United States Patent Application Publication US 2026/0103690 A1 - sequence listing, part 34

SEQ ID NO: 157316 - protein, 457 aa, unidentified
MPRPRRRSLQPAAPPLVNPHAAGIDIGATTIYVCVPLERDSAPIRHFGTFTEDLHALATWLEGCGVTSVAMESTGVYWIPLYQILEARGLEVCLVNARHVKHVPGRKTDVQDCQWLQYLHSVGLLRASFRPPEAVCAVRSLLRHRDTLVQLAATHTQHMQKALNQMNLQLHHVLSDLTGVTGLAILDAILAGERDPQVLATHRDPRVKAAPETLAKALVGDYRVEHLFTLRQALESYRHYQRLLGECDAQIAALLAGFASEVDPGAPPLPPARAKTQRHAPRFDLRGELYRILGVDLTAVPGLATLPLTLFAELGRDLRKFPSGKDFASWLGLCPDNRISGGKVLSVKTRQVIHRVANALRMAAQSLQRSRSALGAYYRRMRARLGAPKAITATAHKLARILYHLLTTRQPYEETRVATAEAQYHRRSESRLRAHARALGFQLVPLTAEATSMPPTV

SEQ ID NO: 157317 - protein, 341 aa, unidentified
MEITINYRFILGIDIAKQTLELHLLDRKTGHGYARQISNAPDGFGALGHWLASHGAGKSETVLCSEHCGRYGEHLLRWTTANGWPHAVLKTTALQKVGDEHHRKSDPWDAQGLAEYGQRFADRLRLAEAPKPNVKQLRRLRAERRRMVDQRASLKQKRTESGCHDADMSRLLAMWNQQITLLSEHIQQIETQIEALISEDPARRQKTMRTAPGIGPVVGSHWLSLFAGQQTLDPKQICSRFGWAPHPHSSGSSLRSPNRSSGFGNNDMRKIMHQAALSVAQNYEHYRNYYQRKEAEGKHHLVIINNIINKLIGLYCGMWNNRREYDPNYIQKMKKQWKKSA

SEQ ID NO: 157318 - protein, 425 aa, unidentified
MNYKQNEKINQVKESTLVVGIDIGSTTQYARAFDWRGIELGKVFTFSNSREGFEAFKAWMQRLQDKYRKSDVIVGIEPTGHYWFDLGAYLEDEGILLVMVNPYAVKQTKELDDNSQSKNDRKDPKVIAKLVTEGRYSAPYTPDGVYADLRIMVTNRKRLIREMTQIKNRFARWFAIYFPEYTDVFGDYEAQSSMLLLKKVCTPEAIVELGAEKINQIWRDAKLRAVGMKRATTLCETAKRSIGLKKGSSAAQYEMKLLLEDYEYKKAQLDAVIEEIEKLCRKIPESEQMLAIKGIGVITVAGFLAEVGDVRRFESPRQIQKLAGLSLRENSSGKHKGQTTISKRGRSKLRAVLFNAAIPLIAKNPEFKSLHEYYTTRANNPLKKKQSVIAISCKLIRVFYAILAKGVTYDAQKLISDIHRQPQVA

SEQ ID NO: 157319 - protein, 320 aa, unidentified
MASRESLFIGIDVSKQTLDVAFGADPHAPRETIPYTNEGVQLLVTRLQRLQPTLIVLEATGGLERMVFAQLLQAGVPTARVQPRRVRALAHAEGRQAKTDRLDARLLARFAERVRPPHHQATDEQRASLRDLLVRREQVIQMRTAEINRLTAAAPNLRPGIQQHIDWLDQEIRALEQERDNEAERTDEVRRKRELRDSVPGIGAITALNLLLRLPELGTINRKEAAAFVGVAPYANQSGAQHKPRHISGGRRDVRSVLYMATLAATRRRLVRRAFDQRLCQAGKPRKVAIVAAMRKLLTILGAILRQQKPWDPAVHTSAP

SEQ ID NO: 157320 - protein, 350 aa, unidentified
MTTMPLRVTGGVDTHLDVHVAAALDHRGALLGVESFATTPAGYRGLLGWLRGFGALELVGVEGTGSYGAGLTRHLQTEGVCVVEVDRPNRQRRRRRGKSDPQDAGSAARAAQSGDARGEAKSRDGNVEAMRVLRLARSSARKARTQALNQMRSIIATGPEPIRAELRNLNVYRLLAHAGAYRPGQRCDVLSLTKRTLRMLARRAQALEAEVTELDAILKLLVAQTAPALAARPGIGTDCASILLVAAGDNPQRLRNEATFAHLCGASPIDASSGKHQRHRLNRSGDRQANSALWHIVITRMVYDPRTRNYIDRRTKEGLTKKEAFRCLKRYIAREVYNHLPRHHLALDSP

SEQ ID NO: 157321 - protein, 343 aa, unidentified
MHSTTIAVDLAKSVFEVAVSQRPGKVTERHRLSRGQFSRFLAEQAPATVVMEACGTAHFWGREAGARGHRVVLLPPHAVRPYVLRNKTDGADAKGLLEALRNDDIRPVPVKSVDQHVLAGLHRLRSAWMATRTARLNTLRGLLRELGFSIPVGARQVVPYVGALVSDADSGLPEALRPVLAEATREIRELEARVREVERSLEAVSRESDLLVRLRTIPGVGLLTATALVAFVGDVQRFPSGRHFASYLGLTPRESSSGLRRRLGAISKRGDPYLRMLLIHGARSVLCHAKKATGERDRLREWAIERERARGHNKAAVALANKLARIVWAVWRNERAFAIRPQD

SEQ ID NO: 157322 - protein, 349 aa, unidentified
MVIIGADTHKRSHTVVAVDANGRPLAERTVAATPAGHLELRRWAERFAERSWALEDCRNLSRRLEADLLRAGQRVVRVPPKLMAGARVGGREPGKSDPIDALAVARAALREPDLPTAQLDGPEREVRILVDHREDLVAERTRIQNRLRWHLHELLPGSEPAPRSLDRTAVLDGLQRRLAVESGTIARLAVELLGRVRELTIAINRLEREIAALVRPLAASLLELVGCGALTAAKLVGETAGASRFRSRAAFARHNGTAPVPVWSGNVTRHRLSRGGNRQLNAGIHRIAVTQLQRPGPGRDYVEHRRAAGDTNTEAIRALRRRISDEVFRRLRHDEQHWNHQSAGLRAAA

SEQ ID NO: 157323 - protein, 404 aa, unidentified
MVYLGIDWAEAHHDVCLMDEGGTRLAGTRVPDGLEGLRRIHELVAGHTDSAENVVVGIETDRGLLVRGLVAAGYQVYAVNPFAVSRYRDRHATSGAKSDPGDAKVLADLVRTDRHNHRPVAGDSELAEAVKVLARAHQTLVWSRQRHVNQLRSSLREFYPAALTALGTDLASRDALAVLGRAPTPAEGRRLSLSQIQAALRQGGRERNLATRSTDIQQALRAAQLEPPPRLAKAYGSSVRATVRVVAQLNAEISELEAALAQAFDEHPDAEILRSLPGLGVVLGARVLGEFGDDRTRYQHARARRCYAGTAPITRASGTRLVVLARMARNRRLADALYLWAFSALTCSPGARRFYDAHRARGNTHHQALRALGNRLVGILHGCLEHRMAYSEAIAWPLSAVIAA

SEQ ID NO: 157324 - protein, 331 aa, unidentified
MAKNFFQVHAIEREGGSPLTCKLTRKKFREFFSKVAPCRVGMEACGSSHYWGRELRAMGHDVVLMAPAYTRPYVKRGKNDATDAAAICEAMSRPDMRFVAIKSADQQAVLMLHKTRDLLVKQRTMGVNALRGHLQEFGLIAAKGIHRVAELIALARADAGLPEEAKQGVEILARHGEQLDAKIDTLEKKIARAGAKNPTSRLLNEVPAIGPLIASAMAACVPDPGVFKSGSDFSASLGLTPSQHSSGGKEKLGGITKKGNRYLRKTLVAGCTSVLRVAHKYKGALAEWIVAMKARKPERVVAVALANKLARICWAIMSTGESFREDIYTRA

SEQ ID NO: 157325 - protein, 330 aa, unidentified
MYFTGLDVHKAFTFGVIKDKEGVVLNKAKFDNSEENFEIFFKGFPPEETKVVMESTGVWEYIYEILDGKGFAIKLANPVRTKAIASARIKTDAIDASTLADLLRADMIAESYVPTKEVRRLRDVVRQRKTIVDGRTQVKNKIHAILIRQGVKLPYKSLGPKAINWLHDNIDINDILVSYFNLLEQYNNELKFIKERIEARAEKDEQAKLLMTIPGIGPIRAMEIIAEIADIKRFPNSSKLCSYAGLVPSIKQSGNSLRHGTLIKQANKSLKNALIESSWAAVKTKEAHTLKLHYLRLKDKKCKQKAICATARKMLCVIHAMLTKKQEFTA

SEQ ID NO: 157326 - protein, 323 aa, unidentified
MATNKNVEFEPIATRCCGLDVHKVEIVATVEGEGIKRETRTFKSTTRSLTELKEWLLSLGVTHVAMESTGVYWKPVFNILECEGLTILVVNARHIKYVPGHKTDKKDSAWICKLLRAGLLKGSFVPPKEQRELRDLTRYRRKLVQNVAAEHNRMIRVFEDANLKLSSVFSDVTGKTCTEVIDNVLAGNTDPEFLASLCTHWKLKSSQEEIALAVEGNFTEHHKFMLRAIRQSITNLESQIKVIDEEINRYMQPVEEEVSLLCEIPGIKRTSAIDILAEIGVDMEVFPTDAHIASWAGLSPGNNESAGKKKTRTRTTAIKRRKR

SEQ ID NO: 157327 - protein, 368 aa, unidentified
MDSSCDSVGIDVPESLLFRAKEEPIMSNDTRIGVDVAKAVFEIAISDRPGHIVRRERAQRAQFLPFMAQQPRATVVMEACGSAHHWGRKLQDLGHRVVLLPPHHVRPYICRNKTDRTDAKGILEASRNEDIRPVPVKTVDQHVLTSLHRLRSGWMTERTARLNALRGLLRELGIFIPMGAREVVPMVWSLIEDADSDLPEALRPIFAEACREIREIEARVKQVERQLEATAEQLPAVGYLRTIPGIGLLIATALVAFIGDIRRFPSGRHFASYLGLTPREYSSGLKRNLGRISKRGDGYLRTLLIHGARSVLLHARQQQPDRLREWANNLGKTHVHNKAAVAVANKLARIVWAVWSRQQPFVLIAKAA

SEQ ID NO: 157328 - protein, 394 aa, unidentified
MFLVGIDIGKLSHMFCILDASNNEVIVKPVSFKNDKLGFDFLMNQLKSYPKDHLLIGMEDTGHYHFTLLKFLLDSGFSVALINPVTTDLTRKIQLSSTKDDDLDTLTICDVLASNQRRKGYRISKIDSFDLYEQKRLTREHHDLKEQLNVYINKLQKCIDIVFPEFNSLFRSKYGSVYMNVLKTFGSADSIAHADIRNIRKCFEANRKGRRISLTPEELKEAARNSIGFPSKAEVIELRHLIDIIELINVQISEVDKKIEEFSVQNNSPILTIPGISHFSGTSILAELGDLRNYSKASQVIKFAGVSPSKYKSSQYEAQHTAITKKGSRYLRKTLYQVILPVIRYNPVFNAFYRHKLSQGKGHRCAQGHCVRKLLRIIYHLVTTDQSFDPKLLR

SEQ ID NO: 157329 - protein, 403 aa, unidentified
MNSVGIDISKGRSTIAVMRPFGEVVISPFEVRHTDSELSELARQLKSLNGETRVVMEATGNYHAPVAKLLHDAGLYVSVINAKLVHGYGNNDLRRIKTDRKDAVKLANYGLDRWLTLPRYVPEEDTRLLLKNCYRQYRQYSKVQTVLKNNLISLLDTVFPNVNRLFSSPARADGSEKWVDFVAEFWHCGCICERSEKAFVSKYQKWCKKHGYNFGEEKACAIYAEASGYIGVMPKSETTKLLVEQAVAQLRATSTALAALKQEMQTLASMLPEYPVVMDLFGVGPTLGPQLIAEIGDVRRFYSKKALVAYAGLDAPPNDSGDVTGRHKSMNKIGASSLRRTLFLVMSVYLQNAPLDEPVYQFMDRKRAEGKPYRVYMMASANKFLRIYYATVKAYLESLEPTA

SEQ ID NO: 157330 - protein, 433 aa, unidentified
MMTRLPTQEFVAFVGIDWADTSHAVCLQVAGSDIRESSVLAHTPEAIGAWACMLRHRFGGRPIAVCLELTKGPLVSALSAHDFLVLFPVNAHTVAKYRQAFTPSRAKDDPSDAELQLELLLKHRDKLQALTPQSVTMRALAQLVEDRRRLVGDKVRLTNRLTSALKNYFPQVLSWFSDKDTTIFCDFLTQWPTLKAVHLARRATLERFFRQHHVQIRIIAQRIHMIKAAVPLTMDEGVITPQLRAALQAIEEFDRAIAQLAPTHPDFALFHALPGAGPVFAPRLLVAFGEQRERYTSATELQQYAGIAPVTERSGNMCWVHWRLQCPKFLRQTFVEWASESTRHSFWARAYYAQQRAKGSTHQAATRALAFKWIRILYRCWQTSTPYNESLYLNALVRRGSPLIRYLANRGYLDLNLPGLLRLEIRGFTTRTP

SEQ ID NO: 157331 - protein, 336 aa, unidentified
MEEVQSVVGIDVSKKSMDIALLRNGKVKSKSLGNTPAGHKELLEWLIASKADMATIHVCMEATGVYYEALALAMHDAGLKVSVVNPSCVKGFGRSENIRNKNDTIDAALIARYCAAMKPESWVPAPLEQRQLRAWSLRVQSLKDIRQQEENRREAHIVSGMFDVATHVAEHVKWIDDQIKKLENEIDDHIDRHPGLKRDSELLSSIPGIGKTTVARILGHLGDVRRFKSAKALAAFLGVTPKHNTSGTSVKGRSVICRTGSTSLRAALFMPSMVACRYNPIVKQFAERLLATGHPKKAVICAIMHKLTHLIYGVIRHGKLFDANYLSKPLAIQDGI

SEQ ID NO: 157332 - protein, 350 aa, unidentified
MKKIVKQVVGIDVAQKELVVCLARMFDDWNPELYAHKTFKNTSKGHLALVLWVKKFTEQIAEVRYVMEATGVYHERLAYFLDDKGHLVSIVLPNKISNYSRTLDTKTVTDKTASEAIALFGVERKLDNWERPKPVYKKLRQLTRERDQVIKERTIVKNQLHAENAEAEPNRSSLKRLKQRIQLLNKQESEIKTEVSVLAREEKETNKAVRLISTIPGVGELTAATILAETNGFELIRNKRQLTGYAGLDVREKQSGTSVNGKPRISKRGNKYLRKALHMPALAAIRYNERHKGLYTRLVSKHGIKMKGAVAIQRKLLELSYILVKNNQPYDPNYERRIEETKLKKVVGQS

SEQ ID NO: 157333 - protein, 408 aa, unidentified
METIHPICCGLDVHQASVSACLRRVNADGAVSVEAREFSTTVKGLTALADWLVEEGCPIAAMESTGVYWKPVWHILSPLLDVWVLNARDVKQRRGKKRDRADAKWIAELVAHVLVQPSFVPPARIGALRDLVRMRTTLVHMRTQVKNRVLAILEDTNIKLASVASDPFGASGRKILDALVKGERDAKVLSELAMGVLRRKIPQLEEALQGSFTEHHAFLIRLGLESVDQSNRQIRELDSQIGSLMEPMREEVSRLTSIPGVSETAARVILSEIGTDMTRFGSTGRLASWAGLCPGNNESAGKRLSGKTCKGNRYLRRITVECAWATRNTDTFLGQTFCRLQARIGGKKAAVAVAHKILVIAFHLLNEGELYDDGRYDLHKQRERVRRTDRALKTLERLGYRVQVTLAS

SEQ ID NO: 157334 - protein, 357 aa, unidentified
MTSIPHSGPQRIVVGVDTHQYARVVVALDQLGARLGEITIAVDRAGYEQLQRWAAQHGETIRFGVEGCGSYGAGLASFLRRRGYPVVEVNRPDRRIRHLHGQNDPLDAESAARAVLAGTATAVPKSADGAVEMIRQVKIAKDTAVTARSQAIITLKTIVVTAPADLREHLDPLGDTQLIEVCRQLSYDSMTGPADAARYTLRALAERYHELDREARLHDRVLQTLTQRAVPELTSSFGIGADSAAELLLVVGDNPARLRSDGALAKLAGACPIPASSGKTTRHRLNRGGHRQANAALHRILIARMRFHQPTIDYVTRRTTEGKTKREIMRCLKRLLVREVYQILVASHKTKDEHLAA

SEQ ID NO: 157335 - protein, 370 aa, unidentified
MSEITRALIARVGVDLAKHVIQVHAVDAAGRRVVARSLKRDQFIAWCAQLPAGCMVAMEACSSAHHWARKLRALGLDARLIAANFVSPYRMEGKSGKNDMTDAAAICEAASRPSMRFVPIKSCEQQGVMSLHRVREGLKEERSACINRIRGVLAEFGLVFAKSPKALRAVLADVIEDASNELSTMARLVLQRAFDHWRELDEHMRWCDRQVGQHVRFSAAAQRAAKITGIGELGASALTAGVGDFHQFKGGHQFGAWLGLVPSQNSSGGKSSLGRITKRGDDYLRTLMIQGAKSAVMSAPKRDDPTSRWLVQLAARVGWQKACVAMANKNARILWAVMTRDQGFDPRHVSDKPLAKRPAHERIALTCTAA

SEQ ID NO: 157336 - protein, 317 aa, unidentified
MQVPLCFIGVDVSKAELVVATHGQDACLAVSNESTAIVQWLHTLPPGALLAMESTGRFHQLLATLAAGMGLTVFVLNARDVYFYAKGLGARGKTDRVDARIIARYLAEHHERLHPHCVPSACQAELEQLLGQRWTAVTKRTALRQSLRGCSTSIAQAAAGLEDAFGTLLHTIDGRITQLIKEQEQLHRARTLLQSIVGIGPQSSALLVTVLDRVAFCSCDALVAYSGLDPRAHDSGRSRGRRHLSKRGNPALRHQMFMAAMSACHTVTFAATYQALRARGLKSTEALVVLARKLLRIAFAVWRSGKPFDAHRITPSA

SEQ ID NO: 157337 - protein, 387 aa, unidentified
MARKRILSTLDTSITYDALGLDIAKEDVALAAFGDDHDEPYFVDKLTFDGLYALLADMAPTLVAMEPCSGAHQIAEHIEALGHQVMMISGKHVQAWVKDHCNGQKTDLNDAFAILNLAYDRWLTPIRGKTREECRLLALQASYRQLQGQRTKTLVHVKATLHAWGYPIRTGSFNQKALHELIEANRDLFGDEVAETLHLMINRVRDLDHDIAKVLKLLTEATKRGPRASLLRSIPGFGVLTTSRWCAVMGDIARFESPKQAMAFIGLVPNNRITGHHTETSSGREARGQGKMSKRGDKMLRSLCILGAASLCLMVRNNRLPDCPFVAGIKERLASPRPWFKVLVYVAAKLVRIATALLKYGETFSFEKAGISKAVLKQWELEQAKAA

SEQ ID NO: 157338 - protein, 331 aa, unidentified
MEELRRFVGIDVAKAALDVFIGSAGEAFSVANDEVGIRELLRRMKPADFVILEATGGLEMPVASALATAGSAVAIVNPRQVRDFARATGRLAKTDRLDAEVLAGFGETVRPTARPLADEQTQALEALVTRRRQLVEMLTAEKNRRARAPKILHRSIDEHIRWLEKRLAGFDDELGELIRDTPLWRERDELLRSVPGVGKVLSITLLAQLPELGMLNRKQITALAGLAPFNRDSGNMRGSRCIWGGRAQVRRVLYMATVAGVRSNPTIRTFYRRLRTNGKHAKPALIACMRKLLVILNAMLHNKTPWQTPACTLPTAPLSPLVGEVSEHGCC

SEQ ID NO: 157339 - protein, 359 aa, unidentified
MMTDNNGETQRVIGGVDTHKDVHVAAVLDELGRLLDTASFATTTIGYRRLHRWLCDHGEVLAVGVEGTGSWGAGLARFLRARAVNVVEVNRPNRQTRRRKGKSDTIDAEMAARAVRAGDATAVPKAGDGPVEALRQLRLARTGAMKARTAAANQLHSLTDTAPDELRARLRSLSTLQRARLCARLRPGDVLTPAGAAKRALRAVAHRWLALRDEITELTGDIRHVLDTIAAPMLERHGVGYETTGALLCAAGDNPERLHTEGSYAALCGSTPVRVSSGKTNRHRLNRAGDRQANSALWTIVMVRIRSRHAPTIAYLERRTADGLSKREAIRCLKRYVAREIYNDIRTIIATNTPQQMAA

SEQ ID NO: 157340 - protein, 393 aa, unidentified
MRFIGIDIGAEKHFVSIVDEAGRPLRKPTSFGEDAVGYAALMRLVGEPSDALVAMEATGHYWQNLFAFLHAAGFAVALLNPTRTSKFAEEDLRRAKTDALDALGIARFAQQKRPAPTQLPDAATLELRELMRLRDRLVQDLGDRTRQLHRAIDLTFPEFPQHVKDLASFKSTALLKACPTGQAFRAADPAMLAQLKYDGRCAIGTELAEALCKAAKTSVGSQDGAPYELQVRYACEDIATLRARIKKLDDDIGQSLNRHEVGKLLTTIEGVGDNTAARMIASVDFAAFRSASQLAAYVGVAPVVNHSGKRRPGRGPTGFMSDADLRAKLWMPTLRAVTKNAWLKAFYDRLVSAGKPKKLAIVAAMRKLLGAMMSVAKNRKAFVPNLTDVGSAN

SEQ ID NO: 157341 - protein, 375 aa, unidentified
MKKNSNLVGRRVKAKQKGKSKQSEAITIGLDLGDKMSHYCVLAGEGEKVYEGKVAMTKQALAEVFGALSRGRIALEVGTHSPWVSRLLASLGHEVIVANARQVKLITQSSRKNDKLDAQTLARLARVDPQLLRPIQHRSEETQQDLMVIRVRATLVEARTALINHARGLAKAVGERLPKCDADNLEAERLSGLPAGLRGVLQPVLEEVESLTEKIQRCDQEIEQIAREKYPETELLRQVSGVGILIALTFVLTVENAERFRKSRDVGCYVGLRPKRSDSGESQPQLGISKEGDVYLRKLLVQGAHGILGRRGPDTDLKRWGLKLAARGGKNAKKRALVAVARKLAILLHRLWVTGEVYEPLRNSQALAAAKRKVA

SEQ ID NO: 157342 - protein, 415 aa, unidentified
MKYAPVSRPGPHPGGVTAGIDWASADHAVCVVDGAGEVVSRFSVEHSAEGLRALVSRLARAGVREAAIERGDGPVVDALLAAGVTVVVITPRQIKNLRSRYGSAGNKDDRFDAYVLADVLRTDRARLRPLIPNSPATVTLRQACRARQDLVRHRVAVTNQLRAHLLCVFPGAVGLFCRLDSAISLAFLARFGCQDRAGWLSEKRLAAWLKGAGYSGRISPAVLYERLRSAPGGATGEQGAASAQVTRALAAVLASLNTQIKALEAQIAGQLAAHADGHIFTSLPRSGTVRAARLLAEIGDCRARFPDPQALICLAGAAPSTRQSGKHKAVTFRWAVSKQLRDAVCDFADGSRHASPWAAKTCNDAITRGKDHPHAVRILARAWLYVIWDCWQHHAAYDPAQHRALQRLLATGQAA

SEQ ID NO: 157343 - protein, 361 aa, unidentified
MNTLTLKTIGVDLHKTSLTATVLDPSGRVIERKDLPTKCRKQVAAYFAAHGPDVQVAVESVGFYHWFWDTVKPAVRTLHLADPAGVRACAGRRTKTDRNDSLLLAELLREDRLPRAFVPDEPVRALRELCRHRHRLARQLALARRHLRWIGLKNNLPGPATLSSDRAQKWLRSQDATLNAVHRLSGRQFVDQITSLERQLADVESVLKDSVAAHAALAPTLALMQSVPGIGFLTAVTILCECGDITRFDSIDELSSYAGLCPRVTQSGESAHHGHISKQGPPLLRWVLQQAAWVAIRCDPQARRISSRIAKRAGNKKAATALARKLLSYAWSVCRQGRPFVWPNPEVQPGRVPVPVWSFDI

SEQ ID NO: 157344 - protein, 361 aa, unidentified
MIVIGVDTHKRSHALAAVDEGTGRVRGKREIAASEAGHLAAVRWARELDDERAWAIENCRHVSGRLEQALIAAGERVVRVAPARMGASRKGEREAGKSDEIDSLAIARAVVKDGIEAFPVAYLDEQALRVRLLSDHRRNLVAERTRMQNRLRWHLLELSPELERQIKPRSLSEPRALERLDRQLRRLPTCERLRVARDELSLIRTLTRNVNALESELLELIRAQRPWLLEELGCGALTAAVLIGHTAGAERFHSAAAFAKQCGSSPIPCSSGQRQAMRLNRGGDRQLNSALHTIALTRASHDPKTKAYLARKQAEGKTPKGALRCLKRNLARRFWRLLTRPPLTQPATERITAPLPMTCIT

SEQ ID NO: 157345 - protein, 344 aa, unidentified
MEVAIGVDPSKSSLAVAAVDPLGRVVGTAEFSNDPRGHRALLGWVGERGPDRVIGIECSLSYGATLSRVLLRSGEDVREVPTTLTHRQRRRRASQGKSDMVDSVAIARIVASGEVLPSAHRLEVLADLRALVEYRDQLVRARTQVANRTHADLVNILPGYERQVPNLRAKAHRTTARSLLRGDRSVRGELVRKRQGELSRLQGEIAAMDRRIRATVQKTGTSLTSIPGVGPFIAAKILGEVGDPSRIRSKPAFAVLSGTAPLSASSGQVQRHRLNRGGNRQLNWALHYIALVQCRITPEAQAYMARQREAGKSHKEAMRCLKRQLSNVVYRHLVADARRAELAA

SEQ ID NO: 157346 - protein, 416 aa, unidentified
MRIAIGLDVSSKTTNVSVVVNDGEVTREAEACKVSNDLVGFGPVLKLIHKYSINDKLPEVVFEATGVYSRRLQHFLRVHAVAYTQLNPLKAKQELTAIGGLHRRKTDQMDALGLAQSQLILQRAKSYVQDPVYIYLRDAERFYQQINSDVVTAKNRLHRALQLTFPELENVLYSTDGELYWRLVQTFPHPDLLLKSHQSFDQLVETVRHLTKRTMSETRGQRIAQKLSDSASVAAPAVSAAPTEIEPVTYQAGELIRLSDQKHHLINEMLDLAKELPELDIFKSLPGAADTSAVTLLAEFGDLRRFQTTNQINSYIGIDLRHYESGNYEAADHISKRGNPYARKILFRMIGTMDAVAKLPNHPNHIIDYYEKKKQSSQSKGTKKIAIAAVSRLIRTIYYLVTHNQTYDYQKATLGR

SEQ ID NO: 157347 - protein, 412 aa, unidentified
MEILYQSCCGLDVHKKMIVACLRWADEAGKVGKQVRTFGTTTSELLSLTDWLVEAGCTHMAMEATGVYWKPVYNILEGQMELLVVNAQHIKAVPGRKTDVKDAEWIAQLLQHGLLRASFIPPQSQRDLRDLTRYRTTLVRERARIVNRLQKALEDANLKLAGVATDVMGVSGRAMLEALLAGQTDTEQLAELAKGRLRKKIPQLKEALTGRVREHHRFMLSEQLSHIDYLDEAIERLVAEIGERLRPFEEEIRLLDTIPGINRQTAEELIAEIGADMSRFPDGHHLASWAGMCPGHNESGGKRKSGKTRKGNRWLRSTLVEAAHGAAHTKDTYLASQYHRLVGRRGKKRALVAVGHSLLIISHYVLKRRQAYYDLGSNYFEELHRQRMERNLVKRLENLGYKVTLEGLTPAA

SEQ ID NO: 157348 - protein, 352 aa, unidentified
MDRFIGLDAHSQTCTVAVMGPSGKHILEKVVETNAKMLTELVRSVGGQRHLCTEEGTHAEWLYEILERHVERIVVVQPPKSTGRKSDSIDAWALADMIRKNDIEKAVFKAPGMYTALREAVRGHQVVVRDMVRAKSRVKAIYRSRGLQGMGQAVYEPEKRDQWLCKLPPHRRQLAELLSDELDGLIKMHEKAEKWLLEQATRCPEVKRLATAPGIGPIRAAQIVAIVITPSRFRTKQQFWSYSGLGIVMRSSSDWVRGRDGEWTRKEAAQTRGLNPNRQPLLKAIFKGAAMTVIQHMPKHPLHADYQRMIEAGTKPNLAAVTLARRIASAVLAMWRTKEVYDPAKHRRPDAA

SEQ ID NO: 157349 - protein, 345 aa, unidentified
MKILALDLGNYKSVACIYETSSLSHRFTKVVTTPKGLHDLLVEVEPDRVVIEICPLAGWVSDLVRALGIELEVASTTHDAWRWKNVKRKNDRQDGLKLAQLSALGQLTLVHVPEQGVRQWRALINYRQRLVSRRTKIQNHIRALLLRQAVAMGAGHRGWTRAGIGQLEALARPLNEVEREELWRGELGLELEGLKAVAEPLQQVEAKLDELGVADKRVQLLRSIPGVGPRGAEALAAVIDKAQRFKRGKELGAYLGLVPKQIQSGESNRLGRITRQGNRLLRSLLVEISWSGLRYNSWMRSVYEQVRRGSKARKKIAIVAVARRLLIRCWAMLRDGTTWRPASST

SEQ ID NO: 157350 - protein, 340 aa, unidentified
MEKRYIGIDLHRNRFTCCIRLENERTYVTEWALENLARFVKKLRATDEVAVEITSNTRLFYEAVAPHVARVVVVDTNQFRVISQSVKKTDPNDARLLSLYLSKGLLPEVRMKDKERAQLASLTQTRDTLVKQRSALKNKVNNILSARGLNLVKEALSSEKKLTEVLELPFDEVVRIELRVIVEQIRSLNKSIAELEKTIGEEGSKLEGHKGLSSIKGIGKITGAILLSVIGDVNDFADEGRLASYFGIVPRVSNSNETERSGRIHKRGTKLGRTALVQSALIAANYSPYLKRFYEQVKARRGAGKAIIALARKFLGIIYRTLKNKWVFEDFPNFVLAEAS

SEQ ID NO: 157351 - protein, 340 aa, unidentified
METKRHIGIDLHRNCFTVCVRLENGRNYLSEWKMEDLPQFTKKLRGGDEIAVEMTGNTRFFHEAVARHVARVVTVDPNQFKVISQSVKKTDPNDARNLALYLAKDLLPEERMKEKTEAQVASLTQTRDTLVKLRTALKNKVNNILAAHGINLAKEALSSEKALGAVLEMRFDEMVELELQVIVEQIRGLKRSIEKLEQTIKDRGQKLKGHRNLTSIKGIGNLGAGILLSVIGDIDDFADEGKLAAYFGIVPRVQNSNETERSGRITKRGTKLGRTTLVQCALIAKRYSPYLARYYDRIKSRRGGGKAIIALARKFLGVIYRTLKNNWVFEDFPNFVLAEA

SEQ ID NO: 157352 - protein, 345 aa, unidentified
MEVTTIGIDIAKRIFQIHGVDKNGKTILMREQVLTFMANLPKCLVGMEACGGASYWARELTKLGHTVKLIAPQFVKPYVKTNKNDQADSEAICEAVARPNMRFVPIKTVEQQDILFIHRVRQRLVKNRTALANELRGLLHEFGFVIPQGINKIMTKLTEILDEEGLSQLSYRTFSELKEEFLENDKKIKELEQRLKIIASQYSNHQQLMTIPGIGLITATALIASIGNASCFENGRQLSAWLGLVPRQHSSGGKDKLLGISKRGDIYLRTLLIQGARAVLNSKIRFTTEEQKSKKDYSKFTEWMFNLSERNGHNKTTVAVANKLARVVFAVLSSGNDYTESKVCS

SEQ ID NO: 157353 - protein, 358 aa, unidentified
MPPITPQDGTPGEVAGGVDTHLDTHTAAVIDPVGRVLGTEQFPATAAGYAALLEWMRRFGRLVRVGVEGTGVYGAGLARLLRDRDVEVIEVDRPDRKARRFQGKSDPIDAIAAAKSALAGERTGVPKQRDGRIEALRNLRVARRSAIDQRADAQRQIKALIVTAPDILRERLRGLPVRELITTCANLRPDRADAAAVATAAKIALRSLARRHQRLSDEIGDLDELLEPLVAMINPDLVAAHGVGTDVAGQLLVTAGHNHARLRSEAAFAMLCGAAPIPASSGRTTRHRLNRGGDRHANAALYRVVLCRLRWDPRTRAYMQRRTKEGMSKKEIIRCLKRYIARELYQIITAPSDLEPAA

SEQ ID NO: 157354 - protein, 349 aa, unidentified
MIIGCDYHPAFQQIAFVNTDTGELQEGRLQHREEAEKFYRDLAAQGMKVRVGMEASGHGRWFERLLAELNFELWIGDAAEIRAKRVRKQKTDRQDAQLILQLLLEDRFPQIWVASWENRDLRQLLWHRHRMVQARTRIMNQLQGVALNEGLRCKKRLWRAWGREQLEAFRLAPWASRRRHDLLELLDRLTPTIAELTQAIEQEVEKCPAAQRLRTHPGVGPLTALAFVLIIGKADRFQCGKQIASYLGLVPLEKSSGNQRRLGHITKQGSSLLRFLLVEAAQVTARSLPEWRSKYYHLTMRRGRKIAKVAMARKLAVRLYWMMRKQWDYGQLTKFGSHAGKLGTGDGVQ

SEQ ID NO: 157355 - protein, 409 aa, unidentified
MEVVHERCCGLDVHKDSVVACVVVPGTGKQPHKEIRTFNTMTADLLELADWLTTQGVTHVALESTGVYWKAPWNILESSFTLLLVNAQHIKQVPGRKTDVRDCEWIADLLRHGLLRASFVPDLPQRELRELTRYRTTLIRERAAERNRIQKTLEGAGIKLGSVASDILGRSGRLMIEALVDGSTDAATMADLAKGNLRAKLPQLQRALTGRVRAHQRFLIAHQLAHLDGLDELIEQLSQEIAERLRPFQDKIERLDAISGVGQRTVEVFLAEIGTDVARFPSAAHLASWVGICPGNNESAGKRKSGKTGKGDVWLRTALTEAAQAASHTKDTYLASQYQHIAARRGKKKAIVAVAHSILRIVWHLLDHDCEYVDLGSRFLEERDRQQIERRLVRRLEGFGYTVKLEPAA

SEQ ID NO: 157356 - protein, 387 aa, unidentified
MPQPNDLSRSLVTLEQDSTLIAVIEMGQSSWLVAGIVPGIERQPLKKLAADQDGLLQLLHRWRKEAAQAGHPIKRIAVAYEAGRDGFWLARWLRAREIEAYVIHPSSVPVSREHRRAKTDRLDTELLKRAFLGWLRGEPKHCSMAAIPTVEDEDARRPSRERESLVGECTRIVNRVKANLARLGIRGFRPRLAHAPKRLETLRTPEGTAVPANTLAELQRDMVHLRFVKQQIKEIETARAKRLEQASGGGRDAMVRLLARVVGIGIETADMLVQEVFSRKLRDRKAVARYAGLTGAPDESGQKRRERGLAKAGNARVRHAMIELAWGHLLHQKDSALAEWYQKRTVDARGGTRKTMIVALARKLLIALWRLVTTGEAPAGLLLRPAA

SEQ ID NO: 157357 - protein, 367 aa, unidentified
MDETITYVGLDVHKETIAVALADGGGRGDARAFGQIVNTPTALTRMLAKLSQPGRTLKFCYEAGPCGYGIQRQLSAAGHDCVVVAPSLIPHKPGDRIKTDRRDANNLARLHRAGELSAVWIPDTAHEAMRDLVRARLAAVRSLRQARQQLSGFLLRHGFHYSRPAWTQMHRRWLAGLCFEQPIHQIVLQDHIATIEAATERRDRLTKQIETMLSDWSLAPVVVALQSLRGMALVTAATMIAELGDLSRFTNPRQLMAYLGLVPSEHSSGGTRRQGGITKAGNTTARRMLIEAAWSYRFPAKISRDQLIRQEQLPKAIRDTAWKAQERLCGRYRKLTKAGKPATTVTTAIARELSGFVWAIACQVSPR

SEQ ID NO: 157358 - protein, 356 aa, unidentified
MTTIAHDSVEVTGGVDTHKDTHTVVAVDMTGRVLGTAQFPANSAGYARLLSWLRSFGTLVLVGVEGTGVYGSGLVRYLTAERTAIVEVDRPNRATRRRRGKSDPIDAEAAAQAALSARGTSIPKDRDGRVEALRNLRVARRSAITQRADTQRRMKALIVTAPDTLRQRLRALSDRQLIHTCATTRPDRTRAADPTIATTLALRHLARRHQQLTTDITELDDLIAPLVHAINPHLCHLSGVGPDVAGQLLVTAGDNTHRLHSEAAFAMLCGAAPLPASSGNTHRHRLNRGGDRQANAALHRIALCRLRWDHHTRNYAQQRTHQGKTKKEIIRCLKRYIAREIYNTLNQTTPHTPRHP

SEQ ID NO: 157359 - protein, 347 aa, unidentified
MEYVSTIGLDLAKHVFQVHGADIAGSPLFNRKLRRGEVLRFFEKLPSCLVGMEACGGAHYWAREIANLGHDVRLIPPAYVKPFVKRGKTDAADAEAISEAVIRKTMRFVPIKTAEQQADAMVLKTRALLVQQRTQSVNALRAHLAELGIIAAGGLPSVAALMTIVREGEDTRLPAAARFALMAVADQIDTLADQIFKLERAIVTEAKRDEDMRRLTTIPGVGAITAATIKALVPDPGGFKSARHFAAWVGLTPRPHSSGGKERLGGISKMGNPELRVLLVLGATAVLRIARNDDRARPWLKALLARRPFKVAAVALANKMARIIWALLNKGGIYHRPEPLSIAAVAR

SEQ ID NO: 157360 - protein, 351 aa, unidentified
MVVLGADVHKRTHTFVAVDERGRTAGEKVVPATTEGHLAALAWAKTTFGEDLLWGIEDCRNLSARLERDLLSAGQKVVRVAPKLMAHERAAARTTGKSDPIDALAVARAVLRHPDLPVAAHDEVSRELKLLVDRREDLVGQRTATINRLLGRIHELDPAQAPKKGSLDRAKTQTTLAAWLATQEGLVAELATDELGDIIRLSLAIQALDTRISDAVQAVAPQLLALPGCGELTAAKLVGETAGIARFKSEAAFACHSGTAPIPVWSGNTAGRVRLSRAGNRQLNAALHRIALTQTRLTNSPGHAYYRKRLAEGDSTKEALRCLKRRLARVVYNHLRNDEQTRHHTPQPAAA

SEQ ID NO: 157361 - protein, 346 aa, unidentified
MDKLIRIGMDTSKSVFQLHGVNEAEQPVLRKKLRRNQVLAFFAGLPPLKIGMEACGAAHYWARELRALGHEVLLMPAQHVKPYVQRSKSDAADADASCEAMNRPRMRFVAAKSADQQAAQMLAKLRAQFIDRRTQLSNSIRGFAAEFGLTAPKGLSRLGDLLADIRADATIPDMAKDMFETLARDYAHISAEVAVLDEKLLALHRHNEVSRRLAAIPAVGPVGATLLAIKVTDAHGFKSGRDFAAWLGLTPKNHSTAGKNRLGVITRAGDEMLRSVLVAGATALIQHMRRGSKRVWPWLQALIARKAPKLAAVALANKLARIAWKLMVSGEQYRPLGATYPAPVLP

SEQ ID NO: 157362 - protein, 413 aa, unidentified
MTEETFAWFVGVDWGSEKHQVCILDQQGTIVGERHFPHGGAGLAELGDWLLSVAGTATAVAVGIEVPHGPVVDSLIDRGFVVHAINPKQLDRLRDRFSVAGAKDDRRDGYVLADSVRTDRRLFRRLHVADPRLVELRAWSRLAEELTEERVRLGNRVHHELWRYYPQMTKLADDIAASWFLELWTIAPTPAKARQLRKATVGRLLKQHRIRRIDAETVIRTLREPAIKVADGVAEAASVHMRSLIARLHVVNRELREAERQLDKICAEIGATEAASGDGLQRQDVMILRSMPGIGRINLAALLAEGSGPLSRRDYPALRTLCGAAPVTRRSGKSQVVIMRYAAHVRLRNTVYHWARVASQHDPTSKSRYAALRQRGHSHGRALRGVADRLLGLACVLLQRQTPFDPQYGHPAT

SEQ ID NO: 157363 - protein, 428 aa, unidentified
MQMWCGIDWAERHHDVAVIDDTGQLVAKTRIGDDAVGFRQLLDLLATHGNRCVEPIPVAIETAKGLLPAALRAAGFELFPINPLAVSRYRDRYSPSRAKSDPGDAFVLANILRTDRPNHRPLPEDSELAQSIRVLARAQQDAVWDRQQIANKLRSLLREYYPSYLGCFEDLTSMGARAALRLAPTPAAAARLRRTSLAAALHRGGRTRGIDAEAARIVSALRAAQLRQPPAVEAAMGHQARAYLRALDTAVGNVEALEAALADAFDQHPDKPILTSFPGLGPVLAARVLGEIGDDRGRFTSARGLKAFAGTAPITRASGLKTSITMRVVRNKRLGHAAYLWALPLLAHSTEARAHYDRRRARGDSYSAAARNLANRHLGMLYHCLQTGQLYDPAKAFPPTQHQAAATSCKPRAGHACQETEAPQPIRA

SEQ ID NO: 157364 - protein, 355 aa, unidentified
MKREYFIGLDTHGTFCEMAVVTGKGNLVRRGRCDTTIEALRKLIAPVPAPRHVVMEEGPLANWLYRNLKPHVTSLTVSDPRRNRLICCEGDKDDAVDALQLAQLLRGGGLLKPVHQTETLSESVFKQLVGQYHRRVRRRVAAGLQITALLKQHGVIARAKQFSRPEDQANLLKLLPANQLLAEMILTSCAEHEQLQAAEEVWYRRLVMWAKKDATVVRFTGVPGISWVRASTLRVYLDTPWRFRSKKALWKYLGIGLERRTSGNGPELLGVPKRTHRLLKSTILGAAQTAATRGENPFAVQYRRWIDNGLSLRLAKRNVARSLSSTLWGMWKQDADYEPEWVGRNGSAAAASESY

SEQ ID NO: 157365 - protein, 482 aa, unidentified
MKSKPQEKNKRATNHPTQHHWHEMNRKQRREMLRKIQSEDLSLEVIHPDAAGIDIGNESHYAAVPPSRDSQPVREFRCTTAELKAMAAWLQQCRIRTVAMQSTGVYWVAVYDILEEAGLEVYLVNARDTKNLPGRKSDVQESQWLMKLHTYGLLRNSFRPPQEIRTMRTYWRQRNDLVQSAGRHILRIQKALTQMNIQLANVLSDVSGVTGQAIIKAILAGERDPHKLAAFRDCRVKASEEQIAQSLEGNWQPDLLFLLKQEQDGYEFCQKQMAECDRQLKQYLQRREDRSHGAPLPEEKRKGRLNKKRANKPQFDLREGLFRMTGTDLTRIDSVDVMTATTVISEAGYDMSKWETENHFVSWLRLCPDNRISGNKVIGKGRLPTNNPLSIALKMAASTLRQSKTYLGAQFRRLRTRLGAPIAIKAMAAKLARLIYRMLRYGMKYVDQGAAFYELQHRHLQIKQLKWKAAKLGFQIVGAPAA

SEQ ID NO: 157366 - protein, 316 aa, unidentified
MKRQMNDTIGIDIGKDTLVIHRLPDKATLEVGNNKAGLTTLLRWLGRDEALRVVFEPTGPYHRLLEKTLAAANIAMIKVNPRQARRFAEAIGRLAKTDRVDAAMLARLGATLDLQALPPKSEMLHDLRELRVARQGRVKDRIALTVRLRHANLALIKHQLRLSIRQVEAHLAEIDAAILEAVRADEALSQRFDILTSIPGIGEIAACAMLIEMPELGQLEARQAAALAGLAPVTQQSGKWKGHAHIQGGRAGLRRSLYMPALVATRYNAPLREKYQKLIAGGKAAKIAITAIMRKLIVLANALLRDKRNWTPNTSC

SEQ ID NO: 157367 - protein, 340 aa, unidentified
MNKVTIIGIDLAKRVFHAHGAAADGSVVFRKRLTRAQVLPFLAGRPRCVVAMEACASAHEWGRAIQELGHDVRLIPPTYVKPYVKRQKNDMADAEAIAEAGSRPTMRFVAVKTEEQQARSMVFRTRDLLVRQRTQSINALRGHLAEHGVVAPQGPAHLKTLAAAMDGAGRSLPQLVRDVGGIYLELEQLNRRIADLEKVLRREAQFGTETRRLQTMPGIGPITAMAVAFAPPMATFKRGRDFAAWLGLVPVQHSTGGKQRLGRTSKMGQRDIRRLLIIGAMAVIQWASRREAEAGSWLHRMMERKPLMLVAVALANKMARSIWAMLTKKEDYRNPGNAAA

SEQ ID NO: 157368 - protein, 389 aa, unidentified
MLPNGDKHSNFSVANSHEGSTLLVKKIYSALTSHSLDTVLIGLEATSVYGDNLVYFLREDATLAPFNRKIHVLNPKQVKKFHDTYNDLPKNDYVDSFVIADCLRFGRINKEVYMGDYRYKALQNLTRARFFAVQNLVKEKQRFMNVLFKKYSTMTQEKVFSDAFSTTALAVYDEFESAEALANMDLHELTDFIIEKGKNRFPDPDAVAKAIQKAARSSYRLPKTVNDSVNQVLSISITSMKALESQIKEFDKAIKALMELLPNVLISIPGIGPVYSAGIMAEIGDINRFDNQASLAKYAGLAWKQHQSGGFEAEVTRLIPSGNRFLKYYLCEAAFSLVRCDKKYSDFYHLKYKEVNRCQHKRALALTAHKFVRLVFRLLKDNRLYCPAK

SEQ ID NO: 157369 - protein, 476 aa, unidentified
MNCAAQPFRWRQQEELEMNPKRSKSRHDRKMPMVHPNAAAIDIGATMHMAAVRADRAQEPVRSFGTFTADLHRLVDWFTECGVETVVMESTSVYWIPIFELLDARGFTVCLVNARDAKHVPGRKTDVSDAQWLQRLHSYGLLRASFRPKGQIAQLRSYVRQRERLLEYAASHIQHMQKALTEMNLQLHHVVADITGATGLRIIRAILTGERDPEALAALRHYSCHSSAETIAKALTGSYRAEHLFALDQALALYNAYREKASACDVRIEAVLKELSIHRGRDHGAVPPPRRRHRTDQANALAFDVRAALFALLGKDITAIDGLGAYLSLKLIAECGDDLSSWPSAKHFTSWLGLAPSNKVSGGRMLSSRTRRSGGRAAALLRLAAVAVGRTDTALGAFYRRLSSRIGKAKAVTATARKVAVLFYNAVRHGMEYVDPGASSYETRYRTRVVNNLHRRAKAFGFVLQPLDPKAGAAVS

SEQ ID NO: 157370 - protein, 354 aa, unidentified
MAKTFETTVAVIGIDIGKNSFHVVGLDRRGAIVLRQKWSRGHVETRLANMPPCLIGMEACVGAHHLSRRLKALGHDARLMPAKYVRPYSKGQKNDFRDAEAIAEAVQRPTMKFVATKTVEQLDLQALHRVRERLVSQRTGIINQIRAFLLERGIAVRQGRLCLRRALPQILAAPPDVLSPRMLHIIEGLAGEWRRLDERIQALSDEIGAIARQDIGCERLMSVPGIGPIISSAMVAAIGTGDAFSKGRDFAAWLGLVPKQVSTGDRTILGKISKRGNRYLRVLFVQAAWVVLVKRKSRECLGLDRWLEAAKKRLHHNVLAIALANKLARIAWSVLAHGRAFAVGNIAEATAQTF

SEQ ID NO: 157371 - protein, 401 aa, unidentified
MTVRPQLWVGIDVGKTNHHACAVDDAGKVVWAQKLTNEQRAIEQLIDRAHKAAEQVRWAIDLTSPMALILITVLLGAEQSVVYVPGRVVNTMTHGFRGEGKTDAKDARVIAETARLRSDLSKVTLPDELVVELTQLTGYRTDLMADWVRGINRLRGLLGSIFPTLEAAFDYSTRTPLILVTGLCTPSEIRAAGIDGVKAHLVEHKAWPAAIAKTAATAVALANEQELALAGEAGTAALVKRLARKLLELDHEIKDIDKAITERFRDHPYARIIESLPGFGPGLGAEFLVVTRGSLASFATPGRLAAYAGLVPVPKDSGRITGNLRRPKRYNRRLRRVFYLAALSSIRSNGPSRQFYDRKRGERLIHSQALLALARRLVDVLWALLRDDREFTPHAPGTAAA

SEQ ID NO: 157372 - protein, 392 aa, unidentified
MIYIGIDVAKDKHDCFITHSDGEALFNSFTISNNREGFETLFQRIESVSDDLTKVKAGLEATGHYSYNLLGFLPDKGLTTFVINPLHTNLYRKSLSLRKTKTDKVDSRTIATMMMSDMNLKSYSDTSYHNEELKSLTRYRFDKVKERAKLKSSVSRLVCILFPELEKLVPTLHMASVCDLLSEFPGADAVAAAHLTRLSNLLSESSKGRYGKDTAVMFREAARSSIGSHMAAKSPELKHTIKLIQELTIEIDEIETAIKRIMDEEIQSPILTIPGISYRMGAMIIAEIGDFSRFDSADKILAYAGMSPSTYQSGQLDNCHSHMEKRGSRYLRYALYNATKYVCHWDESFGTYLEKKRSEGKHYNVALSHATKKLVRLIFAMEKSRRAYIPVP

SEQ ID NO: 157373 - protein, 544 aa, unidentified
MRGSSREGTESQIVAAIEWLGPCVPASRPKKTNGASFGSPFRSMVPDFVLKSVVTAASYWGYVDPDQKSTPFRTVWADAHGRIILGRAMARKRKNNKKMGAPVLHCLNPNAAGVDVGATEIYIAVPADRHPQSVRHFSTFTEDLHAAADWLKSCQIETVAMESTGVYWIPLFQILEARGFQVFLVNARHVKNVPGRKSDVSDCQWLQYLHSVGLLRGSFRPEQAVCTVRSILRHRDGLVQMASSHVQHMQKALDQMNLQLHHVISDITGVTGLAILKAILAGERNPHTLAALRDGRIKATAETIAKSLVGDYRREHLFTLGQSLAAFRHYQELIGACDREIAQLLEAFESKADPPKGSLPESQEGQKPSGGEPRFDLQSHLYQIFGVDLTRIPGINVLTTQTLLAEIGPDLSCFACAPAFTSWLGLCPDNRVSGGKVLSVKTRKVKNRAATALRMAAQALHRSQSYLGHFYRRMRAKLGAPKAITATAHKLARIIYHMVTTRQAYDETICVQNEVHNRQRLEVRLRKQARDLGLEIIPLKTGAL

SEQ ID NO: 157374 - protein, 338 aa, unidentified
MIYIGMDIHKNFIQAVAITKEGKLICNQKLGTSDEQIKRFIQSLAVPVHRIKAAVESTCTWYHVYDSLEALGIDTTLVNVRRTKVIAESKIKTDKLDALSIAHCLRTGFIAESWVPPKDIRELRNMVRHRLSLRKEITRFKNKVHSILLRNGIKHEYSDLFGKKGMEFLRNLELEGSDRYRLQSYLGIVESLMEQKQRTDSRISRLCRMNEKAMLLTSIKGISYYSAMVIVSEIGDVKRFPNSKKLCSYAGLVPRTMQSGNHVYHGRILKECNQNLKWILVQCIHSHIRFCKDSLITRLYYRVMKRKSKNKATIAASRKMLTCIWHMLTRGEEFKCRG

SEQ ID NO: 157375 - protein, 347 aa, unidentified
MQVITVGIDLAKHVFQVHGVDANDKVVFNKPLRRAQMLPFFAKLAPCLIGMEACASAHYWARELKKLGHDVRLMPAKDVKAYVKRNKNDAVDAAACCEAVRRPVVRTVPVKTPEQQAQLMQHRVRDLLVRQRTQAINALRSHLAELGIVAAQGYDGLKALLSIIADGGDNRLPENARVSLSALVAQIASCQAEIAAIEKRLLAQHRKNEDSKRLETIPGIGVIGASAIAATVPDASIFKTGRDFAAWIGIVSREDSTGGKQRLGPISKQGDRYLRRILILGALAVVKRARSCPEGYPWLTRLLARKPAKVAAVALANKMARVAWAVLTKKENYRLPEIAAAAPAKGC

SEQ ID NO: 157376 - protein, 343 aa, unidentified
MKLSRVGIDLAKNVYQLHGVDRSGKTVLKRRLKRHQWLKVLLDKTEPGCVIGMEACASAHHWGRQLQSRGYTVKLIPPQFVKPYVKSNKNDARDAEAICEAMSRPNMRFVTVKTVEQQDIQATHRIREELKVRRTAKANQIRGLVAEYGLVAPKSLSSLRAAIPCWLEDAENGLTHYFRSLLHGLWDDLLILDDRMCEMDKTIKRLAKGNEDCVRLQQLRGVGPMTSTALVATVGDARQYHKGRQMAAGIGITPRQHSSGDKHRLLGISKRGDVYLRTLMIHGARSVVTAAKHKDDRLSRWVTEIAKRRHPNVAAVALANKNARMAWAMLRHKTDYDPDFAMS

SEQ ID NO: 157377 - protein, 400 aa, unidentified
MKGFLHMKLIGIDIGKNKHFFCIMDQQTGEIISQPVSFSNDKEGFDFLVQKIKSYPKDSILIGMEDTGHYHFALLKYLLDLQYTVALINPKTTDFNRKMQGGITKNDKLDTINICDVLDTPERKKQYRITKVNSFDLYEQKQLTRHHHSLKEEENVYKNRLQKCIDIVFPEFNKLFNSKYGIVYMNILKMFGSAENIANTDIRTIRKCFEIEGRGNRISLTPERLKECAGSSIGISSSAEVIQIKHLTAQIELIEEQLTEIDKKIEEFSIQNNSPILSIPGISHFSGTSILAELGDISNYSKPSQIIKFAGVAPLHYESSQFNAQHTAITKKGSKYLRKTLYQIILPVIRHNPVFNKYYQLKISQGKGHRCAQGHCVRKLLRIIYHLLKTNQQFDPQLLR

SEQ ID NO: 157378 - protein, 384 aa, unidentified
MQKPNDLNQSRIDLKQDSTLIAVIEMSLSSWLVAGIVPGVERQPLKKLAVDESALLKLLNRWREEAEKAGRRIERITVAFEAGRDGFWLARWLRARGIEAHVIHASSVAVSREHRRAKTDRLDTELLKRAFLGWLRGERDHCKMVAIPTTKDEDAKRPNRERQSLVGEQTRIVNRMKAALIRLGIRGFNPKLKKAAGRLEDLRTPEGEPIPPNTLAELHRDMERRRLVSDQIRQIEKARLERMEQAPGDGPHAMVRLIARVIGVGIETADMLVHEVLSRKLRDRRAVARYAGLTGAPDESGSKRREKGLAKAGNARVRGGMIQLAWRFLLFQKDSALAQWYRTRTEGGRNRKTIIVALARKLLIALWRLVTTGEVPAGVVLRAA

SEQ ID NO: 157379 - protein, 473 aa, unidentified
MAKGSGGSGMTRGDRRRNARRERLRELLPRDGAVIGIDLAEDKQALAVIDHDVRVLARKTVRVKAFRLGAALDWAVGQARAKGFGPVTVACEPTGPRWLQVQRLCAERGLPLVCIQPLVSHIAREQQDFTRHKTDESDCVMIARLAVELHCYVPEELDETWAHLRHLGRRRAQLITAATASAQRIRDFLSVAWPTVTETCARPLESVTWLAALQVVTARCGADPGKLAAMGEQEFTALVRGAVPGWGGQKAHGPISRRVFAALTGTEGVVVSSRRGLLRRVADELGDLQRTRAQLGAVEADMVAVLDELGLSRLAGIPGLTAVGAAAILAETGDPHRYDNSSSLVKHAGMSPSDNASGAFAGQAHISRRGRPGLRLVVWRAVWPMLQFNPVMAAKYQAMTRAADTAAADAGPQQGKAAQAAARARRAKARVACAASLLRWIYCIVVHDTSWDPAVASGPASRRDDPHTQAEAA

SEQ ID NO: 157380 - protein, 360 aa, unidentified
MSNSISIGVDVHAGKNCVFALDRDTGEALEATLSGDPAELVRWIGENGLSGGTCCYEAGPTGFGLARALAAAGIRCVVAATSKLPRRSDRRKNDRVDAEWLARMHAAGSVRAVRVPTEREESLRHLSRLRGEVARDLRAARQRVASFLLLTGTRYALTKRRWTKTFRRWAAALEFAQPADTFVFRQKLAAVYRLEERLAEVEAEIARAVASSPGLAERMARLECIRGIGRVTAFSLVCEVCDFRRFRNGSALASYIGLVPSESSTGSRTRRGGISKTGSSHLRRALVEAASAYSRPCRGASAPEDPSVPALVRARAAECSRRLRRRREHLVGRGLAANKVKVAVARELCEWIWWIAVMPA

SEQ ID NO: 157381 - protein, 416 aa, unidentified
MKIVRPICCGMDVHKNIIVATIGITNKKTRITEYIQETFSTLNPDLLNLKQWLINHKCFDACMESTGKYWIPIFNILEDEINIYLTHPKYVKAIKGKKTDKKDSKWICDLFKHDLIKFSFIPPKEIRALREISRYRYKLVGMRSSERNRYQNCMTVSNIGIGSVFSDPFGKSAQAIMKEVLESDIIEDEKILKCIHRSCKNKDKILDSIKHCNIETDQRFKMNESMTHMEELQVHINNCEIEMMKRAAPMFDQFMHITQLPGISTLSAILIISEIGVDMKQFESDKQLTCWAGLAPANNESANKKKSVRISKAGQYLKPLLVQCALGAIKDKEGYFGIKYSRIKKRRGHKKAIIAIARMMLVSIYHMILTGETFNPSDYESFKNPKPPIKQQVLTEESAIEFLKKSGFDVSKLTKP

SEQ ID NO: 157382 - protein, 413 aa, unidentified
MDVLHARCCGLDVHKSSISACILLREAGRVQKHQRRFGAMTQDLRELAEWLQQFGVTQVAMESSGVYWKPVWNILERQFTVVLANAQHIKNVPGRKTDQKDAEWIAQLLQYGLLRPSYVPCEIIRDLRDLTRMRASLSQEASRISSRIQKVLEDANVKLASVATNVLGKSGRAMLEDIISGEDDPEHLASLALGHLRVKIPQLRLALEGKIRSHHRFLLRRLLDQIEFLEHEIALLDERLEDIGRQRPELSQAVARWDTIPGIDQVAAWALLAEIGDNMAQFPTAEHLASWAALCPGNHESAGKRLRGTTRQGSPWLCRMACQCAWAAARTKNTYLSSQFRRLAARRGKKRAIIAVAHTLIVIGYHLQKNQSNYDELGGNYFDRLHSDGLKRYLVKRLQQLGHKVTLEPIEAA

SEQ ID NO: 157383 - protein, 460 aa, unidentified
MSRERSKQQKRAGQGGAVPSLNCIEPNAAGIDVGATEIFVAVPQDRDPSPVRSFETFTQDLHRLKEWLQQCRITTVAMESTGVYWIPLFQILEEVGLEVCLVNAQHVKHVPGRKSDVIDCQWLQYLHSVGLLRASFRPEDRVCVIRSLLRHRDSLVQMAAAHVQHMQKALTQMNVQIHHVLSDITGQSGLAILDAMVAGERNPVVLAQLRHSRVQASEEEVVKSLVGDYRREHLFTLRQSLEAYRYYQRLITGCDAEIEQQLQNFDGHLPPDAPALPPERYPHRQRKNEFRFDMRSELYRIFGVDLTAIPSINALTGYTLLAEVGTDWSKFRNIQAFASWACFCPQNKKSGGKVLSAKTRRSANRVNRALRLAAQTLERSTSYLGIFYRKMCARLGRPAGITATAHKLARIIFHMVTTGRAYDESIFAAEQQRQRKHLESSLRRKAAKLGYQLIPFPQTA

SEQ ID NO: 157384 - protein, 343 aa, unidentified
MQVSTIGVDLAKNVFQVHGVDSAGKVVITRQLRRKQVIDFFSKIPACLVGMEACGTAHHWAREVSKLGHIVRLMPPSYVKGYVKRSKNDAADAAAICEAVTRPSMRFVPIKSADQQALLMLHRTRDLLIRQRTQLINALRSHLAEFGLVAATGREGLAQLAAIITDESNREALPSAMKQALQAIVDQLAALELQIGTLDRAIHAHHRANDMSCRLETVPGIGVIGATAIASTVTDPNDFKSGRDFAAWIGLVPRQHSTGGKERLGGISKQGDRYLRRLLVIGATAVVRQARLHPQKHPWIMRLLAKKPAKLVAVAVANKMARIAWAIMAKGGHYRAPELAAAA

SEQ ID NO: 157385 - protein, 347 aa, unidentified
MDRYIGLDAHVQSCTFVVMSAAGKRLREQVVETNGEGLQDFIRSVTGQKHLCLEEGTMSEWMYELFEPLVDEIVVVVPERSKGNKNDSKDAWARAEELRCGSIQRAVYKAPQKFTALREAVRAYEISQRDMIRAKNRVNAIYRSRGFSGMGTEIYDIEKRKEWLEKLPSHRRALALLLSTQLDGLQDAHKRAEDWLREEAKRVAIVKTIRTAPGIADIRAAQIVATVISPHRFRTKKQFFSYCGLGIVTHSSSDWARTSQGAWERRQIAQPRGLNRNRNPILKRVFRGAADAVINTLPKHPLHVAYQRAIAAGTKPNLARLTLARRLAASVLVMWKDNKEYDPKRHS

SEQ ID NO: 157386 - protein, 352 aa, unidentified
MSEYIALDVHKHYTFAEREAVETGRAWHCRIDHARGNIRQYLANADPGTRVAVEATGNWYWIVEEIEAAGMQPALVHPYKAKMMLACVNKTDKLDVHGMNRLQRTGTLPTVWIPPAAIRDLRDLPRTRMFMVRERARLKNRIQAHLTKYALNVTGFSDVFGLRARQEMEQHVAQLPPHTQAVTRELLCQLDVVDEQIEAEEKRIHLLVKETADMQRLMTLPGVGRILAAVIALEIGDIRRFASAAHFASYCGATPRIHASGDKVHFGRLRSDVNHYLKWAYVEAAASIRAHQRSHPDRHVVKLYQRVAERRGCQKGVGAVARHLAEATFHMLSRQEDYKEPSVARRRATTGT

SEQ ID NO: 157387 - protein, 420 aa, unidentified
MPDDRCRLGSDDVVIGLDLASAEHQVVVLTADGQRLTRFRIPHSRVGLEELLRRTMPAALGRAEGARVFAFEATGHVWEAVAYLLRARSERYVVVNPLTTFRVREARQLSREKTDLTDAEQIAELCRTGLVTQTQLEARPYLALRRAWGEYRRLREERARLKVLVAHQLYGLFPEFLRVWANLLQPGALAVLRTGLTPAAMAALSLSEFVACVREHRAGRRVWRFKLAQVHRYAEQTIACPDGIDVLAREVQRAVARMDALTTQMTVVATEIDALLADLEETQYLRTIPGLGWASVAGLLAHVGAITKYRHGRQLIKLAGTNPSRRDTGQTVGRGQTMSRRGRAGLREVIYLATISCLQHNPRIRAHYDRLIQRADRPLTKMQALGACMNKLLLYAFAVMSRREAFQLDHDWQRTMPRVA

SEQ ID NO: 157388 - protein, 315 aa, unidentified
MLIVGCDYHPGFQQIALVDTGGGDFQERRLQHREEAEKFYRVLAGTGKQVCVGMEASGHARWFERLLAELNVELWTGDAAKIQAKRVRKKKTDHEDARHILQLMLKDDFPKIWVPSWDNGDVRQLLWHRHRMVQMRTRTMNQLQAVALKEGLRCKKRLWRKHGRPQLESVRLAPWASRRRRDLLELLDRLNPTISELTQLIEREVDKHPVAQRLMTHPGVGALTALAFLLIIGEGERFECGKQIAAYLGLVPEDDSSGESRRLGHISKPGSGLIVSFLWKRRRSGYGAMRNGVTNFSISPCDEGARSRRLRWRAD

SEQ ID NO: 157389 - protein, 361 aa, unidentified
MQIIGCDLHARQQTLAMLDTTTGEVVNLTLLHEGNNVREFYSKLPRPVLVGIEATGSMQWFLNLMQELGIECQVGHPAKIRAAEPRKQKHDRRDADLILKLLAEKRFPAIWLPTKELLDLRALLLHRHQWVRLRTRIQNALQAIALANGLRRGPGLWSYDGQSAIAFLPLLPHTAYRRSALLAMYGKMEAEIEKLTQQVAEQAGNRCGARLLMTHPGVGSVTALATDVFLGDPRRFVDGKALASYVGIIPREYSSGGRQRLGGVTKQGSPLLRFLWGEEGAHAARRDPELQRFYRRKLVQKGLGKARVAVARKLGIRLWIMLRDEIDYQEFCRRGQKQQSVAACAGMPETRYGANSHRPID

SEQ ID NO: 157390 - protein, 425 aa, unidentified
MNYKQNEKINQVKESTLVVGIDIGSTTQYARAFDWRGIELGKVFPFSNSREGFESFKAWMQHLQDKYKKLDAIVGIEPTGHYWFDLGAYLEDEGILLVMVNPYAVKQTKELDDNSQSKNDRKDPKVIAKLVTEGRYSAPYTPDGVYADLRIMVANRKRLIREMTQIKNRFARWFAIYFPEYTDVFGDYEAQSSMLLLKKVCTPEAIVELGAEKINQIWRDAKLRAVGMKRATTLCETAKRSIGLKKGSSAARYEMKLLLEDYEYKKAQLDAVMEEIEKLCRKIPESEQMLAIKGIGVITVAGFLAEVGDVRRFESPRQIQKLAGLSLRENSSGKHKGQTTISKRGRSKLRAVLFNAAIPLIAKNPEFKSLHEYYTTRANNPLKKKQSVIAISCKLIRVFNPILAKGVTYDAQKLISDIHRQPQVA

SEQ ID NO: 157391 - protein, 349 aa, unidentified
MLIIGCDYHPSVQQIAFVDTDTGELRERRLGHREEAEQFYRELKEQNLAVRAGMESSGHSRWFERLLQELGFELWIGDPAEIQSKRVRKQKTDRQDAQLLLRLMMEDRFPRIWIPDAANRDLRQLLWHRHRLVQMRTRVMNQLHVVALNEGLRRKKALWRPAGRTELEAIALAPWATRRRQDLLDLLDQLTPKIQQLTQALEEEVEKRPVTRLLMTHPGVGPLTALAYELVIGTTERFHCGKQIASYVGLVPEEKSSGDRRRLGHISKQGNALLRFLLVEAAQVTVRSQPQWRSKFLHLAMRRGRKIAKVAMARKLAVHLYWMWRKGHDYGQLQKFGSHAGEPGNLDGV

SEQ ID NO: 157392 - protein, 359 aa, unidentified
MTSIALGRGDVVVGIDTHKDEHVAVALDGLGGRLGELAITARPDGYAELLAWADELGAVSAFGVEGTGSYGSGLARFLRRHARKVIEVSRPPRKGERRMSGKSDAIDAEHAAREVLAGTATATPKLADGIVESIRLVKIARDSAVKARSQAMITLKATLVTAPDEMRCQLEPRSDFKLIAACAELDTGGDVADPTTAMRQVLASLAQRWLELHAEIKTHTRNLEDLTRRAAPDLVDAIGIGPDTAAEMLVTAGDNTDRIHSEAALAKLCGACPIPTGSGKTSGRHRLNRGGNRQANAALYRVVIVRMRWHPPTIAYVERRTAEGLTKKEIIRCLKRYVTREIYRLLPEPSSPAILASAA

SEQ ID NO: 157393 - protein, 317 aa, unidentified
MAALICGVDVSSISLDARVGAQGAEARFENSPEGVAALIAFCRQHGVELVAMEATGGYERLAFGLLWGSGVAVALLNPRAVRRFAQGMGLEEKTDRIDAGVIAWFAEVKKVVPTQPASAAQARLEALVTRLRQLTELRAAQRNQRLLVTQAEVLAGFSELLALLTAQIRALEKAIANLIAADPLWQQLDAAFRSIKGVASRTVSRLMAEMPEIGTASNKAVSKLAGLAPLAQDSGKSQGKRAVRGGRSNVRTILYVVAGVVRRYDTEFAAFDQRLRAAGKPKKVIRIALAHKLLVRLNAKAREVRRQHSAAACSATC

SEQ ID NO: 157394 - protein, 343 aa, unidentified
MQAVTTIGLDIAKSVFQVHGVDAEGKVLIRRKLKRRYVLAFFQKLPPCLVGIEACATSHHWSRELKARGHNVRLMPPAYVKPYVKRQKNDAADAEAICEAVTRANMRFVETKTPEQQSCLMLHRTRQLFIRQQTSVINAIRAHMAEFGIVAPVGRKGVEQLLDVVADARDRRVPEVARACIAALGAQLRLLKAQILEFDRRILAWHRSNETSRRLDELPGVGPALATALVASVADAKAFRSGRNFSAWIGLVPKQHSSGGKDKLGSISKQGDRYLRSLFTAGALAVIRYAKIHGTQHRPWLTALLARKPTKVAAIALANKIARMAWALMAKGERYNEPVALGA

SEQ ID NO: 157395 - protein, 477 aa, unidentified
MLKEVNKSLGLRTKFRYGAGIDVHKAYVIACVAIQRDELVSGLVNQQFQRSINGLDEMCRFLKKYLLSSIVMESTGVYTPFVKEQLDKVIWCGLTPKIVVINPSMVRKYPGELHADRQDAFELARLELLGLAEPSFLPKDLLKELRWLSRRIYFVRKDSARIKNRIKQNLDLWGLSLPQFNLDQGWALDLCRVFIIHAKGNLKQSYQLIEKKEIDLKSRSLAAILRRKEKYTKFFDIQLPSSATRVIELQLANLNAQNAIIKGIVVEIENIINQNSVLKDKIHQLIQIPGIDHQSSVSLLSEIGRISRFPNVKKFLQYVGCAPTIYQSGTIRKASHLNKRVNHYCKVIFMQAGRSVCSNVKKDSDLKEFARKQLNRHWKDKKLAYANTGIKIARIIYHLLLSGEEFRPFYESKKDRSKNKYDQKELAKPFRLSAIRKRIRHHFNFLHHALENQNDATVREVYEEIKVMWNSLVGSSS

SEQ ID NO: 157396 - protein, 403 aa, unidentified
MNNVAGIDVSKGKSMVSVLRPFGEVVAKPFSIGHTGSELKELADYLKSLDGETRVVMEHTGRYYEPVARFLHEEGVFVSAVNPKLIKDYGNNTLRKVKTDKADARKIARYGLDNWAELRQHTPMDTIRMQLKTLNRQQSLYTKTKTMMKNNLIALLDQTYPGVNALFDSPVREDGSQKWVDFATAFWHVDCVRNMSLTAFAERYRKWCKRHGYNFSQSKAVEVHTGAQDLIAMLPKDALTKTMVRQAIDALNAISASMERLKAEMQALAAQLPEYPVVMAMHGVGDSLGPQLMAELGDVTRFTHRNAITAFAGVDPGADQSGTHEAKSTRVSKSGPPELRRALFLVMDCLLKTQPQDDPVYRFMDKKRAEGKPYLVYMTAGANKFLRIYYGRVKEYLASLEGN

SEQ ID NO: 157397 - protein, 404 aa, unidentified
MIFVGDDWSEDHHDVCLMDHAGKRLASRRLPEGLTGIRQLHELIAEHAEEPDQVVIGIETDRGLWAGALAAAGYQVFAVNPLAVARYRDRHHVSGGKSDASDAKLLADLVRTDRHNHRPIAGDSLDAEAIKVLARAHQSLIWARTRHTNAMRSALREYYPAALLAFEDLAHGDALGVLGRAPTPEQGAHLDLPAIQSALKRGGRKRNIAARARQIRAALRSEQLAAPAPVAAAFGATTRAAVGIIVELNRQIAELEAELATHFEAHPDADIYRSLPGLGVILGARVLGEFGDDPNRYTSAKSRRNYAGTSPLTVASGKKRAVLARHVRNRRLYDAIDHWALCALTSSPGARAYYDHHRAAGDVHHQALRALGNRLVGILHGCLRHHTTYSEHTAWAHRQITQAA

SEQ ID NO: 157398 - protein, 410 aa, unidentified
MEVVVERGCGLDVHKATVAACVWRREPGVHKETQTFGTMTTDLLVLADWLKAHGVTHVAMESTGVYWQPVYNLLEADFEVLLVNAEHIKRVPGRKTDVTDCEWIAELLAHGLLQGSFIPPAPIRELRDLTRYRKSLIDERVREVNRLHKLLQGANLKLSSVASDVLGLSGRRMLDALLGGTSDPAVLAELARGKLRTKLPALRQALQGRFSAHHRVLLAHILAHLDFLDEAIEQLSAEVAARMAPFEDALGCLDTIPGVDRKAAEGTVAELGVDMSRFPTHRHLAAWTGLCPGNRETAGKRKPAKSRKGDVWFRRYAIEMALAASRTKGTYLNALYHRLVRRKGHKKAIVAVAHAIVVIMYHMLKHKVPYRDLGADYFDKLNSTQIQRHHVRRLESLGFKVILEPLEAAA

SEQ ID NO: 157399 - protein, 339 aa, unidentified
MNKVKFFIGVDISSEFFTVSILNTETMKYTSFKDFENSINGFQNLLSEFQSYKIEKSDSIICMESTGVYGEKLAYFLVGNNYDLVIESPLKVKKAFNPARGKTDKIDSEQIAEYAYRYFDKLKIWSPKSEIIEEIRMFLTQREQFMVQRIANINAKKAVEKKFHKSEKVISYYDEMISKIDENIKSIDKEIISLIEKEPEYRQIFANVISIPGVGKILGFHLLAVTNGFSEHLDCKKLASYLGIVPLPFRSGSSIRKNNSSSGIGPSKLRQVIYMASMSAMQCNKELKNYFLRKVAEGKNKRLVLNNISNKLLKLIIAIIKSNKPYIEKFVSINPIFKK

SEQ ID NO: 157400 - protein, 356 aa, unidentified
MIVIGIDPHMRTHTAVALERVTGEIVAERTVKARARGHGELVLWARALDAERVFALEDCRHVSGSLERFLIARGERVVRVPPKLMAGARAGGRERGKSDAIDALAVARAFLREPELPVATLAGFEREVRLLADHREDLVGERTRIGNRLRWHLHDLEPSLEIPAGALDRYRWLDRLQEWLKGRDEGSAQVRIARELVVRCRELTRRIKELERELEALLESEAEELLELCGCGTLTAAKLVGEVAGVGRFAGESRLAKYTGTAPLPASSGERQRHRLNRSGNRQLNCALHRIAVTQARVYPPARAYLERRQAEGKTRREALRCLKRHLARTVYRALRAMEERKTTSTVEVAALADLT

SEQ ID NO: 157401 - protein, 607 aa, unidentified
MTDARNQDSPGSVVNFQSRERNGAFGLAARVGDMGRGADGTKSGVERRIWKVIKGASTGEPSLAGFGGVVFQGEAKAGKSDTVSTGIHPLARRARKGSPQPAVNSCAAPMKNRSVQVLPPEYNSSGGIAPHGARSGKSYLAKVTPSSPARAAAPVPKSERTIAREAPGIRLTYDSATMPKEKGKTMKEWQSITHYAGFDWARDHHAVVIVNQQGQIVADFEIQHTQAGWKAFFEKTAAFPDLAVAIETNQGAAVDQLLQAGYTVYPVNPVAAKAYRQRKAPSGTKTDHLDGWSLADALRVDGQGWRVIQPTDPLSAELRLLCLDEVTLICQRTQLVNQLQQALVEYFPAATEAFDDWTLPACWDFVIEFSTPQALFQAGRRRWEKFLHTHRMWRPETAGKRMEIFARADQFAGSAPIIQAKSRLALSLCKLLRTLQQQLDDYRKQIEELFARHPNHDLFGSLPGAKKVLAPRLLAAIGSDPARYANDAVVLQAFAGTAPISFQSGQRNQVKMRWACDTFLRHVVHLWADCFRHVSSWGQVYYQNKRHAGMSHACALRCLGQRLLKIVFRMISDKNPYDAELHARNQQKHGSWILALANKTSAASAGE

SEQ ID NO: 157402 - protein, 338 aa, unidentified
MFIIGIDPHKGSHTAAVIDRDEQLVGELSVCADRGQRDRLLRWAAPFEPRVWAVEGATGHGALLAQQLVASGETVVDVPAALSARARLLDSGHKDKTDAHDARSAAIVALRNRNLRAVTLEDHRQILRLLDRRHHQLIAARTRAICRLHAVLAEMIEGGLSKNLSAKRASVELRKVRPHDAIGIERKRIAIEFLDEVRRIDLALVELHRRINDAVKAAHTSVTEVFGVGPIVACYLIGYSGDVHRFPTAGHYARYNATAPIEASSGPKVRHRLNPNGHRQLNHAIHIAALGQISHDTPGRAYYLAKQADGKSRKEANRCLKRRISDAVYRHLHTDLDH

SEQ ID NO: 157403 - protein, 397 aa, unidentified
MYIVGIDIAKRKHEAAVIDGEGAVIIKPFSFTNNCSGYNRLLAMLAKAKLPLDEVSFAMEATGHYWLALFTRLQKEGFRVQVINPVQTNSIRNFYIRQAKTDPRDALLIAEVIRFGHFSESTLHPENIYELRELCRGRHAIVSMQADVKRKVVALLDQVFPEYETAFTNMFSDTSMAILQTCPTPKELSEMPLEELCHLIEVSSHKRFRMAKARELQELARNSFGFAMAGDVFSTMIRLYAKHLDFLKQQVREMDRKIAEIMDTLDTPITTITGIGPTLGAYILSEIGDISRFSSAAKLAAYAGIDPTMRQSGEYNDVRNRMSKRGSPYLRHAIWLAASSAVLHDPALKLYFQKKRDEGKPYMASVGHACRKMVSIIYAVMRDNKTYTPHIPNEISA

SEQ ID NO: 157404 - protein, 345 aa, unidentified
MTEAYDGRQVVGMDLHRRRSVLVRMTGDGRKLETARIENSPAALRAVLARAGDNPRVVVEATYGWYWAVDVLEEAGAEVHLAHPLGVKAFSYRRVKNDERDCADLADLLRLGRLPEAWIAPPPVRALREITRFRHKLVGQRTSCKDQVHAVLAKAGIPVTRSDIFGRGGGIWLDGLPLPQPYAGKVASLRALIAVLDGEIARLEEQAAAMLAGDRGYAAIRRLPGIGPVLGAVICAEIGDITRFRNPGQLASWAGLTPRHYESDTRVIRGRVSKQGSRMLRWALAEAIQRAPAGTKPRQVKDAIIARRGADARGIAKTAAARIMLTQVFYGLRDGHIRRAISQAA

SEQ ID NO: 157405 - protein, 456 aa, unidentified
MSKLRIKKKAKKFKAADLPAELKHVNLNAAGIDVGSDRHMVAVPVGRDEVSVREFGAFTTDLQALADWLKKCGVTTVAMESTGVYWIPLFEMLEGRGFEVKLVDARKSKNVSGRKSDVLDCQWLQTLHTYGLLTGAFRPADEICVLRGYIRQKQMLVQSSSMHIQHMQKALQQMNLLLHNVVADITGVTGMTILKAIIAGERDPTVLASNRDPRCRNSVQTIAKSLVGNYREEHVFALTQAVDLYEFYQTKINDCEVAIARFLSTQAQQRDDEPPESHKHIPPQRRIRAGIDLRSRFFKLTGVDLFSIPGLAADTLLTILAEVGFDMTLWKTEKHFASWLALCSGTKISGGRVLDRKSKRSANRAAQAFRLAASSLARSHTALGAFYRRIRARIGAPQAITATAHKIAITFYSLLKNRTSYVEIGEQAYNQKFKERRFKAIKKQALALGYQLIPVV

SEQ ID NO: 157406 - protein, 312 aa, unidentified
MTRVCAAGVDVGRDYFDVGLAPVGQVFRAANGPAGVAQVVERLRRAGVAKVVLESIGGYAQRLVRALAEAGFEVGVVDPKRIRALRLAEGRRAKTDALDAALIARFALIMQDAARPIPSAKAFEIKALSTRRRQLVEMIAMEKVRLGQTLDPPVADSLRRIIALLAEERAGVEAALHQALMALPGSPGRTRQLQSIPGIGPAISATLMSDLPELGSLDRKAIASLAGLAPHPNQSGTLSGKAHIGGGRPCVRAALYMAAVSAVRSDKGFKREYQALRAAGKPAKVALIAIARKIVVAANSMLRDGREWTKTP

SEQ ID NO: 157407 - protein, 358 aa, unidentified
MIDTGDIDVFLGLDVGKGEHHATAVTPAGKKAFDKRLPNTEPKLRELFAKLQAKHGTVLVVVDQPASIGALPLAVARDMGCPVAYLPGLTMRRIADLYPGEAKTDARDAFIIADAARAMPHTLRAIDDEDETIAELETFVGFDDDLAGQATRVANRLHGPLTQIHPSLERVLGPRLQHPAVLALLERFGSPAQIRKAGRRRLVTLLRPKAPRMAERLVEEIFAALDEQTVTVPGTEAAALIVPSLAGSLTAVLDQRKLLAGRIEELLEAHPLSKVLTSMPGIGVRTGARILIEVGDGSTFPTAGHLAAYAGLAPATRSSGSSIRGEQPSRGGNKQLKRAFFLSAFAALGDPASRAYYD

SEQ ID NO: 157408 - protein, 416 aa, unidentified
MNCVGIDVSKGKSTIAVMRPFGEVVVSPFEVCHTASELSELARLLKSLDGETRVVMESTGNYHAPVAWLLHGAGLYVSVVNAMLVHDYGNNSLRRGKTDKKDAVKLANYGLDHWLTLPRYVPEEDARLMLKTCYRQYQQYSKVQTMLKNNLISLLDTAFPDANRLFTSPPRADGSEKWVDFVAAFWHCECVCGLSKKAFTTKYQKWCRKHGYNFSEDKALDIYVSACGRFGVMPKTKTAKLLVEQAISQLQATSAALAALKQEMQSLAASLPEYPVVMGMFGVGPTLGPQLIAEIGDVRRFHSKKALVAFAGIDAPPYQSGQIDVRSRSISKRGSASLRRTLFLVMGVLLQCAPMDEPVYQFLDHKRSEGKPFYVYMTAASNKFLRRYYAQVRDYLSTLDDLPPVDMDSTGLKPSD

SEQ ID NO: 157409 - protein, 376 aa, unidentified
MSNLRFIGLDVHAETIAVAVAEPDGAVRSLGVIPNRLESIQKLVKRLGPTTQRRVCYEAGPTGYVVYWQLTALGVQCSVVAPTLVPVKAGDRVKTDRRDALKLARSYRAGDLTPVWVPDAAHEALRDLVRAREAAKKDQLRARHRLGKFLLRHGRRPCRPVKAWTPAYLTWVNTAVRFEHPAQEATLLDYVHEVEHAARRIERLEHAIDEAIKTAPVRMRAVIAALQALRGIAQVSAVTIVAEVGELSRFTTPRQLMGYSGAVASEDSSGGRIRRGAITKTGNAHLRRIIIEAAWAYQHRPSVGAALRKRHAPLDAAVIAMAWKAQHRLHARYRSLTARGKSKQSAMTAVGRELLGFIWAIGRTAERPRLGAPVAA

SEQ ID NO: 157410 - protein, 425 aa, unidentified
MATKVREVAYVGLEAVSEYCCGLDVHKKRITACLLVGPVDQPPKELLSAFTTTTKGLTAPRDWLASYDCTHVAMESTGIFWRPVFNILEGSVTILLANARHMKQLPGRKTDINDSQWIARLLRWGLLKPSLIPLKPIRELREMCRYRKKLTQEVGAEKNRVHKTLEDANIKIASVATEIFGVSGLAMMDALIAGNLSPQETAELARGRMRSKIPELAEALVGKIEEHHRLLLRKHLDHLSYLQQAIAEMNRLIEKKMQPYQSQVDLLRTIPGIDTLAAQQTFVEMGGDITVFPSEGHFASWIGICPGNNESGGKQRKAKALKGNRWLCSLLVQSAHSVGRTKGTYAGAFYHRIARRRGNKRAAVATGHYLAKCIYHILQDGKPYQDLGANHFNRRGNDALKKQLLSRLERLGYQVELTPQLATVN

SEQ ID NO: 157411 - protein, 340 aa, unidentified
MNITTIGIDLAKNVFQVHGVNERGQAVLKKQLKRSQVMAFFANLPPCLIGMEACGSAHHWARKLQGLGHTTRLMATQFVRPYVKSNKNDAADAEAICEAVARPNMRFVPIKNLEQQAVLALHRARHGFVKARTAQGNQIRGLLAEFGLIIPKGLVHIRTQVPAFLEDASNELPGEFRSLIHRLTQHLVELNRQVDEIGAQIGIWHRNNELSRKLTAIPGVGPLSASALTATIGDARNFSSGRQLAAWLGLVPRQSSSGGKDVLLGISKRGDSYIRMLLIHGARAVIAWARQKPESNRWLLKLMERRNCNVAAVALANKNARIVWALLAHDRQYRADYALA

SEQ ID NO: 157412 - protein, 422 aa, unidentified
MVLKGVPMALKIVYQICCGIDVHKTFVVACIASTNKQGVTIYKRHRFSTFTQGLKELLQWLLDNHCKDVCMESTGKYWIPIYNVLEKDCNIVLAHPKYVKAIRGKKTDKKDAKWIADLFKHDLVAGSFMPPADIRQLRDLMRYRFKLTCFMSSEKNRLQNCLTVSNIQLASVVSDTFGKSSQRILDKILENPDDTSFDIEPLIHGSMKKKLPELELAIDGFITPEQAGKLKVIKKHFEDLESRKAELEKLILALASPYQQELDLILTAPSFKNKFTAIGIISEIGVNMEAFPSAKHLCSWAGLTPTNNESAGKKKSVRVSKAGCYIKPLLVQCANSVVKSEKHPEIRNRYLRLRKRRGHKKAIIAIARMLLTALYNMLKNKEPYNAELYRKSDALPVNREITIEQAILIAQFQGYKIKSAAE

SEQ ID NO: 157413 - protein, 371 aa, unidentified
MADYRRAFVGIDVAKLRNAIAIADAGREGEVRFFGEVDASDTSMRRVIQRIAAKFDRVHFCYEAGPTGYGLYRLIRSLGYECMVVAPSLIPRKPGDRVKTNRRDALALARLLRAGELTAVWVPDEGHEAMRDIVRARAAAVETLRVHRQHVSAFMLKHGRIYPRKKGWTMRYLRWLQEQPFDHPAHQIALQEMVEAVRVSKERVERLERVIEEFVPAWSLAPVVRALQTLRGVELIVAVTFATEVGDVQRFESPRQLMGYLGLVPGERSTGETVRRGGITKAGNGRVRHMLVESAWTYRHPPKIGKMKLYRLEQAPPKVRDIAWKAQTRLTARYRMLSGRGKKTTVVCTAIARELAGFMWAVAREAQAIRS

SEQ ID NO: 157414 - protein, 339 aa, unidentified
MSIIGCDLHSRYQVIAMVETDTGEMVTRRLEHESGEARAFYTTLPKPSLIGMEATGYTQWFERLVAELGHELWVGDPAEIRARAVRRQKTDTRDAEHLLDLLLTKRFPRVWVPTPEERDVRQLLKHRNKLVRMQTSVRNQLHFLAMSQGVCRKQKLWSARGRAELEGLSLGPWASQRRKELLELLDGLRPRIAELDQAVQTEAERRPEAVELMKHKGVGPVTALAFVLTVGPVERFANSRKLVSYLGLNPGEDSSGGHQRLGHISKQGNEMLRWLLVEAGHGAAQFDPELRRKYQRLVFRRGRNVAKVALARHLAVRLYWTLRQASSATPPVRTPGSPR

SEQ ID NO: 157415 - protein, 405 aa, unidentified
MMLDMEIIFGIDVSKHSSNVAILIDGRTFKEFKITNNRPGYKILDDALNSFRSPKVIFESSGIYSRSIRSFLQRENWNYTEINPLAAKKDMDGFRHNKNDRLDAVSLAMAMAQHHYQSTFKEKAVYGELHDLERTYQEFNEDIVRAKNRLHQKLQLTFPEVEQFISTTDGALYWHVVQQFPHASLVLAIELPALAQFILKATPKNMSEKRAFALARHLHDLASQSAPAVDYNAHAVHSVIYLANEVEHLSGLKADIIEEMTKISSLLAEIPILESIPGFGIKTAVCLLAELGDISRFHGSNAINAYVGIDLIQYQSGDFEMMQHIRKRGNPYARKILFKAVLNMMSVAKYHPSNISIFYQRKKQSSSESHTKKIAIAAMGRLIRTIYHLIKNNELYDSTQFSPEK

SEQ ID NO: 157416 - protein, 415 aa, unidentified
MNWHEQPHFAALDWARDHHDFVVIDRQGVVIEKLRFEHDEAGWRRLGLLVEKYRNLPVAVETSHGTVVENLFAAGVKVFPINPKAAERYRERHAPSGVKNDLRDAWSLADALRLDGHMWQPLRPLDPALNELRLLCRDEIALIEQRTQLVNQLRQALHEYYPVALSAFDDWTSPVAWAFVVRFPTPQALHSAGSRRWESFMRQQRVWRPTTVQARITLFAQATSFCGTPSTVAAKSLHAVSLAQLLQVLEKQLVTYREHIEAVFARHPDHALFGSLPGAGEKIAPRLLAEIGDDRVRFPSAQSLQCHAGTAPVTIQSGKMCYQRLRHACNMSLRYSVHIWADLSRRKCKWAEDYYRAHRAKGHTHATALRCLGQRWLNILWKMWQTGTSYDEALHTRNQSQHGSWVAKAASAKPA

SEQ ID NO: 157417 - protein, 389 aa, unidentified
MLCVGIDVAKRKHDCCIIDSDALKTVESFTFPNSREGFDMLLSKISELGIPKDKIRVGLEATGHYSSNLAHFISEHDLPLLTFNPLLTNRYKQGFSLRKTKTDKVDACAIAQMIVSGKGFQTYSSSLYHNEEMKSLSRYRSQTMQKCSKLKISVSRLVTILFPELEGLTSSIHLASIYALLKAYPGHEQIAHCSMKRLTHLLSDASQGRFDKSKALEIHQAACRSIGKVSLSASMELVHTITDIEVLKQHIAEIDEKLKEMVDQEESSIIDIPGIGYTLCASILGEVGDFKRFPDVDKLLAYAGMSPSKHDSGDYHSKHNKMEKRGSPYLRKTLYLAARLVAQNVPRFKEYLEKKLSEHKPYKIALSHVAKKLIRLIYRLGISGCPYLA

SEQ ID NO: 157418 - protein, 312 aa, unidentified
MKIICGVDVSKARLDACIEPGAIFASFDNNPAGIAALAAFCRRHRAELAVMEATGGYERQAFLLLWEAGMPCAMTNPRSVRRYAESMGVLEKTDRLDASVIARFAQAKNLQPTPAPTPAQQRLKALVARLRQVTDDLTVQKQRRSTLAGNAEMLASINEVIALLNRQSRRLEGEIASMIDDDPLWAQLAEAWRSVKGVAGRTVARLMADLPEIGTYSNKAVAKLAGLAPLADDSGKRKGKRSIRGGRASVRSILFLVARMAAKYDKTLAAFRDRLQAAGKPKMVVRIALAHKLLVRLNAKARDARAQYANAT

SEQ ID NO: 157419 - protein, 338 aa, unidentified
MVYGAIDLHMRYSQIRVVGEEGQVLREQRVQTSVERLVEVFGGHGPMRILLETGTESEWVAQALEAAGHAVIVADPNYAPMYGEIRRKVKTDRRDVAALGEANRRGWYRATHRVSRPQRALRQVLRSRRQLVQMRSGTISLIRSLLRQGGYRLARSSSERVPAGLAALVLPAELTETIAPLRRLVETLTTEIAGVDMRLATQAKADPIVERLQSVPGVGPVVALTFRAFVDDVGRFAHAGQVSAAIGLVPREDSSAERRHRGHITKAGPRELRSLLVQAAWACWRSKTSGTLRAWVERLAGRRGKRIAVVALARRLSRILFALWRDHSVFAAATLAAA

SEQ ID NO: 157420 - protein, 430 aa, unidentified
MKSNTQNAKIEAITEKTLVLGIDVGSETHYARAFDYRGVEYSKKPFKFSNTEAGFVTFKAWVLDIKEKHGKDKVIPGMEPTGHYWFNLGKFLQDNEMKPVLVNPHHVKKSKELDDNHPTKNDRKDPKVIAGLVREGRYMIPYLPDGVYADLRTASNIRFQLQAELTRIQNRINRWFNIYFPEYKTVYGKPDAKSGILILKEAPLPEDILTLGIDGVNQIWRDAKLRAVGKARAKTLIEAAEHSVGSKEGAVSARMEIRMLLEDYESRNIRLQEVMALIEELVNQIPMAEKLLEIKGVGIKTVSGFLAEVGDIRRFNDPKELQKLAGLALVENSSGKHKGKTTISRRGRKRLRYLLFEVAMSLVAKNPEFRELHNYYTTRRLNPLKKMQSLMAIAAKLLRIFYAILTKGVGYDPKKMVNDIRRPAAYAQAA

SEQ ID NO: 157421 - protein, 469 aa, unidentified
MKKHQSAKTKSKALKPIHDPQPDAAGIDIGANEIWVAVPPDRSQDSVKRFGAFTRDLQAIVQWLVDCGVRSAAMEATGVYWIPLYQLLADAGLKVCLVNARHVKNVPGRKSDVRDCQWLQYLHSVGLLMGSFRPPQAICAARSIYRYRQNLLSTAAQHLQHMQGALEQMNVKLHHVIDDLTGLTGQAIIEAILAGQRDPEQLAKLRDKRIKASKERIVKALEGDWRREHLFVLAAAWHSWKELQQQVQSCDQELLNYSRELEACTTVAKPTKVMRLTQLAAPNPVGPKGRKARKKTSKNEPQGPWREELLRFFGVDLTAIPGISVLSSLTLMTELGNDLSAFKTAHHFASWLCLCPDNQTSASKVLRRATRRSQNRVRQALRMAASSLHHNKSYLGDKYRRLRAKLGAPKAITAMAHQLARIIWTLITRRVDFDLSIFALQEQANEQHRLKRLSASARQMGYQLTPIAL

SEQ ID NO: 157422 - protein, 330 aa, unidentified
MAFAGIDLHKSFCQAIVCTSEGDVLKEGRIPTEQEDIEEFFSGLECLEIALEASTNYEYFYDLLESLGHHVVVAHPLKTRMIADAKVKTDKRDARILAELLRGDLLPTSYVPPKEQRELRHLVRHRIALGRLRGRLKTQIKTELRRKNIKYHEGANCFTEKGKAELRRLHNPMVDSYLTIYEVVEDELKKMDRVIAEAGARYEEVKFLTSITGIGVYSALVIYSEIGDGSRFPTEDNVFSYAGFIPRVHQTGNEQYYGRITKEGSKYLRWILVEAARIHVQWCQESKITKHYEKIKRKRGEKIAIVAAARKLLQVIYHMLKHKEPFRIEG

SEQ ID NO: 157423 - protein, 324 aa, unidentified
MQGKEASEQETVKYSAGIDVGKSWLDAHIVPADISLRVANTREGIAKLKRWLMHTKPDLVAVEATGKWHRLVCRSLHASGIAVSVVVPYRVRMFAKAQGILAKTDKLDARVLAQFAVVMAPPAHAPAPQVLEELQELVTARDSAVAEETALKNQLGVAETVFLRKQLARRIVRIKADLKALEGECRKRIEADPGLARRYEILISIPGIGSKIAITLIAALSELGSLNSKQIASLAGLAPMANDSGQHQGARIIRGGRAIVRKMLYLAAVSAARCDAALRAFYLRLAEKKPVKVALVATARKLVLLANTLIAENRLWQPVAPVHA

SEQ ID NO: 157424 - protein, 320 aa, unidentified
MACLIVFVGIDVSQDWLDVHLHPLREELRVANTAAGWRELADRLAVHPNAKVAAEASGGYEKGVLRHLCAAGFAVHCLNAGRVRQFAHAGGRRAKNDRIDARVIAHYLATFVLTPERFDAALERLAENVTYRRQLVDQRGAVANQARLLGDPSLVRLSRRRLAQLDALIERQNQRLAALIAADPALSAKAAVLRSVKGVGPILAATLLALLPELGTVCRRAIAALVGVCPYDFDSGKFRGQRHIAGGRMHVRNALYMPTLTAIQHNPRLKAFYGTCCEGRNDKKPAVIAAMRKLLTILNARMRDHIAERHDSLKTVKHAA

SEQ ID NO: 157425 - protein, 325 aa, unidentified
MQITTIGLDLAKSIFHVHGVDAHGCERIRRKLRRGELLKFFAKLPPCMVGMEACAGAHHWARQITALGHEVKLMPPAYVKPYVRRQKNDMADAAAICEAVSRPSMRYVPIKSASQQATLLAHRGRSLLIRQRTSLINAIRAHCLEFGLVAARGPANIAALIATIQDDRNPLLPQEARPALLILVEQLHFLNQRIAAMEKEATATRRLDDRVKRLMSIPGIGIITATAIAATVPDAKAFRSGREFAAWIGLVPRQHSSGGKERLGGHIKMGDSYLRRLLISGAQAVIAHSSRRKETAATWLGALIARKPRMVAAVALANKTARIAG

SEQ ID NO: 157426 - protein, 417 aa, unidentified
MPLVRWVGRAIGLDVHRDFCVVAICVDGVVRSAGRVPSTPEGLAMLAESLLATDRVALEVTGSCWEVARILEPHVDRVVVVSPDDTGISSARAKTDKLDARALASLLWKGELEAVWMPDERCRILRRRLARREQLMRARTRVKNEIHACLQRRLQERPPCSDLFGVKGREWLAGLQLPVEERESVDAGIRQVEFLDAEIAAVQRLIAQQALSWPEIRRLMTVPGVNLVCAASFIAAIGHADRFMTSRKLVAYLGLDPKVRQSGEGPARSGRISKRGSASARWALVEAAWSAVLQPGPLHAFYERTRDRRGHGKAIVATARKLAVLFWCMLTRSEDYAHQQPSLTKKKLRRLEITAGAPKYAKAAAGIWHANDMVRDAERELAQQAEISYRRMVADQTAGGPARQRVGASATPERAEI

SEQ ID NO: 157427 - protein, 414 aa, unidentified
MLYIGIDWAADSHTVTLLAASGEVLESLVIENRLVGFLTLLEAVRKHLRKLGPAATSDLVSFAIEDQNQRLTDFLLAQGFQGYLIEPSRMKGYRLRYRSSGNKTDPDDSFILADVLCRDHDQLPRIAPDSDVVRVLKMLLRDRGSFVRDSTRLTNRLTASLRQYYPEALGFFEDVAGKTALDFISAFPDFAAASHLSRREVKRFLVEHHCHRETQLERILTVLGSSPTPVPAVVVRTKRQQALAIIQQLRTVQAAVASYDAEIERLGAENDDVKRFRSMPGGGPIIGAGLHALFGDDRTRFNSAMAVQSLAGTAPKTIQSGQFRTACFRFGCNRFYRMLLQQMAFGALRSSVWAKQYYRGKRKEGKTHQHSLRCLANLLLKIAYAIWRDRTEYCEDRHLAQIMRHHLRPTSNTV

SEQ ID NO: 157428 - protein, 343 aa, unidentified
MHIHSVGIDLGKTTFHLVALGDKGKVLLKKKFTQRQLITFTANLQATLIGLEACAGAHFLGRALRGQGHDVKLIPAQFVKPFVKSNKNDFLDAEAIAEAVGRQNMRFVPIKTDDQLDLQALHRVRDRLITRRTSVINQLRAFLLERGLVFAKSPAKLRERMPEILENAEEDLTPRMRNLLALLWDEWKDLEQQVVDLNHEVELIASSDAACLRLRQIPGIGPLVATAIVASIGNGAAFHKGREFAAWMGLVPKQYSTGGRAKLAGISKRGNRYLRKILIHGARAMVLRCKRERIPMGAWMTALETRAPRNVLIVAAANKLARIAWAVLSSGQDYRAVQEPVAA

SEQ ID NO: 157429 - protein, 373 aa, unidentified
MNYSTVYVGMDVHKESFSLCCYTNEKEQAEYPQKINAHYSKVLNYLEAMRFHYGDDALFICGYEAGCLGFTLYHELTAYNVKCVILAPTSMPVPGWKKRIKTDRRDAAMIARCLAHHDYSPVHIPTQKDEQVKEFIRMRDDHRLALKKIKQQILSFCLRHGCHYNGIQNHWTQTHLSWLRTLHIEGLYQELLEEYLLTYDYLTAKLERIEQRIEELASEEEYRENVHKLTCFLGIKTQTALSVVTETGDFRRFPDACHYAAFLGLTPGEDSSGGNQNRLGITKAGNRHVRMLLVEAAQSFARGKIGYKSSALKARQEGNAPAVIEYADKANERLRRKYYRLTLKNGKKSNVAKTAIARELACFIWGMMTEHYA

SEQ ID NO: 157430 - protein, 328 aa, unidentified
MFYLGMDVAKAKLDCCLLLDEASGKRKTKVVKNTQSGITDLLAWVAKQNVSPEALHIVMEATGVYHEQAAMALADAGVMVSIINPAQVKDFGRGLAVRTKTDGVDSVVLARYGALLKPKAWVPPPLEARVLQALLARHVAIAQDLQRERNRQEKAGATDTPALIHKSLEESIGFLAKQLVQLQKDIDDHIDKHPDLQKDRALLQSIPAVGPQVGSNLLSVMHNHDFGSAEQLAAYLGLVPVERQSGSSVLGRARMSKAGPAKIRAVLYMAAIVGTRYNPHVKAVYERLLARGKSKMSSVGAAMRKLVHLCFGVLKTQQPYQHNYLKIA

SEQ ID NO: 157431 - protein, 349 aa, unidentified
MLADELDYVVGVDTHLDEHVLAVVAAPAGAVVARRAVRASARGYREALRFAEQNAAGVRAWAVEGAGHYGAGLARFLSGHGEPVLEISRQPRGERRLRGKDDSLDAIRTARAALASETLALPRSGERREALRLLLIARRSAVDVRREALVQLRSVIVTAPERLREELRGLPAQRLLERCSRLRRSSSGSADEVATRLVLRSLARRIEAVTAEAAELERELLGHIRALAPQLLDEPGVGPIVAAQVIVAWSHRDRLRSEAAFARLAGVAPVPASSGQTTRHRLSRGGDRQLNRALHTIVLHRRQHDAATQDYIARRIAEGKSRRDATRLLKRYLARHLYRLLQHTEPLMA

SEQ ID NO: 157432 - protein, 374 aa, unidentified
MPPVSQQRKKRKVNEKKLNHLGIDVGKRKCRAALKDDRGKILDEFFFGNNSDGILELIKRIHNHRMKKCNAVLESTGNMWMRIHDTLEDNGIDTILANTFKTKIITQAKIKSDKLDARILSDLLRTGLISESYVPVKEFREKRSLVRHRIVLSRTKTKLANKIHAILDKYEYRTELTDIFGIHGIEWLKILSVSPIDKIILDTTLASIGSIDNQIQIISKEIARYAWHDSKDVKILLSITGIDIFSAMLISTEIVDIKRFVTPWKLVSYAGLAPSIRESSGKIKTGRITKQGSPLLRWILVQCALSAIRYEHHMRTFYERIKQRKGHGKAIVATAKEMLVIIWYMLTRHQLYKYINISRYEQKLERLKKIGSQR

SEQ ID NO: 157433 - protein, 393 aa, unidentified
MVYVGIDVAKDKHDCFIVNSDGEVLYDVFTIQNDMDGFEDLLFKIKTASRDLSKVKVGLEATGHYSCNILGFLHNKGLYTIVINPLYTSLSRKSVSLRKTKTDKVDARTIASMIMSDVSLKPYSDTVYHNEDLKSLSRYRFDKVSDRSKLKQSVSRLVNILFPELEKLVSTLHAKAVYALLSEFPGAHQVASANLKHLTALLSTASKGHFGREKANEIREAARRSISSYLPAKSLELRHTIKLIHELNAEIAEIETEIKKIMDSIDSPTLSVPGISYALGSVIVSEVGDFSRFDNPDKLLAFAGCSPSTYQSGQLYSTHAKMEKRGSKYLRWALLNAAKYVCKWEPTFAVYLRKKLAEGKHYNVAVSHAAKKLVRLLYHLETTGEKYIPQTLS

SEQ ID NO: 157434 - protein, 355 aa, unidentified
MNDAKYIGMDVHQATISVAVLDSAGTLVMEAILETKAETILQFIRGLRGSLHVTLEEGTCAAWLHDLLKPHVAQVLVCDPRKNASMKAGNKNDRADARHLAELLYLDKLSPVYHGETGIRPLKELARSYLALTRDTTRVMNRLKALYRSWAIPCAGQRVYAPRYRSEWLAKISEAGVRRRAEIYYQQLDALRSLREQVRRDLLAEGRKHSAMKLLRQIPSIGPIRAVLLIALMQTPHRFRTKRQLWAYCGLALKTSTSGEYRIVEGQLKRSKKFLAIRGLNANHNHDLKNIFKGAATRAAAVPGPFQEFHAGLVARGMKPTMARLTLARKIAAITLIVWKKGVGFDAEHLKQQAA

SEQ ID NO: 157435 - protein, 409 aa, unidentified
MQNRDSDRNVTAIGLDVHYKFSSVTMRNKAGNVVTRERLDHPDREALRRRLSQWPKGVPAVLEASFGWGWLSDEMSAVGIDAQLSNCFKVEQMRKARGGAKTNAKDADLLSLLPGESDAWWRIWRAPPEVRDQREWMRYRADLVNVQTQTKCRIHAVFHRYGIFYDVSDLFGGKGRVFLAALCREGRHAGGQLPPGALAALRGQVRLLDHLRTQLAQIGVSLRRALSRDALTRRLTSIPGFGLILSHVVQSEIGQMERFGCNHNRLASYSLLGPRSMDTGEPDPTRTPLGRHLGHHGNRTLKWAFIEAAHGAVRRGGRFGAMFDRVTKGGTKDRNRGYIRVARELVKVLTAIWKNGTEYQEAPPVRPGREKSATPFTTPGPRERMETFLGSTRSETGQRYRPMVHAVQA

SEQ ID NO: 157436 - protein, 350 aa, unidentified
MNAVHYIGFDVHKKSVSFCVKTAAGEIVEEGVVAAQRESLRQWASARRQPWRGAMEASLFSAWIYDTLQPYSEQLEMAHPAKMKAISAGKKKSDTLDARTIADLVRCNLLPACYVAAPRIRELRRRLRYRSLVVSQAVRMKNKMAGLLMETGAVYVKEKLHRKKYFSRLLEELEEVPESVLDLLRLSRGALEMFESTQQRLVRELLADPELTQRVERLMTIPAVGEITALTWALEVGDPQRFRSASDAMSYCGLTAALKSSAGKQQRGPISKQRNHWLQTTLIEAAKLAPRWNPPLAALHARELERGHRNRATLAVARKLVAYLLAVDKSGQPFQCTSRRKWQDKKLPEK

SEQ ID NO: 157437 - protein, 459 aa, unidentified
MRILGIDLAIIAKHRGILADERGRFIGHLVKFRTCQADLERVYAWARQGMASEEMLAVVLEATDIVWYPVAVFFQQRGATVYLVNPRMAADLARFYQRYAKSDRLSAQTLARLPVVNPDSLYPWARLEPAYLALQRGCKELDRLTEQASAIRNRLQSTDHLGWPDLHQRVFAAPFSPAARWFRDHFYDPRRVLEVGASGLRQAWRAAEVYDGDEDWIEPLLTLAQEVLALYGAEGECLDYQALAEEVQREQRRLANLEADAHFVRLQVTRPRYRRLHPSRNLETIKGVGQDGAAVYVAFVGAPERFATNRAFRSWSGMIPVSDQSGEEEGKGLRITQAGPDLIKKYAFLGAETARQRDPQIAAIYHDQMVNKGKHHTQAVCVCATHLLDRIRVILTEDRPYELQDVDGTPVTPQQAQTIIAEHYTVPEEVRQRNTRRARRERRERKEEKKEKSPRQIRG

SEQ ID NO: 157438 - protein, 339 aa, unidentified
MVLYAGIDLHSNNSMIVVQDEQDNVVGRKRLVNDLATVCEWLKPYREDLAGVVVESTYNWYWLVDGLLEQGYTVHLANTAALQPYDGLKYRDDAADARWLAKLLRLGELPEGHIYPQKERAIRDLLRKRSQLVRQATMNLLSIQNLYARNTAASMSANRIKEMTADEVDAGYEDANLAQAIKSSLVVLNCLQEQIAVVEKVVLGQVALRKGYQRLLKVPGIGKVLAMTIMLETGDIGRFASVSNYVSYCRLVGSSHLSNGKRKGSGNIKNGNAYLCWAFIEAANFAIRHNETIRKYYQRKQARTKRIVALKAVAHKIARACYHVVKEDVPFDIRRAFGC

SEQ ID NO: 157439 - protein, 413 aa, unidentified
MEVLYPHCAGLDVHKDTVVVCVRHMVNGTVSREVRTFKTTTKELLALSEWLATEGCTHIAMEATGVYWKPVWHILNDGDFALVLANAAHVKNVPGRKTDVNDATWLADLLAHGLIRGSFVPDQQTQEMRDLLRTRKQLVREASRHIQRLQKTLEDANIKLDSVISDVMGLSGRRMIEALIAGQSDPEELAQLAHRRIKASPEELREALRGRLTRHHRFLLSLHLQQIDAIDAAIGAIDQEVDAQIEPFRTTVHLLTTIPGVDELSACVILAEIGRDMSRFPTAGHLISWAGLCPRNDESAGKRRSTRMRKGAAWLKTTLVQCAAAAARKKASYLQALFHRLRARRGAQKADQIEQGHRFALQGMDNVLVIDDVAVFAAWLRAPPAQAHQRRRAEKAFQPIVVKPHPQAMADQP

SEQ ID NO: 157440 - protein, 353 aa, unidentified
MKDKRDYTGKTIFAGIDVHKKTYSVVVVCDKEIVKRDTLCAMPEALRSYLQKHFVGAKINSAYEAGFSGFGLHRHLIEHGINNIVVHAASVEIGARDKVKNDKRDALKIAVQLEAGRLKGIFVPSIEMEDRRELTRLRSTFVQDRNRIATRFKHKAHYNGLIGPDDYQRVSGEWIKDLLSKDVRPGLQYTIITLAKEWHGLNDKIKELEILLEEQAKNDENLELVYRSVKGIGKTAARILANELGDMSQFPSERDLFSYTGLTPSEYSSGEHTRKGHISRQGKPMLRSTLVQCAWVAIRYDENLKEVFERISKRAGAKRAIVAVARKLIGRIRACFRAGKLYQSQEVPSKAVA

SEQ ID NO: 157441 - protein, 408 aa, unidentified
MNTLYVGIDVSSKSNVVYLMLPNGDKHSNFSVANSHEGSTLLVKKIYSALTSHSLDTVLIGLEATSVFGDNLVYFLREDATLAPFNRKIHVLNPKQVKKFHDTYNDLPKNDYVDSFVIADCLRFGRINKEVYMGDYRYKALQNLTRARFFAVQNLVKEKQRFMNVLFKKYSTMTQEKVFSDTFSTTALAVYDEFESAEALANMDLHELTDFIIEKGKNRFPDPDAVAKAIQKAARSSYRLPKTVNDSVNQVLSISITSMKALESQIKEFDKAIATQMELLPNVLISIPGIGPVYSAGIMAEIGDINRFNSQAALAKYAGLAWKQHQSGDFESEVTRLIPSGNRFLKYYLCEAAFSLVRCDKEYSDFYHLKYKEVNRCQHKRALALTARKFVRLVFTRLKDNRLYRPAE

SEQ ID NO: 157442 - protein, 412 aa, unidentified
MDAIVESCAGLDVHQETVVACVLRASLDARPRPQSRTFGTTTRELLELADWLVEQEITVVAMESTGIFWRPVWNILESHDFNLILANARQVKNVPGRKTDQRDAEWLAQLLRCGLVQRSFVPAVEQRDLRDLTRRRRALLQELSAEKNRVHKVLQDANVKLTSVVSDIFGVSGRALIAALSRGEEITADSVLALVKSNLRSKVPALMAAIDGRIRPHHLKMIGFSLEHIDFIQRQVSTIEEVIETRIAAPFRDARELICTIPGIERSAAIEILAEVGTDMNVFQSDAHLASWAGVAPGNFESAGKSKSGRTAKGNRYLKSALVQCAWSASRTKDTRLSGRYRRLVRRLGRDGKKKAVVATAHTILRIVYFVLSTGRPYLEFGPDYGTASAEVRTRRLVSQLERLGYSVTKAA

SEQ ID NO: 157443 - protein, 401 aa, unidentified
MIDIRDVAVFLGLDVGKGEHHATGLMPDGRSVVDKPLPNSEPKMRAMLDKLTAKYGRVLVVVDQPASIGALPLAVARDAGCEVAYLPGLTMRRIADLYPGEGKTDARDAAIIADAARTMPHTLRSIELTDETIAELHMIVGFDDDLAGEVTRVANRLRGLLTQIHPHLERVLGPRIQHPAVLTLLEQFGSPKAIRKAGRRRLITLLRPKAPRMAERLVEDIFTALDEQTVVVTGTDAAAVIVPKLAKNLAGLLDQRKELASDIEELLKSHPLSELLTSMPGIGVRTGARILIDVGDGTAFPTAGHLAAYAGLAPVTRRSGSSIRGESPSRRGNKHLKRAFFLAAFASLSDPASRAYYERKKAEGKRHKQALMCLARRRVDVLFAMLRDGTFFEPQAVPQTA

SEQ ID NO: 157444 - protein, 403 aa, unidentified
MNNTPQLCVSVDIGCRQHSVAIGLPNGDLLDEFDILHRPEGFKQFFDRIDHHCRQHGKEVAVAMEGYNGYARPLDSLVKMRGYQLYNINNLKLARFKEIFPAAAKTDRIDACKGLELFQLRDHLPLAKDVLQEVMPTPQENDMLKRLSRRRRALVNEKSRLQGRLQTDLHAVCPGLLDITRNADNLWFLRFIASVDELTKLSRLRLSTLNNIPSVGHKYAAIIKAWQPNALFSHEVEWVGEMIIADAQRILALKAEIKALTLRCEILIGESQAAQLIDSIPGFAVICASELAGEIGTIDRFASERSLALYLGMANLDNSSGKFRGSKAPKHVNKRAKGAMMTAVDRHRKCVPESQRYYEKKRTEGKLHNQAIRALGRQLCRIIFRMLKQNRTYEIRQDNEKNA

SEQ ID NO: 157445 - protein, 344 aa, unidentified
MNKLSRVGIDLAKNVFQLHGVDRHGKAIWRRRLTRDKWLRVLLENIEPGSEIGMEACAGAHHWARQLQAKGFTVKLIAPQFVKPYVKSNKNDANDAEAICEAMSRPSMRFVAVKTVEQQDIQATHRIRSELIGQRTAKGNQIRGLIAEYGLVAPIKMARLRAAVPAWLEDAENGLTDRFRGLLSGLWNDLITLDRRVTELDHEINMIAQSDPVAKRLQQLRGVGPMVATALVANVGNAKQFSNGRQMAASLGLTPKQHSSGGKDRLLGISKRGDAYLRSILIHGARAVIQTAKLKDDRLSQWVTSIAERRHPNVAAVALANKTARIAWAMLKYDMDYDPDYIAA

SEQ ID NO: 157446 - protein, 344 aa, unidentified
MSKHSVAGGDVAGMLARFAELSRKVVARTGQCFPIIVIQEAGLDGFWIHRVLEASGIESHVVDPASIATSRRRRRAKTDKIDGEALVRALLAYKRGEPRVCAMLRVPTPEEEDRRRLSRERKALTNERVRHVNRIKGLLFGQGVSSYEPLHRDRRKRLEALKTGDGRPLPAHLKMQVGRELDRLELLLEQIKAVEAARDAMLAAAQEVVSPAPAMLLNLKGIGPEFAAVLWSEGLSRHFDNRRQVASYAGLAPSPWQSGAVDHDQGVSKAGNPRLRTTLIQLAWLWRRHQPRSALTLWFEDRVKHNGGRLKKTTIVALARKLLVALWKYVNAGVVIEGAIMKTA

SEQ ID NO: 157447 - protein, 371 aa, unidentified
MNSIVYVGMDVHKESYTLCCYCYDTDKVEYKQTIPSDYKLILKYIESMRRVYGEDATFVCGYEAGCLGYSLYHQLKEHVVDCKILAPTTMAITNTNRIKTDKRDAANIARCLAFHTYSEVYVPDDEDNSVKEYIRMRDDQKLMLKKIKQQILAFVLRQGKKFEGGKTYWTIAHMKWLKNLDLKGVAKETLSEYLVTYEYLVEKIERLDNRIEELASLEKYKEKVKNMGCFLGIKTHTALSMIVEIGDFNRFEKAPKFAGFLGLVPSEDSSGDDKNRYGITKAGNSHLRRLMVEAAQSYTRGTVGHKSIALKQRQQGCSADVIAYADKANERLRRRFYKMTLNKGINRNVATTAIARELACFMWEMATGNIS

SEQ ID NO: 157448 - protein, 352 aa, unidentified
MHTQSNKLDFSGQNFYCGIDIHKKTWAVTIETDDISLKTFGQESDPDFLVRYLKRNYPGGNYLLGYEAGYFGFSLQRYLQSQGIKCLVIHPSDIPTTHKEKEQKRDPLDSRKIARVLRTGEVKSIWIPPVSQEQDRQLLRIRRTLSKDQTRIKNRIKALLKIHGIIYPEVFSNYRSHWSRRFINWLEGIELEEASGTESLQCYVRNLKYIRNEILIISQKIRSLSLKKRYHTAYSRLIELPGIGALTAMIILTETGTIKRFSNVDSFRSFIGLVPRSHSSGEKDYQGRITNRKNNHMRTLLIESTWSAIRKDPYYLHVYNSYKHRMKPNKALIRTTRKLANSIYYLLKDLDY

SEQ ID NO: 157449 - protein, 347 aa, unidentified
MQFYTQQHKHYCGIDLHARMMYLCILDASGAVRLSRNIECTAQAFLSAVKAFRDDLVVAVECMFTWYWLADLCQREGLAFVLGHALYMRAIHGGKAKNDRIDAHKIAALLRGGMIPQAYVYPPTMRATRDLLRRRCHLMRKRAELIAHIQNTISQYNLPPFEGQIRKAHDRAKLLAHFPDPQVRNSVALDLALIDEYDALLPKLERHIRACAKEHDGKAFTLLRSIHGADLIIPLLILYEIHDIRRFPRVQEFMSYCRLVKPTRESAGKIQGHAGGKIGNAHLKWAFSELATTFLRSNPRAKALHERLKKQHGKGKALSVLAARLGRAVYYMLSRGKVFDPDKFFQH

SEQ ID NO: 157450 - protein, 354 aa, unidentified
MKKLFIGIDFAKEKFDAAIIDAIGLKEFGDRQFGTFPNDKKGYRQFLKWVKSHSGNSTETEWLFCGEDTGQCSQGLSKWLYGKGLDIWIESPYAIKHSSGIQRLKTDKADASMIAEYGWRHQDKASLFRPLSESLEQLREVFLYRHKLVHQRVAMEIRDKGKESEENSRGLSFIRRKAKHLIAELDRTIKECDLMIDRIIESDEELSANYKIVTSVKGIGRQNGACMLIYTNNFSRFDMDARKIACYYGVAPFAKDSGKSIHSPARTSHFANKLIKSLLTQGACIAKMFNPEIRVYYERLIQRGKHKSVALNNVKNKLLRIIVALVRDKATYDPKTFQFYQQRWKEKNEEPFAV

SEQ ID NO: 157451 - protein, 410 aa, unidentified
MVIWLTHIQGRQNDRIQRLRIRPVFIGVDVGKDTHHAVAINRSGKRLFDKALPNDENKLRSLISDLKQHGQILLVVDQPATIGALPVAVARSEGVLVGYLPRLPMRRIADLHAGEAKTDARDAAIIAEAARTLPHALRTLKLADEQIAELSMLCGFDDDLAAQTTQASNRIRGLLTQIHPAPERVLGPRLEHPAVLDLLQRYPSPEKLASLGEKKLAAQLCKLAPRLGKRLAADIAQALAEQTVVVPGTNAAAVVLPRLALQLITLRKQRDEVALEVEQRVLAHPLYPVLTSMPGVGVRTAARLLTEVACRAFASAAHLAAYAGLAPVTRRSGSSIRGEHPSRRGNKALKRALFLSAFAALRDPLSRAYYTRKMSQGKRHNQVLIALARRRCDVLFAMMRDGTFYTPQGS

SEQ ID NO: 157452 - protein, 372 aa, unidentified
MTDHSEAFVAIDTSKLRNAVAIAEAGRSGEVRFLGEIDNTPAATAKLVRKLAAQYGRVAFCYEAGPTGYGLYRQITGLGHECIVVAPSLIPKKAGDRVKTNRRDALAMVTQFRADGLTAVWVPDPRHEAMRELTRARGAAVEDLRRKRQQVSAFLLRLGRHYPGDKTWTKAHMNWLASQKLEHAEQRIAFEEMMLAVRQAQERVARLEAAIRAAVPEWSLAEAVDALMAMRGIDLVSATAFLAEIGDLSRFHTPRELMAYLGLVPSEHSTGDTVKRGPITKAGNRRARRTLVECAWSYRHPPRVGRKKQDKVAAAPRAVREIAWKAQNRLYGRYRALARRGKLKTVIVTAIARELAGFIWAINREIAPAVTR

SEQ ID NO: 157453 - protein, 347 aa, unidentified
MKKHSKTQEKIPVETIGIDLGDKMSRYCIVNQGGQIVEEGSFRNQVSSLEAHFSGESRRIAVEAGAQSAWIRRELKRLGHEVIVANARELKWITASDTKNDPANARKLALLARADVQLLAPVEHRTSEQQAELAVIRARDAILRTRTLLINSAVSPRDSVRDCRSRSQRRSDNAPWWICPRLAALCGLLQQIDALSQQINNYDQQVSALAEQHAEVKRLESIPGVGRLTAMTFVLTLGRAERFVHSRDVAGFLGLRPKQRQSGARDPQLGISKSGNPYLRKLLVQCAHHVLGHLGKGFGPAPLGLAKGEGGKKATLRAIVAVARKLSVLLHQLWVSGEFYKPFPQMA

SEQ ID NO: 157454 - protein, 315 aa, unidentified
MYYLGIDVSKKTIDCCLISDSIFYERRFDNTEDGFRRLDDWIQEYTAEAVHCCCESTGIYHEAIAAHLRQKHTVSVVNPSKIKGFREAEQTRTKTDRQDARLIAEYCLRMQPKEWQPPTEEQEYLQAITDYIARLKQQRAAEQTKYQTASDTIRHHIQTTIDHLNRLIETVQNELKDFYRQNPIYNEKKNRLKTIDGIGDFAASALLAKLTRYDFANQNQFAAYLGLDPKIKDSGTSVKGKPRISKQGQKSARKALYMPALVAYRMNAFPAFTARLKARGKPPKLIIVAIMRKLAVIAYQLYKTGKDYDRSRYRN

SEQ ID NO: 157455 - protein, 339 aa, unidentified
MQLYAGLDLHSRNTYIGIMDKEFKRVFGKRVLNKLPMIIKTLAPFRDQLKGIVVESTFNWYWLIDGLMDAGYQCVHLANPSAIKQYEGIKHTDDQHDAFFLAQMLILGILPKGYIYPKEDRPVRDLARKRLFLVRHKTSHILSLQSLIARCCGQRVSANQIRKFTVEDLQQLLREDHIVLSAQANLDTIVFLKEKIQQLEKAIKKKVKLNKAFEQLRTVPGIGLILAMTIMLEVGDIGRFAKVGNFASYSRCVSSRRLSDGKSKGHGNRKNGNRYLSWAFTEAAHLSRRYNAYFRSYYNRKLAQANTSLATKALSNKLARICYYIMRDQVPFRKGLLSH

SEQ ID NO: 157456 - protein, 319 aa, unidentified
MQSKLTFGMDIGKNEVVVACHEGAFAILKMANAVAGLRRWLATVPAGSRLGLEATGGYHEPVAELAYSLGFTVYILNPKDVHFYARALGARGKTDRLDAQIIAAYVAEHCARLHPFTPLSADEKLLRELARRRATLVNAKSMLQQSLRVLPGFEREGRELLRAMGSFADRLERKLAQIAARSSERATLVKRPQTIDGVGTLTSIRCATLFTRVPLHSSDAAVAFFGLDPRPNDSGQHRGRRRLSKRGPSEDRRLLYNAAMSAIRTPTWRPLYQHLRSRGLASTEAIIIIARRIVRIAFAMYQNHSNFNPRLVPRPYCPA

SEQ ID NO: 157457 - protein, 393 aa, unidentified
MERPMLQLNDLSRSFAALDQDSTLVVVIEMGLSHWLVAGMVPGVERQPLKKMKADEHELLKVLGRWRDEAAAAGREITRVVAAYEAGRDGFWLARWLRERGVEAYVMHPSSVAVSREHRRPKTDRLDTELLMRSFLGWLRGEKRHCSMSAIPTIEEEDAKRPNREREKLIADRTRIVNRMKSTLSRFGIRSFKPTLRKAEQKLSELRTAEGTLLPENTRAELRRDMARLRIVRDQIKEIEQERLRKLEAAAVAENGPHSMIRLIARIVGVGVETADMLVNEILTRRLRDGKAVARYAGLTGSPDESGRRRREKGLARAGNARVRRGMIQLAWRFLTFQKDSALAQWFRLRAADGRSGTRKTMIVALARKLLIALWRMTRTGEIPEGVKLRPAA

SEQ ID NO: 157458 - protein, 421 aa, unidentified
MKSTIPTILAGVDTHSTTHTLALLDEHGRVTDTETFNADPKGYERLIAMIGGPALCLGVDVEGTNSYGAALSRRLAAAGYTVHEVLRPKRSVRRSDGKSDPIDAIAAARSVLAGDGISTPKASDGWCEALRHLIAAREQLVTSMTAISNCLAGLLTTAPEGIRERYRSLPSKRRIGKLAACRPSGGIVERNVLSSLKTLASSWRELRDRADVLECRMRQIPEENARPLLDVYCMGTMSAAQLAVIGGDNPERIRSEAAFSKLCGACPLPASSGKTNRHRLNRSGNRQGNRALYNVALVRMSHHQPTKDYVVRKTKEGKGKLEIMRCLKRYITREVYRALIAIRNGEAGREPAVERGARLREVRVSLGKTQQQVGDALGVPSSRVSEIERGVRDLPELERQIIEWMDSILGQSQHSNTFDNV

SEQ ID NO: 157459 - protein, 368 aa, unidentified
MDIIAYVGLDVHKATVSVALAEAGRGGEIRQLGVFENRPALLTKLAARLSKGGRRLSFCYEAGPCGYGLHRLLTGCGHDCVVVAPSLIPIKAGDRVKTDRRDAMMLAKPHRAGELTPIWIPDAAHEAMRTWCAPERRRVLSKARQHLQGFLLRHGQIYQGVRAWTLAHRRWLTTVRFAHPAQQIVLQDYIHAVQDAEARLGRLTRQIAELLPSWSMAPVVAALQAMRGVALVVAVAVVAEVGDFRRFANARQLMAYLGLVPSEHSSGTSIRRGGITKAGNVLARRVLIEGAWIYRLPARVSRKLHDRNQELSPAIRDIAWKGQIRPCSRYRRLAAAGKPKVVVTTAIAREMVGFIWAIARIVQPTLQG

SEQ ID NO: 157460 - protein, 364 aa, unidentified
MKDSTFWVGMDVHADSVVVSVFSAKGSEPVERFEVVPDDRGLARLVKRLKARGSKVRCVYEAGPCGYEPQRLLASRGLICEVTAPSLIPRRPGDRVKTDRRDADRLGRLYRAGELALVAVPDPKLEALRDLLRAREDAQEDLLRRRHRLSKFLLRHGHRYRDGQNWTQRHWVFIRSIRFQDAHAQAVLEEYVMAVEEQLEQIRRFDRHIEEASQRPEHAAKVDRFKVLRGVGTTTALTVLSETGDLRRYPKASQFMSATGLVPSEHSSGSQRRQGAITRTGNAHLRRVLVEAAWHYRHRPTPSPAIRRRRDGQPEPVLAIARRADSRLNGKFRRLTGRGKRSTEAAVAVARELAGFVWAIGQIS

SEQ ID NO: 157461 - protein, 427 aa, unidentified
MGARDTVQEPGFVAFVGIDWADQKHVWSWQNADSRQHESGELEHRPEAVEAWVGERCRRFGYGPIAVAVEQVKGALVYMLRKYECLHLYPVPSTMSASMRAALYPSGAKDDPRDADLLLELLVLHRNKLRRLTPDNEATRRVQNLVEERRKLVEEKTAQLNRLTGYLKVYFPQMLEWFAKLDTKLVCDFLERWPSLEELQKVASGEVKKFFRHRRGRHGELTEWRMEGISQAMPAIRDRGVIEAKQTVVQVIAQLLRTLREGIATLDRKIAEAAEAHPDFFIFQSLPGAGAALAPRLLAALGSQRDRYGSANEVQKYSGIAPVTERSGKRKWVHFRWACSKFLRQSFHEWAGHSIGQSVWARAYYQQQRERGNEHHAAVRALAFKWIRIVFRCWQDRVAYDESRYLAALAKRGSHLTSACAAAAVSM

SEQ ID NO: 157462 - protein, 339 aa, unidentified
MEITAIGLDIAKNVFQVHGVDCRGEVVIRRQLRRRQLLPFFKRLPGCLVGIEACATAHHWGRQLIELGHEVKLMPPHYVRPYVKRGKNDAADAEAICEAVTRPTMRFVAVKSAEQQSVLMLHRTRELMVRQRTMLVNAIRAHMAEFGIVAPVGIPRVKELLAVIADAEDDRLPPIARACLEALARQFMSLHEEIALAEKRIHAWHRSNETSRRLETIPGIGPITASALAASITDPRVFKSGRELAAWIGLVPRQNSTGGKERMGRISKQGDQYLRWLLVAGAMSVIRHARSKDPASMPWLAGLMERRPLKVAAVALANKIARIAWVVLMRGETYRPAAL

SEQ ID NO: 157463 - protein, 339 aa, unidentified
MQVTAVGLDLAKNVFHVHGVTDDGYIAFNKPLRRSMVLGFFARLSPCIVGVEACASGHYWARELSKLGHNVRLMPPMYVKPYVKRGKSDAVDAEAICEAVTRPTMRFVEIKSEEQQALLSLHRARDFVVRQRTQLINMVRSLAAEFGVTIARGVARAIDFAKGLIDSEQSQLPDLAQDVLRVLSRQLVELHNRLRWYEITMRSQTRLNRQAQLLQTIPGVGPVTASAVAATIGSGHQFRNGREFAAWLGLTPRNHSSGGKERLGKITKMGDRYLRQLIVVGMTSRVRQVTSHPERADPWLADLLQRKPARLATVAMANKTARIMWAVLTRNEPYRQHAA

SEQ ID NO: 157464 - protein, 314 aa, unidentified
MALHLTFVGIDVSKEWLDLWLAPLKRFERVSNDAAGWAGVIELLKPLGIEAGIVVAFEATGGYEQGLRRALLEAGFDVRRLNPLRVRLYAKSLGRNAKNDRIDARIIARYAEAADTTPEILDPARERLAELVSHRRRLVDERVAVSNQTATLLCGLLQAQNRKRLTLIERQIEETDGLILEAIGQIPSLLAKVALLKTLKGVKDITAIALVALLPELGRITRRAIAALVGLAPFDHDSGKFNGTRSIAGGRAGVRTALYMAARAAARSKSPLGDFYKRLIAAGKKPKVATVALMRKMLVMLNAMIRDDHGWKHA

SEQ ID NO: 157465 - protein, 366 aa, unidentified
MEQITRGEIVRVGIDLAKHVIQVHAVDSAGRVVAAKALARDRFTAWCVQLPPGCVVAMESCGGAHHWARRLITMGLEPRLIAGHFVGPYRMQGKAGKNDANDAAAVCEAASRPSMRFVPVKTAMQQGQLAVHRLREGYKEERTACLNRIRGLLTEFGIVIAQSPEALRRVLPEVLEDASNELPSLARMALQRAQLQWAELDCHIAWCDERILAHVRDDEQAKTATQLCGIGPVTASALVASVGDFKQFKTGAQFSSWLGVVPSQNSSGGRSRLGGITKRGDDYLRTLLIQGAKSAVMTAHKRRDRISQWLVQLVARVGWQKAVVALANKNARILWAVLVKGRRFDANHVSVKSDVHSLAAIPTIAR

SEQ ID NO: 157466 - protein, 320 aa, unidentified
MKMIQHSILTAGIDTAKHKLDVALQGRDRVVTFDNTKEGIAKLAHYLKAEGAGRVGIEATGGYERAAVRYLQAQGLTVAVLQPLQVRAFAKMRLQRAKNDRIDARLIAACTHLLDATDKMPPDPRFDALADHLTFIEQIEADVVRIQTRMEHVHDARQRKLYDGDIKRLRKRAAAERRRLEAEVRAHDDLARRLDLVHSIVGLGEPTALCIVVRMPELGQVSREQAAAIAGLAPFVHQSGKFAGQTHIGGGRARLRRALYMAAFAASARWNPALMALYKRLRARGRSHKAAVVACARKLLIYANTVVQRGTPWEDRTAAA

SEQ ID NO: 157467 - protein, 345 aa, unidentified
MEEHTTIAVDLSKNVFEVAVSRESGRVCERRRLSRGQMTRFFSQRPPATVLLEACGSSHHWARQIESLGHRVLLLPPQHTRRYVLRDKTDRADATALLEAHRNEQIAPVPVKTLHQQTLAALHRLRSGWLATRTARLNTIRGLLREMGITIPVGPRHVRPGLTAALSDSSRAVPEALHQTLLSAAGEIRELEERIRAVERQLESMAGGLPAVRNLRTVPGIGLLTSTALVAFVGDPTRFRSGRRFASYLGLVPRERSSGLQRHLGAITKRGDAYLRTLLIHGARSALYAAKRSQQPDRLRRWAIAVQQRRGHNRAAVALANKLARIAWALWTRNTVFRPATAQAG

SEQ ID NO: 157468 - protein, 428 aa, unidentified
MNYNRNSKIRQITEQTLIIGVDVAKHKHVARAQDYRGMDLSKAVVFENSRIGFQTFLNWVHTLMNQHEKRDVIVGMEPTGHYWLNLAYFLTSHDILCVTVNPMHVKRSKELDDNSPTKNDVKDAKVIAQLVKDGRYSIPILPEGIYAELREGVKLHDMMTQDLYAVQAQVHNWLDRYFPEFLTVFKDWTGKAALQLLKLGYLPNEIAKIPSERLLVEVKKVAKRAVGMKRMEQFKEAAKVSIGLQPGTQMAKEELRYLLEKYEYLTHRLDELEKQLSEMVQTIPGAKEMCEIKGIGEMTVVGFFAEVGNLHQYQHPRQIIKLAGLNLKKNESGKHRGKTTISKRGRKRLRALLFRVVMPLSTKNKGFKALHEYYRTRTHNPLTGKQSLVALCSKLIRILFVIGRRQISFSEEKMIQDIPHLKTLQEIA

SEQ ID NO: 157469 - protein, 361 aa, unidentified
MKKLAQHLIAEVPRRQAKVEITIGIDLGDVWSHYCTLNQDGEVVDRGRFRTTPKAIEKWFTDVAPARVAMEAGTHSIWISAQLQELGHEVIVANVRELRAISHSDRKSDQVDAEKLARYARLDPNILRPIAHRTVAQQEALTLIRARALLVRLRTAAVNAVRGLTKSCGYRMPASATTCFAQRSLAVMPPGLAQALGPVLQQIAEMTVKIKLYDRQIQQLGQTEYPETQALLKVHGVGHLTALTFVLTLGSKERFGRSRDVGCYLGLRPRRSQSGDHDPQLGITHAGNAYLRSLLIECSNHILRPHGRDSALRQWGLRLAARGGKQARSKAVVAVARKLAVLLHHLWSTQATYMPFYEQAA

SEQ ID NO: 157470 - protein, 343 aa, unidentified
MKKLKADEQALLRLLHRWRDEATKAGRNINRIAVAFEAGRDGFWLARWLQAHGVEAYVIHASSIAVSREHRRAKTDRLDTDHLKRAFIGWLRAEPDHCHMAAIPTLEQEDAKRPTREREKLVGERTRIINQVKSCLARFGVRGFKSKLRKAAERLEALRTPEGVALPPNTLAELRRDLLRLRVIMDQIKAIEVGRLERLKKAPKARPNAMVRLLARVIGIGIETADMLVHEILSRNLRDRRAVARYAGLTGSPDESGKRRREKGLARAGNARVRRGMIQLAWRFLKFQKDSALAQWFQSQTTNARCRTRKTMIVALARKLLIALWRLVTSGEIPIGVALRPAA

SEQ ID NO: 157471 - protein, 315 aa, unidentified
MGAEVWVGIDVSKARLDVALGAAGELLWVANDARGIASLVARMVELGPELVVVEASGGLQTALVAELGAAGLPVVVVNPRQVRDFARATGQLAKTDALDARMLALFAERIRPKVRPLPSAQELELKALVARRRELVEMITAERNRLGSAPQLLRKEISAHIRWLESRLKERDRDLGRMLRSLPLWREREDLLRAVPGVGPVLCATLLADLPELGALSRHQIAKLVGVAPLNCDSGTMRGRRTVWGGRAQVRAALYMATLAAVRCNPALKTFYLRLRSAGKPAKLALTAAMRKLLTILNAMLKHRTPWSPQCHHVA

SEQ ID NO: 157472 - protein, 335 aa, unidentified
MSIIRIGLDTAKQVFQVHGVDEREQPVLRRRLGRKEVERFFAKLAPTRIGLEACGAAHYWARVLRDLGHEVVLLPPQYIKPYLKRGKNDALDAEAICEAMSRPSMRFVPIKSAEQQAALMLLKTRDLLVKQRTMLSNAIRGHAAEFGVVAAKGLGRVAELLQAAAAEGVPDLALEMLRVLASQLDALDIKLKIIEAKLIAWHKQDPVSQCLATQPGIGPIGAVSFSLKITDPKAFRSARHFAAWLGLTPRENATGGRSRPGRISRQGDEGLRRLLVLGATTVIQFAKPGRAAPWLIGLLARRPRKLAAVALANKMARILWAMMVSGELYRRPQPA

SEQ ID NO: 157473 - protein, 427 aa, unidentified
MKEQSGTIVGIDWSADSHTCYDLKADKSFKIPDSVEGYGKLLNDYPDAVFVIEEANNRIGDYLLINNREVYVLPPCRSKEARKYHFSSGAKSDSLDAKAIALTFKEHPSYCLKARYSGVGAKITKLVTMYNIVSKTHSQQCNRLYSVLLRYFPEYLHIMDKQYRSNTSLRILSICPTITELKKVSNEELRKILNKENYRMTSILRKKLDRIRSEGISWGDTSCEGNLIMFLANQILALRGTAESLRKEMGETLENSPYRIILSIPGVKAVIGSYIVKAYLTHDFRSYQEMQKYAGTVPFLFQSGRKSIMLMRKKCDNDLRSMIHIAAFASLKTCGWARNYYKRKRKEGKTYGHALRALGNIILKIAFSMLSKMKEYDETLFLNAKGIKTTQQNNTTIPEAFTNPEYSQDAHPSLAATKDVVDNLNVT

SEQ ID NO: 157474 - protein, 351 aa, unidentified
MESQQTAYPKLFIGIDIHKRSWKVHCATDLFAGKSFSMPSDPEQLRNYVSKHFVDYEVTTAYEAGCCGYYAHRCFESYGWRSLVVNPADIHRKGKERHTKTDKIDAQLIARELKDGRLESIIIPDKKREELRSLFRRRNDLVKDFRRVKSYIKMQLLYFGIKEPEEFDNDHWSHKYRKWLDDMVFAHPTAKATLDSRMRFFRFVDQELRDVSTQLRRYCKTHYKKDYILLRSIPGIGGIVACGILCELGDLRRFNNIKHLAGYVGLAPSVHQSGANQRTMGMTPRANRLLRSYFVEASWQAIRADPVMQSYYRKHQGKNVKSIIIKVARKLLNRTLAVIKTEVPYTIGVVE

SEQ ID NO: 157475 - protein, 403 aa, unidentified
MNNVAGIDVSKGKSMVSVLRPFGEVVAKPFSIGHTGSELKELADYLKSLDGETRVVMEHTGRYYEPVARFLHDEGVFVSAVNPKLIKDYGNNTLRKVKTDKADSRKIARYGIDNWAELRQHTPMDTIRMQLKTLNRQQSLYAKTKTMMKNNLIALLDQTYPGVNALFDSPVREDGSQKWVDFATAFWHVDCVRNMSLTAFAERYRKWCKRHGYNFSQSKAVEVHAGAQDLIVMLPKDALTKTMVRQAIDALNAVSASLERLKAEMRTLAAQLPEYPVVMAMHGAGDSLGPQLMAELGDVTRFTHRNAITAFAGVDPGADQSGTHEAKSTRVSKSGPPELRRALFLVMDCLLKTQPQDDPVYRFMDKKRAEGKPYLVYMTAGANKFLRIYYGRVKEYLASLEEN

SEQ ID NO: 157476 - protein, 341 aa, unidentified
MEITALGVDLAKSVFQLHGVDRDGAIVLQKKVRRSALLDVLGQLEPSLIGMEACPTAHFWAREIAALGHDVRLIPPAYVKPYVKRQKNDAADAEAICEAVTRPNMRFVPVKSEEQQAVLVLHRSRDLLMRQRTMILNAIRAHLAEFGTITAQGPRKVVDLARRLSDPGDGLDLPALARSALLSLVAQLESLADEIRKIERQLMSWHRQNQASQRLETIPGVGIITATALAASVPDPSVFRSGRQFAAWLGLVPQQNSSGGKERLGRVSKMGNGYLRRLLVVGATSVTRRAPTTDTRTGAWVRSLLERKPTRLVTVAIANKTARTAWALLVKGERYRATPAV

SEQ ID NO: 157477 - protein, 414 aa, unidentified
MESGYRLMVGIDWATEAHQVCVLDRQGRLLEQRRVEHRAEAIAAMTDRLIGLAGGDPASIAVAIEVPRGAVVEALVERGLSVFAINPKQLDRFRDRHTVAGAKDDRRDAFVLADSLRTDLAAFRRVHLDDAWTIRIRELTRIEENLNTEINRLANQLRDLLLRFYPQLLRLCPAADQPWLWALLKLAPTPAKAQRLRRSSIQRLLHQFRIRKWTADQVRTELKTAPLCVAPGVTEATSTHIALLLPRMELLMAQLKLCSKAVQTALDEKIAEEEQRREHRDVEILLSLPGVGRVVAATMLAEASQLLAQRNYHALRTLGGVAPVTRQSGKRLAVRRRYGCNHRLSNAFYHWARTSSQCDPRAKHHYQTLRRLGHSHGRALRGITDRLLARLVAMLRDQTLYDSTRTLTPNPIAA

SEQ ID NO: 157478 - protein, 479 aa, unidentified
MKGKDRRCCGIDVHKKSVTVCVLAPTGQPHMGMKRRKFGTFTRELRQLRGWLKNCQVTEIAMESTGQYWRAVWNVLEGEFEKLVLVNPQHIKGLDGRKTDPKDAQWIAELLEGGKLRGSWVPPRAIRELRDLTRERVNVLEDLNRAKNRIEQLCQTGNIKISSVATDLFGQSGRAMLKAIVEDSRDAGWMADYARGTLRGKKRELELALEGTFTGEQRWLLDRELRQVEWLETQGEVLEREIERRVEPFESAIRRLITIPGIERKTAWTIVAEIGVDMSVFGDARQLASWAGLCPGNRESGGKRMSGRTRKANRYVKRVMCQAAWAASHTKQTYLSAFYRRMRVRKGAPKAAMALAHHLLTVVFHVLSRSEEYVELGGNYYDQRNKAKVTARLVARLTRLGYYVDLRPADRDVSPTAESAPLPDPVEAPSDTDGSPSIPVRRKRGRPCKCAERNIPCKHGTFADPNSLREQPSSPAKFS

SEQ ID NO: 157479 - protein, 412 aa, unidentified
MDRWIERCCGLDVHKETVAACVRVPGAKGRRTQEVRTFGTTTPDLLALQDWLAAHQVTHVAMESTGVFWKPVYYVLEARFTVLLVNAAHVKQVPGRKTDVRDCQWIAELLEHGLLRGSFVPPPVIRDLRELTRYRRTQIQERTRVANRLHKVLQDANVKLSNVTHHVLGVSGRAMLDALVAGTTDPDVLADLARGQLRKKLPALRQALTGRFRAHHAFLLGQILAHLDYLEDAIAAVSAHIAEQLRPFAPQVERLMTIPGVQRRTAETILAEIGTDMAVFPTAGHLASWAGMCPGNDESAGKRRSGKTRKGSKWLRTSLIEAGNAAARTKATALGARYRRILPHRGHRKAVVAVGRHILEISYHLLRTERTYQELGPDYFDRRHAERLQRRCVRQLEQLGLQVTITPAPAAA

SEQ ID NO: 157480 - protein, 355 aa, unidentified
MNTGKYVGMDVHQASTTVVLLDERGKCVMESIIETKAQTIRDLLKGMSGSVHVALEEGTQAAWLYEIVRPLVGEVIVCDPRANKALMAGNKGDRIDAHKLAQLLRAGLLKPVYHGGHSTRELKELVHNYDSVVSDSVRVMSRLKALFRGRGIGSAGRAIYNVKSSDKWVAKISEPGAKSRASFLYSELKALKEIRRDSKKLLLSGSERHQATKLLCSIPGIGPVRAAVIVGTVSTPHRFRTRRQFWTYCGFAVVTRSSSDYRFEGSKVVRDRKRVTTRGLNRNFNRRLKAVFKGAVQQAIKQEPFKSYWEQLKARNVTPAIARVSVARKLAAVTLAVWKSSEKFDVEKYKPSPEL

SEQ ID NO: 157481 - protein, 391 aa, unidentified
MIYIGIDVAKDKHDCFITNSDSEVLFKAFTIFNNLDGFNDLYQKIESVMDDVTKVKVGLEATGHYSYNLLGYLIDKGLPTYVINPLHTNLYRKSLSLRQTKTDKVDARTIASMLMSDVNLKSYSDTSYHNEELKSLTRYRFDKVKERAKLKTSVSRLVCILFPELEKLVPTLHMASVYALLSEFPSAKHVATAHLTRLTNLLSESSKGRYGKDTAITFRDSARASIGSNMPAKSLELKHPIKLIQELDSEIDEIENEIKIIMDEINSPILSIPGINYRMGAMIIAEIGDFNRFDSPDKILAYAGFSPSTYQSGQLDGAYAHMEKRGSRYLRYALYNATKYVCHWDPTFAAYLAKKRAEGKHYNVAISHAVKKLVRVIYHLEKTKQQYIKVA

SEQ ID NO: 157482 - protein, 316 aa, unidentified
MQSILNLGADVDSRTVMVACSAGSFKPHRIANERNAILAWLRTVPRGSRLAMESTGSYHELLADLAHQAGLQVFIVNARDLRRYGQGIGRRGKTDRIDAEVIARYIAREHQELHAYVPPTDAQRLLARLIGRRAKLVRAKDSIRQSLGGLPALQSEARRLIGHIDRVIARLDLLMQRTVQQTPAVREAAGHIVTIPGIGVLTSTCLGHRFTRLPYTTSDAVVAATGLDPRPEDSGQKEGRRRLSKRGPAEERRLLFNCARSAAQRKPWRSYYDAQLAKGLSKTAATVVLARKMLRVAFAVYQHRQPFNPLLVGGGT

SEQ ID NO: 157483 - protein, 331 aa, unidentified
MKVSDVIGIDVSKLTIDVRMHVKQKYGQFENSKKGFDKMCQWVYKNNPIPKEEIMFVFEHTGLYSYNLAVYLNRQGIPFYMASGLEIKRSLGISRGKDDKIDATKIARYAYRLRDEIIPYKLPSQELENLKRLFSLRNRLVKQRAGYKASYKEQKRVYRVKDNTILLGVQEKMIKYLTKQINAIEEEMYSIIKGDEKLLKQYNLITSITSIGSQTALSMIVLTAGFTKFKNWRKFASFSGIAPFPNRSGTSIKGKTKVSHLANKKIKALLNLCAINAIQYNLEMKLYYKRRSAEGKHPFSTINAIRNKLLARIFAVVQREQPYVNFLKFAA

SEQ ID NO: 157484 - protein, 430 aa, unidentified
MMEEVDDAELVVERIAALDLGKAGLEACVRVPSPHRPGRRMQELRGYGTTTAQLLEMVAWLRHWGVQRAVMESTSTYWKGVYYLLEAEGFECWLVNAREVKNVPGRAKTDRADAIWLAKVAERGMCRPSLVHPAEIRRLRDLTRYRRALVQDRTREQQRIEKLLEDAQIKISSVLSELHGVTARAMMDALIAGQRDPRALAQLAKGRARKKTGQLEEALRGFFTDHHAAILRMMLDNTDRISAQIAALDARIEKEIGPFSHQAARLAEIPGVDAVAAAELIAEIGVDMTRFPSDAHLVSWAKFCPQTHESAGKSKSKGRGRGNPWLAGTLGRIAFANSRADTFLGARYRRLARRRGKQKAIVATGNSVLTVVYYLLSDPTATFCDLGPGYYESRINVHRRARDLATQLQALTGQHIVIRDGKAVITDAAA

SEQ ID NO: 157485 - protein, 347 aa, unidentified
MSIVTVGIDLAKNIFAVHGIDETGRAVLVKPKVARDQLSALMIQLPPCLIGMVACSGAHHWARLFRQYGHTVKLMAPKFVTPYRMSGKRGKNDAADTAAICEAVTRPKMRFVPIKEEHQQIILCLHRTRQGFVEERTATYNRLRELISEFGIVLPQKVANLRREIGVHLEALPGYANRCTLWGINIGDLLAHADQLNERIDEYDRTIAQAEREDARSKRLMQLPGIGPITASALLASIGGGHDFANGRQVAAWIGLTPGQYSSGGKARLGRITKAGDRYLRSLLVMGGRAVLSGLGDKQDRFSRWARSLEERRGYWRAVVAIAAKNARMAWAVLKYGEDFRLTPSAT

SEQ ID NO: 157486 - protein, 315 aa, unidentified
MAMPVSVTKPIVGVDVAKNELMIYHAELDLLEAIPNNKAAIQKWLKVLSGPVAVAIESTNIYHLEFADLAYEAGCTIYMVGGYELSHYRKGVNVRAKTDALDARLLARYLKNEGDDLHPWTPPSPLYRQLLSLFRRRAALVQARVGLVQSWANEPLLKSAFAAQVKAMQQLEALVEKTINDHLKEAGLLGQLRRCLKVEGIGFLTGARLLTAFQRGDFRNADAFIAFLGMDLRVSKSGQKDGRRSLTKRGDPEARRLLHNAAMSASRTPAWKGFYEDQRARGFSTTQALVILARKLARIVFALLKGQSEYQPKAG

SEQ ID NO: 157487 - protein, 575 aa, unidentified
MVVFSRSDGPSPPVLLARRHARAERVGRGNIFFGAGTRGGAPRVACPNTSSKVIHGRAERAPTAERSEAVNNFAAANGAAVNNLGQKSFESDLRPGQDSLSRKARGRTRSACPNPARIKPRTPVGPGALVQKSERTTPCEGLRIGTTHDKSQGPRAKKTMTENNTWKEIVHYAGFDWAQDHHDVVVVDPTGKILKELRFEHTAEGWAQWKELVRAYPHLAVAIETSQGAAIEQLLASGVAVYPVNPKSAQRYRERKVPSGNKTDLLDAWSLGDALRVDGHGWRALKPLDPLIAELRLLCRDEVELIAKRTELVNQLRAALHEYYPAALQAFEDWTSTPSWNFVQRFPSPELLQKAGRRRWEKFLHVQHLYRPELNERRLQIFAQAQAFCGSPAVTRAKSRLALALVKLLQALENQLEQYRQEIRRLFNEHPDHELFGSLPGAGDKLAPRLLSEMGSDRTLFESAQALQCYVGTAPVSFQSGQIHQVRVRYMCNKSFRHAVHLWADLSRKCCAWAQIYYAEVRARGKSHAMALRCLGQRWLKILWKIWQTKTLYSTDHHTANQLKHGSWVLQKKAT

SEQ ID NO: 157488 - protein, 349 aa, unidentified
MRHQPTTGATVYGIDLGKSSFHTIAMDVTGKPVQKLTLSRATIFTFFSNAPASIIGMEACPGSQWLARKLEALGHTVKIIPAQFVKPYVKSNKNDMIDACAIAEAVTRPTMRYVRIKTTEQVELQTMHRLRESMMSNRTRLINQGRAFCLEFGVVMRVGVAAFKTTLPQVLADETNDLTPRMRQLLGDLWNDFKLLDGRIVGLTKELDAIARRSEMARRLTTIPGIGSLGATAILGAVGDAKQFDKARDFAAWVGLTPAQYSTGGKTTLLSISKRGNSLVRCLLIHGARSCVAHMDRSKDRLGAWLTALERRMHPNKVIVALANKIARIAWVVLTRQGTLYTPDVATRI

SEQ ID NO: 157489 - protein, 376 aa, unidentified
MNSIIYIGIDVHKNSYSYCAYAKEKDSFFAEHKSEAGSKNAINYIKSVIKTTGSDFPVLIGYEAGPTGYKLCRDLQKAGFPCVVIAPSTIYKPNGPRIKTDRRDARLLAQTLAYKTFKQVVIPSEKIEAMKEFTRARCSKKRQLKKAKQELLSFLLRMGMIYPEKGSYWTQSHFEWLRTVQFKDEWLQLAFEEYFSEVNELMAKVARLDAQIKQMAENSEIKNDVEKLICFTGIDYLTAVSIVAEVGDFSRFSNAKAFSNYIGLCPGENSSGLRVRHTTITKAGNSKVRQLLIESAKSIKYGRLCSAKSKRLIQRQEGKSPLVIQYADMAIARIRHKMLSMERKGLHYNVITTAAARELSCFIWGMMTGNISRTSV

SEQ ID NO: 157490 - protein, 370 aa, unidentified
MATSAADVTVIGGVDTHKHTHYAAAVDDHGRFLGHREFPATDTGYLELLRWMRSQGEVRTIGVESTGSFGATLTRFLTRAGVEVVEVNRPNRLARRMDGKSDRLDAEQIARAVLGRTSTAVPKTKSGVVEVIRTLRVTRASAVKSRTQAFNTLWGVMIGAPSPLRDELVVLTKRTLVNRCLRLRPEADELLSLASEPERILLAGVKTALRDLARRWKALDEEIKTLNRNIEALVRTAAPDLLELHGVGVEIAGQFLVTVGDNPERIHSEAAFAKLCGVAPQPASSGRTTGRHRLSRSGDRAANSALYIITIVRMRHHQPTRDYVERRTAEGRTKREIIRCLKRYIAREVYKNLPPAAEAAPPVEEPRQVA

SEQ ID NO: 157491 - protein, 336 aa, unidentified
MIKYIGLDAHSSTCTFNVTDERGREVDNTTIESNGRLLVKYLRGIEGVKKLTFEECELSNWLYEILRPEVDDLIVCNPVANGDYKKKKTDKMDARKLSNLLRGGFLVPVYHDGSKRERFRSLMSGYQDFIEEGVRLKNRYKSLFRKSGKKVKGEALYNDESFLEGLERADFKFIGTQIYQLLEKMEESRQEYVKEIVRCSKGFKEIKYLKSIPGIGSIQAAKIVSQVIDPERFSSKYKYYSYCGLVRHKRISDGRGYGSEKIWGNRILKCVYKMAGHSVLKGKSGLRNYYDTLRWKGISHDNAYNAVCRKIAAISLSVWRKSEKYNDRLINGNLIK

SEQ ID NO: 157492 - protein, 405 aa, unidentified
MNNNSTSVGRVIGLDAHPDSFTVAVLRGQTPAQVFVEKTFHKVPMAQLQNWAQKHTQNDDLLILEASGNSFQVVRTLRAIGRRALVLESRHLGKLKEAHANNDKMSAVRIGKAYLAGTAREVWVPDEKTQERRDWFHAHRKATKRSTQMRARLRSYLSDNGVRLKKGTTLVQERVVEAQLRKAKEWSVRQWQVIEGMLMELRHAEEQRKHWRSLIAQEVIADPLLLSLVRLCGVRDVVAFALGAIIGDIHRFASPAKLVKYVGLDPALDESGEGRWEGGIGRHGRKDLRALLIEAAQAIYRSKEALAKWGRKLFARKSSLNLVVAAIARKLTVAIWYLLMGRFSVLLEVDSRLKIKAGKILSAVGKNALAQIGKSRKALREEMEHSLTTARVYVLDPNKKFAQCA

SEQ ID NO: 157493 - protein, 326 aa, unidentified
MEHELHYIGIDTAKEKLDVDVLRPDGRHRTKKFANTTKGHDELVSWLKGHKIDHAHICIEATGTYMEPVAECLYDAGYIVSVINPALGKAFAQSEGLRNKTDPVDARMLAEFCRQKRPAAWEAPHPLERALRALVVRHQALTDMHTQELNRTETAREVQRPSIDAHLLGLEAELKRLEKQIKDLTDDDPDMKHRRKLLESIPGIGEKTSAVLLAYIGLKDRFAHARQFAAFAGLTPRRYESGSSVRGASRMSKAGHVSLRRALYMPAMVATSKTEWGRAFRDRLAANGKKGKVILGAMMRKLAQVAYGVLKSGVPFDASRHNPVAA

SEQ ID NO: 157494 - protein, 347 aa, unidentified
MTAPDRSGSSDASANTATRAAGIDVSKASLEIVVLCRDADHKDADRSVSRSIPNTEEEFGKLREWIDREVEVDLEKVHVCLEASGGYERPVARYLHEQNVTVSVVNPRRTSAYADSRLNRSKTDPVDARLLARFCQREEPSSWQPSSSEQKGLKDMTRGLQSLKKERDRLKNQIDRSSNPTVTSSLQSVLESVNEQIDQLEKAIDEHVQSCQTLAQKRELLETIPGIGSTSAALVLAELGDSERFESARQAAAYAGLTPAHHESGSSVHRKPRLSKIGSSRLRKALYFPAISALRCNAAIKAFGDRLAERGKAKMVIIGAAMRKLLHICYGVLKNQAPFDASLHPGT

SEQ ID NO: 157495 - protein, 381 aa, unidentified
MGWTGRAPAPNGYQSRWALRARGAHTIPSKTDTAVARTIGIDTGKNTLHMIGLDEKGAIVLREKVSRIRIAARFVNVPPCLIGIEAGMASHHIARELTALGHEVKQVPPAYSKPFRQGHKNDFRDAHAVAEAVERPSTLCVPIKTDGQLDLQALHRVRSRLVGNRTAVINQIRGFLLEHGIPVRQGHRFLRQQLPQILATRADVLSPRMIRIIGDLIEDWRYLDERIETVTDEIKALARADEGCQQLITVPGVGPIISSAMVAAIGNGTAFCKGRDFAAWLGLVPKQMSTGDRTILGRITKRGNRYLRTLFIQGARAVLLHPTSWARHGFGPWLTTAARRMHRNVLTVALANKLARIAWTVLAQGRRYEARVEPRIEPAAA

SEQ ID NO: 157496 - protein, 341 aa, unidentified
MSEVSIIGIDLAKRVFQLHGACANGAVIFRKKLTRVQLLAFMSQQPTCLVAMEACATAHCWGREIEKLGHKVRLIAPNYVKPFVKRQKNDVADAEAIAEAASRPTMRFVALKSEAQQARAMLFRTRQMFIGQRTQTINALRGHLAEHGVVAPKGAIHVRRLADAVADETIGLPEGVRELAQVYLAQIEGLNVQVAALDQRMKGAAKEAEAARRAQTMPGVGPITALAIETFAPDLNCFRRGRDFAAWLGLVPKQNSTGGKPRLGKTSKMGQRDIRRLLISGAMAVLQAVERFGTPHNSWLIGMLERKPRMLVAVALANKMARGLWAMVTKQEDYRTPATMA

SEQ ID NO: 157497 - protein, 347 aa, unidentified
MNNPSRDSRATVFCGIDVSAATLAVAVIEQDQAAQQREFPNQPAGHKQLLLWLAKCQACVRVSLEATGIYSLDLALALDAAPQVEVAVLNPKLVNRFAQTLSRSKSDAADALVLAQYSQRMPFIPWSAPSSGGLALRTTARHIHALVAQQTHEQNRLHAVKASRTAPRAVVNDLAQALRSLACRIAKMRKAAREIIRADAPLNERYHLLVAMPGIADVSAIYLMAETALLSPELTARQWVAHSGLDPTHHNSGTSVHKRPRISRAGNRHLRRALYMPALAAVRWDPHMKAFYEALQQRHKTKLQALIAVARKILHAIYGIFKTRTPYDGRKLFPRLAIAPELQSASR

SEQ ID NO: 157498 - protein, 480 aa, unidentified
MHGTRKGDKQMASTTFKFSEDMGNMQFYCGLDIHKHQLEVAIFGRDDSGHEFTKDELFSMDPEGLKSFWGFVKPYRPVMFAMEATNVYHHMVALFLDEQKKSAKWTFECMIVPPADAASLPGKPKNDRVDAERLARYVAAGLLHGGKPIVLPLEDLRALFRAAWHLECEMTAMKNRIKKQLDRGGFRPEKLNLDATWVRDFLHGLAGYEGTVGSYFTTCMNDTSTRPISKKLLEKNRSLFERFFDVQLSLAERALVRQEIVELEFKTARKALLAVDVDRIIMVRPALKQLVENVASIPGISMYTATWLVAEIGPIQRYPSVKNFVSYCGCCAREVSSANVVYSAHLTRRSNKHVRTMLFNAAKSVCTIIKGDSALKTYAQRVIARKSLRGPKLSWCIVAQKIARIIYGIMCSNMPFDSTKACNLKKHHDDPGKVLSFADKKTLRRARNALRRVATIDNLKLISLKAKVFADALDDALREN

SEQ ID NO: 157499 - protein, 410 aa, unidentified
MERQVERCCRLDVHRDTVAACVRIGEGPGQRTQQHVQTFRTTAGDLVVLRDWLAAHAVTHVAMESTGVYWKPVYYALESEFTCLLVNAAHIKQLPGRKTDVKDCAWIAQLLEHGLLRGSFVPPAPIRELRDLTRYRKAVIQDRTRVVNRLHKTLEDAGIKLASVASDVRGISGRAMLEALVQGTTDPAMLAELARGRLRGKLPALRQALAGRFRGHHAFLIGQLLAHLDYLDEAIGILSGQVETAIAPFADALTRLDSIPGINQRTAEVIIAEIGVDMSAFPSAGHLASWAALCPGNHESAGKHQSGKMRKGNRWLRTALIEAAAGASRVKNSALQARFRRVLRHRGPKKAVAAVAHALLRAAYHVLADHSVYRELGADYCDRQHSQRVTRRAIQLLERHGYRVTLEPAA

SEQ ID NO: 157500 - protein, 384 aa, unidentified
MRAAEPRPGSDDIIVGIAELLRRSRPRAWQAEGRVFAFEATGHVWEALAARLEEAGERYVIVNPLAVFRLREARRMDRTKTDLTDAEQIAELARTGMVTSTRPLHGPYLALRRAWGEYTRVRFEAARLKILLRQQLFGLFPELLEVWSRVDRPGLLAVVRLGLTPAQIAALPSGEFLARVCAAREGRRLWRAKVAAVHEKAQRSVAPGERLEAAAAEARRIVARYDLLARQLSEVHAEVEALLGEIEEARWLATIPGLGFASVAGIIAHTGPIARYRHGRQLIKLAGTNPTRNETGERLGGYQAMIHRGRAGLRQVTYMATISCLAQNARLRAHYDRLVSRPERPLAKMTALGACMNKLLLWAFAVMKQRRAFELDHEWKECAA

SEQ ID NO: 157501 - protein, 353 aa, unidentified
MMIIGCDFHPSFQQIAYVEQETGEYEERRLSHRGEAEAFYRSLAGRSVRIGVEATGNDRWFHKLMSELGHELLVGDASAIHASAPREQRTDKRDARHILRLLMENRFPAIWQPSAGNEEQRQLLLHRCRLVRMRTRIKNQLDSIAKSEGLTGSRVWKAKRRQQIEALPLTGWYAERRKDLLALLDEMDKLIEPLDKAVQAAAEQNAEAQLLMTHPGVGPVVSLAYVLVLGDWRRFPRGKQVGSYLGLIPSEASSGKHQQRMGHITKQGNTLLRWLLVEAATKAQSKDPSWHRQYVRLSMNKHHGVAKVAIAHKLAVRLYWMLRSGQNYTKIVERGSHAGQSELAGGCGLRPIN

SEQ ID NO: 157502 - protein, 340 aa, unidentified
MFVNYKVMQNFYFIGIDVSKKKLDICVMSNSKVLKEEQVSNHPQAITTVIAGIKEELSMSNDCFIICAEHTGQYTYPLICACKSVGSKLWLENASQIKYCSGVTRGKNDKVDARRIAEYAMRFFDKAKPYQRPIEELMRLKQLEAERSLYLTDLAKYKAQLSDQEGFMEDKIFKRKAKRLKEMIKSLEKTLKEIAQEMADVIYSSEELSRQMRLLKSVEGVGPVVAMNMIIATEAFTRFDNPRQFNCYVGVAPFAYTSGSSQHSRNRVSQRAVKYIKCLLHMAAVAIAHKKTGDLKTYFERKVAEGKNKMTVLNAVRAKLVARMFAVIRNNRVYQPILSV

SEQ ID NO: 157503 - protein, 290 aa, unidentified
MEHYAGIDVSLEFSSVCVVDAQGKIVREVKVASEPEALVAFFASLGFAVKRVGLEAGPLSQWLHAGLKRAGFDTLLLETRHVKAALSAMMVKTDRKDARGLAQLIRMGWFRPVHAKSMGSQEVRALLVARKQLLGRLIDVELSIRGILRGFGLKVGVVTRKGFEGRIRELVTGHITLERIAGAMLSARATLKVEYEKLHKIVLTIVREDAVCRRLMTVPSVGPLVAITYKSAMDDPNRIAKSKAAGALFGLTPKKYQSGEKDVTGAGSRGPAMKWRARRFMRRPMFYWRA

SEQ ID NO: 157504 - protein, 370 aa, unidentified
MRIIGCDLHARQQTLAMLDTTTGELANLTLMHEGNNVREFYSQLPRPVLVGIEATGSMPWFLSLMEELGIECRVGHPAQIRAAEPRKQKHDRRDADLILRLLAESRFPTIWLPSKELLDLRALLLHRHQWVRMRVRMQNALQAIALANGLRRGPSLWSYDGQAKIALLPLLPHTAYRRSALQAMYKTLESEIENLTQQVAEQAGNRPGARRLMTHPGVGPVTALATEVFLGDPQRFTDSKALASYVGIIPREYSSGGQQRLGGVTKQGSPLLRFLWGEAGAHAARHDPELKRFYRRKLVHKGLGKARVAVARKLGIRLWIMLRDEIDYQEFCRRGQMQQKTVRPVAGMPETGNGAKSHRPVDEATRLPES

SEQ ID NO: 157505 - protein, 414 aa, unidentified
MKPASFVGIDPASGDFDCALVRNGVPKILHKKFLVSEDSLNQMIQWVRNDHIEVVAIEGTGGYTAPLERALRNADIPFHTFSAYRVSQYRKAILGEHKNNRKDSMTVAFLAQQLAAQNELDPYRRTWFPDDVLRPLARLYEQKQRECIRETNRLWQIIHGISGELFLALRHPSKGEDQTKGLSREWLLRLLSSYPDIKSWQFFTRERIIREMGEHRKNVIEKMLQLKDITTDIRSLSVVEKMTLQVTASTALALKQAVKSLYHQLEEETEKNIAAKHLKTYKGIGPVISAQIVSEVADITRFPNNNHLASYAGLGRQEFKTGSNRIERSPHLFSRRLKNALMTGARCYTLFNPDSHLTGYYRSLASKGMKPTERYKRVARALVRRFYRDLKLIAAPVESETRYEGKPEPMPAER

SEQ ID NO: 157506 - protein, 393 aa, unidentified
MICVGIDVAKDKHDCFILSSEGEVLADVFTIQNNAEGFDMLLQTIRRCARPEDKIKVGLEATGHYSYNILGFLLDKGLDTYVINPLHTNLYRKSLSLRKTKTDRVDARTIAAMLMSDVDLKSYTDTAYHNEELKSLTRYRFDKVKERAKLKQSVSRLVTILFPELEKLVPTLHMASVYALLSEFPGAKQIARAHLTHLKALLNDASKGRYGRDMATELRDAARCSVGSVMPAKSLELQHTIRLIRELNTEIEDIESAIQTIMEEMQSPITTIPGIGFRMGAMILAEIGDFSRFDSPDKILAYAGMSPSTYQSGQLSLSGTYSHMEKRGSKYLRYALYNATKYVCLWDSTFEAYLAKKRAEGKHYNVALSHAAKKLVRLIYAMEKSRQPYNSVA

SEQ ID NO: 157507 - protein, 367 aa, unidentified
MSSIAHRGFVHLGMDVSKDSIAVAVLSPDRDTAEVDKIFHDTDSVRRLVKRLGKPKGIWACYEAGPTGYDLQRLLTSMGVRCDVVAPSLIPKGSGDRVKTDRRDARRLAGLHRAGELTPVAIPTPAQEGVRDLCRTRGDMVQDLTRARNRLSGFLLRHSVVWRGGSPWTERHRRWLATLSFDDPAIATTYSHYLATVKLRDTALESVEADLVPWCTQGPFGEQVPRLAAYRGVSRIGALCLAAEVFDWRRFPRARGFMSFTGLVPGENSTGLTQRRGSITRAGNAHLRGQLCEAAWAYQHSPNVGAGIRERQQGVPLETVARSWAAQVRLSRRFRQLAAHKNVRSVVAAAIARELAGFLWAEMVAQV

SEQ ID NO: 157508 - protein, 346 aa, unidentified
MKYSTTVGIDLAKNIIQVSVVSSRGKELSNRSLTRRKFAEFLGKQKPSLVAFESCATAHYWARAAQRHEHEVRIIPAKAVTPFRQGHKTDSNDALAVAEAARRPNIKEAPMKTVEQQGLQAIHRSRELLIQECTALSNHLRGLLMEFGVIIPQGFASLLKTLPEILEDADSELPDLYRPTLHRMYTRLIELREDIEAMTKEVEILVKEHPVCSRLTALEGIGPIGALLLYATLGSGAAFSGSREFAAYLGLAPRQYSSGGKTNIVGLSKKVGNSRLRSVLILGARAYTYRLKEPKSSKDKWLKAATERNGHSRAAIALANKNVRTAWAMVTQGTEYQRRAPLKVAA

SEQ ID NO: 157509 - protein, 338 aa, unidentified
MALYAGIDLHSNNNVIVIQDEEDNVVGRKRLPNDLKRVCRWLESYRQDLAGIVVEATYNWYWLVDGLMEQGYSVHLANTVAIQQYNGLKYRNDDSDARWLATLLRLGLLPEAHVYPRTERAIRDLLRKRSRFVRQATMNLLSIENLFARNHGQRPSANQIRRLTLEGADAIFEDSNVALAVKSTLSVWDCLTDQIYALEVAIRGQVRLRQSYKKLRTVPGIGEVLALTIMLETGDIGRFDDVGNYVSYARLVGSSHWTNGKRKGSGNTKNGNAFLCWAFMEAANFAIRYEPKIRAYYQRKEAKTKRVIALKAVAHKLARACYHMIKENVAFDITRAFG

SEQ ID NO: 157510 - protein, 383 aa, unidentified
MNVALTLHSRRSALAQGSTLFIGLAVHKESIAVAYVAEEREAEVVFLGTIGTRQGDIDKLIRKLQAKGKRLHLVYEAGPCGYWLYRYLTKKNLKCWVVAPSQIPKKAGDRVKTDRRDAVQLARLLRSGDLTPVYVPGVEDEAIRDLVRAREDALKDGKAAKARLKAFLLRQDIRYAGRANWGPAHLRWLAEVVCPTPAQQIVFQEYVRAVSEHTERLPRREAALQTQGQSWRWAPGVEALQALRGVPCTVAVTLSAELGDRSRFANPRQLMSYLGRTPSEHTRGERRRQGALTQTGTSHARRALIAGAWAYGYPATVRRPRQLRWEKVPTVSQEMSGKAQVRLCKRSRRLVARGKQVNQVVVAIARAMAAFVWAIAREVEVTP

SEQ ID NO: 157511 - protein, 408 aa, unidentified
MDVLYPRCAGLDVHKDNVVASVRLADEGEVVREVRSFGTMTSELLELSDWLEAHGCTHVALEATGVYWKPVWHVLEDSFELVLANAAHIRNVPGRKTDVNDATWIADLLAHGLIRGSFVPPPGIQEVRDLTRMRKQLVREVAQHTLRIQKTLEDANIKLTGTITDILGLTGRTILDALVAGETDPERLADLAHRGIKASRHKLVEALRGRVTKHHRFLLELHLGQVDALRAAITRVDIQLGKALGEARSLAELLTTMPGVGDVVAHVIIGEIGTDMSRFPTSAHLISWAGLCPRSDESAGKRRSNRIRHGAPWLKATLIQAAWAAAAKRNSYHRAQFLRLKARRGPKKAIIAVAASMLTAAYHMLRDGTEFEDLGADHFDRRDREKVAKRLTRRLEQLGFQVELRKAA

SEQ ID NO: 157512 - protein, 344 aa, unidentified
MEATPADSSAAAAAAAAAAAAVRPVTFVGIDMAKESFQAAADVPDANAANAARFNASFTYDTAGIASLLERLRTLDVQLIVMEATGGLHRKLAAELSEAGYAVAVINPRQARDFAKAIGRLTKTDRVDADVLAQLARMLKPVARPLPSAEQIRLKDLSARRRQLIHMRTSELNRQQQASLTDVSKSIRHVITTLNREIAKIEKQVTDLIDSNSDWKHKADLMDSVKGIGIDTAHAILAELPEIGTLSKRAVASLAGLAPHAFESGQFKGKSTIWGGRAAVRSALYMGTIAATRFNPTIKRFYDRLVAAGKKKMVALTACMRKLLTILNAIVRTGVKWNPKMANV

SEQ ID NO: 157513 - protein, 412 aa, unidentified
MQDILTCAMGLDIHRDVIVACLAKGELGADPEIEIRSFSTLIPEMRKLRDWVLEAECHHVAMESTGIYWQPIYEMLEPCFDGQISILVVNARHMKNVPGRKTDMRDAQWIATLLRAGLLKGSFIPDKTFRELRHLTRYRKSIVHDITAQKNRIDKFLQSSGFRFTAFLSDAFGASGRNIIRHLMEYGSISREALDRCLKTQTRKRIDEILIALNGSLSEHQRNFLRMIFGHLEALEQHRHTVEDAITEEITKHEEALRLLCSIPGIDVTAAAAIIAEIGTDMSAFPDSQHICSWAGLSPGNNESAGKRKSAHINKGNPYLKSMLCEVGWVISGKRTLHLSGWYWKIKQRKGAKRATIALARKLLALIYTMLKTGSPYSEECFETRRKQSERKRAYRMVNELQKLGYFVLPPD

SEQ ID NO: 157514 - protein, 451 aa, unidentified
MKKEIEKKVLIKLGKGLPVFNFHAAGIDIGDTLHYTAINDENGGHEVKVTSAFTCDLEEIVSYLLQHKITTAAMESTGIYWLSLYLMLEEAGIDVYLVNAKSVKNVSGRKKDDTDAIWIQKLHTCGLLQKSFQPDNEIRLLRTYTRQRKNIILLAADSVRRMQKALELMNIKIHTVISDILGKSGMKIVKAILHGERNPDFLATLCDPRIKASKEEIIKSLQGIWKEEYLFMLEQALENYEFHQGQIKKCDEKIEQQLIKQVAIVNDGDITGLKELVTKKTKGIKNQFSFQVAPFLKQITGTDLCKIPGISDVTALEFIAEIGTDMTKWKSAKHFAAWLNLTPNTKITGGKIISSKMEKKKNKAGQYLRQACSCLSTNKTAIGDYYRRKKSSLGGKGAVVATAHKLARIIYTLLLNKSDYSPEMLANNDLKYKENKIKYLEKQLEKLRKAA

SEQ ID NO: 157515 - protein, 314 aa, unidentified
MTSNAEIVGIDVSKSTLDVACWESKAYRQFSNETKGIPELIEWLKELQPELIVLEATGGLEMPLVAELAYAKMAVAVVNPRRIREFARSMGQLAKTDKLDAKVIAHFGVATHPEARKLPTEEEERLTALITRRRQIIEMLTAERNRLHSARFAMKERIETHITWLEGELKDLDKEISDFIQQSPVLKEKEKLLRSVPGIGPVTSATILAMLPELGTLNRQKIAALVGVAPVNKDSGKRQKKRRVFGGRANVRSVLYMAALSASKHNPIIKAFYDHLVRMGKEKKVALTACMRKLLVILNAIVRDNQAFSLLPIN

SEQ ID NO: 157516 - protein, 335 aa, unidentified
MKKYFIGIDVSKEKLDICLIQDDQIIAEAIVTNDTVAIKDNLQILLTENDLDKQTVLICAEYTGQYTYPLSCICEELKIDLWLENPVQLKYRSGIQRGKNDKMDARKIAIYAKRYQDDVHLFSLPEKQISALKQLISERDLYVVDKAKYQGQLTDQKRFMSQEDYERKSKRLNKLIAELEEAINQIEQEIQSIIDKDDTLSNQHKLLCSVDGIGDRTAIKMIVETNAFQDFKDPRKFCCHAGVAPFEYTSGSSVHSRKKVSNRADKSIKALLHMAALSVATRKSGEMSEYYWRKVAEGKNKMSVLNAIRAKLVLRMFAVIRNNKFYEKNYINSLV

SEQ ID NO: 157517 - protein, 416 aa, unidentified
MKKNSKSAMKKEQKGKRAKAQRPVQREPKEVLAELVEKLQGKLELKATSARPAEASPGTELGPNLDRLTVGVDLGDQRSHFCILGLQGETLSEGQLQTREAEVAEFLQAIAPARVVMEVGTHSAWMQEIIAGEGHEVVVANPRLMEGSKRRKRKNDRIDAKKLARLGRVDPQSLHPIRHRSREVRQDLVVLRAREALVAARTELINATRGLVKSMGTRLPKCSSPSFGQKVKDAIPEKVREALLPLVQLADALSDCIQSYDQKMEELGSEKYGHTKLLRQVKGVGPITALAYVLTLENPEHFAKSRDVGPYLGLVPKQEDSGESQPQLGISKTGDTMVGKLLVGSAHYILGPFGPDTDLRRYGLRLCERGGKNAKKRAAVAVARKLAVLRHRLWVSGEVYEPLGYASSRAIVQPAA

SEQ ID NO: 157518 - protein, 351 aa, unidentified
MLIIGCDFHTRYQQIAMAEEGTGELLLERRLEHENGEAHAFYRNLQGPVRVGIEATGPIHWFERLLTELGHELWIGDSAKIRASEVRKQKTDVRDAALILDLLLAKRFPKIWVPTPAERDLRQLLWHRHKLVCLRTMLGNQLHALAMSEGLCRKRKLFTKKGRVELQQVGLAPWASRRREQLLKLLDQLEPPIAELDRAVLEQAHRREDAISLMTHPGIGPVTSLAFVLAIGPVTRFSRSRKIASYLGLNPTEESSGGRRRLGGISKQGNTMVRWLLIEAVYPAVRKDPALRQDYQRLKFRRGHAVAKVAIARKLAVRMYWMLRTGADYAQLVRRQGSPGGTLMNASSSLA

SEQ ID NO: 157519 - protein, 346 aa, unidentified
MKITRIGIDLAKTVFQVHGVDSHEKVVLRRQLRRNQMAAFFAKLTPCLIGMEACASSHYWARVLTGMGHTVKLIAPQFVKPYVKGNKNDANDAEAICEAVGRPNMRFVAIKSVEQQDIQALHRIRTELVQQRTAKVNHIRGLLGEYGIMIAQRIGSLRKALPDLLEDAENGLTTDFKVLLHGLREDLVYLDGRVAELDRAIQHLASTHAAAHRLQQLRGIGPITATALVAALGDGKMFRRGRDAAAWVGLVPRQHSSGGKDNLLGISKRGNAYLRTLLIHGARAVVKTAAGKEDRLSVWVQSLCRRRNKNVAAVALANKTMRMAWALLTSGAEYQPEYGPGSVQPA

SEQ ID NO: 157520 - protein, 353 aa, unidentified
MKPETESKTAPFAVIGIDIGKEVFHLVGLGVDGKTAFRRRIRRLGLKDAFEKLPPCIIGMEACLSAHFVSRTLRALGHEPRIIPAIYVRPFVKGQKNDYNDAEAIAEAALRPNLRVVQEKSQDQLDLQACHRVRSRLVARRTATINQIRAFLIEQGIAVRAGPRVLRNSLFAILENRKEEISPRTATLIRGLYEDWCCLDKRIEAVTGEIEQLSEAEARCRRLMSVPGVGPLISTAVVAAINTGEAFERGRDFAAWLGLVPRQHSTGGRTVLGRISKRGSRYLRMLFIQAAKVLLMRPHNWVRYSFGTWLKTASERLHRNKLAVALANKLARIAWSVLRHDKAFDTHLDAAAI

SEQ ID NO: 157521 - protein, 347 aa, unidentified
MKKVVKQILGIDVAQDELVCCFGKMHDDFTPELISHRTFVNSSKGFESLLAWVVKLSDATVSVRYVMEATGIYHESFAYFLDVQGLDVSIILPSKISNYARTLNVKTVTDKTASEAIALFGLERKLDNWEPPKGIYKKLQQLSRERGQLMDEQTVIKNQLHAEMTEARPYKNSIARANKRLALIKKQVQDIKEELEELIKSNDEVKEIVILLCSIPGIGMITAATVLGETNGFNLIRNKRQLTSYAGLDVQEKQSGTSVKGKPKISKKGNRQLRKAMHMPALSAIRSDERFKSIFVRLVSKHGVKMKAVTAVQRKLLEMTFTMFKSKTKFDKNYYKSAEEIIEQVAE

SEQ ID NO: 157522 - protein, 367 aa, unidentified
MLLLFSAPYMEELVMALDHRWCVGVDLHKDTLTACVFCGCCGEVSFQKIACRCRRQIAEYFAALPRPHTVALESVGFYRWLWEMLEPIVEELVLADATQARALAGRRLKTDREDALNIAQLLAAGRLPRSYAPPIEVQWLRDLTRHRNSFSRQHARILHRVKSIMNANNRPGPARMQSDGLIRYLKAQGEKLPARHVEMLWQCVDALTLTERQIAHTERTIGQVVRRESFREVYGILTSFPGVALVTAATVMAEVGDFKRFPDTKAIGRYAGLNPRVYASGGKQRMGHIAKTGSRDLRWVLQQAAWTAIRYDEHVKRIFLRIAKRAGRKAAAVAVARKLLTWMHIAAKKGEPYRTPGARHTVLPGAA

SEQ ID NO: 157523 - protein, 456 aa, unidentified
MAHRKKKVPAQLVEDEEYQLRYERVAGIDVAKAKADVCTRLPPKEGGVRRRSRVEGVPATVAEVAALAGRLLADGVELVVMESTSDYWRLWFYVLEGAGLRVQLVSSSQARQLAGRPKTDRLDAQWIARLAEMGLLRPSFVPPAEVRELRDWTRARLHLVRDRTAEWQRLEKLLEGALVKVSSVVSSLAGNVTARAIVEALIEGERDPRRLADLAKGSLRGKRAELAAALAGNAFGPHHARLARMHLDRIDALDRDVAALEDEVAACLEGIEAAWGVDAAGVACPDPGEGAAVLAAAARVAEIAGVSPELAMAIIAETGLDMSRFKTAAHLVSWAGLAPSARQSGARSRKPGKGRGNSYLKGYCTQAAIGTARTDTFLGERLRRLSRRIGGARALVAVGRSILVIIWHLLADPAARYTDLGSGWHASKTDRDKKITGHLRQLRALGLQVTVTEAAA

SEQ ID NO: 157524 - protein, 388 aa, unidentified
MPRQRKPNDLSRSLIALDMDTTLIAVVELSLSSWLVAGIVPGVERQPLKKLKTDENALLALLNRWRDEAVRSGHKISRIAVAFEAGRDGFWLARWLKARDIEAHVIHASSIAVSREHRRAKTDRLDTELMKRAFVGWLRGERDHCKTASVPSLWEEDAKRPSRERESLVGEQSRLINRMKATLIRLGIRGFNPKLRHAEQRLETLRTPEGEPIPPNTLAELKRDMQRRRFICDQIQSIEQDRLERLERTPHTEPHAMVRLLARITGIGIETADLLVHELLLRNMRDRRAVARYGGLTGSPDRSGGTNREKGMARSGNARVRRGMIQLAWRFLLFQKNSALAQWYRRRTEHAPKARKTMIVALARKLLIALWRLVREGVVPEGVAMRPA

SEQ ID NO: 157525 - protein, 422 aa, unidentified
MLAKTQDEEQIIARVAACDIGKAELVCCVRVPDEDRPGRRLQEVETYATMTRPLLGLADRLRCLGVTRVVMEATSDYWKPVFYLLEAHGSETWLVNARDVKHLPGRPKTDKLDAVWLARVAGRQMIRPGFVPPPQIRKLRDLTRYRADLVAARTAEKQRVEKLLEDAQIKLSVVVSDIFGVPGRQMLAALIGGQRDPKALAQLARGVMRRKITTLQEAFTGYFTGHHAFLLATMLARVDAIDADIAALDASIGELAAPFAAAVTRLTEIPGISFTAACAILAEIGTSMDRFPTAAHLVSWAKFAPGVKESAGKKKGKGTTGHGNRYLARVLGNAAASIARTGTFLGERYRRIARRRGSQKAVVAIGRSLLVIIWHLLADPTARFTDLGSDFYGTRINPGRRKRNHIRQLEALGYKVTVEPAA

SEQ ID NO: 157526 - protein, 403 aa, unidentified
MNSVGIDVSKGRSTVAVMRPLGEVVQKPREVIHSTIELERLAYQIIELGENTRVVMEATGRYHEPVAAALHEQGIYVTILNPILIKQSGGGSVRKVKTDKKDALKIAKYGLDNWNGLREYTPTDALRQQLKLFSRQYNLYMKISVMLKNNLIALLDKTFSGANELFDSQTRADGHQKWVDFVTAFWHCDCIARINQQAFTERYQKWCKRKGYHFSKTKAEDVYYSSAGHFPTLPRNSNTKLLITSAANALTDNQKVLMTIKAEVLRLAELMPEHDVVLEMYGVGDITAAQLMAELGDVRRFENRGSIVAFAGIDPEVSESGKTKSESNSTTKRGSPHLRKTLFQIAKTHLIRSPVNEPVYLFLDKKRRQGKPYFVYMTAAANKFLRIYHAKVKEHLNNLDAQP

SEQ ID NO: 157527 - protein, 353 aa, unidentified
MEKIARVGVDLAKNIMQIHAVDSVERVVVRKAITRERFASWFANLEPCLIAMEACSAAHYWARKLSALGHDVRLIPPQFVAPYRKGGAHVKNDALDAEAICEAASRPHMRFVPVKSPAQQSVLVLHRMRTGFVEERTALINRMRGLLAEFGVFLPQGIDSLRKQFVERVEDGSNELAGPARQALMRGWTQWQLLDEQIAWLERQIAEHAAHDPQAQRCMDVCGVGRLTASAAVATVVDARQFKNGRQMAAWLGIVPKQNSSGGKSRLGRITKQGDAYLRTLLFQGARSAVLTAHRRNDRLSRWIVQLQARVGFYKALIAVANKHARILWAVLARGEQFDPTYVPARIRTAKGT

SEQ ID NO: 157528 - protein, 381 aa, unidentified
MGEPILSAGGRAVGEDSEVFVGLDVAKRRHAVAIAEDGRQGEIRFVGEIDADPTSVRRLVGRLEKRHARLHFCYEAGPTGYGLYRQLTEMGHRCAVVAPSMIPRKPGDRVKTNRRDAMQLARLLRAGELTEVWVPDEGHEAVRELIRSREAAVDDLRRKRQAISSLMLRYGRSYPGKKTWGARHRQWLQAQRFDHPAQQLVLQEMVLAAQHAQERLQRVEAAIVEFVPTWSLAPVVDALQALRGIQLINAATIMVELGDLRRFDNPRQLMGYLGLVPGERSTGDTVRRLGITKTGNGRVRRALIESAWSYRHLPRTSKLKHYVHERVSSAVRDIAMKAQARLCSRYRSLAGRGKKLTVAVTAIARELAGFIWAIGRMVQAS

SEQ ID NO: 157529 - protein, 337 aa, unidentified
MTEFNTIAIDLAKSVFQLCVISDQGKSIKSLRLNRTRFQDFMANREKSRIVMEACYSSHYWGRYLEKAGHEVLLIPAQHVTPFVRGNKNDKNDALAIYEASLRPNIRFVPVKTEHQQDIQCLHRMRERLVANRTALCNQLRGLLADYGHIFPVGINAIIKGVREIIRDSSLSGTLLSELESSIVEYDYQTKRIDNINKSLKNHSDKNPQSQRLMEIPGIGAHIATAITSTVGKAEVFRNARDFAAWTGLTPRQSASGNKSVMGGITKRGDQYLRKLLVQAARHTVRWAVKENDSKLAKWINEIIVRRGLQKGVVAVAHKLARIIWCVLTREEGFKPA

SEQ ID NO: 157530 - protein, 329 aa, unidentified
MGLDDKKKIVLRKRLSRHDLVHFVAKLPMVLIGIEACSGAHYWARRFRAYGHEVKLMAPQFVKPYVKSNKNDSRDAEAIAEAVTRPTMRFVPTKDVAQQDIQALHRVRERLMGERTALVNEVHGLMHEYGIVMPKGVSKFRQAVVGKLEAEKDKLTPLSQEMFWKLVEEFAALEEQLAYYQEKLEALATTHPECQRLMTIPGIGPLSATALVAAVSDASAFKNGRQFAAWLGLVPRQHSTGGKERLLGISKRGDSYLRKLLIHGARATMRWVGRKTDRRSQWIRQLSERRGKNRTAVALANKNARIVWALLTSHQAYEPAKGSSRRRSW

SEQ ID NO: 157531 - protein, 389 aa, unidentified
MDEAGKVLVKRRLPEGAAGMTQLHALIGRFLPEDADDAEVVIGIETDRGPWVTALVAAGYVVFPVNPLQASRYRERHGVSGAKSDGGDAHMLADMVRTDSHQLRPAAGDSPEGQGIKVVARAHKTMIWDRTRATQRLRSQLREYVPAALAAFEDLDAPDVLELLGKAPDPDRARRLTRAQVAAALKRARRRDIAGKTDAILAALRGEHLGQPAALTAAYAATARSLIAVITTLNAQVKILEDQVRDHFGRHPDAEIYLSQPGIGAILGARVPGEFGDDPCRYVSAKARKNYGGTSPITRASGKKKVVAARFIHTDRLIDALMSWAFASLNASPGARAFYDEQRAKGLDHNDALRRLANRLVGILHGCLKTRTPYDEATAWSHRESSLAA

SEQ ID NO: 157532 - protein, 316 aa, unidentified
MTEALYVGIDVAKDSFDVASDPAGLKLSLPNDPKGWQKLLDSLQTHPVALIVMEATGGYERRLAAELIQAGYNVVVANPRQVRDFARGMGELAKSDSIDADVLAQFGRVVQPKPRPQPSGQMEVLSELVTRRRQLTDLHTQETNRLPMARHATVRKSLQKIVRALEHQIADLDKLIHDNIQSDDGLRRKGDIVRSFKGVGPGTSSMLLSHLPELGSLNRQEIAALVGVAPWTCTSGKWKGKSKIWGGRMEVRNMLYMAALAAIRSNQVIRVFYQRLISNGKLFKVAITACMRKMLVILNTLVRNDTKWSPQFVKNA

SEQ ID NO: 157533 - protein, 425 aa, unidentified
MRTRDGAHWAGVDWGQRVHDVCVLDTHGEVLAERRFDHSSKGLGELSAFLSGFVDVQVAIETPRGPVVEALLDRDLAVFAINPKQLDRFRDRFYPSGAKDDRRDAFVLAHSLKTDAHAFKAVSAEHPVIVELREWSRMHRELSEERVRLTNRLQAQLRRYYPQLDGFDVPLWSPWILDLFVAAPTPERARSLRRATLVRLLRRNRVRKWTLEEVREALREPGFTVAAGTVAAASAHAETLVERIRVVHDQHQRAAKRLGELTERYRLDALTERYRATELGEVDSDEDSSEQHDVDILRSLPGVGKLVLAVLLAEALELLQRRDYHGLRALSGVAPVTRRSGRKLVVLRRHACHQRLAWAVFQWARAAMSNDPEWHARYAALRARGHTHGRALRTLGDRLLRIACAMLEQGTMYDADRLAPVQRAA

SEQ ID NO: 157534 - protein, 342 aa, unidentified
MQITTIGLDIAKNVFQVHGIDAAEKVIVRKRLRRSQVLTFFKALLPCLIGMEACATAHYWARELTKLGHKVRLMPAKDVKAYVKRNKNDAADAEAICEAVRRPTMRFVQVKSAEQQGQLMQHRTRDLVMRQRTQVINALRAHLAEFGIVAAKGDKGVKELLTILADEKDTRLPIDARASVIVLAAQLQALQTLIGSIEKRIKAQHRSNQASKRLETIPGIGVIGATAIAATVADPTVFRSGRDFAAWIGLVPRQNSTGGKQKLGPISKQGDRYMRRILVVGAHSVLRRAKENPDKYPWLTQLLARRPFKVVAVALANKMARMAWALLAHGGTYRAPKPAVAA

SEQ ID NO: 157535 - protein, 332 aa, unidentified
MIYTEFIGIDVSKLTIDVWLYYAKKHMQFDNTEKGFKAMLAWIRKTTKTTDTNQYLFCLENTGLYNLPLCSFADDQQLNYCLESALRIKLSFGITRGKNDKVDAERIARYCYLHREELVLSHLPAKAIRRLKKLLALRDQLVCHNCGFKACIKESGDFLNQKEMKEYFSVQKFLIHTYEKKIAIIDKAIKETIDSDDDLSKISECVQSVPGIGPVITAYMLAYTNGFTAFDTWRKFACYIGIAPFANQSGTSLKGKTKVSHLANKKIKAIVNSGTRSSLQSCKEYQQYYNRRIKEGKDEYSTINIIRNKIISRAFACAKRKTKYVNLFKFAA

SEQ ID NO: 157536 - protein, 416 aa, unidentified
MEVLHRRCAGLDVSKRDAKVAVRIAGGGRAGAKSTVTTWGATTNSILALREHLITEAVTCVVMEATSDYWKPFYYLLEDGPFEVLLVNARHAKNMPGRKSDVSDAAWLAQLGAHGLVRGSFVPPPPVRELRDLTRTRTALTRERSREIQRLEKLLEDAGIKLSAVASDITGVSGRAMLDALIAGERDPAVLADLAKRRMRVKIPQLTEALTGRFNDHHAFLAQMHLDLIDHHTEAVDLLTTRIERMIEPFRHVRDLIITIPGISVLVADVIIAETGADMAIFPTAGHLASWAGTCPGSNESAGHVKSTKTRPGNPYLKGALGIAAMAAAKSKSTYLAAKYRRIATRRGPIKAQVALEHAMLVAIWYMLTNDNPYHEPGGDYFVRLNPDKAKNRALDQLRQMGYDVTLSPAHLPMAG

SEQ ID NO: 157537 - protein, 340 aa, unidentified
MKKFIRIGVDLAKNYFQIHALASEGGPAVTRKLSRLKMREFFSQIEPCLVGMEACGSAHYWARELKAMGHEVLLMPPAYTKPYVKRGKNDAVDADACCEAMSRPGMRFVPIKSAEQQATLMLHKTRELLVKQRTMSVNALRGHLSEFGIIAAKGIGRVDELLLAASDTTLPGAARAAVKVLALQLEGLDKSIDDLEDEIASAHAQSEMSRLLDGVPGIGKLIASVIAASVPDASVFKSGRDFAAWLGLTPRQNSSGGKQTLGSITKQGNRYIRKLLVLAATSLLRVVGKRKGALRDWIVALLAKKPARLVTVALANKLARTLWAMMKTGESFRTEMFAKA

SEQ ID NO: 157538 - protein, 394 aa, unidentified
MRFAGIDIASETHVLAMVGADGAVELKPTPFGEDAAGYQKALDLLGTPGAVLIAMEATGHYWKNLFAALAAAGHSVALINPLRTHRFASEDLERTKTDAIDALGIARFAAQKRPPPTRLPDAATEELRELVRLRERLLQDFGDRVRQLHRLVDLGFPEFTRYVRSLDSELASAILLDYPTAEAFHGVSVKRLAALRYDRRHQVGLDLARTLIDAAKRSVGHHHSAPYRLQVRYTCQDLDLLRRRLRELDHDLDGKLREHEVGRLLTTIDGIGPQTAARVIGTVGDPAHFRSASAFSAYVGAIPGLKQSGKRQTTRAGLTPIGNAQLRAALWMPTLSAVRHNPWLRAHYQRLLARGKLPKVALVACMHKLLLAIYSVAKHRRPFNPKLCAESTAQ

SEQ ID NO: 157539 - protein, 383 aa, unidentified
MKKHTIAKHTPKVLTKTDKNRIRGMAAKQRLTIGIDLGDRTSRYCILDETGAIVSENSLPTTKGGFDSLFGKMPSSRVAMEVGTHSPWASRQLAALGHEVVVANAHEVKLITKSARKNDRVDARKLARLARIDPELLRPIRHRGEQAQADLAIIRARAQVVEYRTGLINSVRGSVKPLGERLRACDADQVTEALADGLSAAAQQIVRPMLKIVEAISEQIAVYDRQIEALAKRYPEIELLTEVYGVGTLIALTFVLTIEDAQRFVHSRDVGCYLGLQPKQRESGDSQPELGISKAGDRLLRSYLVQAAHCMLRKGGPDSDLREWGMKKAQSGGKRAKRRAIVGMARKLAVLLHRLWATGEVYDPLYNRKTVQGAALGKSTAAA

SEQ ID NO: 157540 - protein, 325 aa, unidentified
MEKLYGGIDIHKENLAGCIMDKDGNIKREHIFPSSKKAVEKFLCNIPNSEITIAIEACGMWRGVHKVITELGYEVKLANPKKTHDIAGSKKMDKIDAKTLADLLRTHYLPEVWIPDEQTLQFRDLTRHKANLTRLKTQVQGKIRGYLLRKGAKYNKLSKEETLTTLAEEDPDIKNLVHVYQCLKEEEREVMRRIKRISQNMKQTTMLMSMPGIAEFSSLMILAEIGDIKRFPSSKELVSYAGLCSGIYQTGTTERSVHNTAVNKWLKWIIYECSGRAMMLDPRFQNYYYKIKEKKGFKTARRATARKMLTIIWYMLTNEEPYHAS

SEQ ID NO: 157541 - protein, 352 aa, unidentified
MQHFIGCDVHTRNQVVAWMDEETGEIRTRRLDHDGGEVRKFYEKFEPGTVVGIEATFPAHWFERLMGELGHELWVGDAAGIRASVVRLQKNDYFDAEHLLDLLRTGRFPRIWIPSLEERDLRQLLVHRMKLVRMRTQVKNQLWALATSQGICRKGKLWTVKGRGELENLALLPWAARRRKELLEALDRLDEQARELDRAVEEAGRGRPEVELLRTHPGVGMVVGLAFALTLGPVERFANSRCLVSYLGLNPREASSGGRQRLGAISKQGNSMLRWLLVEAAQTAARFDSQLGRLYQRLKKKRVSAVAKVAVARRLAVRLFWMLRTRNNYAQLVRMSGSPSSAVVPPPVEPTV

SEQ ID NO: 157542 - protein, 342 aa, unidentified
MDHFAGLDVSVKETSICIVDDAGKIVREVKVASEPEALLAVLKNPAYHFKRIGLEAGPLSQWLFSALAEAGLPVICVETRHMQAVLKAQINKTDRNDARGIAQMMRAGLYRPVHVKTLRSQKLRMLLTHRKLLQSKAIAIENDLRGTLRNFGLKVGMVGKVKFEARISELVENLPDLAALVEPMLIVRRTLREQIVILHRRLLAIVRDDEVCRRLMTTPGVGPVVALTYRATVDVPARFRKSKSVGAVFGLTCSKYQSGEIDRSGSISRCGDEMMRVMLYEAAQSMLRSKKWSWLKAWAMQIARRRGMKKAIVALARRLAVIMHRIWVDGTEFRWTREAAAA

SEQ ID NO: 157543 - protein, 312 aa, unidentified
MKEHYYGGIDVAKDRLDVQVLPHRQRFSVDNNATGWAELVAQLHALPIAAVGIEPSGGYERGIIRTLLAAGLSVRRINPNKLRQFARARGILAKNDRIDAQLIAEYVSIMPTRVVQRNTATERLTEVVTMRRQLCDEHVTIENQAAHVEDVILRRLNKRRLTRLKADIRLLDRRMAEMVAADADLAQRYALLISMRGVGPTLAFTLIALLPELGHMSRKQIAALVGVAPYDFDSGKLKGHRCIYGGRIPVRNVLYMAALSACRYNPVLKIFHTRLAATNKKPKVIIVAVMRKMITTLNAMVRDNAAWQPRAA

SEQ ID NO: 157544 - protein, 349 aa, unidentified
MSQSLNSAIAVIGIDIGKNSFHVVGLDDRGAIVLRQKWSRGQIEVRLANMPPCLIGMEACVGAHHLSRKLQAFGHDARLMPAKYVRPYSKGQKNDFRDAEAIAEAVQRPTMKFVATKTAEQLDLQAMHRVRERLVSQRTGIINQIRAFLLERGMPVRQGLRFLRAELPRILATPPDVLSARMVQVISDLAEDWRRLDHRIDHLSNEITLLARQDTGCERLMSVPGIGSIISSAMVAAIGTGDAFSKGRDFAAWLGLVPKQISTGDRTILGKISKRGNRYLRVLFVQAAWVVLIKPMSWERHGLKHWIEAAKKRLHRNVLAIALANKLARIAWAVLAGSRTFEANKIQAA

SEQ ID NO: 157545 - protein, 351 aa, unidentified
MKYLGIDVHVKTSVWCLLDEGGQIVERGRVATTAPDLTALLKRLMEADNILAGQEVGKLSYFVHDVCTAAGVKLLSFNAYQLRMIASSRKKTDTRDSYWLAKALQTGMTPHPVYIPTGTVRLLRSLLSQRQALLVERRRWLARARAQLQGAGYKTKITRSVTRLLETAVSDPDGLDEYLAQALELCIRMEQSAEKELRDVEKRLFVVCKPIDAIERLMTIPGIGNLTAIMIYAWVGDISRFRNARVLTSYAGLVPSTHQSGEMSLSGPITKEGAGQLRSCLVQCGHVLLSRCQTKEAQPLKALAERVHTTRARRKIAVVAAARHILRIAYYVLRDGSVYEPNRLRPASEAA

SEQ ID NO: 157546 - protein, 320 aa, unidentified
MRNTVGLDISKLTFDATAIVGNAEYSAKFDNDSKGLDQFSDRLKSLGCQNLHICMEATGNYYEEVADYFAQYYSVYVVNPLKISKYAESRFKRTKTDKQDAKLIAQYCRSAQESELVKRQKPTDEQYRLSRMTAAYAQIKSECAAMKNRHHAAKDEEAAKAYAQIIKAMNEQLEVLKEKIKEQTEKPNCKEGVKRLETIPAIGRMTAAVLFHHLTSSKFETSNKFAAFAGLSPQQKESGTSVRGKGKLTKFGNRKLRAVLFMPAMVAYRIRAFPDFIKRLEEKKKPKKVIIAALMRKLAVIAYHVHKKGGDYDPSRYKSA

SEQ ID NO: 157547 - protein, 437 aa, unidentified
MLPTSHTIQSAGRARHTKNAMNTENYGALVTLDWGETEHAFATEVAESPANTGKIPATPESLHGWLEQIHERAGGRPVAIALEGGKSAVVHALLEHPWLVIFPVHPATSDRFRKAFTPSGAKDDIPDALVLLTILKQHRDLLRPLKIESPQTRKVEGLVAARRQAVDRRTRIACELGSTLKTYYPQALELCGREPATDLMLDFLTRWPELKSLKAARPASLRTFYAAHNSRHADVIAERLALIAQARALTEDRAVIEPAMLEVKMLVDLLRPLQKNIALIEERIAEAFEAHPEADLFRGLPGAGPATPPRLLAAFGTDRSRYPDACSLQKYAGIAPVTQKSGRSLWIHWRWNAPRFLRQTFVEWAGQSIPKCAWAKAYYQQQRAAGKHHQATLRSLAFKWIRILWRCWQDRIPYDEARYLASLRQQKSPLAARLAIT

SEQ ID NO: 157548 - protein, 345 aa, unidentified
MVYVGIDLHRKRSHVAVVDERGQELFSRRLVNDRERFRELLDELGEDAEFALEATYGWEWLAELLEHEGRELHLAHPLRTKAIASARVKTDAVDARTLAHLLRADLLPEAYIAPRELRDLRDLLRQRFVLTQMRTALKNRVHALIARQGVQHGHTKLLGPGGRAFLAELELRPEPRARLEVLLRLISDFDREIDALAADIDQRAKRDDRVKVLCEIRGIGRYLGMLIVAEIGDITRFPSARHLCAWAGLTPTVRSSDAKARLGHISRLGSGVLRWALIEAAQRNTQGDGPLAESFERIAERRGRQIAKVAVARKILTLCFYGLRDGEIRCLQTPGPGDSMKVMAT

SEQ ID NO: 157549 - protein, 348 aa, unidentified
MDTIGLDLHKRESQLCVGHADGTITEQRIVTSRERFTAVLGHRPPARVLVEASTESEWVACHLESLGHEVIVADPNYAPMYATRARRVKTDRRDARTLMEACRAGTYRPAHRLSAARRHVRAELAVRDAVVRTRTRYVALAKALVRRDGLRVPSSAAERVGAHLAALAVSPPLAAELAPLLTLLPPLNATIAAADQRLAELERTDPSVALLMTAPGIGAVTASALVATIDDVQRFASAHQFEAYLGVVPGERSSGELRRIGPITKAGNRRARWLLVEAAWRILRSKDPASAPLRAWARPIAARRGPRIAAVALARRLAGILYAMWRDSVPYDARKVRRPRRAPGGPAS

SEQ ID NO: 157550 - protein, 315 aa, unidentified
MRDVPCFVGIDVAKAQLDVALRPSGERRAVANDASGVETLVDWVQTLHPTLIVLEATGGLERAVTSALAAAGLPVVVVNPRQARDFARATGQLAKTDALDARALAHFADVIRPTPRPLPDAQTQELRALLGRRQQLIVMRTAEQNRLAGTSERLTQDIVAHITWLNADIATLDNDLETTLRASPLWRENDDLLQSAKGIGPVCARTLLLELPELGTLTRQQIAALVGVAPLNCDSGILRGRRTIWGGRAHVRTVLYMGTLVATRYNPQIKAFYERLLAAGKVKKVALTACMHKFLTILNAMLKHRTPWQPQEVQS

SEQ ID NO: 157551 - protein, 424 aa, unidentified
MYVFIEPLVFNLFFVLLKGYDVYKYFLGIDISKDSFDFCFTDETEKVLYKDHYQMDMTDFTKLSDYLAPFSKDEILIVMEATGIYHLTLLSYLLEQELNVSVVNPLFIHAFTKSMTIRKTKTDAKDAHIISIFAKRNYTTIRLSSASDIETIKPIVREKEKLTNQISAIKTDIKSIVNQVFPEMLKNTNIFLKSSLNLLLQAPSKRIIRNLKEKKIASYLSCDTKRGAKPKVDAKEILLMAKNSIGINNQSLEKILVSKIKQLNFLQTQLDEFNKTIEQFVDKHHNNDIDLLTSIAGVGKPSAASFLTELGDINNFATYKQLTAFIGTDPTIYQSGTSVNVKGSISKRGNSHLRRTLWHMARAATVWNTTLKEYYDKKRSEGKTFKQSVIAVANKLIRIIFSMLKNNTKFDTNFSNLAIKSASI

SEQ ID NO: 157552 - protein, 432 aa, unidentified
MTVINPTAAGIDVSDTEMMVAYPISPEQLEIRVFGCFTRDLHSIANCLKENGTTTIAMESTGVYWIPLFLLLQEYGFEVYLVNAKHVKNVTGRKDDESDAEWIQKLHSCGLLSASFQPDNMERTLRSMVRHRKNLVRTSSTYLNRIQKALELMNIKLHTIISDIDGKTGLLILEAILAGERDPEVLADLRDKRIKASREDIIKSLEGHWTTEHLFELGQCYQLYCTHRQMIDECDKEIEKQLVIQIASKNEGVIPDIPKVKRKVSGKHKVKFNLTADLKEILKVDVTEVFGINELSALTILSEVGCDMTKWKTEHHFTSWLGLAPNTKISGGKVMSSRIMKKKHHAGQAFRMAANGLYNSKSPLGDYFRRLRAKAGAPKAVVATARKLAIIYYKMVANKEAFNPKALDDYRKKYNEKKINQLKRKIAQLEAA

SEQ ID NO: 157553 - protein, 352 aa, unidentified
MIIGCDFHPSFQQISYVDRETGECGERRLCHREEAVRFYGGLAGRQVVVGLEATGNDRWFRKLLSEAGHHLLVGDASAIHAAAPREQRTDKRDARHILRLLVENRFPAVWQPSAGNQEQRQLLMHRCRLVRMRTRIKNQLDSIAKSEGLTGSRSWSKQRRAQIEGLPLAGWYSQRRADLLQLLDELELRVKPLNAAVEAAARQDAQARLLMTHPGVGPVVSLAYVLVVGDWQRFPRGKQVGSYLGLIPSEASSGKRQQQMGHITKQGNTLLRWLLVESAVTAQRFDPSWHRQYVRLSMSKHHGVAKVAIAHKLAVRLYWMLRSGQDYEQIKERGSRARQSECPVGRSKRPIE

SEQ ID NO: 157554 - protein, 358 aa, unidentified
MNDDTIAVTGGVDCHQRTHHAAALDHAGRLLGDAEFPATQCGYEALLVWLQTFGTIIAVGVESTGAYGAGLTRSLRAAGVTVVEVNQPHPHTRSRRGRTDAVDAEAAARKVLSGEATVTPKDTTGAVEAIRQLQVARHSAVKARSAALCQLGQLLTTAPAAVRETVTGQRKTLEGQATVCARLRPDMTRLDDPVQAARFALRGVAQRIVTLRREITAYDTQLDALIADIAPATSALLGVGTHHTAQLLVTAGQNIDRLHNDGAFAHVCGADPIPASSGKTIRHRLNPGGDRDANRALHMIAVVRLRYCERTRAYAERRRAEGKTNKEILRCLIGRVSRVQAVGLFVGNGEGRPRCLAT

SEQ ID NO: 157555 - protein, 324 aa, unidentified
MQTIPIGCDVSKDKIDLCVWLNDGKQEYLLIGNNQKGYLKALAEIKRLNIKPHICMEATGIYYEGFADFMAENGYLVSVVNPLKIKKFAESEFQKTKTDKQDARLIACYCLKMQPKADYIKPNPEQYAVRRNIALLKQLNADLSGIKNRIKVAKDEFVRQILISQQKEIKKHIKEVRQHIVKITEQTAAGHVAEKLESIPAIGQTTALILAHYLNMYRFDSENKFVAFAGLAPGKHESGSSVRRPDKLTKYGNRTIKGALYMPAMVAYRFGYFGAFVNRLKNKGKPPKVILIAIMRKLAAIAWNLWKNGQTFDPARYGLNSKTA

SEQ ID NO: 157556 - protein, 321 aa, unidentified
MEQEKVYVGIDVAKASMDVAVHQSEQQWSFSNEDKGIIQAVSCLQGLAPALIVLEATGGIEMPLVAAIAAARLPVVVVNPRQIRDFAKATGKLAKTDILDAKVMARFAATVKPTPRPLPDEQAHEFADVLARRRQVVEMITAEKNRLSSARNKAVRRHIKDHIAWLERELVDTDNNLRRSVRESPVWREKDDLLRSVPGVGPVLSVTLLADLPELGTLDRRQIAALVGVAPLNCDSGNFRGKRAIWGGRAKVRATLYMATLAATRHNAVIRAFYQRLCVAGKEKKVALTACMRKLLTILNAILKHRAPWRYGACQIMGPCS

SEQ ID NO: 157557 - protein, 448 aa, unidentified
MKRTKKMQENGHRISGKTIIGIDPAKNKHQAIILRPDGSICGRSFAFETNHRGFTETLPQRIQQRLATPEETEVVYAIEGSCALWQNLAFHLSEQGQEVVLISPLATYHARPSITGDFSRTDQKDAELIARLAQQGSYREMPGHSDHQRAMHRMAICYDKLRKSRQRHYARLRALVERLFPEFLSVLTLDTKTARYLLREALLPGEFLALEPGRTVLGMARASRHQHGQATLLHLQELARHSVGQTRGPAEGKVEHLAAETWLAVIELIEAQIKALTEALVEAACEHPCFASIKSLRGISDLMAALFIAELRDPGLFRHWKQIEKMAGLNLYVSDSGQYRSRRRISHLGNSRLRWLLYQMASETSKYVPEVRCKYLTRRLKHGGSRTKHLVGCIPQLLQLLMALMRQGRCYEQRPESLAQMQQLETRYQAVQTSKGKRRAQGTRQKAA

SEQ ID NO: 157558 - protein, 464 aa, unidentified
MDTLYCVGIAVALRDHRVAILGPDGEARGKSFSILASQEGFADLVRTLHARGAAPGHTLVGLEATGHFWENLEAFLSRAGYRGVVLNPLQTRRYRDVLRRKAKTDDIDAYVIAGLLRSEAAAACYVPDEQIQSLRELVRLRARLMRERQDYLRQLVAQLDVVFPEHRARLGDATTTRARGLLTVFPTARHLAHATPATLRRTAAAAGARGFSLQDATALRDGARQSTYSGKAADARGHVVRTLLAQFERLTTSIDDLDQTRQALLPPATPEGGPSDATLLQTLPGVGPYTAGTLLGELGSLTRFTDARALVAYVGFFPVIRESGEHAATPFLSPTGSRIARHALYLAAVNAVRRSTEWRLLYQRKIAHGKSPSKHSSRWPSNGSTRPTRCSSIGCPMIPRDSSRCPPQFPLDGHWMISSARPSSDGGIVRPRALAVLRLMTSSNLLGCSTGRSAGFAPLRILST

SEQ ID NO: 157559 - protein, 389 aa, unidentified
MKIFVGIDIAKLNHFAAAISSDGEILLEPFKFTNDADGFQLLVSKLESFDKNSIIIGLESTAHYGDNLVRYLVAEFYQVCVLNPIKTCQMRKNNVRKTKTDKVDTFVIAKTLMMQDDLRFITFFDLDMMDLKALGRFRQKTIKQRTRLKIQLTTYVDQVFPEIQYFFKSGLHQHAVYALLKEAPSPKEIASMHMTHLANLLKVNSHGHFTKEQAKELRVLAQKSVGANDSTISIQITQTIQQIELLDSQLEKIEAEMTDIMKFNDSVIMIIPGIGYINGGMILGEIGDIHRFSNPNKLLAFAGLDPSVYQSGNFQAKTTRMSKRGSRILRYAIVNATWNVVRNNATFKAYYDAKRAEGRSHYNALGHCAGKLVRAIWKMLTDEVEFNLE

SEQ ID NO: 157560 - protein, 421 aa, unidentified
MISKKKRNGGTTSTTLAPINGRAAGIDIGSRFHVAAVPPDLDPEPVRSFQSFTGDLARLADWLAAVGITTVAMESTGIYWVPVFEILEACGLEVVLVNARDAKNVPGRKTDVNDAQWIQQLHSYGLLRASFRPRAAIVALRAYLRHRERLLEYAASHVQHMQKALMQMNLQLHHVVSDITGVTGMRILRAIVGGERDSEVLVAFRDVRCKSSVDTIREALTGNYQPEHVFALRQAIELYDTYQAKLQDCDAEIERSVRALPREDASASPPPPPRSRTKQKNELGFDVRPLLHALLGVDLTQINGIGPYSALRIIAECGTDMSRWRTAKHFTSWLTLAPGSKISGGKVLSSRTRRSSNRAAVLLRLAATTVGKTNTALGAFFRRLAVRTGKAKAVTATARKIAVLLYNTLRNGMAYVDSGAD

SEQ ID NO: 157561 - protein, 341 aa, unidentified
MESAAIIGIDLAKSVFQLHGADVTGKPLFRKKLTRDQLSVFLASQSPTVVAMEACGSAHYWGREIGALGHDVKLIPPIYVKPFVKRHKNDAADAEAISEAAIRPTMRFVPVKSAEQQSRAMVFKTRDLLVRQRNQIVNALRGHLMEYGIAVPAGLTFVRELEREIEDPDTSLPMLVVELGRLLIDQLQSCNTKISVVERQMKEEAKRDPEALRLQTAPGVGPVSAMAIKAFGPDLNCFRRGRDFAAWLGLVPLQKSTGGKQKLGRTSKMGQRDIRRLLIIGAMTRIRWAVKNGAPEGSWLQKMLQRKPRLLIAIALANKTARVIWAMMTKGEEYRGEPVSA

SEQ ID NO: 157562 - protein, 489 aa, unidentified
MAKTKRKQSTFERLRRGELNRKQRRNLARRLAGNDPGLTIIHSNAGGIDVGNESHFVAVPPDRDANPVQEFGCWTADLKRMAEWLKACRIDTVAMQATGVYSIPLYDILTGHGIQVVLVNAQHTKNVPGRKSDVQECQWLMKLHTYGLLRDSFRLEERMEGVRTIWRLRDRHVKDASRAVQHMQKALTKMNIQLANVISDITGVSGQAIIGAILEGERDPWKLADLKHEMVKASREEVARSLEGNWRVDLLFELQQAVDSYHFVHQQMRACDRQLESFLASLPTRILERPNQPDGAPAATAKKTKKPRKPKKARRNQPTVDLTTELKRICGVDLTSIDGIDVITAQTIVSEIGTDISKFKTVDHFASWLGLTPAKDITGGKIIGRGRRKVQNRVGGALRMAATTLIQSKTYLGARYRHLRQRLPSYAAAIKAMARYLAVLVYRVLTHGEAWVDRGAAKFEQNRSERELRSLTSKALAKGFKLVPIPVTS

SEQ ID NO: 157563 - protein, 475 aa, unidentified
MNVKGTKKKNQAVTANIFEQQELLKKAEVIRESLTASTWHELETNGKFDKNKKLSFISDDMLILGCDVGSETHYMRAIDTRGRELSKSAFSFNNHSDGFQSAKEWAVKIAAEHNKSQIVLGLEPTGHYWFCLAAWMVSNGISVVQVNPYAVKQTKEVEDNSQMKDDRKDPKLIANLVKDGNFGMPYLPEKLYAELRRLSMFRDQLNEDRTRTINRMHREMKIYFPEYKDALGKVDGAFSLELLRQAPFPDDLISLGEDGIRKIWHDARLRGRGYSRAGEILQYAKVSVGIKDGAIAGKAAVKWFVQKILELDAELAVIENQINQKCQEIPHAGNILEISGIGENILSGILAEMGDISRFDDVKEIQKLSGLGLVACSSGKHKGETRISHRGRKRLRYWLFQAAKSAVAHAEEFKELHIYYTTRADNPLKKMQSLIVIACKLLRIIYTILRNGTVYDPKKMLMDIRRPEKKEAAAA

SEQ ID NO: 157564 - protein, 423 aa, unidentified
MNHSTLCVGADVHLKDIVLRAVDKVTGEEVIAPSKVTNNLPGARTSALRIASVAERLGYTRIEIGYEATGLLWLPFHRFLSTTPLLQSFELVQICFNPKLIAGFKGGMDLRTPKSDERDAFDIAARVQVGYWPASHVPSDFWQGLRRLTRYRFRLSRNLAREKMRFQSNAFLKCSDWTRIKPFSDLLGATSAALLTEFTAAQLREMSQDQLAQIISHRGRGRFHDPDATTRAVQKALSSSYPIDPQEDEMLTTTLALIWRHIREIKRLMKYLDRQIAHAIQPLPNPLITVSGLGPVITAGLLAEIADVSRFPDHKHMAQYFGISWNKRSSGEFVSHNSHITKAGNLYGRYYFILGADRLRLYNLEFKAYYWRKYNEVSNHQHKRALVLTARKLVRLVHALLTKNVPYVRPQMPLQYEVDSLLQ

SEQ ID NO: 157565 - protein, 354 aa, unidentified
MHQPEQAAEVIIGVDTHKDTHTAVALDTLGTRLGTTTILVSREGYRQIEAWARSFGSVRAFGIECTGSYGAGLSRALQASGYRVVDVNRADRSARRRHGKNDPLDAEAAARAVLSGQATALAKSGTSSVEMIRHLKLARDSAVKARAQAMQMLKALIVSAPAELREQLEGIRGKVTLVRHLAALRPGPMTSTTASAKVGLRAISRRWLSLSEEIEAHDRDLDALAAAHTPELISAPGIATGTAAEMLILVGDNPERIRSEAAFAKMCGTCPLPASSGKTSRHRLNRGGNRQANAALHRVIVTRMRCHQPTIDYVRRRTAEGKTKAEIMRCLKRYVAREVFTHLCKPRPPASETA

SEQ ID NO: 157566 - protein, 417 aa, unidentified
MNSNPETIPIERYIGIDIHKQYVMVGGQNEKQEWVLRPRNVQMSRFRDWAAKNLRMGDAVVIETTSNAWDIYDIVAPLVSKTVVANAYKVRQIAEARVKTDKEDIKRLITLLIADIVPEVWVPPMHVRELRSLVSLRWRLNKQIAMSKNRLHSVIQRYNLNPPKGKILADKNQSWWERQTFSDLTGFQVECDLQIVEHLELQKAAIDQKLAEMSNTEPWADEIVYLMQIPGFGIIFSMIVLSAIGDVTRFTHPKQLVGYAGLGAGVHDSGQKHQDKSITKEGRRELRWALVEASWGAIRSDPYWKAQYEHLKKTKHANKAIVAIARKLLVSVWYILTHREPYRHFDDETIAYKMLIWSQRMDEKAIDGMTRPQFAKYGLLRLGVGKDLTRIVRNGLPRRIAPTDEVLALKPDLKPSG

SEQ ID NO: 157567 - protein, 412 aa, unidentified
MLFVGDDWAEDHHDVEIVDDTGKLLARRRLPEGLDGVTRLHALIGEHTPIEWADVEPAQAAAMVKVGIETDRGPWVAALAAAGYEVFAINPMSVARYRERHSTSGAKSDAADAHLLAEIVRVDRAHHRPLAGDTAAGEAIKLTARAHQSLVWDRTRHVLRLRSALRDFFPAALRAFSDLDAPDTLELLARAPGPDKAARLTKARIGAALNRAHRRDVATKATELAAILREEQLRQPPDIQSAYEAVVSSEVAIIAALNTQIDQLSTVVAAHFGQHPDADIYTSQPGLGTILAARVLGEFGDDPHRYRDAKARKNYAGTSPITRASGNRKVVLARYARNRRLADALQQWAFCAMRGSPGARNYYLQLRARNIGHQAALRQLANRLVGILHGCLKTHTRYDEHTAWANLRTAAA

SEQ ID NO: 157568 - protein, 351 aa, unidentified
MKVTTIGIDLAKDVFGLHGVDGEGRVTFKRRLVRSRLLEFLSQLPRCLVGLEACSSAHYWAREIERLGHRVRLMSPRFVKPYRKSDKNDANDAEAICEAVTRASMRFVPIKSEAQHEVQALHRVREQLLKSRTALVNQVRGLLAEHGVVAPHGIARARRLLLGILADPERHGLSGLFRETLQEMAERLRFFDERVGAYDDRIERVFKEDERCRRLAKVEGVGPLVATAVVAAVGNASEFKSGRELSAWLGLVPRQHSSGNRSQLLGISKRGDRYLRTLLIHGARAALRRADHKRDQRSRWAMRIKLARGYNKAAVALANKNARIIWALLTRGENYRPAAISVASAGSVESV

SEQ ID NO: 157569 - protein, 316 aa, unidentified
MAMRVSKSIVGVDVAKVELVTYQADPDLLTSITNEKPAIKRWLKTLPRTTAIAVEATNVYHVDLVELAYESGFDVYIIDGFQLSNYRKGVGGRSKTDASDARLLARFLKNEGENLRPWTPPPAVYGKLQSLLRRRASLIQAKTSLTQSWANDTSLKASFAAFLKSIERLDLLVKAKLKDALREAGLLEQVARCQAVEGIGFLTATALVMAYNRGDFKSGDSYIAFLGMDLRVTDSGQKNGRRFLTKRGCSEIRRLLHNAAMSASRSSAWKEFYDHHRSRGKATTQVLVMLARKLARVAFALMKNQSEYQPKGWVMA

SEQ ID NO: 157570 - protein, 320 aa, unidentified
MMAQNADVVAGIDVAKGKVDACIRTLSMRPAFPSTAEGRRRLLAWLRKHRVTKVVMEASGGYEREWAKVLRQAGIEVRIVDPKRVRNFALSAGRLAKNDAIDAEMIAWFAETFSQGPSQVYDADREELKALVQARLGLIDLRTRLGAQSEHAAHGLVQKAHARIVKGLDAEIAKLEAEISAKVKSSPDLAQRVDLIKSVPGLGETSAANLVAGMPELGQVSDKIAAALVGVAPYDDDSGKRRGDRRIKAGRRWVRNAIYMPCVGAATLNNPVLKAFYRRLIAKGKEPKVAIIACMRKLIIILNTMLARRQKWDAKRYSLS

SEQ ID NO: 157571 - protein, 429 aa, unidentified
MHKPKAGHMKQWKDLTHYAGFDWARDHHAVVIVNAQGQIVADFEFEHSLEGWQSFSEKTAAWPNLAVAIETNQGAAVDQLLQRSYTVYPVNPVASESYRKRKAPSGTKTDHFDGWGLADALRVDGQGWKALQPMDPLTQQLRLLCQDEVSLIEQRTLLVNKLQQALVEYYPAALKAFDDWTCPFTWDFLMEFPTPQALVKAGQRRWEKFLHCHKLWRPETTEKRLAIFAQADQFKASQPITNAKSQLALSLCKVLRLLEQQLDHYRQQIEALFKDHPDHDLFGSLPGAKKVLAPRLLAAIGTDPQRYGTHNVLQCFAGTAPVSYQSGQINKVNIRWACDKFLRHTVHLWANCFRKASAWGQTYYQKKRHQGMNHACALRCLGQRLLKIVFKMLTEKKSYDAELHARNQQKHGSWVLQLMNENPAPKACE

SEQ ID NO: 157572 - protein, 359 aa, unidentified
MSAWYEGQQFVGIDLHRRRTVLVRMSEAGELLAPMVRFPSTAEALRREMTPAITAGGPPPQVVVEATYGWYWAVETLQQLGAQVHLAHPLGIKGFTHRRVKNDERDAADLADLLRMGRLPEGHIAPAPVRALRELVRHRAKLARWRGMVKSSVHAVLAKRGVVVPMSDLFGVEGIALLNSLCTVSGRSRLEPAYAARVTSLRTILALLEAEITLFDRRIAAALNGHRGYRAIQQISGIGPVFAGVFVAEIGEVTRFSGADKLTCWAGLTPRHHESDARVHRGRVTKQGSKLVRWAAVEAVQRSHAPGVADIRTRIAERRGRPGARGGRNVAKVAAARVLLKQVYYGLRDGEIRALAATA

SEQ ID NO: 157573 - protein, 302 aa, unidentified
MKKVSTVAAKASRKISQQKLTIGLDLGDRSSWYCVLDEAGSVLLEQRLSTTPKALREVFGGMPRSRIALETGMHSPWVSRLLSELGHEVIVAHARNVRLIGESRKKDDRLDAQTLARLARIDPELLSPVKHRSAKAQADLSVIRARAGLVRARTALVNTARGLAKSYGERLRGCNVRNMNPEKAEGLSPELQAALQPLLAALGSLSERIAEYNQRIEKLAQESYPQVALLKQVKGVGTLIALTFLLTLEDPHRFCKSRDVGCYLGLQPGRRNSGQNEPQLHISKEGDPYLRTLLVQGAHHAQ

SEQ ID NO: 157574 - protein, 343 aa, unidentified
MLYVGMDLSRKRLQWEAAWPDGVLAGADVAVPDADGLARLADRLAGVEEQVVGVIESMTGARFVHDRLEASGWDVRIADAALAKGLAPLTCKTDRIDAHVLCELGRRDLVPEIWLPGPDDRAERERARFRLHLAKHRTMLKNRIHQTLITHGHACPVSDLFGSRGRELLDRFQIPDPWRQTVDASLCLIDHLDRQISQAEAELRALGADHPDVSLLVTIPGIAWILGYTIAAEIGDITRFASPAKLIAYTGLVPRVYQSGDSDRRGPLTHRGPRYLRWALIEAALHAARPTHPYHALYARTKTRVGKQRGRKLAAIVVARKLAEAIWWMLTRHRPFAPAGAPM

SEQ ID NO: 157575 - protein, 319 aa, unidentified
MNHSENNEINIGIDVGKSQLDIFVRPIGDYFSVPNNENGVREAVKRFCKYQPKRIIIEATGRLEHKLVFACVEHNLPIVVANPVHVRRFAQAIGQLAKTDKIDAALIANFGDTIKPDKTIIKPKNIRTISDLLARRKQLLTMQTMEKNRLGIMPQELHASIKSIIKAFKSAIDKVDKLLDTLIIENKEWAIKNDILQSVPGIGKVVSYTLLSNLPELGHLNSKEIAALVGVAPINKDSGSYEGQRRIRGGRHQVRTVLFMSMMSAIQYNRTLKAYYERLKAAGKLPKVAIVACMRKMIVILNTMLKTGTAWDEKILKSS

SEQ ID NO: 157576 - protein, 416 aa, unidentified
MEVIVSRCAGLDVHKNTVMACVRVPGPNGGRTSTVRQFRTFTAGLRQLRDWLVAEQVSQVVMEATGVYWKPVWHILDATAGLELMLVNAYAVKNMPGRKTDVADAVWLAELGECGLLRPSFVPPPVIAQLRDLTRYRKKLIEERARETQRIQKLLEDAGIKLDSVVSDILGVSARQMLEALIAGVRDVAALAELARTRMRAKIPQLRQALEGRFGAHHALMLRMHLEHVDQLSVSIDRLDSEVDRVIRPFSSALQRLITIPGVGRRTAEVIIAETGADMRRFRTAGHLASWAGMCPGNHESGGKRRSGRARKGNAALRAALCEAAWAASHARSGYLPAQYRHLLRTFGKKGQTRAVFAVGHSILVIAWHLMAHDRDYADLGGDHFTRATDAEARGRYLVRQLEALGHKVTLEPAAA

SEQ ID NO: 157577 - protein, 453 aa, unidentified
MSKKRKNKAQPAPAINTQLHPNAAGIDVGAEEFVVAVPADHHPESVRTFPSFTTGVETLCEWLQACGITTAAMESTGNYWITLYDRLTARGIDVYLVNARHVKGVPGKKTDVCDAQWLQQLHAAGLLKKSYRPALEIVPLRFLMRHRCEMIGDSARQLQLMQKTLTEMNIKIQHVFSDIDGVSAQAIITAILKGERNPAKLADLRDGRCRSSVSVIMEALKGDYREEYLFVLRQSQSAWHQLSKAIGECDKQIAALMAKVHTKECPPLPPAPGQQHRMTKNCPDLPIFEEAWRFFGVDLSAVPGVGGGLLSTLMSELGTREQILKQFGSGPALASWLGLNPDNRISGGKVLKAKTRKVASRLAKALRMGVFGLQKSHTKLGDYVRRMKARLGKAEGIVAGAHKLLRIIYGMIKNQMPYNEIEAFKTTPQTAARRRRNLEKQAAALGLQLVAAV

SEQ ID NO: 157578 - protein, 316 aa, unidentified
MGNLINTINIGIDVAKDELVIFFDGDQSSISIANTQSALTELVQVWQSYPQLQRIVIEASGGYEALAVSILANCRLPVSLVNPKRVRDFAKGLGKLAKTDRIDAALLAVFGQMTVPSLYQFPSPEQAHLAALAARRGQLVLMKATEQTREKQAAAAIKPSITRHLQWLETEIQAIDTDLQQKIKDHEPFQQLDEKLQLVPGIGPATSAMLLAELPELGKISAKEVAALVGLAPYAADSGRHRGQRRIRGGRRQVRKSLYMATIAAIRCNRTINQFYQRLKEHGKPTKVAIIAAARKLLCLLNAIARDDKSWSPVSI

SEQ ID NO: 157579 - protein, 319 aa, unidentified
MAQNDLVVAGIDVAKDKVDVCIRALSLRRTFAATAEGRRELVSWLRRQKVGKAVMEASGGYERDWAKALRDAKIEVRIVDPKRVRSFAQSAGRLAKNDTIDAEMIAWFAETFDEARSQAYDATREQLHQMVNARQALKGMQAKLESQGEHALPAAVQRMHARILKTITVELVKFEAAIAAMIQATPRFTELAEIIESVPGIGRTTSAAIIATMPELGQANNKIVAALLGVAPYDDDSGRRRGERHIKGGRRRTRNVFYMACLGAATQHNPVLKAFYDRLVAKGKEKKVALIACMRKLISILNIMIERRQKWDASRYALS

SEQ ID NO: 157580 - protein, 336 aa, unidentified
MSEKQWVGIDVCQKYLDVYIRPKEELFQVTNDEVGITRLVAILKNIQPELIVLEATGGMEIDVAVKLTKAELAVAVINPRQARDFAKATGTLAKTDAIDAQLLAHFADAIRPEVRPISDESSRQLEDLVARRRQISNMITAEKNRRRGKTNSVQVDIDEHIEWLEKRLKEIESQIKEAIAQDRDWQEKLKLLTSVPGVGEVVAVTLISSLPELGTLSHKSISHLVGVAPLNRDSGKFRGKRKIWGGRAKIRCVLYMAALVAIRFNPPIKAFYERLIQKGKLKKVAITACMHKLLIFLNAMMRNNQTWRHEVSPKGYRFAYAKAYRSAYPLGQPQIV

SEQ ID NO: 157581 - protein, 340 aa, unidentified
MEQYVGLDVSQKETAICVIDAEGKRVWHGTCRSTPEAMAEVVRTKAPLAVKVAMETGPLAVWHWHGLKAAGVPIVCIHARHAKAALSMQINKTDSNDAFGLAQIVRTGWYRPVDVKSMDSHRLRLLVAARTRVVSMRTGLYNQIRGLLKTFGVVLAPGKGSSFEQLVSRGIPNDHFVRVVIESQLSTWRHLSTELKKLNREIERAARALPVCRRLMTVPGVGPLTAVAYATTVDQPSRFRRSKDLGPYLGLTPRKYQSGEVDRTGSISKCGDRTTRSLLFEAAGVLLFRNRHASALKKWGLNLSRRAGTRKARVAVARKLAVLLHRLWTNGRVFEAYSTV

SEQ ID NO: 157582 - protein, 347 aa, unidentified
MRFYTNQHRYYCGIDLHARSMYVCILDPQGQILLHRNMPCAPESFLKAIAPYREDIAVAAECIFTWYWLADLCSKQNIPFVLGHALYMKAIHGGKAKNDKIDAHKIAVLLRGGMLPMAYVYPPEMRATRDLLRRRMYLMRKRSELLAHVQNTNSQYNLPEIGKRIAYKANREGVAERFSDPSVQRSIEVDLKLMDHYDQLLTDLELYIVRTTKQHDAYAFYRLRSVPGIGKILALVILYEIHDINRFPTVQDFVSYSRLVKCAKESAGKRHGTSGKKIGNVHLKWAFSEASVLFLRANPKGQRFVEKLSSKHGKAKALSILAHKLGRAVYYMLSRKQAFDMNKFFSS

SEQ ID NO: 157583 - protein, 430 aa, unidentified
MKSNTQNAKIEAITEKTLVLGIDVGSETHYARAFDYRGIEYSKKPFKFSNTEAGFATFKEWILDLKERHEKDKVVPGMEPTGHYWFNLGKFLQDNEMKPVLVNPHHVKKTKELDDNNPTKNDRKDPKVIAGLVREGRYMIPYLPDGVYADLRTASNIRFQLQAELTRIQNRISRWFNIYFPEYKTVYGKPDAKSGILILKAAPLPEDILTLGIDGVNQIWRDAKLRAVGRARAKTLIEAAEHSVGSKEGAMSARMEIRMLLEDYESRNTRLQEVMVLIEELVRKIPMAEKLLEIKGVGIRTVSGFLAEVGDISRFNNPKELQKLAGLALVENSSGKHKGETTISRRGRKRLRYLLFEVAMSLVSKNQEFRELHNYYTTRRLNPLKKMQSLMAIAAKLIRVFYAMLTKGVDYDPKKMVSDIKRPAVYLQAA

SEQ ID NO: 157584 - protein, 272 aa, unidentified
MERIFVGLDVSKDRLDVHVRPTDDSFAVAYDEEGLAMLVSRLGLLQPTLIVLEATGGYEVKVAAGLANAGLPVAVVNPRQIRDFARATGQLAKTDTLDARANARFAETVQPAARPLATAQAQVLAALVARRRQLVDMLGAEQNRRRQARDPGLQKRIRAHVTWLTRAIEELEGEIKRLIRSSPVWRAAEDLLTSAPGIGDTTAHALIADLPELGRLDRRRIAALVGIAPLNRDSGLWRGRRMIGGGRPPVRRALFMPTMVAIRYNPVIRDGG

SEQ ID NO: 157585 - protein, 335 aa, unidentified
MKQVTMIGIDLAKNVFALHGVNAAGEVVLRRLCRRHELAELIAQLPPCVIGMEVGSGAHEWARRFEGFGHTVRLMAAKFVHPYRKAGKNDFNDAEAICEAVGRPNMRFVPVKSTEQQAILCLHRARQGFVEERTALINRIRGLVAEFGIVLAQRPIAVKRARALVLEALPELARAALSDLYDHLAVLDERIAQHERRIVQLARENEAARRLMAITGIGPLIALALIATVGDARVFANGRQFAAWLGLTPRQHSSGGKTRLGHITHRGDAYLRMLLTLGARAAVQVAGRRSDRLSRWIVELRRRRGYHRTVVAVAAKNARIAWALLARGERLRVAT

SEQ ID NO: 157586 - protein, 400 aa, unidentified
MISIDGVGFFLGLDVGKQTHHGHGLTPAGKKVFDKPLPNSEPKLRAVFDKLTAKFGTVLVVVDQPASIGALPLTVARDAGCQVAYLPGLAMRRIADLYPGEAKTDAKDAAVIADAARTMPHTLRTLDLTDEVTAELTMLVGFDQDLAGEANRTSNRIRGLLTQFHPSLERVLGPRLDHPAITWLLERYGSPQALRKAGRRKLVEVVRPRAPRMAERLVDDIFTALEEQTVTVPGTGTLDVILPSLAKSLAAVHEQRRALETRIEALLEAHPLSQVLTSMPGIGVRTAAVLLATVGDGSSFPTAAHLASYAGLAPATRQSGTSIHGEHAPRGGNRQLKRAMFLSAFAALHDPASRTYYDRCRAHGKTHTQALLRLARHRISVLFAMLRDGTFYEPRSPRTA

SEQ ID NO: 157587 - protein, 387 aa, unidentified
MQRVEQAWAGIDAGKTHHHIVVIDGEGRRLLSQRLANDEAELSQFIEVALNRADSLTWAIDLADGPAALMITLLLEHGQRLLFLPGVAVNRASAAYRGEGKTDAKDAAIIADQARMRRDLRELQLEEEMIAELRLLTALRADLAADRTRTINRLRGLLLSVFPALEAVLDFTNRGPLVLISHVQTPDAIRASGQQQLELWLRGRKIRAAGKLATTAVQAAAAQHTRIRGESVAAALVSRLADNILELDRQLAELDKLISDRFRAHRNADIIASMVGIGDLLGAELLAATGGSLTGFASPNHLAGYAGLAPTPRDSGRRTGNLHRPRRYNRQLQRVFYTSAMISIQRSPASRAFYDRKVRHEALDVRVEVRVLRRPVVAAAGLKLGAA

SEQ ID NO: 157588 - protein, 370 aa, unidentified
MKERITSYVGLDIHKDSIAIAVAEAGRTAPRFVGTTAAELAQLCKALRRSADARHTLVVYEAGPCGFGWARHLTAHGWRCEIIAPSRLARSPAEQRVKTDRRDALLLARESRAGNLVSVVMPDTHDEAMRDLSRTREDAVAARLRARLQLKAMLLRHGRAYHGKSSWTQAHERHLAALRFEHPAQEIAFNEYRQAVKDADERVARLTEALRAQSVHWRMWPIVEALMCLRGFDFVAAVTFVAEIGDLHRFGHPRALMAYLGLVPSEYSSGQARHQGRITKTGNTHARRILVEAAWNYRFKPQVSRCLEVRQQRQPKALRDIAWRAQLRLTQRFRRLSLGRRLPQNKVCVAIARELAGFVWDLARQVTLTT

SEQ ID NO: 157589 - protein, 402 aa, unidentified
MIFINCLGIDISKSESVVAHYKDEVLVKEMVIQNNQNGYRYLKNYIKHLDSLFILFESTGIYSRGMKRFCEIHKIDYLEMNPLEAKFKTSSLRSWKTDKSDAHKLALLAFRMKDSKVQRHPEEIYFELRERARFHLEMEINQNRLKVELVETLHQTFPGLEKLFTNRYSKIALNIAKAFPHPDFVSTLTHDELVEKVLHSTDKGISVNKAHKYVQKLIEIQINSFPNVDKSSFLLQKVQYLCDKLLIGIEEMKEFDQEMIDLAKNTTEFENIISIPGIGELTAALLIGELGNIREFKTNKQLNAFVGIDIKRYQSGTSKSRDTINKRGNKKARRLLYLIIMNIIRGRNHYQSHIVDYYYKLREQPHGKTHKTAVIASINRLLKTIHYLIVNNKLYDYQKAPH

SEQ ID NO: 157590 - protein, 472 aa, unidentified
MPGKRRSKTRTTKRARPTAKQRQRFLERVHLNAAGIDVGSQAHWVAVPEDRDERPMQKFSSFTHDLHRLADWLEACGVETVAMESTGVYWIPLYEILEERGFEVLLVNARHVKNVPGRKTDLLDCQWLQQLHSFGLLRGSFRPQAEIAALRSYLRHRDKLVEGAAAFIQRMQKALILMNLQLHNVISDLTGLTGMRILRDIAAGQTDPERLAEHRHTRIRASKQEIADSLRGHYRDEHVFQLRQALEFYDFYQQQIQACDREIEARVRTLEVRCERPTTPLPALQGPRRTSHAPDFEIRSPLFVLCGGVDLTELPGIGPYGALRLISEVGLDMTRWPSEKHFASWLTLSPNAKISGGKLLASATQPSANRAARIFRIAAMSLGRSDHALGAFYRRLAARTGKAKAITATGRKLAVLFYRTLRDKRPYREQSAGDYDARQRSRILRHLRRRAESLGFQLVDRATGELLGAPVS

SEQ ID NO: 157591 - protein, 338 aa, unidentified
MIIIGCDFHTRFQQIAMLDSESGEMIERRLEHEGGEAQAFYAGLAGARVGMESTGYARWFERMLAEQGHELWVGDAAAIRAAMVRKQKTDSRDALHILDLLLRERFPRIWIPSAVEQDVRQLLRHRYKLVCFRTSVRNQLHAQAMGEGIRRKQKLWTAKGRQELESLALDGWASRRRQELLEMLDRLDGSIEELDRAVHDEARSRPLAVRLMEHPGVGPVTALAFVLIIGEVGRFRRSKQVVSYVGLNPRESSSGGKQRLGSISKQGNSMLRFLLVEAAQTAARFDPELQRDYQRLKFRRGPGVAKVAIARKLAVRLYWKLREAAPSSAAGSHAGQSG

SEQ ID NO: 157592 - protein, 394 aa, unidentified
MRNVYGSVASIGMDVHYKFSTVVMRSVEGKVVRRERLEHPDRGTLRAVLAGWPQEVPCVLEASFGWAWLTDVMKEVGLQPALANSYKVEQMRKARGLAKTNVKDAELLSLLPLEATDWWKVWLAPPEVRDRREWMRYRSSLVAIGTATKNRIHAVFHRHGIFHEFSDLFGGKGRRFLGELCREGQAGEVRLSGGSLAGLRGLVRLLDHVRGQLAEVARALRGELERSPLARRLDGVPGFGLILAHTLMAEMGMIERFRDHGGLARYSVLAPISHDTGEEDGSRAPQGRHLGHRGNQTLKWAFIEAAHGAVKSGGKWRAMFDKYTDGGQKNRNRGYIKVARELVKVVYVVWKKGVEYTDSPPARPGSSRREQMERFFGSTRSGTGQSSQPMAAVR

SEQ ID NO: 157593 - protein, 312 aa, unidentified
MLTPSVYLGADVSKLTIDLGCPHFAVPTSITNDPAGHRTLMKILRRSPSPIHVVCEATGPYHKALVAALHQAGVGVSVVNPRLPRDFARSRGQLAKTDRIDALLLADYGRTMQPAPTPQPEAQMTLLDDLVTRRAQLVEDRAREKNRLQQTTNAEALASLRLHLRHLDGQIEKLLARIAEVVESTPALRAKVARLVAVQGVGALTASALLAALPELGTLSKNEVTALAGLAPFNRDSGAFRGTRSIRGGRSEVRHALYMAAFCASRRNPILKAVYQRLRANGKAHKVALTAVMRKLLIHLNSLLKRLPSSPA

SEQ ID NO: 157594 - protein, 403 aa, unidentified
MEVTKEHLDIHQFLIVGIDVHKDNHALVAANGFNQIFFEKEISNQYSDFQQIVDQIQLIARKENLRPLIALEDSYGYGQALARFFFSKGLEVKTVNPVLTRRERGYMTHPEKSDISDAKGVVKATILEGIGRLPTFRITSESEFSKDLRILVYDRDFLIKEQTRLKNQLHRLLHQSYSGYYDKIFKDPFSKKSLKLWQEFPSLLELKRTKRRITKPDWLKKINTLTLLSISNLQENQIKRKVRRLLQIREELKEMDQDLEQLLSNSNQYLETLPGCARILAAGTLAEVKDVSRFNSKDAFAKYAGLSPRPWESGKKKRNKKSLSGNRRLNRIIHQIALSQIGNRGYQPAKDYFQKKIAEGKSKKQALRCLKRQISDVIYPVRSLLNSSLKLKLFSNFYNFWSF

SEQ ID NO: 157595 - protein, 332 aa, unidentified
MQTLAIDLGKQSFHIYGITSDGEVISRKVSRAKLVDAINKLHPQSVTMEACASSHHWGRTFDALGYVVRLIHPRFVKPFVKGSKNDAVDAEAIFEASSRPSMRFVPLKTVEQQELQSLHRMRDRLIVQRTALINHTRGLLAEYGFIIPVGASRFRLQIEDIVENAELSALAKNLFGKLIDEYRDLDTRVSVLDDMLVEICRTNERCKRLTTLPGVGPVVATALVAAVDDGRHFESGRALAAWIGLVPRQYTTGGKPRLGGIGNRANHYLRRQLVHGARSALLRIARYDDRHSKWAQALQARAGHNKTLVAMANKTARMAWAMLRNGENYQMA

SEQ ID NO: 157596 - protein, 401 aa, unidentified
MNSVGIDISKGRSTIAVMRPFGEVVISPFEVRHTDSELSELARQLKSLDGETRVVMEATGNYHAPVAKLLHDAGLYVSVVNAKLVHGYGNNDLRRVKTDRKDAIKLANYGLDRWLTLPRYVPEEDTRLLKNCYRQYRQYSKVQTVLKNNLISLLDTVFPNVNRLFSSPIREDGSEKWVDFVAEFWHCRCVSEKSQKAFTNKYQRWCRKHGYNFSEEKAHTIHAEASGHIGIMPKSETTKLLVEQAVAQLRATSAALTALKHEMQSLASMLPEYPVVMDMFGVGPTLGPQLIAEIGDVRRFYSKKALVAYAGLDAPPNDSGDVTGKHKSMSKIGASSLRRTLFLVMSVYLQNAPLDEPVYQFMDRKRAEGKPYRVYMMASANKFLRIYYATVKAYLELLERT

SEQ ID NO: 157597 - protein, 331 aa, unidentified
MKKQNWAGVDVGSQELVVAVERNGKRDGTLSFENTAEGHRKLIRSITKRGASARVVLEATGVYGFDLALALARAPRVEVMVANPRAVSHFGRASLQRSKTDALDAEVILEFAKRMPFKPWIAPAREILDLRAISRRMEALTKTATQEKNRLHASDQSEELGEVVRADIVFSIEHLESRVAQLRDQALQLIASHSHLRDAFGHLTSVKGIAEVAGIQILAELAILPKDMSVRQWVAHAGLDPRQYQSGTSVHKPARISRTGNAHLRRALFMPALVAVQHEPHVTAFYEKLLGRGKTKMQANVAVMRKLLHAIYGMLTHDQDFKGEKFYAIGA

SEQ ID NO: 157598 - protein, 328 aa, unidentified
MCEFTGIDVSKEKFDVGWLRDVKTDKKKTKVFINTAVGHQQAVDWLLKNLKVPAEDIVITLEPTGVYHEALLYFLHDCGFQMLLVNPGKAKKYAESINQLHKTDKLDAITLAYYGHAQHHRLTLWQPESLEIRELKVMIRRLDALEKDLQREQNRQEATRVSLSSDRVAQSLKDMIDTLKAEIQRLQQDIDNHIDRFPELKRNRQLLESIKGIGPVMSRELVYLFASKHFKSARQAAAYLGLIPKLRESGKLKGRTMLSKIGSARLRAKLYMAAVCASTHNPDIKAQKARLLKAGKVKMQALGAAMRKLIQICFGVIKHQCEYQPQLV

SEQ ID NO: 157599 - protein, 404 aa, unidentified
MKGPIVSIDVSKGKSDYQAFKDLNVKYTGSRSIKHNKEGFDEIVNLVREMEKKLETEVCVVYEATGVYHRVLKKVLEDNNIKQFIINPLLSAKTRKNDSLRSPKTDKLDPKSIAKTYYSHSLHNSHKQETIYHELRELSRYYEDILVHIRKDKVAFRAQLDIVFPGYDTLYDDLYGPVALAIIEKYPHPEMLQKKKINTVSKVIQNKICHRQAVSDTMADKAIEYSKTIYSGCDKDDIEVLILQRFIKKLNEDMAEAERTIGEMIKLAQELPDFNIIKSIPGIGDNLAARIIAELGDMTRFKKKNELVAFAGLDPRISESGQNDGDHMHITKKGNKRLRCLLYLAVTCSIRLKRDDNSIKDFYIKKKQQSNPICSKAAKTACASKLVRIIYSMCKTGELYQYNK

SEQ ID NO: 157600 - protein, 315 aa, unidentified
MFPQVTSAVTYIGADVAKLSVVFQLPDQSWSFANIPEGHAALVTRLRTLAGPAHIVCEATGGYERALVCALHQAGIAVTVLNPRQARDFARACGHLAKTDGIDAQVLADYGAKLHPQADPVPAPGEEAFAELVQARRDIVGLLTAEAGRREHTTLPSLRKLADARQRQLENQLAKLDILLDAHVAADTKLAAKAERLSAVAGVGRVTVLTVLALMPELGAIEDPKAAALAGVAPLNHDSGQYRGQRHIAGGRSAVRRVLYMAALSASQHNPILGAIYQRHRQNGKPHKVALTALMRKLIVLLNRLLRNPDFVLVG

SEQ ID NO: 157601 - protein, 438 aa, unidentified
MTTPSLPVLDPSAAAIDVGSEQLHVSVAGGPPKVFGTMTGQLHQMRDWLKAQGARSVAMEATGVYWLCPYEVLEQGGFEVVVVNGKYVKNLPGRKTDMSDCQWQATLHAHGLLKPGFVPPAHIRRLQDYIRVRTDHITMAATHEQHMQKALDRMNVKVHEVISDLTGASGLAVIRGILDGIRNPLALLTLCDRQVQEKKAERMLAALEGTWKDEHLFALRQALELWQFYQEKIAECDEAIEKVLKEIAGPEDPAHPAPPPTKRGGVNTPGIVQLHAMLWRLCGYKDLTVLPGVADYVLLQLLAEVGTDLIQWKSEKHFTAWLGLAPGSRQSGKRRGNQKRGRNRAGRLFCVIARSVGRSVDKALGGFYRRLKGRRGGLVANLALARKLAELFWRMMVHGISYVEQGLNKYQEKVAQTEQRLLQKLARKYNMLLQPKAP

SEQ ID NO: 157602 - protein, 398 aa, unidentified
MSTSTGPLRVVIGMDPHKRSATIEVMTGDESIVGGGRFGTDRDGYAEMRRYSRRWPDRVWAIEGCAGIGKHLASRLLADGELVLDVPPKLSARARVFATGQGRKTDATDAHSVALVGTRMSGLRPVVTDEQLEVLRLLVDRRRSLGEEHTRKTSQLHGLLLELIPGGAKQNLSAAQAKALLAKIRPRDVVGKTRRRVAAELVADLERIYTRKKAANKELTELVKQTGTSLLDLHGIGPTGAARLLVEVGDITRFPNKAHFASWNGTAPLDASSGDQVRHRLSRKGNRQINRVLHTMARVQLRNPTEGRAYYDRKKADGKAPMEAMRCVKRRLSDIVYKTMLDDAVRTTDTTTRTGPGGQRGNDSDSSAAGSHPHTSSSDKSLPGPARQHPKTPLPAAS

SEQ ID NO: 157603 - protein, 354 aa, unidentified
MRTYYVGMDVHRASIVIVVLNGAGKVVERIKLQTSATAVRSYLQRLKGKVYVTFEEGTQAQWLYDLVRVLVTEVIVCDPRQNRLLAVGNKSDAIDAEKLAQLLRNRSLKAVDHADHGVRALKELVRNYDCLVQDATRVMLRLKALYRGRAIDCSGHDIYRQDRRKQWLKKLKEPGAKQRAEFLYKQWAALKPLRHEAKLLMVREARKQAAYPWLLSVPRLGAVSVAQLLAVVGTPHRFRTKRQFWTYVGLAVVTRTTADNEVVNGVLQRSRRPVATRGLNRNHNHQLKRVFKMAATSACHSQPFQAGYEARLQQGMDPALARLTIARQLVAITLSIWKRGEKFNVERMKKQPAA

SEQ ID NO: 157604 - protein, 349 aa, unidentified
MKIIGCDFHPGYQQIAMLDEETGELSEKALSHEKIQEVRAFYSALQGPVRVGIEASGQSQWFERLLAELGHELWIGDAAKIRASCERKQKTDRRDALLLLQLLMEGRFPRIWVPTPAERDVRQLLLHRAKLVRMRTQVKNQLQALALNQGVQRKWKLWSVAGRKQLEGLALMPWASRRRAELLVLHDQLEGSVSELDLAVAEQANTRSAVRRLMTHPGVGPITALAFVLTMGPAQRFRRGKQVASYLGLIPSEHSSGGRRQRLGHISKQGNTFLRGLLVEAAQSAVRHEPEMRREYQRLAQRKCRALAKVAMARKLAVRLYWMLRSDLDYAQLIRGSHAGQPESFRGRS

SEQ ID NO: 157605 - protein, 360 aa, unidentified
MNATTVAVDLAKSVFQLAVADSEWRVIESHRLTRSQFERWFHNRDVSLVIMEACGSAHHWGRWLNRLGIEVKLLPAAYVRAYVKRNKNDAADAMALLEAARCAEIVPVRVKSVEQQALQALHRTRSLWMGTRTSRINALRGFCREFGLAVPQGARTGVEAISRTLADPQTPIPTMIHRAMLFLVEEIRLLELRIGQLERELAELAKQSPACTTLLSIPGIGLLTATAMVAATGGQVSHFKDARHFASWFGLTPREFSSGSSRVLGRISKKGDRYLRMLLTHGARAVLRAASVARQAGKTLDGLRSWGLAVQARANHNKAACAVANKLARICYATLRDGEPYASSKRLAHTLNRSAFVIAA

SEQ ID NO: 157606 - protein, 410 aa, unidentified
MKVLHPQCCGLDVHKETVVACVRLVIDGKPVKEVRTFSTTTADLIALSEWLAETKCTHVAMEATGVYWKPVWHILSDDGFELVLANAAHIKNVPGRKSDVKDADWISDLLAHGLIRASFVPDGPTQEMRTFLRTRKQFVREKGSHILRIQKTLEDANIKLDSVITDIIGVSGRKMIEALIAGESDPAKLARLADPRVKASQQTLRQALRGRVTGHHRFLLRLHLDQIDALDVAIAKIDQEVEAGIAPFRTAVEQVSSTPGVKTLAAMQILSEIGTDMSRFGSDANLVSWACICPRSDESAGKRRSTRIRKGSPWLKTTLVQCAWAAVRKKDTYLHAQFHRIKARRGPKKAIVAVAASILTAIYHMLKDGTMYQDLGPNHFDARTKERQKNRLVKRLADLGYAVELAPLSN

SEQ ID NO: 157607 - protein, 355 aa, unidentified
MPSKADTAVARTIGIDTGKNTLHMIGLDEKGAIVLREKVSRTRIAGRFVNLPPCLVGIEAGMASHHVARELVALGHEVKQVPPAYSKPFRQGHKNDFRDAHAVAEAVERPSTRCVPIKTDGQLDLQALHRVRSRLIGNRTAVINQIRGFLLEHGIPVRQGYRFLRQQLPQILATRTDVLSPRMIRIVGDLMADWKYLDERIEGVTDEIEALAHADEGCQQLITVPGIGPIISSAMVAAIGNGAAFCKGRDFAAWLGLVPKQMSTGDRTILGRITKRGNRYLRMLFIQGARAVLLRPASWAKHSFGSWLTAATRRLHRNVLTVALANKLARIAWTVLAQGRRYEARVEPRVEPAAA

SEQ ID NO: 157608 - protein, 360 aa, unidentified
MQTYYVGLDVHSRESVFVVENDTGAIVARGSVPTTVNGLKHLRDSCGLPAATGVALETGTSAFFVARELARLELKPVVIDAHEVRRKAQRPEQKSDTRDALELCEGLRRGFYRSLVHVPSPAISDLRTTLSRRRHFIRIQTAEVNAVKRLLRGVGRNSGRRGSLRTDTHWQSLLAGDLVPEQLQEHVRHPYAVWRQAAERVRALGLSLGDNARERRDAVKRLETVPGVGPIVALTAIAVFAEVSRFESAKHAASYAGLVPSTFQSGERDAHGHITKRGSAELRAMLCEAAHHARRSAHPLHPHFAKVCARRGYKTAVIAVAHRLCRILFAMLRDGTDFSVTRVGVEQGDFERTTTYIGPT

SEQ ID NO: 157609 - protein, 398 aa, unidentified
MKYVGIDLHKKTISACVVVKESGQRAVAARKRLECRDEAGIAAWFAELGKFEVVVEATASYEWFVKLVEPLAHRVLLAHPKKLRVIAESKRKSDKLDAQVLAEFLASDEIPLAYRPGPRVREHRTLVRYRHYTQRRITSVKNKLRHILAAYNTDVPHLFTAKGQEHLAAVKLSAADRFVADELSSELHRHQKRQAKASRELRRFATKAPLAEKEARAVLDSIPNVGPVTTDVILAELGDWRRFRSQADVACYAGLAPGFRESAGKAKQLGITKEGSRLLRWAMIELAWRMIRTSRKWGRHFTHLEVRIGAKKAIVAIARRLVGMIFTLLRTGQKYALALESSQPASCRSNSPRDTHPSDPACLRGQPRQASSLGAGVDYGGPLSVPRKEAVEAESYMI

SEQ ID NO: 157610 - protein, 356 aa, unidentified
MTKVKANFENNTVYVGLDIHKRSWNAAIYLNDQFVRNVHQNPTPEALHHYLKHTYPGASYVCAYESGKFGYWIQRRFAGYGINCLVVNPADIPSTHKDEVYKTDSRDARGIGHALVCNQLKSIYVPTEGQESDRHLVRQRKKIWRDLVRCKNRIKGFLDYIGITVPPQYDNSNWSKNFINWLAALEFEYYSSRVTLNYQIKQMELLRKELLSICNDIRKLMRSKKYNEMYYLLRSVTGIGPLTAASLLTEIGDMKRFSSFYHLNSFIGLMPMEHSSGEKELKGRITVRKHRQLRSDLVECAWTAKRTDPALALYYSEQIKRGKNGKAAIVKVARKLLSRIRYVWLSGQPYQTAIVK

SEQ ID NO: 157611 - protein, 421 aa, unidentified
MESDYRIYVGIDWASEAHQACVLHHERGIVAERSFAHAGKAIVEFAQWLSGLTDDPGQVAIAIEIPRGAVVETLVERGFHVYAINPKQLDRFRDRYSVGGAKDDRRDAFVLADSLRTDQPCFRRVELDDPQVIQLRERSRVDEDLQREGNQLANRLRDQLHRFYVQALQLCPAADEPWLWTLLELAPSSSVAQRLRPKRVERLLRAHRIRRLKADDVVSALRVPALQVAPGVVEAATEHIALLLPRLRLVHSQRQRCGARIEALLDELRAAGEEDDKPGEHSDVAILRSLPGVGRIVAATIIAEAGAALTERNYDALRAHAGIAPITKQSGKHRTVLMRYACNGRLRHALYHCARVAVMGDLPSKTYYTAQRQRGHTHGRALRAVADRLLRILVAMLTTRTLFDCTIARPPQLSSPSEKVA

SEQ ID NO: 157612 - protein, 451 aa, unidentified
MSSSKGSPRGLPVVHERAAGIDVGSRFHVVAVGAELCEQPVQTFQAFTADLQRMADWLVGVGITTVAMESTGVYWVPVYEVLEARGIAVILANAREARCVPGRKTDVNDAQWLQRLHACGLLRASFRPGRDIAALRVYLRLRERHLDYAAAHIQHMQKALTFMNLQLHHVVTDVTGVTGMKIIRAILGGERDPQVLAQMRDVRCKASEETVRAALVGNYQPEHVFALAQALTLYDFYQTRVDECDAKIQEVLAVLVAEKEPPSAPLPKARHRTAQPNAVSFDVRPFLYQLAGVDVTQIHGLGPYVALRLIAECGTDLSRWRSAKHFTSWLTLSPGSKISGGKVLSAHTRKTSNRVVAHLRLAAVTVGRTNTALGAFYRRLAARIGKAKAVTATARKIAILFYNAMRFGMDYQDPGAAHYEQKYRERVIKQLHRRAAQFGFTLQEAGSASVS

SEQ ID NO: 157613 - protein, 340 aa, unidentified
MERITVMGIDLAKNVFELCGRDASGGIVLKRQIRRKQLREFVAKLSPGLIGMEACPGSHYWAREFRNMGHEVRWMSPQFVKPYVKSNKSDTAAAEAISEAVTRPTMRFVGIKTVEQQDLLGLHRIRERLIRNRTALMNQIRGLVGEYGIVVAVGEPSLRRELPRFLEDAECGLTPKGREWMAQLYEELKEVAERIEQYEKQIGMEFSSSEICQRLSKVPGVGPITSTAIVATVGDAHVFRKGRELSAWLGLVPRQHSTGGKPRLLGISKRGDKYVRKLLVHGARAVLQRVGEKSDRQSQWLRKLQATRGTNKACVALANKNARILWALMASGQEYRKSAA

SEQ ID NO: 157614 - protein, 425 aa, unidentified
MSYTVAAIDIHKKVLMVVVVVVVATSAEEVQDVTGEALEFECRRFGAGSGERKHLVAWLQEQGVREVVMESTAQYWKPVWLDLEPHIAKLHLAQAYSNRAPKGRKNDFRDAKRLSRRLLAGELMLSFVPEPEQRTWRTLTRSKQQLVRDRVQLQNQLEALLEEMRIKLSGVISDLLGVSGRRILTALSEGESDPGKLADLGDDRLKCSREELTDALQGAPTPTHLAVLKLFLERLKLLDTQIQSLDKLVAQEMKKHEEAVIRVAEMPGFGVDSAQQVIAEVGVAAETFPSAGEFSSWVGVCPGSDISAEQNKSSHSAKGNRFVRKILTQAAQAAVRKKGCHFQSVFRRFLPRLGYNGAIWAIAHRLGRLLWKILHDGVCYIEQGTETNPRAKKRRAQKLAQALRRLGYAVTLTPITPDPVVEGQA

SEQ ID NO: 157615 - protein, 343 aa, unidentified
MARFVGLDVSQKLTSICVVDETGARLWRGQCATDPEQIARVIRGHAGEDAKLGLETGPMTPWLVHELRARGLDVTCLDARHASAALKMQMNKTDQNDAEGLAQIMRTGWYRSVHVKSLHAHRARALLGARAQLVGMTTRLSNHIRGLLKTFGLLPGAMRGLPFDRRVEALIADRDDLAPIARPMLAAWRQLRAQIATFDKEVRALAKGDPTCRLLMSVPGIGVVSVLAYVSTVEDPARFARSRSVGAHMGLTPRQYQSGEVDRSGRISRCGDTLARTLMYEAAVVILTRVKRASSLKDWAQAIAKRAGIGKARVALARKLSVILHSIWRSGEAFRWSEQPARG

SEQ ID NO: 157616 - protein, 313 aa, unidentified
MPSPMDFGVDVAKDTLQIASAQSPTELSLSNRRSSISAWLAKLPRGSRLAMEATGRHHLLLAELAHAAGMIVYVLNPCDLRHYARAVGLRGKTDRVDARLIARYLLREQAELHPYVPPTPVQREIDQLLRRRATLVNTKTRLQLSLRGMASYAADLRHVLKRLEALIAKFDQRLRQLATHQADAQRRVESTLGIGPLLGVALTNTFERVPLHNGDAAVAFVGFDPRAKDSGQFKGRRRLSKRGPAELRRLLFNGARSTSKTKLWRPLYQRYRNRGLSATEATVILARKLLRIAFSIYRHGTTFDPARLRSCLT

SEQ ID NO: 157617 - protein, 446 aa, unidentified
MNCHRRLKCDFDHGCQIAFEAIPLPKSIGWYKLIEIVKKSCGLDIHKRFFIATILSTSSEKQQQRFNRDDDGILALKNWVISEKCDVVACESTSDFWVPIYDSLIKHLPVIIGNARDMKAFTHKKTDKIDSEVIAQLALNNMIQPSRVFPKYHREFRSYVRLRHKLVQKRTDIKNEAHAILALEMFNLNDVLTDIFGKNGRAILSGISSGKNVDEIIESLSPNVRKKSAQIKEILDREISQGAALRLQICLKLIKHLDDEIEALENEIFNYAYGKHKREMEILMSVPGIGELGAATLIAEIDNFKDFSSGDKLASWLGIVPNVYQSADKFYNGRITKRGSKEARWILTQIAQAAARKKNSKLKEFFNRKKKSIGHSKAIIALARKIATIIWHLITNDEMYEDETGYQKGQIQKRKIVETEIFSVDERIKIISGIIAVMGKEEGEST

SEQ ID NO: 157618 - protein, 412 aa, unidentified
MTATNQFAAHVGLDWADKKHDVCVQFKNGERTFHVIEHTPEALDVWLTELHQKVKGRIAIAVELKKGPVVYALQKYPFITVFPVHALSLARYRQAFSPSGAKDDPQDAELALELMLRYPQKIKAIEPDNADIRLLQQLVEQRRQLVEDKRRFVNRLINSLKQYYPQPLEWFSHRGSLLLCELIIRWPSLQQLKRARRDTIRNFLNAKGGRAMALTEQRVVSIDNAIPLTTDPSVIEANALMATALATQIKVVSEIIKTYDERIETLFDTLPDAGLFKSLPGMGPCMGPRMLAALGDNRDRFNSAEEIQNYAGIAPVTERSGQKSWVHWRWQCAKFVRQTFVEWTAKTVNSSYWARLYYQGQREKGKSHQSAIRALAFKWIRIIYRCWKTRTRYDEAKYLLALEARKSPLLKP

SEQ ID NO: 157619 - protein, 357 aa, unidentified
MAYIGVDLHSDKFTVAFRDKMNKDTLKSYYIDKNEIDNFKKGLKKNDYIFLEASTPTFAFTDLLEDAVKKTIVIDPFKFRAIADSRKKTDKIDARQLARMGKYHIEGDKKFLPEVYVVEKSIRKLRSLFTTYRLLNKEITMIRNRIHSLFKQNLKPYSKKHIFDEIMTGLEPIDLDEEYKVQVEILFEVLSKLQEKKAKIKEQILLTGKPFIKDIDILVSISGISVFVALGLISDYATIERFKNAKQFSKYLRSTPKSEESNKKVKTGKTQKNGRKVSIELMLQSINHFRRESLFIDKFYRRLKKGKGGCKARIAVVRKMFVAIYFMLKEREYYRYMNKKLHDKKILEYKMFLAKSK

SEQ ID NO: 157620 - protein, 367 aa, unidentified
MKDSITVVGLDVHKNSIEIVTADTDRAMEIRRFGRIGGTMDALDRAVRKLVSGGSTLRFVYEAGPCGYEIYRHLTGKGFSCKVVAPSKTPKKSGDRIKNDRRDAETLARLERAGELTSIYVPREEDEAMRDLTRAREDAVRALKTARHQLNAFLLRYGKRYPGKGSWTPAHMRWLSDIALPHPSQQIVLQEYITTVRVCTERTTRLTDQIAKLLPEWRLNPVVKALQALRGVAPIVAATTIAEIGDLSRFENPRQLMAYLGLVPSEDSSGESTHRGSITKTGNGHVRRALVEAAHAYGFPARVSRHLLKRQEGLPEPVLAIAWKAQVRLCSKFRRLMARGKLKNKIVTAIARELSGFMWAIAREVEV

SEQ ID NO: 157621 - protein, 351 aa, unidentified
MLIIGVDYHPSFQQIAFVNTDTGECDERRLVHSTGEAEGFYRELQKANIKVRAGMEATGHTRWFEDLFAELGFELWIGDPGRIRAQRVRKQKTDRQDAQLLLKLMSEDRFPRIWVPDKENRNLRQLLWHRHRLVEIRTRVMNQLQSIAMNEGIRRKKGLWSQAGRAQLESLPLACWSSRRRQDLLQLLDQLNQLIEELKAAIVKEAEKKPEVQLLMTHPGVGPITGLAFVLVIGNPERFRCGKQIGSYLGLIPSEDSSAGRQKLGHISKQGNWLLRFLLIEATHNTVRLDPDWRRHFLHLAMRRGRSIAQVMVARKLAVRLFWMWRKGWTYQQVLKFGSHVEQPELHHGVK

SEQ ID NO: 157622 - protein, 408 aa, unidentified
MQVVYERCCGLDIHKRSVTACSLTPEGKAIRTFGTMTEDLLELADWLQDQGCSHVAMESTGSFWKPIYNVLEATGAFTLLVVNAQHIKAVPGRKTDVRDAEWIADLLRHGLLQPSFVPSREQRELRELIRYRQEIVDERAREVNRLQKVLEGANIKLSSVATDITGKSGWSILKALSQGETDPQELAAMAKGRMKAKHDELKRALHGVMGDHQRLMLREQLQHIEELDRRIERLTKEIGERMRPFEDALERLDTIPGVGRRIAEVIVAETGADMSQFPTAGHLASWAGMCPGNHESAGKRKSGRTRKGNVTLRRALVEAAQAAGRTRDTYLSAQFKRLAHRRGSKRAAVAVGHTILIIAYHLLKRQTTYQELGPLYFEEKQRETAVRNSVKRLERLGYQVILEPRIPA

SEQ ID NO: 157623 - protein, 375 aa, unidentified
MKVYVGIDAHTTNYTLATADTFEKPVFNVNSYSPKISNIVAYCKDIKKHFGNETEIITGYEAGTLGYSLRRDLEKHGITCIVMAPSTIAGTELNRKRRRKTDKRDAAAIAKALLTHSYSEVHMLDEEDEAVRDYIRLREDIKQEQKRVKQQIGALCHRHGFHYNDGNYWTKKHIAWLRTLPVEGYLKETLDGYIRSFDYYTDRINECDIRISEIAETDRYRESVHKLICFKGIRTLTALALIVEIGDFTRFLKAKNFAAFLGLVSGEDSSSDGQQLLGITKQGNRFLRRLLTEAAQCFSRSAASTKSKEFLRRQRGNTEEIIAYADKANVRLRKRYYHLVNRNKKCANKANTAVARELACFVWGMMTGNTHTALA

SEQ ID NO: 157624 - protein, 450 aa, unidentified
MEHSKGQQGQAKKRGPKLEVTNPNAAGIDIGSAAHYVSVPVERDDEPVREFKSFTVDIHKMADWLTACGVDTVAMESTGVYWIPVYEILERRGFKVLLVNARHVKNVAGRKSDVLDCQWLQQLHSYGLLRGAFRPDDQVCVLRSLSRQRAMLLRLQARHIQHMQKALVQMNIQLANVISDVVGETGQKILRAIVAGERNEYVLAGMRNVRIKASEEEIVQSLRGNWRDEHVFALKQALELFDFYAKQVADCDALIEQQMVVLHQHDRVPGKARKTSHRNKPKFDLRTRLYQMCGVDLTRIDGIDVCTAMTVLSEVGVDMSKFPTAKHFAAWLGLCPGTKISGGKVLGSKTQKCANKTAQALRQAASCLKNSHSALGAYYRRMCAKMDKPKAITAAAHKLARLIYSMITNGEEYVDKGQAYYEERYRQRVEYHLRKRAESLGLRLVPMEVA

SEQ ID NO: 157625 - protein, 314 aa, unidentified
MSMETQFVGIDVNKSVLDFDSLPVSAPKQFTNDAEGIVALVALLKDSGVDRIVIEATGGYETAVASALAVAGLPVVVVNPKQVRDFAKAMGHFAKTDRLDAKVLALFGERIKPMLRTLPDEAQRALADVLGRRSQLVVMRAQEKARLATVSAIARKDVEQHIVWLDKRIVRLEDDLGDRLRRSPVWCSKATLLESVPGVGKVTTFSLLAQLPELGTLNRQKIAALAGLAPFSDDSGKRHGARYIRGGRADVRCALYMATLSAKTHNPPIKAMYERLTQAGKPFKLAMTACMRKLLTILNALLKKNEAWKIQPST

SEQ ID NO: 157626 - protein, 426 aa, unidentified
MKYSQNFKIKQVTEKTLVVGVDIAKNKHYARAFDWRGIELGKTINFKSNYNGFTKFIEWTKGLAEKNGKDKIMVGIEPTGHYWYTFAKAVVDEGMTVVQVNPFHVKRTSELDDNTPSKSDRKDPKTIGMLVTQGRYQIPYLPKGIYAELRKANNLREEWLKKINSIKNKIDRWLDIYFPEFPDVFSSWEGKTALMTLEELTLPSKIAKLKAEEILEIWRKEVKRGVGIKKAEELIEVARCSVGIKEGEEMSEYEIKLLIKEYKEIRKVIEEIEERLETLVMQIPGAINLLEIKGIGIKTVAGFFAEVGDITRFTHAKQVIKLAGLNVRENSSGKRKGQTTISKRGRSRLRALLFRAMLPLVARNAEFRALHRYNTEERKNPLRKMQSIIALCGKLIRIMYTLVTKNEKYDPERMLGDIHREEHVAA

SEQ ID NO: 157627 - protein, 365 aa, unidentified
MKKIAYVGIDYHQNTLAIALCMENEKKIHETVRIRNEDKIIRKYMKKLSAEFEIKACYEASSSGYYFQRKMKSWGYDCEVIAPSSLPKKRGDRRKNDFRDARDLVQNYANGTLSIVHLPTEEEESVRNLIRCRSAFKEAEKRVKQQINSMLLSQGLRWSRSKWTFQHRKWLWELKMPNEYLQIVLDEHLAHLDYIQSRVKSFDQQIEQIAKSDLYEPAVKKLRALKGIGTLSAMLLITEITDFRRFPNPGALMAFLGLLPSEHTSGNKQRGGPITKTGNPRCRTQLIECVQHYVKKPRISNQMKADLAQVDPQSAAIAIKCLNRLHKRYWTLTMKGKIKPVALTAIARELVGFIWAMMQPQAVNA

SEQ ID NO: 157628 - protein, 389 aa, unidentified
MSQAFDASKSLIALDQDSTIIVVIEMSQSKWLVAAVVPGVERQPLKKLDADKDALLELLHRWRNEASRAGRAIKRIAVAYEAGRDGFWLARWLRRHDVEAYVIHPTSIAVSREHRRAKTDRLDTELLMRAFLGWLRGERRHCSMAAIPTAEEEDARRPNRERENLVTEQTRIVNQMKAILARFGIRTFRPTLRTAAEKLDSLCTAEGTPLSENARAELRRHLVRLCVIRDQIRAIEQDRLRKLTTARAGERGPHAMVCLLARVTGVGIETADMLVNEVLSRPLRDRKAVARYAGLTGTPDESGRRRREKGLARAGNARVRRGMIEFAWRFLRFQSDSALAQWFNARTADGRRNTRKTMIVALARKLLIALWRLVTIGEVPEGVILRPAS

SEQ ID NO: 157629 - protein, 418 aa, unidentified
MKVVFPTCCGVDVHKSFLVATIIKTPKESLQPSYQKKRFSTFNSDLNRFADWLHENDCLDVCMESTGKYWVPVFNILEKRGIRVTIANPKWVKAVKGNKDDTKDSKWIGDLFRIGLVKSSFIPAKDIRILRELTRYRYKLTSMKSSEKNRFQNAFTVCNVALDSVVSDMFGKSATAITDYLTSDEDFDPQHCVSLLHRSLKKKAEDVLSSIEGYEITLEQKCRIGIVRDHLHYIEKLIERVDICINTMVEKYDGAISLLRTIPGIDRSSAITVISEIGVDMAQFGSSKRLCCWAGLTPGNNESAGKKKSVRISRAGVYLKPVLVQAAHAAVKDKLNPYYALKYERIAKRRGKKRAIVAIARMILTAIYSMLSTGEIWNPVDLFKVDMPEHLKEQQLQKAMKQAVRFLEAQGLTVLDSA

SEQ ID NO: 157630 - protein, 342 aa, unidentified
MDLGDKASRYCALNGEGDVLVEGACPTTKKGMAQLFGAMAHCRIAIEVGTHSPWVSRELKRYGHEVIVANARQVKLISQSSRKNDKLDAQMLARLARMDPALLRPIRHRSEEAQKDLMTIRIRSALVEARTGLVNAARGLTKATGERLASCDADQMNVEKLEGLPADLRDLLKPLVEEVGSLTEKIKECDRKIEQIGRDRYPETKLLRQVSGVGPLIALTFILTIEDKGRFEKSRDVGCYVGLRPKQSESGERQPELRITKEGDVYLRKLLVQGAHGIMAERAPDTDLKRWGRKLAGRGGKNAKKRAIVAVARKLAILLHHLWVSGEVYEPRRNSQAMAKAA

SEQ ID NO: 157631 - protein, 428 aa, unidentified
MNLTQDAKISQVTEKTIVIGVDIASEVHFARAFDWRGIELDKVYSFENSAEGFRSFTEWVSGISEKTKKGRVMIGAEPTGHYWFSLGIYLRDKGVKLVLVNPYHVKQSKELDDNHPGKSDRKDPKTIAKLVIDGRYNEPYIPEGVYAELRVVMNSRWRILREMTALKNQIHRWLKIYFPEHATVFGSFDCVSSMAILRTAPLPEDLRELGADGINAVWRRAKLKAVGLKRATRLHAAANDTIGCADGIAAARMDLWLLLDDYEAKCQQYSAVMSVAEELCNQIPEVAELLKIKGVGLITVAGFLAEVGDLRRFESPRQIQKLAGLAIKENSSGKHKGQTSISKRGRAKLRAILFRAAISLAATNSEFREIHRYYTTRAKNPLKKKQSIVAMSCKLIRVFHTIVVKGRIYDPEKLLADIHRNQPDTMAA

SEQ ID NO: 157632 - protein, 351 aa, unidentified
MMIIGVDYHPSFQTIAFLMEETGECGEQELNHTDGQAEKFYRDLKQRGISVRVGMEATGYSRWFERLLAELGFEVWMGDPAEIKAKRVKKRKTDREDARLLLRLMLENNFPQVWVPGPENRDLRQLLWHRHRLVQMRTRIMNQLQALAMNEGYRWKKKLFSEQGRVQLEKLALAPWASRRRQELLELLDRMNPTIKELTAAVEREARKRPEVLRLMTHPGVGPLTALAYVLIIGTPTRFQRGKQIGTYVGMIPCEESSARKQRLGHVTKQGNSLLRFLLVEAAQAATRIHPDWRRRYIHLAMRRHKSIAKVAMGRRLAVRLYWMWRNGCEYSPSLEFGSYAGQLEIGHGVK

SEQ ID NO: 157633 - protein, 304 aa, unidentified
MNGIGIDVSKRRLDVGTSDGQTLQVSNDPSGFAELDLWLRKRPSNQIVLEATGGYEQPVLEFLHKAGHPVVRANALRARKLAQGLGQRAKTDRLDAYALAQMAALVKLPAYQPLEPWQQKLREFVRARRQMIQALAIARQQQEMVGDRELRRLLQANITHLKTLVKRLGNQIAEQLAQQPQLTVLKSMKGVGPVVQAVLASYLPELGHISGKAIASLVGVAPMSHDSGTMRGKRSIHGGRAEIRQVLYMAGMSALQHEPRIRDFYRSLRARGKEAKVAIVAVMRKMLVILNARVRDAQSGPIPA

SEQ ID NO: 157634 - protein, 362 aa, unidentified
MKRTKSITSYIDQDIFVGIDVHKKTYYVVARVNQEIVKKWTAPASPQKLGEQLLKYFGEGRIHTAYEAGFSGFALHRKLVKLGIDNLVVHAAGIEVAVNNRVKTDKRDATKLATLLEAKRLKGIHIPSEKEENRRLLTRTREQLVKDRTAIKNKIRMKFHQLGLIDYDENHVMTHKFVKEILILDVSRELIVVIQAYWRIWKSLDQEIRNIEKELKKQAETDPLESTYRSVPGVGNISARILSNELGNMSQFHNERQLFSYTGLTPCEYSSGEAIRRGHISKQGNSRLRAILVEAAWRAIKKDPALEEFFNRLYPRTGKTRAIIAVARKLIGRIRAAFNKKELYQMGYSNNNANSTAILQLG

SEQ ID NO: 157635 - protein, 429 aa, unidentified
MTEESRLQLFRKLRSSIRGSETHLLVGVDVAKDRHYAFFGTSNGKTLCSKLVFENSKKGYELLRSYAGNIQDKYGLAEVVYGVEPTSTYHKPLAEYLIRHTENVVVLVSNVAVKRNRELLDGRWDKNDKKDAANVADLVGQGRCLYYELPEEHLRELRSLLAYRIKLKKLEHGLRMRIRNNVFAQYFPELDRLYMRRGQPDDLVLSIAEHCLDPEEIAGMEFDDFLKLIARRKIRIEQERRLRAIWEAAKETAGCKVHEAAKWEAKSLVEQLKAMQSAVKENERRIAVEAKWFAEYNCLLSMPGFGPILSAMVLGAIGNALRFDNRRQVLRLAGLDLCASRSGNKSDSAVPVISKQGKAALRYALVQAAIVAARANPVVRSYFCRLIKGREFERGINLKMKVKLAAKMLVVAWTLMKRKEQFDPSCFSA

SEQ ID NO: 157636 - protein, 337 aa, unidentified
MPGSSIPYLQGRVTKGVVIIMNKEEKIYIGIDVSKSILDISILPNKKYMQFKNDLAGIERLIKKISKFPNALIVMESTGGYEKLLAISLLQAGHKACIMNPRRIRDFAKSMGILAKTDKIDCDVIALFASKIEPAPNFDYDEETNLLSENNARRRQLIGLITMEKNRLDKASPKHLKGIDRVIKFLTKELNKIDIEQQKLLESNTDFAEKADLLTSVKGIGDLTARALLAELPELGVLGSKQIASLAGLAPFNRDSGKFKGLRTIWGGRATVRCALYMATLVATRHNTVIRSFYKRLLAAGKKKKVALTACMHKLLIIINAMIKNKTFWREPTPLQT

SEQ ID NO: 157637 - protein, 340 aa, unidentified
MEKRYVGVDLHRNQFTVCARLENGRTYLREWKLGALLQFVKKLRATDEVAVEATGNTRLFYDAVQPHVARVVVVATNQFRVITQSVKKTDANDAQLLALYLEKGLLPEVRMKDKQHGQIASLIQTRDALVKLRTALKNKVNNILSARGINLAKEALSSEKKLDEVLALPFEELVQVELRVIVAQIRSLNQSIRDLDRIIAEEGSKLEGRKNLTSIKGIGKITGAILLSVIGDVNDFPDEHRLASYFGIVPRVFNSNETERSGRIHKRGSKLGRTALVQSALIAAIYSPYLKNFYERVKARRGAGRAIIALARKFLGIIYRTLKNKWVFEDFPNFVLAEGA

SEQ ID NO: 157638 - protein, 409 aa, unidentified
MRVIGLDVHRTFGEVVYLEDGQCRSGGKVGLTVHELAEFGERLCATDEVVLEATGNTAAIVHALAPHVAKVIIANPLQVRAIAHARVKTDKIDATVLAQLHASGFLPSVWMPDADTEALRRQVARRSQLVRHKTRLKNEVQSVLHAHLIPRCPFTDLFGKRGRAWLAEQPLPIDEQCAVEQRLREIDRLSEDQQVIDRALAQANLHDPRVHRLLTISGVNVTVAISLIAAIGQIDRFASPQKLVSYFGLNPSVRQSGLAPARHGHITKIGRAQARGMLVEAAWAAAHTPGPLRAFFLRIRARRGMQIAAVAAARKLAIITWHVLTKDEDYDWVRPALTQKKMRALELQSGFKPTPGSNRGRAYDYNLAAVRASECAASEQAERAYERFVGTFRPKGPRPKSMADLRGSA

SEQ ID NO: 157639 - protein, 343 aa, unidentified
MAFTSFIGIDVSKLTIDAAIYVSANEPVFHQQFENRPSGFGKLLAWVYQHCDKTQLLFCLEHTGIYALPLCCFFTRHKLSYSLQSALHVKRSMGIQRAKNDKADARMLARFAYLYRDEIKPSQLPSKTLLKIQHLLAYRQRLVKNKVALEVAAKELANFVDKEFSNSIIRDSQKHIAQLVASIQLVDKQLRTVIAEDQEVHRTYQLATSVTGIGLQTAAYLLVHTQCFKSFANWRQLAARRSDCFAGTAPFTYSSGSSVRGRSKLSKIGHMKLKALLSNGANAAIQSPNEFADYYNRKILEGKPKLVALNGVRNKLISRVFAAVQRGTPYIKNQVEYRQAVSC

SEQ ID NO: 157640 - protein, 337 aa, unidentified
MGMDQHRAQISAEWIDTITGEISRARVAPADRAGVRKFLAGFKDADLEVALEATTGWRFVVEELQRIGADVHLAEPAETSALKGKKKRAKTDWADARHQRELLLIGRLPESSIPPAHLLDLRARVRCRHTLSQQRTEWQQRMQAVLYHHGFPQRRDLLSLDKREWLAGLKLPAAAREQITIALHMIDAIDLQLAPFDVDLRAYARKQTGCRALIDQIYGVGGLVAVTILAELGDTRRFQNSRDVVRYSGLDITVYQSDAHRAPGHLSRQGPPALRWALYEAAQRARFPASPDRAYYVQAAERIGANRACIALARKLLKRSYHILRELGDHALDPVTS

SEQ ID NO: 157641 - protein, 345 aa, unidentified
MHIASIGIGLGKTTFHLIALGERSKVLGRKKFSRTQLLAYTANLPAALIGLEACAGAHFLGTALREQGHQVRLIPAQFVKPYRKSNKNDFLDAEAIAEAVTKQNMRFAQLKTQEQLDWQALHRVRDRLVQRRTALINEIRGFLLERGISFAAQPIHLRKNLPGVIEDAEQNLSPRLRWLLDRLWQEWKQIETEVEAITEEIERISKDDARCRQLRQIPGFGPMVSTATVAAIGNGSAFRRGRDFAAWVGVVPRQHSTGGKQKLYGISKRGNVYLRRMLIHGARAVLFRVKYDTGGFGQWVRRLAQRAPRNKVVVAIANKLARIAWAVLSSGKDYRHQPLRQLAAA

SEQ ID NO: 157642 - protein, 442 aa, unidentified
MAMRKRDDDLVFPNAAGIDVGGSSHWVAVPRHTCEEPVRKFGAMTDDLNAMADWLLACGVDTVALESTGVYWIPVYEVLEQRGLKVFLVDARQMKYVPGRKSDVQDCQWLQRLMSQGYLRAAFRPTDEVCVVRAVARQRDVLLVEQASWVQRMQKALVQMNIQLTEVLTDVMGTTGQAIIRAIVAGERDAQILARHRHSRVKASEHDIAKALTGNWRDEHLFVLRQALAMYDDIARHLGECDAKLQALLSQLGSARVDLGQAPRAGSKTRAQFDQRQILANWAGVDLTRINGLGLAAVMKILSEIGPDLSRFANVKHFCSWLGLCPGTKISGGKVLSAKTKRSANRVRQALKMAAMSLSHSDSALGAFYRRMCARMDKPRANTATAHKLARMVYFMLTRGEAYVDQGQQNYEAQQRERSIAALKRRAAALGFAVMPTTATPA

SEQ ID NO: 157643 - protein, 349 aa, unidentified
MIIIGVDFHPEFQQIALVDTDSGELREQRLTHREEAERFYRSLAATGQQVRVGMEASGYGRWFERLLAQLQLELWIGDAAQIQRKRVRKQKTDRQDAQLILKLMLKDDFPRIWVPSWENRDLRQLLWHRHRMVQARSRIMNQLQAVALNEGLRCKKRLWRSKRPQLESFPLAPWANRRRHDLLELLDRLNPTIAELSQAVEREVEKCPEAQRLATHPGVGSLTAMGFVLIIGKAERFQCGKQVASYLGLVPLEDSSGNQRRLGHITKQGSSMLRFLLVEAAQVTVRSLPQWRSRYFHLMMRRGRKIAKVAMARRLAVHLYWMMREGWDYQQLVKFGSHVGQPGNRHGVQ

SEQ ID NO: 157644 - protein, 369 aa, unidentified
MSDVITYVGIDAHKKDLFIAMLVGQQAKPVAWTVANEPNAVRRLAKKLEREAPGPVHAFYEAGPCGYALQRQLTTPRVQCDVVAPGLIPQKPGERVKTNRRDARKLVELGRAGLLTTVRPPTPAEEAVRDLCRARDDAREDLQRCRHRLGKLLLRRGLQYRVGRHWTKTHRRWIDSLTWPHDAERVVVDDYLLAIDQHETRLKELDQQLAAVAETEPYREPVAWLRCFRGIDTLSAMLILAELHDVRRFPSPRALMAYVGLVPGENSSGEKHCRGRITRAGNALVRRLLVEAAWHYQHRPGVGVALARRRKGQPGRIIAIADKAQQRLCRRFQYLTVLNKPRPTIAVAIARELVGFLWAALQPALVVAN

SEQ ID NO: 157645 - protein, 371 aa, unidentified
MDKGIKVFVGLDVHKDSMSMGVAQAAGGEARFVCTLAHDVAKLIKLLGRYGQPSEVRVVYEAGPTGYGLYRALIQRGYGCQVIAPSLIPKRAGVRIKTDRRDGVKLAGLSRAGELTAVWVPDEADEAMRDLVRAREDAVEVRHGARMQLKAFLLRQGVRYSGKTSWGPAHARWLATLSFARSGQQLAFAEYWQAVRAAHERVERFNAALSQAVVDWRFEPVVRALMSLRGLDLVSALTLVAEIGDIARFDSARELMGYLGLVPSEHSSGAAVRKGSITKTGNAHARRVLTEAAWNYRFPARIARALSVRQEAVAEPIRALSWKAQLRLCGRFRSLSVRGVHQNKVCVAVARELAGFIWAIARQVSSQPTTA

SEQ ID NO: 157646 - protein, 355 aa, unidentified
MDSEKYIGLDVHQATISVAVMDSTGRIIMESILETKAATVVEFFAGLRGTLSVTFEEGTCAAWLYDLLKPHVDQLVVCNPRKNALLKDGNKSDRIDAGKLAELLRGNQLKPVYRGETGVRMLRELARSYLTIVKDLSRVMNRLKAVYRSWAIPCAGRDVYYTRHRAEWLEKIREPGVRRRAERLYQQLDMLQHLRQQARRELLVESRKHSITAKLRQIPYLGPIRSALVVALIQTPHRFRTKRQLWAYSGLALETRISGEYSYATGQLRRSKKLLSIRGLNKDHNHDLKGLFKGVATMASVRPGPFQDFYQALLAKGIKPTMARLTLARKIAAITLTLWKKGESFDAEKLKSQAA

SEQ ID NO: 157647 - protein, 385 aa, unidentified
MRSVPHRRPRVCRRDLIGAWRGTCPHSGVSTGGPTRRGSRPKGGPGVMVVGIDPHKKSHTAVALTPLGEIVDELTVQARLKGFERLLRWARSLDRDRMFAVEDGRHVTGGLERFLLPRGEEVVRVAPKLMAGARRSSRTRGKSDPIDARSVALAALREPDLPRAQLAGSERELHLLVSHRDDLVTERTRVQNRLRWHLHDLDPSFFVPVGALDRWVWLRRVRDYLEALEATTQVRIALRLVDRCEAVTGEVRELERELKALVEVQGSDLLSLPGCGVLTAAKLVSETAGVTRFSSEAKFALHAGTAPLPVSSGENKRHRLNRTGNRQLNVALHRMAVNQERLHEPAREFLARKQMQGMSRMEALRCLKRHLARTVYRTLQRMEAR

SEQ ID NO: 157648 - protein, 391 aa, unidentified
MRYYLGVDWADQTHAVWVVNESGTKTAARTVPHTAEGLSEWGRELDEWRAQGIELWAAIERREGRVVDVLLDHGVVVYPVNPKALDRARDRFRQSGAKSDPFDARVLADFLRTDHTHLQALQPSSEAAQELKLLTEDYQQQIRQQTRLVNQLTATLKAYYPRALEIAALPTPLAREFLQAYPTPEAAAALTERQWQRWARAHRLSETRTQALWDVLQQPQLPVPVHVLRAKARLMRSLVAQLTLVVAVVEEYREAIEDFFARMPAAQWARTLPIGKHGITAPTLWARLGDAPGRWESFRHLQAHAGAVPVTKRSGKQQRVIQFRFACDKALRYVIDHVAFLSLHSSVWARAYYDQQRARGHAHRQALRALAAKWLKIIFVMWQHQVPYDEQ

SEQ ID NO: 157649 - protein, 345 aa, unidentified
MEQCNVIAIDLAKDIFQVCIMTTNGEIIFNKAMSIAKLKEWLPKQKLSLVAMESCAGAHYWARFAQSVGHNVMVIPPKQVKPFRTGQKTDANDAIAIAVASRAANIKPARILSIEQQGLQSIEKMRSMIDKHKLQLSNQIRGLLLEFGIVINKGSKSFKERIPEILEDGDNDLSFPMRKVLLQMRTLYSRLEEDFDVINNELLQLTAQDTDCQRLMKLEGVGPITAVRLKIQLGNGGHFNSGRQVAACIGLTPKQHSSGGKVKLGSVGKSSCDKPLRSCIFLGARAVVSKLKNRPAKTEKERWLKALIERRGVNCASMALANKTARTAYALLKNNTDYNPVLIAA

SEQ ID NO: 157650 - protein, 311 aa, unidentified
MTYLGIDVSATTLDTASAMGATWQHANTPAGIAALVATLTPLPPTLIVLEATGAYHASLTSALVAAGLPVAVINPRQVRRFAESVGQLAKTDRLDAALLARFAATVQPPVRALPDAATQELAALVDRRRQLLEMLTMERNRLAVARRSVQASVRQTIRALERALAALEDETDRWIKGSPVWRAREDLLTSFQGIGPQTARTLIARLDELGRVSGRQIAALVGVAPFAQESGRWRGQRHIRGGRADVRALLYMATLTAARCNPVIRALYRRLKAAGKPTKVALTACMRHVLLILNAMVKNNTRWQAPRPTTA

SEQ ID NO: 157651 - protein, 321 aa, unidentified
MMAQNGRVVVGIDVAKDKVDACIRSLSQRQTFPSSAEGRRQLIAWLRKHKVTKAAMEASGGYERDWAKALREAGFAVRIVDPKRVRSFARSAGRLAKNDVIDAEMIAWFAETFGEAPGQTYDAAREKLVQMVNARQHLLDLQTRTRNRDEHSAPKVVQEMQGRLLKTIALELAKLEAAMAAQVKATPQFAELAEIIESVPGLAEITSAGLIAAMPELGQVSNEAAAALLGVAPYDDDSNRRQGERHIQGGRRKIRNLFYMACLGAATRHNPVLKAFYRRLIAKGKKPKVALVACMRKLIVILNIMIARRQKWNPNLYAVVS

SEQ ID NO: 157652 - protein, 348 aa, unidentified
MRFYSKQHKHYCGVDIHAKTIYVCIIDQEARIIKQKNIKSNPAAFMKAIDKYRDDIVVSAECMFTWYWLADLCAKESITFILGHALYMKAIHGGKAKNDRIDAYKIAYLLRGGNIPMAYVYPPEMRATRDLMRRRNHLVRKRAELLGHIQNTNHQYNLPPLPKNIRFKGNREGLIEHFKDECVQKSMETNLSLIDHYNSLLLKLEHYICKKAKVHDHEALLRLLSVPGIGQTLALVILYEIHDIRRFPRVQDFVSYSRLVKPSKESAGKIYGHSGKKIGNAHLKWAFSEAAVSMLRGIPDVKKYKEKLQRKHGKAKALSILAHKIGRAIYYILKRKEVFNIEKFLNKK

SEQ ID NO: 157653 - protein, 393 aa, unidentified
MILVGIDVASNKHDIFIMNALGEVFNKHFTIDNTRQGYKKLLEQISLAKEFFKDSNVRIGLESTGHYSRNILYFLILEGYDVMFINPLLTNMDRKASSVRKTKTDSIDAKAICMFLIRNQNDFKPYTLSSYHIDELKILVRQRKSLKKQLNQITNQLHAFLDQAFPEYHTVFKNILSNAPLTLLSSYASLSELKRVRVNTLSELLKKSSKGRHGLAKVELIKTLVKDSIGIDSASLSLSIKQSVQTIRTIESQIDQINQLLEHHITESKTTLLSIPGIGTQTGAIILAEIGDINRFKSDDALLAYAGLDPSVYQSGNYEGSFKISKRGSSILRWAIFQAAKVAVIHDPVFNAYYEKKKSEGKHYLTIIGHVTKKLLRVIRSILKNNSVYTVSH

SEQ ID NO: 157654 - protein, 347 aa, unidentified
MTYYAGIDVSLECSSVCVVNATGKIVLEAKVASEPEALIGWFGALGLTLERIGLEAGPLSQWLYATMRQAGLAVELLETRHVRDAFKAMPVKSDRNDARGIAQLMRLGWFRPVHCKSMAAQEVRALLTARKLVQSKLFDVEMCLRGILRGFGLKVGPTTPPRFGERIRDLVAGHATLEVVAAALLAVHETLRREFDGFEKRVRSMARADARVRLLMSAPGVGAIVALTYVSAIDDPARFRSSKDVGAHFGLTPKKYQSGEKDVTGGITKIGDTSVRTALYEAAHIILTRPIKGGGLKSWAMKLAKRAGMKKAKVALARKLAVVLHRMWVDATCFVADKVHRPACAAA

SEQ ID NO: 157655 - protein, 408 aa, unidentified
MVVGVDPHKKRHAAVAITQDFTIRDRFKFDNTREGLEFLLRRIRIEMIKSDCRGVMFAIETGGHYWRNIAYYLEERGIPYRFINQYTLKRRREGKDLNRRKNDYRDSEVAAQLLCTGEFTESKIPQGVYAELRAAHNGYRRLVKERTRITNLVKGLLDGLFPEFTQVFKDPGGLTALSILSTCPIPRVIAGKTEEEFVATIEARHKGRRLMRKKLRALHCSARTSIGIEAGARSVSSEISFLVEKLELIRRHIRIIEGTLVRLVDETEEGKYLLSIRGLNYTAVAGLLAELGCFKSYRSAKQMIKMAGSNPTESESAGKKKTRTPMSKQGRPVLRYCAWTSVIPMLRFNPDFRAWAKQRRERPVHANPLCGREVVGAALNRLLRLAFALVKNQTYYQVSRLELTLVAV

SEQ ID NO: 157656 - protein, 374 aa, unidentified
MKQQKKSSDITIGLDLGDRRHRFCVLDKSGGLLEEGSVRNERVFLAQLSERYPGALAVVEAGCHSPWISRYLQEQGCRVLIANPRKLRTIYQHERKSDRRDAQMLARIGRLDPALLYPVRHGTAEAQQDLLCIKLRDSLVRARVAVINSVRFTLKSLGYTVRNPSSERFHKVAMEGLPAALCQMIAPSVAALEELTGRIKALEAQINSLAQSKYPPALQLQQIPGVGPITALYFVLKIEDPTRFQNVRDVGAYAGLCPKRDQSGRSDPQLRISKCGDAYLRRLLVSAAQYILGPFGPQSALRAYGLMLAEDGTARAKKRATVAVARKLAVLLLSLWKHQRPYQPFPLAGSRLNLQQTKEDRRFGTIALHRLEAL

SEQ ID NO: 157657 - protein, 337 aa, unidentified
MSVYVGIDVHRKRSQVAVVTEDGTVQLNKNVVNGSEPFLRLIGDLPSGTPVAFEAAFGWSWLAELLEDYGFEAHLVHPLRCKAIASARLKNDKVDAAILAQLLRADLLPEAWLAPPRVRQLRALLRHRASLVRLGTQLRNRIHAVAADHGYDRSASYWTGPGRGWLAELDLPAASREIVGDCLAVIDGLAPVIDRIDGELHAHARADPRVKVLRTLPGVGEFTALVMLAEIGDITRFGSARKLASWAGLTPTVRGSDLTVRHGHISKQGSAWLRWVMNQAAQTAKRSPEFAASYAAIAKRRGKKIATIAVARKLLTRAWHLLNEMQATDTNAPLRRP

SEQ ID NO: 157658 - protein, 404 aa, unidentified
MEDGMISVGIDVSKGKSTVCILKLYGEIVSSPFEVAHTEAGLKSLVEKLRGLGGKAKVIMEATGVYHLPVFSYLHDKGIFVAVINPLEMKRYANKGIRRVKTDKKDAVTIANYGIDNWFHLQQCKCSDETYTELKFLGRRYAHYMHLHVAALQELTHILDRTMPGIKKHLQSWNEASRKDKLGDFVEKYWHYDNITSKSQEEFSAEYMEWAKEKGYRQDTAKADAIYASAAAGITTLDSSTPSTKMSVQEAVRTLNTINNVLNEILTRMKDLAKTLPEYSVVRSMGGVGEVLAPKLIAEIGDVRRFHSGKALVAYAGIDAPPYQSGQFYGTNRKISKRGSCLLRKIGFETMRVLKSHKEPDDAAVYRFIIKKEAEGKPKKVAKIAGLNKFLHIYYARVMEVYKS

SEQ ID NO: 157659 - protein, 324 aa, unidentified
MIDGILGIDVSKNTLDASMSSCNKVRAKSFANSPDGWRHLLDWLIGQKIRRVHACLESTGLYSLGIACKLNEAGHVVSIVNPAQIRDFARTKLGRNKTDAVDASHIREYCELFKPAPWSPPSHAHRQLGELQTIRAGIVAGLTEWKNRKNSGMIDVVAQSLADATISHFTSQLGAVEKAIAQAIDNDTDLRRKRDLLLSISGVGETLASVVLAELPGPDVLRSSAEAVAYTGLNPRRHQSGTSIDRLTRISKIGNAVLRAALYMPAMSAMRYNPAIVALVTRLKARGRLNPKQIVVAAMRKLLVLCFGVLKTGKPFDPALAMGC

SEQ ID NO: 157660 - protein, 355 aa, unidentified
MNQEKYIGMDVHQATISVAVMDSSGKLIMECILETKAATILEFIAGLRGTLSLTFEEGTSAAWLHDLLKPHVSHLVVCDPRRNALLKDGSKSDRIDARKLAELLHGNKLHAVYHGEHGLRTLKELGRSYLTITKDLTRVMSRIKALYRSWAIPCSGTTIYAPGHRAEWLAKISEPGVRLRAERLYEQLDLLQPVRQGARRDLLGESHKHPAVKLLRQIPAIGPIRAALLVALLQTPHRFRSKRQLWAYSGFAVETHDSGEYRFVRGKPVRNRERITVRGLNQNHNHDLKNLFKGAAISASTRPGPLCDFYLALVEKGMRPTMARLTLARKMAAITLTIWKKGVEFDAKQLNRQAA

SEQ ID NO: 157661 - protein, 354 aa, unidentified
MSETLKTSVAVIGIDIGKNSFHVVGQDRRGAIVLRQKWSRSQVETRLANLPPCLIGMEACVGAHHLSRKLQMLGHDARLMPAKYVRPYSKGQKNDFRDAEAIAEAVQRPTMKFVATKTAEQLDLQALHRVRERLVSQRTGIINQIRAFLLERGVAVRQGLRFLRAELPGILATRSDVLSPRMLRIIEDLAGDWRRLDERIEGLSNEIETLARQDQACARLMTVPGIGPIISSAMVAAIGTGDVFSKGRDFGAWLGLVPKQISTGDRTILGSISRRGNRYLRVLFVQAAWVVLVRLKQWERYGLKSWIEAAKKRLHHNVLAIALANKLARIAWAVLNKGRAFECVKRDAMAPQPA

SEQ ID NO: 157662 - protein, 347 aa, unidentified
MVIIGCDFHPGFQQIAMMDMDTGEVRQQRLVHREEAQRFYAGLRGQEVMVGLEACGYTQWFEQMLEEMGHRYQIGDAGAIRASYVRKQKTDRRDAGHILRLLLEGRFPALWVPRGAERDSRQLIVHRHKRVQMCTRVKNQLHALALNQGLRLRWKLWSREGLEQLRALPLLPHATARRADLLKQLEEMNAEIDRLDRAVRQEAAARPAAVRLMSHPGVGPVTALAFVLTIGDARRFEKSRQVASYLGLIPSEHSSGGKQRLGHISKQGNSLMRFLLVEAGQSAVRKDVELRRFYMRVQHRHSTGVAKVAVARKLALRLYWMLRRTMEEAQFQAGPYAGKPESFCGRG

SEQ ID NO: 157663 - protein, 336 aa, unidentified
MEKKWFIGIDISKKTLDVAIYDLLKKKVDKCNYKQVTNQEDGYLEVYEWCKEKGMNTKEIVVCMENTGVYGLGLCLFFENKKIDYSAINPLHLKRSMGFVKGKNDRVDAQRIAQYCYLHRELITYTKLKGSTIVKLNELDGERKIYVKQAAAHKGYVTDRDEIAPDSGRSARSKETIKYLENRIAEIEKEMIWTINNDKELLLTYKLLLSINGIGHVNATHTLIHTDNFRAFENARQYASYLGIAPFENSSGSSIRGKTRVYKTGTKTLKADLSQAAKSAVTHDPEIREYYKRKMAEGKAYGTVLNAVKFKLVERMFAVVNRGTPFVDVMKYKKAC

SEQ ID NO: 157664 - protein, 394 aa, unidentified
MKHFIGIDNSSIDHKVHIIDENCNKLKSFTITNDLAGFQELDMNLKNYEESYIGLELPHGPIVDYLRSRNYVIYSLNPLKIKRFKESYIVSGNKNDRIDAEAITHYILRNRESLRTLTFNSPEMEKLKLFSLSHNRLTKEHTRYKNRLLFIFRQYFPLYSVLFSDHCSKIQLKMLLEYPVLADLKRATPGEITSFLIRNHYRNGKYIRKVLDAIQNYSHHIAQEVEETLSCEARAIARILLVLKDERENVEKQMKAITDTHCLGKYFRSLPGSGEILASKLLSIFGDNKDRFTHTNGVQCLFGTAPRNYQSGSYHKVIMRKSCNKIAKNILFQYAFSSIKSSKWAREYYDAQRKKGKTHSVAVRALANKWVKIIFSIWKNETFYEEDKKISLVA

SEQ ID NO: 157665 - protein, 351 aa, unidentified
MGKIITDFSSVTTVGLDLAKHVFQVHCVDASGRVVVANSVRRNKLLEFFASLPPCLVGLEACGSAHHWARELVKLGHDARLMPPAYVKAYVRRQKNDAADAAAICEAVTRPSMRFVPLRSLENQAALMHHRVREMLVAQRTQVLNAVRGHLAEIGVIAAQGPKNARDLAKLTTADEATLPWLVRAALAPLVRQLDRLDEEIGLADDAIKAMAKADERARSLMSIPGIGPVTASAIAASVQDVSSFSGSREFSAYLGLTPRQNSSGGKERLGRVSKMGNRYLRKLLVVGAHAVLYNRKGHDDALRTWACKLMETKPFKLVAVALANKLARIAFAVMRDQTPYSAKPFSPAQA

SEQ ID NO: 157666 - protein, 325 aa, unidentified
MATYVGLDVHLRTCHATVMDERGKILKQEKFPNERQELERILKGIDDAKIAMEACYCWQPAYEFLEEKGFEVKLAHPLKTRIIAEAKIKTDATDSEALAHLLRADLLPTSYVPPKELRELRELVRLRTYLVRERAKFKNKIRAELAKRGIRALKNPFAKRRGPALRELGIETVNHCLDMIGALDERIRGISRELNAKAEESEEAKLLMTTPGIGYFSALAILAEIGDISRFSDPEKLCSYAGLVPSVHQSGTTRYYGHITKQGSKMLRWVVLECLWIHLQYDTHISRFFFRLVAKKGKKVAAVAAARRLLVAIYWMLVRREKFRA

SEQ ID NO: 157667 - protein, 335 aa, unidentified
MNQFIKYVGLDTHKDTIAVAIADITGGKPRYYGEIANTPTALSKLMKDVSPKGEVVSYCYEAGPCGYGIYRQISGSGHDCSVVAPSLIPTKPGDRVKTDRRDSENLARLHRAGELTAVWVPDQEQEAIRDLTRAREDMKHLERQARQRLCAFLLRHGQRYDSGKSKWTQAYWRWLERINFSHRVQQLVFQEYIDSVKQQQQRVADLEQAMHEAMADWTLAPVVTGLMALRGCRLITGMTVVAELGDITRFDSPRQLMSYLGLVPSESSSGPKTRRGGLPKQAMGMCGGYWLKRRGATDFQHVKRQRYNDVLNKRLTRYKLSRGRHKNGSVVDIRH

SEQ ID NO: 157668 - protein, 356 aa, unidentified
MKKYIGCDMHKKYSVFITMDEHGHLSEARKVANDSLELDSYLKTLEPATPVAVEASGGWYWFVDRLEQAGLDVRLVNPLEAKKRMGGRYKTDPRDAAGLAMLLRNGTLPEVWIPPADLRDLRGLLRARLALRRHTTMLKNRVHAAIRRYGQWEPGEAKNLFAGKGRVQLAVYIGALPPETRIATRHEWQLIDEVEQHIQELEKRIRLGIGQTGYVRLLRSLPGVGAILSATIYLEIGDVRRFGCAARLASYAGLTPTVHSSGGKTRMGPTSSIANHYLKWAFVEAADCIVMRKQRYQGRHVVALYERLRAAKNHGKAAVAVARHLAEASWWMLQKKQAYREPAPASRSSSENGSAR

SEQ ID NO: 157669 - protein, 343 aa, unidentified
MKLHVLGIDLGKTVFHLVGLDSTGKVVIRKKCSRTQLLAFTANLQVQLIGMESCSGSHFLGRALREQGHEVRLMPAQYVKPYVQTNKSDFLDAEAIAEAVQRPRMRFVPIKTEEQLDLQALHRVRERWVMRRTAVVNQIRSLLLERGLTLPKGRSYVDRRLPRILEDGELRLSGSFRVLLAQLKLELEQLTARIEEMDRVIQKTAKENEDCQRLTEIPGIGPVTATALIAAVGNASAFQKGRNLAAWMGIVPGEYSTGGKQKLLGISKRGNKYLRTLFIQGARSVLQQRHKQAPGLSHWLAQLLGRTHQNVVIVALANKLVRMAWAVLCKNERYRAPVLAVTT

SEQ ID NO: 157670 - protein, 324 aa, unidentified
MILGIDIAKNKFDVTLVLASGRQRHRTFANQASGFAQLSAWVGASAATVVQACMEATNVYWEALAAYLHEQGYQVSVVNPARIAGYAKSQMRRNKTDKLDSEVIADFCATQHPAVWTPPTAAQQTLRSLTRHREALLKTRTQQTNRRSTCSEPLVQKSLDAIIGTLDTEIAQVETHIADLVEQQQTFREELALITSIPGIAEHTAVKLMAEMYDLATYPDANAADADAGLSPAKHESGHSVHRKPKLSKVGKASVRGALYLPAMNAIRHNPIVKQLADRLKAKGKPPMVIIGAAMRKLLHLVYGVLKHKTPFDPQWARSTPSPT

SEQ ID NO: 157671 - protein, 472 aa, unidentified
MKSKSSRKRNPVDPVAEEIPDAEHELVLERVAAIDVAKASGKVCVRLPGKTGRRFSRVWDVPARTGAVSELAEQLIESGVEKVTVESTSDYWRIWYYLLEAAGLDVQLVNARDVKNVPGRPKTDKLDAVWLAKLTEKGLLRPSFVPPAEIRQLRDYTRLRVDLTRERTRYWQRLEKLLEDALIKISAVASTLDTLSTRDMIEALIAGERDPGRLADLARGKMKAKRSELIAALDGRFDDHHGELARMLLDQIDTLTAQIATLTSRIEQLLAAMPDTRSRGDGGTGGDPDRPSTGHGVEPETAARFTDATLLTPVERLDEITGIGELNAQVVLAEVGLDMTRFPTPAHLVSWAKLCPRTIQSGPVTRGGKTGRGNPYLKGALGEAAAAAAKTDTFLGERYRRIVKRRGKLKALVAVARSILVIIWNMLNDPTARYADLGADYHATRINTERRTRNYVTQLMAMGYRVTLEPAA

SEQ ID NO: 157672 - protein, 429 aa, unidentified
MNYNTQNAKIASITEKSLIVGIDVGSETHYARAFDWRNYEYSKKPFAFNNDEAGFAAFKVWMEDIAEKHEKEAVIPGMEPTGHYWLNLGAYLQEQGMKPVHVNPHHVKKSKELDDNNPNKNDRKDPKTIAGLVNEGRFSYPYIPTGIYAEIRNLSNLRIQTQEELTKIKNRIARWFSIYFPEIKVVYKNPDAVSGMMVIKKAPLPCDIKELGVDGVNQVWRDAKLKGAGLKRARTLVSAAEHSIGSTEAPESARIEIRNLLNDYEVYKNRMDDLMREIEAKLSEIPYIDKLMEINGIGLKTVSCFIAEVGDIRRFDNPKQLQKLAGYAIVADSSGKHNGESRISHRGRKRLRYALYEAAISVIGKNKEFREIHDYYRTRKQNPLKKMQSVIAIACKLIRIFYTILTKGVDYDGQKMLSDIVRPETVMAA

SEQ ID NO: 157673 - protein, 376 aa, unidentified
MSEITRLMLLIVRVGVDLAKNLIQVHAVDASGRRVVARAFKRDQFFGWCEQLPKGCVVAMESCSSAHHWARRLRALGLDARLIAAHFVTPYRMEGKSGKNDATDAAAICEAASRPSMRFVPVKTPEQQGIMSLHRIREGFKEERTACINRIRGVLAEFGLVFGQSPKVLRAHLADVLEDASNELSYTARLVLQEAFEHWRNLDDKLLWCDRQIGQHVRGSAQAKRAARITGIGEVTASAVTAGVGDFRQFKGGAQFGAWLGLVPSQNSSGGKVSLGRITKRGDDYLRTLLIQGAKSAVMSAHKRQDPTSRWLVQLKDRIGWQKACVAMANKNARILWAVMTRDAAFDPKHVSVKPQCKVPPGQRTAASPPPAACTA

SEQ ID NO: 157674 - protein, 462 aa, unidentified
MKRKAKSQATHSGLAVVNPNAAAIDIGATMHMAAVGADRASDPVRSFGTFTADLHRLADWFAECGVQTVVMESTSVYWIPIFELLDERGFEVILVNARDAKHVPGRKTDVSDAQWLQRLHSYGLLRASFRPKGEIVELRAYLRQRERLLDTAASLIQHMQKAMTEMNLQLHHVVSDITGATGMRIIRAIIAGERDPAVLASMRDTRCHSSIEVIEKALTGHYRAEHLFVLEQALALYDVYQQKVAACDIRMESVLKELISVRGSKEDASANGSGSLRRRSRQSNGPDFDVGKALNALLGKDLTRIHGIGPYLALKLVSECGDDLSAWPTAKHFTSWLCLAPSNKISGGKVLSSRTRRSGSRAASLLRLAAVTIGRTDTALGAFYRRLSARAGKSKAVTATARKIAVLFYNAIRHGMDYVDPGASYYETRYRERVVKNLHRRAKAFGFILQAAEIPVAEQAVS

SEQ ID NO: 157675 - protein, 393 aa, unidentified
MPSCLAIDVAKGKSMVTLVSSCGEVLIDSYEIDHSINGFSNLLNRIKSFKLDNISVIMESTNIYHRPIERFFLENNFKVFVINPIYGRMHKRNLRKTKTDKEDCFNLVNLFISNTFKEYIKPDQLYLDLNALSRQYFALDVLCVNIKNRYRNLLYLCFPEYETIFKGTLIYSNIALEFIENYPHADIISNTRIDKLQNFFKKREFRYWKAKANLIKEIASKSYPSVNENDELVSNLSQMARLVNEYQKAIDIIKYKITFLSKKSKYFEPINSIYGIGEFTTSIIIAELGDINRFNNIKELTAYCGLDPSIKQSGKSINIRGPISKSGNKYMRKILYIACSNIIRLAAISKQENDFEIYYRKKRNEGKHHYAAIVACTTKLLRKILALCKQLDN

SEQ ID NO: 157676 - protein, 341 aa, unidentified
MKKFFIGIDVSKETIDVSFVESDFQRQPEYLAQYPNGKKGYRSMVRDLKLAMHGTSSGQWLFCCETTGAYDRQLCHWLAEHGMHVWRESALQIKQSLGVRRGKNDKADSMAIADYARRHHDKANLYKVPDKELAALKDLYLYRQTLVDKRKAVKNRVKALESQGGSVSPAAKFIRRDANRELRRLEESIRECESAMKDVIRSDALLERNYEHVKSIKGFGLVVTVALMVFSGNFQNIPTANKMATYCGVASFRSTSGTSIDFRQDVRHLSNRRLKGVLSMAARSAIRHDEALRQYYQRKIAQGKQYGVAINNVKNKLLHIAYALVKNDADFHPGHVCGQAV

SEQ ID NO: 157677 - protein, 398 aa, unidentified
MITTDIDIFLGLDVGKTDHWACAVTKDGTKIWNKTLPNDEAKLVSVYQNLSAKGTVLVVVDQPATIGALAVAVAQNLGIPVAYLPGLSMRRIADMYPGTAKTDEKDAFIIADAARTMPHTLRSIQVSDEDEATLGMLTGFDLDLARQITQTSNRIRGLLTQIHPPLERILGPWLEHDAVLEVLAAWPTPAALRHAGKARIDAKLKKYGARRHTAWASTVIDALDEQSVIVVGTDAAGLVIPHLARQMISLHAQRADVAAHLETMVEAHPLYPVLTSMPGVAVRTAAIIIAEISGKTFTSAAALSSYAGLAPTTRQSGTSIKSERVSHSGNKGLKRALFLSAFAAIRFDPASREYYDRKRAQGKRHNQALIALAHRRPTVLFAMIRDGSLYDVPELKIA

SEQ ID NO: 157678 - protein, 321 aa, unidentified
MTEISMKAAGIDTGKIWLDVATYPVSDKQKVPNNADGWQTLADWLERQGIGRVGIEASGGYERDVIAYLHQRGFEVVLLQPRQVRAFGLYKLRRAKNDQLDAALIAECAARSDARCHAPDSRLLAFGEWLLFIEQIEADIACLKTRRERFTDRRILEEIDRSTGELKSRCKAQLALLQAAVREHDDLARKLDLIESIDGIGIRTALTLVILMPELGRVDREEIAALTGVAPYDDQSGKREGERHIAGGRARVRRALFNAALPASQRWNETLVELYDRLTAKGKSHKAALIACVRKLIIFANTVVKRQTPWTKSAPQQNSCA

SEQ ID NO: 157679 - protein, 420 aa, unidentified
MTSANIIPADAVLVAIDIAKIRNEVLIEDPGHKRRRRLQVLNSRAEHDRLIEVLQTYGRPVVCGFEATGNYHRPIAWRLAEAGFEARLVSSLALARTREALHNSWDKNDPKDAQVMLHMLKIQATQVYHDPLRAGINDVQELSKTHEAIARAKTEIQHRILTHYLPLYFPEIDRFRGNSRSDWFFAFLDAFPAPASIVALTKEEFVKAAWNVVGRKVSKTQILMDIYETARTSIGLPLPLEAPAIRMFRMVIAEARSLIRQRNEIEEQADELLRCSQDYQLLRQIPVIGPINALTIIAEAGDLRRFHHHRQFLKFCGLDLSTQQSGQYRGQTRLSKFGNARLRRTLWIAGQVAIRQRENGFRHKFERYIARDRDNPDLRRKVMTAITAKMARVVHAVVKSGSDYRPFVEGRVPGGRTSVS

SEQ ID NO: 157680 - protein, 422 aa, unidentified
MLEQTQDEQEIIARVAALDIGKAELMCCVRVPDPKGGSRRVQEVKSYSTMTRSLQVMADRLMDLGVTRIVMEATSDYWKPPFYLLEAHGFDVWLVNARDVKHLPGRPKTDRLDAVWLCKVAERQMLRPSFIPPVPIRRLRDLTRYRIGLVSDQTREKNRVEKLLEDSQIKLSVVASDIFGVSGRQMLAALIDGQRNPQVLAQMARTRMRTKIPQLEEAFVGHFTDHHRFLLTKMLARIDALDADIADLDTQIDAHLAPFADAVARLDQIPGVGATAAAVIIAEVGLDMTRFPTPAHLSSWARFAPGIKESAGRKKGTGSTGHGDRYLARVLGEAAAGASNTNTFLGERYRRITRRRGKKKAIVAVGRSILVIVWYLLSDPNVDFHDLGSGYYDSRINPERKKHNHIRQLEALGYKVTLEPAA

SEQ ID NO: 157681 - protein, 341 aa, unidentified
MEEYIGLDVSMKETAVSIRRAGERIWRGKCATDPSIIAELIRKRAPSVKRIVFETGPLSVWFYHSLRTEGLPAICIDARHAKAALDMATNKTDANDADGLAQLAEVGFFREVRVKGFDSMLTRTLVAARTRLVRITTELSNQIRGVMKTFGLLVPAGKGSTFEKNVRSLLADQDRLASIVLPMLEAWRGIRLRAAELGRQLVRDARQSRACRILMSIPGIGAITATSFTTAIEEPDNFRKSRSVGAWIGLTTRRYQSGEVDYDGHISRRGDRPLRGLLYEAAAVILTRSSTHSTLRTWGLQLRERIGFKRAAVAVARKLAVIMHTMLKTGELFNPNAGAAA

SEQ ID NO: 157682 - protein, 404 aa, unidentified
MNNVAGIDVSKGKSVVSVLRPFGEVVAKPFSVGHTGSELKELADYLKSLDGETRVVMEHTGRYYEPVARFLHEEGIFVSAVNPKLIKDYGNNTLRKVKTDKADARKIARYGLDNWVELRQHTPMDTIRMQLKTLNRQQGLYSKTKTMMKNNLIALLDQTYPGVNALFDSPVREDGSQKWVDFAMAFWHVDCVRAMSLTAFSERYRKWCKRHGYNFSQSRAVEIYTDAQDLIAMLPKDALTKAMIRQAIDALNAVSKSLEQLKQEMRTLAAQLPEYPVVMAMRGVGDSLGPQLMAEIGDVTRFTHRGAITAFAGVDPGADQSGAHEAKSNHTSKSGPPELRRALFLVMDCLLKTQPQDDPVYRFIDKKRAEGKPYLVYMTAGANKFLRIYYGRVKEYLASLENAD

SEQ ID NO: 157683 - protein, 343 aa, unidentified
MEIVRIGLDLAKSVFEVCGVDVRDHVVLRKTLRRDAVPQFFAELPPCLIGMEACSSSHYWAKVLTDLGHQVRLIAPQFVTPYVKSNKNDRNDAEAICEAISRPSMRFVPPKSSEQLEIQAVHRIRQRLVSSRTRLVNQIRGLLAEHGVVIGRDISRLRRALSQIVEGADRNLGDLIQELASDIHQELTALDERISSYDRRIRNLFRTNEMCQRIGKIEGIGPITATALVAAVGDQSCFKNGRQYAAWLGLVPKQRSSGGKSRLFGISKRGDRYLRTLLIHGARAVLGKVGEKQDARSAWINRMRERRHPNVVAVALANKNARIVWSVLSRKEEYRRPEMMKAA

SEQ ID NO: 157684 - protein, 520 aa, unidentified
MILIREVADAPVIMGISKPAGLKSPCGEVKIMNPLFVGIDVSSKNNVAYLMKPDGSKHSSFSVQNNLGGAKLLSEKIVSALHSMQLNDVVIGLEATSIYGDSLVYALREDGSLGRFQRKIHVLNPKQVRKFKEAYPDLPKNDWVDAFVIADHLRFGRIAKEVYMDDYRYQALRTLTRARFDIIQNLTREKQRFANYLFLKCSGIAQDKDIQNTSATTIALMEHFETVDDLANADLDELTAFISEAGRGRFVDPDATAKAVQAAARGSYRLPKTVNDTVNQAMSVSIASMRALKEQVKVLDKAIEQHLEIIPNTLTSIPGIGKVYSAGIIAEIGDIHRFNAQASVAKFAGLVWHRNQSGDFEAEHSQMIKSGNRYLRYYLLEAANSVRRCDSEFRRYYNLKFKKNLDMDIGLKYEAMRSGKIDVINIFTTDGQLSHANLTILKDDKHFFPSYYCATIVREETLKEHPELERILEKMNGILTDQEMADMNYKVDVEHRTEREVAVEFLKKKGLLNPQLSYGK

SEQ ID NO: 157685 - protein, 316 aa, unidentified
MNKPEAEQTPAYAGVDISKEVLDVSLAGQPPCRYANDTTGIAALIKVLKKLPQPVQVVCEPSGGYERDLLSALWTAGLAVSLVHAARIRAFARAQGLLAKTDPIDAVVLREFGELLKPETLAAPSPQQERLAALVQRREQLVNLLSMEDQRLAQARDAVVRKMSERLLKKLATQIEQMDALIEEQITADKTLKSQSERLQQVKGIGPVTASTLLAELPELGTLSRNESGALAGVAPYNRDSGEHRGRRTIRGGRVKVRRVLYMAALVAARYNPILKAFYQRLVAAGKPKKVAITAVMRKLVVLLNHLLKNPDFKLA

SEQ ID NO: 157686 - protein, 318 aa, unidentified
MLIHYIDIAKRNFVIAVSSLSKTKTETNNPKGIAHTIEYLKKHKVALVVTESTGGLEIPAAKAIRRAGIAVIIANPRQTHQFAQSQPLTKTDAKDAKMPAFFAQMKAQKEDSQTMPYQPPTEAEEVLEALVNRRNQPADMRTAEKNRLHQVHETQVGSVKQLIAHFDRLIDELDKQIDNHTHTHFDGKDQVAEQIKGIGSITTATLMAMLPELGRLLHKRIAGLAGIAPHPREGGETKFKSRCFGGRSAVRKALYMATVAATRFEPLIRDFHQRPLSEGKPYKVAVTACMRKLLTISNARMRDYFAENDTAENGIRTA

SEQ ID NO: 157687 - protein, 426 aa, unidentified
MAYRIAGVDVHKKMLAVVIADVAVDGEFQFERRRVGTSPTQLRALAEWLVEREVEEVVMESTAQYWRPVWETLERLWQRCRRTREGAGPMSGMLHLAQAQSNRGARGRKKDFPDAERLVKRLVAQELTLSFVPDTEQRLWRTVIRRKWQVTRNRVQLQNRRECLLEEAQLKLSSLVSDLLGASARRMLQAIADGETNPATLAALGSRRLHATPDEFCDALGACTDLHPVYRRLLTLTLEELRVIEDHLAQLDHEMARLLAAYQPAVQRLAEVPGLGVDSAQQIIAEVGAAAATFPSPKHLASWVGVCPGEEESAGVSYSHRSPNGNRQMKRVLNQAANAAVKTKGSIFELVYRRLVPRLGHAQAIGAIAHRLCRLIWKILHDGVRYEERGGERQKQQVRARATRMIRQLRSLGYRVELVLPTDSPA

SEQ ID NO: 157688 - protein, 343 aa, unidentified
MITIGVDPHKSSHTAVALEETGQVLAELRVQVDRGTGRRLRRWAERWPERIWAIEGANGLGHLLAQQLVAAGEVVLDVPATLAARARQLDRGHGRKTDGIDAQTVAWVAQRTPALRRVTAEDHAGVLRLLSDRRDELVAERRRVVNRLHRLLRDLRPGGAPIELSATVAARLLGATRPHGAANVERKAMARQLVADLRPLDRALADNRHRCAAAVTASGTTLTKVFGISDVLAAKILGHTGDVARFGTADRFASYTGTAPVEVSSGELTRHRLTRSGNRSLNNALHLAARVQVLHPGPGREYYQRKLAAHKSSTEALRASSGNSRRWPTATWSPTALVVPCPP

SEQ ID NO: 157689 - protein, 316 aa, unidentified
MTEAGGFVGIDVAKAEPEVVVRPSGARWTVTNNPAGLAQLQERLQASAPSLIVLEATGGYEVAVVAALATAALPVVVLNARQVRDFARATGRLAKTDAIDAGVLAHFAEVVRPPVRPLPDTMTQSLQAWLLRRRQLVEMLLAEEQRRSRAPRPIQRQIDQHVRWLRAQLGAVEKDLAQTLRESPVWREKDNLLRSVPGVGPVLTTTLLGDVPELGQLNRKQIAALIGVAPLNRDSGTYRGRRAVWGGRARVRATLYMATLTAARYNPVIRAFYERLVAAGKPKKVALTACMRKLLTILNAMIARRTAWKPPVAVSA

SEQ ID NO: 157690 - protein, 372 aa, unidentified
MTGYRERVAVPHSDGVAGSERVGPKHQEGTAVDYFAAMDVSLEQSSVCVVDGTGKIIREAKVASEPEALVAWFAESGLKFTRIGLEAGPLSRWLHAGLTAAGFAAILIETRHLRAALGAMKVKTDRNDARGMAQLIRMGWFRPVHVKTVPAQEIRALLTARDLLQRKLQDVELGMRGLLRGFGLKVGKVSKSKYEARIRELAAGHPMLEPVTAAMLQARASLRAEYAKLHRLLLRIVRADAVCRRFMTAPGIGAVVAVTYRNAVDDPTRFHKSRDLGPYFGLTPSKYQSGEVDRTGRITKVGDAMVRTALYEAANVILTRVTRFSSLKAWALRIAKQRGVKRAKVALARKLAVVLHRMWVDGTDFRWRKAPA

SEQ ID NO: 157691 - protein, 367 aa, unidentified
MQNTIVHYEGTASLEAVATKVKPRGAVIKIGLDVHARLYVAVAQYDHLLPKAARRLRPCEFVPWVEALLRQGQSVHVVYEACGFGFSLYRQLIAAGAHCYVIAPRKLDEECSRVKTDPRDATTLCQRLSRYLEGNTRELAVIRVPSQEEEQARHVSRQRTQLVCHRQKLEAQGRSLLISHALPAPAHWWKEQTWTRLGRHLPAWIMTRLQMARPALLSLQEQINALTNELEASASSNLPRGVGKLTSVMLTREICDWHRFNNRRAISSYTGLCPGERSSGNKRVPGSVTKRGNPRVRAALVECAWRMVRFQPQYPPVQKRLAVLAKGSHAIGAVRKKAIVAVARRLAVDLWRLHTGRCTAEQLGLKF

SEQ ID NO: 157692 - protein, 338 aa, unidentified
MEDKIYDHYIAIDWAAINMAIARMTKKSNKITVRDVPSDVAELQIYLKNLKGTKVLAIEETTTSQWLYTELKEYVDKLFICDPYRNSLLSEGPKTDKIDASKLVQLLKAGLMKEIYHSTKQFIYLRKLVSSYEDLVKAGVRLKNQRYSMLRVCGKTGYEKTNFKLTSKDEQYVLKSLDRQIKNYEQEKKEYTKEFARLAKKYPEIRHQKSIPGIGLINAVKIVARVVTPWRFANKGHYLSYAGLIKHEKISGGRSYGKKQPRYCRMMKSVYKSGVLAAIRGNNPVNNYYEYLITDKNYPAYNARNKACRQLAIISFGVFKSGKKYKPNWRNHVEAGCA

SEQ ID NO: 157693 - protein, 356 aa, unidentified
MSQTLKTSVAVIGIDIGKNSFHLVGQDRRGAIVLRQKWSRGQLEGRLANVPPCLIGMEACVGAHHLSRKLQMLGHDARLMPAKYVRPYSKGQKNDFRDAEAIAEAVQRPTMKFVATKTADQLDLQALHRVRERLVSQRTGIINQIRAFLLERGIAVRQGLRFLRAELPDILATRNDVLSPRMVRIIEELAADWRHFDERIEGLSSEIERLARQDKGCERLMTVPGIGPIISSAMVAAIGTGDAFSKGRDFGSWLGLVPKQISTGDRTILGSISRRGNRYLRSLFVQAAWVVLVKVGPKHWDRYGLKSWIEAARKRLHHNVLAIALANKLARIAWAVLHKGRAFECVKANEMTSRPA

SEQ ID NO: 157694 - protein, 366 aa, unidentified
MGWTPPRRPWCARVMVLVTTEQEASVSEVSTIGLDLAKRVFQAHGADASGKVVFRKRLRREQVLAFFAGRPACVVAMEACSSAHYWAREIGELGHTVRLIPPAYVKPFVKRQKNDTTDAEAICEAAQRPTMRFVSVKSEAAQANAVVFRVRDLLVRQRTQAINALRGHLGEYGVVVAKGPSHVAKLIAHVEDPAADLPEAARTVLRALTASLQFLSERIDLLDREVARRAREDKEVRRLTTIPGVGPVIATALAALAPPADAFRRGRDFAAWVGLTPSQHSSGGKQKLGATSKMGERTLRRLLIIGASSVVQKAIKHGTRSGSWLGRMLARKPRMLVIVALANKMARTVWALQATGEIYRAPVVAA

SEQ ID NO: 157695 - protein, 345 aa, unidentified
MPRHIGIDLHRNQFTCCMRLENGRSYLTTWKLEDLPRFVKKLRPSDQIAVEVTGNTRLFHEAVTPYVKRVVAVDPNQFKVISHSVKKTDPNDARNLALYLEKDLLPEVRMKDKTQAQLASLTQTRDTLVKLRTALKNKVNNILSAHGINLEKEALSSEKKLNEILAMRFDAMVKVELEVIIEEIRSLNQRIAKLEKTIADEGSKLEGHKNLTSIKGIGPLTGSILLSVIGDINDFADEGKLAAYFGIVPRVSNSNETERSGRITKRGSKLGRTALVQCALIAQRFSPYLKRYYEQVKARRGTGKAIIALARKLLGIIYRTLKNKWVFEDFPNFVLAEVKRGGRNA

SEQ ID NO: 157696 - protein, 413 aa, unidentified
MKQIPSQFAAQIGLDWADRKHDFCLKSSDLDDFEYGTFAHTPEAIEEWALTLQERFHNEPVAICLELKAGPVVYALLKYSFIVLFPIPPKALAKYREAFTQSGAKDDPTDAYLQLDYLISYPNALKALVPDNKETRILQRLVEDRRTLVAEKVRLTNRITAALKSYYPQALQWFDDIDTQIFCDFIQQWPTLKQAKRARKPTFVKFFKAHRCVRPAVIEKRIEAIQVAMPLTVDDGVIIPFERLTCALTLLLSQLLITIHDYDLDIARRFRKHADYEIFVSLPGAGPVFGPRLLSAFGSKRERFQTADEVNRLSGIAPVLERSGKSAWTHWRYSCPKFLRQTFVEWANQSIRYSFWAREFYDEKRAQGKSHQATLRALAFKWIRIIFRCWKNKTPYDESAYLFALKKRKSTVN

SEQ ID NO: 157697 - protein, 342 aa, unidentified
MKKASIIGLDLAKRSFQAHGALADGSVAFRKKLTREKVLGFFAERPRCIVAMEACGSAHHWGRAIRDAGHEVRLIPPAYVKPFVKRQKNDAADAEAIAEAASRPTMRFVAVKTAEQQARAMLFRTRDLLVRQRTQLINALRGQLSEHGVVAPQGPANVVILAQAIDDMTPSLPLLVVELARVYLDQIDGLSQKVAGLEKAIACEVKRGAVTRRLQTMPGVGPITAMAIETFAPPMEVFRRGRDFAAWLGLVPVQHSTGGKQVLGKTSKMGQRDIRRLLITGAMVIVRWACRKGAQEGTWLHRMLGRKPRMLVAIGLANKMARSIWAMLTKGEDYRGPVAANL

SEQ ID NO: 157698 - protein, 349 aa, unidentified
MKFYNQQHEFYAGVDLHSNCLHVCVLDHQGRKQLHRNFRTTQIDRLQVQLQPFSRADLVLGCESTFNWYWLADWCQQQKIPFVLGHALYMKAIHGGKVKNDAIDSEKIACLLRGGNFPVAYAYPKAMRATRDLMRRRSLFVRRRAELLGHVQILHLQENLPKPTGNLSYKSNRHAVGENLDHPSSRLNANVDLQWIDALDPQIHRLELHLLQTAKADDANSFFRLKTTPGIGDVLALTILYEIGTIDRFPTCGDFLSYARLTKGSHTSNGKKCTATGKSKIGNAYLRWAFGEAALLHKRELSAAADYADTIEAKHGKPRALHQLSVKLARAVYYMLKRNTVFDPTIYPK

SEQ ID NO: 157699 - protein, 459 aa, unidentified
MNRKRSKPKIDRKMPMVHPNAAAIDVGATMHMAAVRPDRTPEPVRSFGTFTTDLHRLVEWLKECGVETVVMESTSVYWIPIFELLDAHGFTVFLVNARDAKHVPGRKTDVSDAQWLQRLHSYGLLRASFRPKGQISELRAYMRQRERLLEYAASHIQHMQKALTEMNLQLHHVVTDITGATGLRIIRTILAGERDPKVLARLRDYRCHSSAETIEKALTVSYRAEHLFALEQALALYDAYHEKASACDARIEAVLKELSIGRGRCSGTELPSPRRSRTDQANALAFDVRAALFALLGKDITKIDGLGPYLSLKLIAECGDDLSAWPSPKHFTSWLCLAPSNKISGGKVLSSRTRRSGSRAAALLRLAAVTVGRTDTALGAFYRRLSARIGKAKAVTATARKIAVLFYNAVRYGMEYVDPGASFYETRYRTRVVDNLHRRAKAFGFVLMPLEAPPSVVVS

SEQ ID NO: 157700 - protein, 368 aa, unidentified
MEEVCAFVGLDVHKATITVAVADAGRGGEVRHFGTIENTPTTIGKLARNLARRHGVVEFVYEAGSCGYNVQRQLAGMGLTCRVCAPSLTPRKPGERIKNDRRDAIALARLHRAGELTYVWVPDALHEALRDLVRARHAACQDVRRDRIRIQAFLLRCDFRFEGKPWSTRHRRWLCNRQFIHPAQQVAFQTYINALEHDEARKVEVEAQIRDLLAGPPWAKQMQALQALKGVGPIVAATIIAEVGDFSRFAHPRQLVAYFGLAPGEHSSGGTVRPRGITKAGSSIARTVLCEAAWNYRTTPKVGQWMKERCPPVPRDIVALAWKAQLRLHRTYSRLTARGKRSVVATAAVARELLGFVWSIGQRVPLGA

SEQ ID NO: 157701 - protein, 428 aa, unidentified
MDQVNRNRLEEFRQLRKEVRHSEEYLIVGIDIAKDRHYAFFGTAAGKTLLKRIIFSNDHEGFRKLLDQAEALRVQHGLKKVVYGMEPTANYHKPLGEYLINLGRTVVLVSGVTVARNRESLDGRWDKHDGKDSANVADLISQGKCLYYEHPSAELRGLRGLLSLKRRLKKQEHGYRVRIRNHLLAQYFPEMDRAYERLGAEGLSIVRWCLPASEIVQLDVEPFIERVTSRRITMEKRRRLEAIWEKAGESIGCEEVPGVGHEAKIIVEGLKQIRAMIKETEDQIKELCEQFSEYPYILTIPGFGPDVSAKVLGAVGDPDRFLNGKQVLKMGGLDLSADRSGKSSDKAIPEISKRGKADLRYALYQAALIASLKNRDVMIYYTNKIRGREKEKGIHIKMRVKLAAKLLVIAWTLMKKKEAFNPAYLNVE

SEQ ID NO: 157702 - protein, 404 aa, unidentified
MWYAGIDWANDHHDILVIDEQGRQVGSLRVDHTPQGMSRLTTFLEQIVGAESKEQMACIIETTHGLLIAHLLEAGWPVYPVNPRTVDRRRAASGAKTDTIDAYRLPKTGRADLADLHRLTPDSEKIAELKLLTRDQDALIQMQTRLVNQLTACLKAYYPVALELFAKLPQKSTLRFLQTYPSPQAAMAASAEQIQQVLRQARHPNSTIVAAKIVERVHQPHLQADAVTTRTKSRLMLALVSQLLPLIEQIAQYNKEIAPLFLTHEDHELFASLPRAGKRLAPRLLAEIGDDRTRYQDASSLQALGGTSPVLFQSGMYSKAHRRLGCIKPLRNALHQFAWQTTQSEPWAMRYYQRKRAEGKSHTVAVRALANVWVRIIFAMWLHHRCYETATFEHAQQQHARPAA

SEQ ID NO: 157703 - protein, 384 aa, unidentified
MFYLGIDQHRKQLTINLRNEAGDVVARRQVSTRREKIEAFLTELAELTARDGGYIAMVEVCGFNDWLLARFAAQVPCRRMLLVQAESRAKHKTDRRDANRLCELLWTNRERLLTGKKVQQLRVVQPPHAVDAAARQVTALMRRMTKQRTRTINAIHHILLKHNLQQDCPTKSIKAKKARKWLSKLELPAMDRLEMDQLLEQWALWDKQCEQLSREIEACQQRHPTATLLSSLPGCGVMSSLALACRIGDVRRFARPGSLANYFGLTPGCRNSGDAQQRLGSITKQGSSLVRFILGQQVLQLMKRGGPLRRWYKQIKNRRGSKIARVALMRRTVTIIWHMLHHEEPYRPYSAPAESSGAHVTSARARQKRAAPSVLTAASAPAGG

SEQ ID NO: 157704 - protein, 361 aa, unidentified
MFDERTSVGLDVHARSVVAEAVDWQTGQVFSQRLVPASEDVVAWVRRLPGSTAVTYEAGPTGFGLARAFETAGIRCVVVAPSKLERPGGDRVKTDRRDARRLARLLHIGELPSVRVPSLAEEHARDLVRAREDTRGDLMRARHRVSKLLLRQGIIYSGGTAWTAVHHQWLAGQRFDSSGLRIAYAEALDAVASCEDRRARLDAAIEQISHQPPWASTVARLECVRGIATLTAFGLAVEIGDWHRFTGATIGAYLGLVPSESSSGSSRSQGPITKAGNGHARRLLVEAAWHHRRPVSGPSRTLRARRSAVPPAIRARARAADARLHRRWLALEARKKRPTVVAIAVARELAGWCWSLAVMDG

SEQ ID NO: 157705 - protein, 344 aa, unidentified
MKVAVIGLDLAKNIFQVHGIDHAGQAVLKRKLRRSEVLPLFRGLEPTLVGIEACHTAHYWAREIASFGHDVRLMPPQFVKPYVKSQKNDAADAEAIVEAVQRPTMRFVPVKTADQQAVLMLHRTRDLLVRQRTSLISAIRSHFAEFGIVVGQGIRNVERLLDLLQSAGDRHLPKLATEMLGVLAAQLRDLAERVKQVEVALLTWHRSDQTSRRLQSVPGLGPITASAIVATVGDPKQFRSGRQFAAWLGLVPQQRSSGGKERLGRISKRGDGYIRRLLVHGARAIVGWRKRSATHKTPWIDGLLARRPTNVAAVAYANKLARIAWAIMMYGTRYDPALAFAAAA

SEQ ID NO: 157706 - protein, 351 aa, unidentified
MIFVGLDLHKRYVTACAIDADGQLIAEERRVGPDLAVLSGWLGRLTGPVTVVLEATLYWAWLEQQLTALGYVVQVAHPYQVKLIWHARTKTDPIDARKLAELARVHLLPAIWIPDPVTRAQRQLLRGRAFLVRQRTVLKNRIHAYLTGENLRCPALDLYGRAGRAWLATVALPAVVRRYVDLLLANLDLLTTQILALDKYLQRHVRQDAVAQRLQTIPGVGPFGALLLQAEIGPISRFRSAQELAAYAGLVPSTHSSGGKTHHGAIGRGSPWLKWIVVEIIQAHKLAPGPVGAHYQKLLRAKGKPKATVAAARKFVTYLYWILKKEWSYTEWLRQHDRPEVRPTQLLGSVA

SEQ ID NO: 157707 - protein, 341 aa, unidentified
MKTVSHVGVDLHQRFCYLTAVDASGKTLRQSQVVNQGAALRAWLRQVPSPRQVVVEASGFWPAFARAVGPETEKLVMVHPQRVKAIASARLKNDRVDSETLAHLSRADLLPEAWMANERTQQTRLLTRLRITLGRQRAKAKNQLQAVLHQEGFLKPVADVFGKKGRAWLAGLALSPAGRAVVEVWLKIVDQMDEAIAGQTRTLERMAKEDARARWLQTVPGIGPYSAMVILGEVGEIERFGTKRALASYAGLTPSVRESAGKRKRGSIGHHGSGTLRWIMLQVAQVAARHSPAARAWYLRLKQRKPAQVALIALARKLLTAVWALLRHGVCFDENSFAAQG

SEQ ID NO: 157708 - protein, 428 aa, unidentified
MERENCNRLAEFRQLRKDIRGSDEHLIVGIDVAKERHTAFFGTATGETLYRRLIFDNDNDGFERLLLQAEAMKVQHGLEKVVFGLEPTANYHKPLGEYLIKHGHAVVLVATDAVKKNRSLLDGRWDKNDKKDPANVADLISQGKCLFYEHPSQEVRDVRNLLSLQRKLKKLEHSTRMRMRNHLVAQYFPELDTCCNWGANEGLAIVKSWLDPAAISALHYDEFLHKIHTRGVTLAQQRRLSTVWQRAFKSIGCECGLSAEYEAQMMVTMLGQVRMSIAATQQQIKTVCEKFPEYEYLLSIPGFGPDISAKALGAIGDPFRFDNASQVLKLVGLDLSASRSGKNSNNITPSISKKGKSELRYALYQAALIASSKDTHFIAYFTNKLRGREKEKGIKTKMRVKLSAKMMIIAWTLMKKKEFFDPKYLNIE

SEQ ID NO: 157709 - protein, 323 aa, unidentified
MSQPNLQCMGIDVAKLSLDIATTDTIEPFTVGNDEDGFAVITDKLKHTKINLILMEATGGLEAAIACKLQSEGYDVVVINPRQARDFARSMGYLAKTDKLDAAMLAQLALVIDRHPDRSRYIRHLPDEARAVLAAMVVRRRQLNHILVAERNRLYPSHPQSRKSIDNIIDALQNELDRINEQMKQHMTAFFQEQARLIGSVKGVGDITVASLIAELPEQGKLNRREISALTGVAPLNRDSGKMRGKRTTFGGRAGVRATLNMAALVATQFNPAIKLFYQRLLAAGKPKKLALVACMRKLITILNTMLRKGEEWNASFQSQVIS

SEQ ID NO: 157710 - protein, 316 aa, unidentified
MRKKEVFVGIDVAKEELEVAVFPRADTETWPNTEEGILRLVGHLKSLCPTLVVLEATGGLEMPCVGALAAEGLPVVVMNPRQIRDFAKATGRLAKTDRIDAKTIARFAEAVRPEIRELKTEEMQELTALGLRRRQIIQMITSEKNRLATASKWPREDIKEHISWLEKRLSDVNSELNKAIRSSPVWREKDDLLRSVPGVGPVLSATLLSQLPELGSLNRKQIAALVGVAPLNRDSGQFRGKRCVWGGRASVRSVLYMAALVATRFNPAIAVFYHRLRIAGKEHKVALTACMRKLLTILNAMARDRTHWSPVPLRES

SEQ ID NO: 157711 - protein, 431 aa, unidentified
MPNEVPIENEIVAYVGLDWADQQHVICWQAAGSARVQSAVVQQRPEELQAWVAELRQRFPQGLVAIALEQSRGAVIAALMHFDFLRLYPINPKSLARYREAFASSGAKDDPDDAGLLLELLVKHRDRLTPWVPDDALSRELALRVEHRRQLVNLQTKLIQQLRSHLKVYFPQALDWVGELDSLQACDFLQRWPTLAAVQKARPSQLEKFYHQHHCRRPQLIQQRLEQIRQAQPLTQDPAIVQAYSQMVLALVAQLRVLIPTLQQWQQQISQLFAQHPDAALFASFPTAGPVFAPRLQAAFGSRRDRFGSAAEVLQFSGVAPVTKRSGKSRQVQRRWARPKFLHQSFVEFTGLSIPHCCWARALYQQLRARGHRHWAAIRVVAYKWIRILFRCWQDRVPYDEQKYLKSLERRNPTLWAAIQQLPAQPSRKEV

SEQ ID NO: 157712 - protein, 374 aa, unidentified
MKQEDTLVVGGVDAHADTHQGAALDARGALLATASFPTTTPGYAQLLDWLRAFGEVEVIAVESTGSYAAALVRYLREHGVRVVEVNQPHAHTRRRRGKSDPIDAEMAARLFLAGKAEAVPKQTDGIVESIRLLRAARHSAVKSRSAALVQLRDLSFTAPQELRDQLSRRKTLRGKATLCRRLRPSVGELRRPSHAAKFALRAIARRIDALDDEIAVLDRQLKQLVRAAAPRTTRLLGISTGHAGQLLVTAGQNIERLRGEAAFASLCGASPVPASSGKTTRHRLNYGGDRQANRSLHLIAVCRLRYCPRTRAYAKRRTAEGKTKAEIMRCLKRYIAREAYNALRADLAASPQPTRTTTTIYCGAGPIGITRRRT

SEQ ID NO: 157713 - protein, 290 aa, unidentified
MTTTGINQILKELKRNETQLILMEATGGLESGVAGYLQSEGFDVVVINPRQARDFARAMGYLAKTDQIDARVLLQMAKVINQHPEREKYIRPLPDVHRQLLAAMVVRRRQLTIMLTAERNRLHPSHPQNHESIRFIISVLKSEMARVEAEMSAYISENFSELSALLSAVKGVGAATVAVLLAEVPELGTLSRREISALIGVAPINRDSGTMRGRRTVFGGRASVRTALYMSALVGTRHNPVIKEFYTRLVAAGKPKKVALTACIRKLLTILNAMLKNNEAWDPLYHQHAS

SEQ ID NO: 157714 - protein, 346 aa, unidentified
MKILAVDLGKFKSTACIYQTETAQHTFETLPTRPQAVHDLIVEHAPDRLVIEVGSQAGWVSDLAEALEVGDIQVANTNHEAWRWKNTKRKTDRDNALKLAKLSAVDQLPQVKLPSKSVRQWRSLIAYRHTLIRRRTAIKNSIRAILDREGLRMPGGKNGWTKKSIKALQLLAQPVLQTCGDDLWRGQLHVELQALEQLKVLTDQVEEKLAILAYQDKRVRQLRTIPGVGPRLAEVVVATIDDPHRFKNGKQVGSYAGLTPRQYESGTMSRQGKISGQGNKLLRALLVEVSWLMRRYNGYLRGVFDRVCRGSKTRRKIAVVATARRLLVICWAMLRDGTCWREPTTA

SEQ ID NO: 157715 - protein, 407 aa, unidentified
MEILHPRCAGLDVHKDVVVAAVRCVSMPTHQEVRSFGTTTKELQALSDWLESHGCTQVVMEATGVYWKPVWHLLEGNFELVLANAQHVKNVPGRKTDVGDASWLAELLAHGLVRGSFVPPAPIQELRDLTRSRKQLVRELSQHVLRIQKVLEDANLKLGSVLSDITGKSGRAMLAAIVQGETDPEKLASLAQGNARKKKAELIEALRGRVTPHHRKMLKLHLGLVDTLQTAIDEVDVSVGKALEPIQARATLLTTIPGVSDIVANVIVAEIGVDMSRFPSPGHLVSWAGLCPRSDESAGKRRTTRVRKSGTWLKTMLVTAAWSAVRVKDSYLRAQFLRIKSRRGAKKAILAVAASMLTAVYFMLRDDKLYADLGSQYFDRHDKGKTIGRLVRRLQDLGCEVEIRPAA

SEQ ID NO: 157716 - protein, 348 aa, unidentified
MAHFVGLDVSVKETSVCVVDDAGKVILEQKVPTEPADIIALLTSLGVSYGRIGIEAGPLSQWLVNELTAADLPVICVETRHMKALLTAQQINKTDRNDARGIAQMMRVGLFKPVHVKTLVAQEQRLLLTSRKLLQRKLLDLESELRGTLRNFGLKVGTVSGGRYEARVRELIAGFPGLAAIAEPLLNVRRVMRQQFAVLHKMLLDTVRSDRVCRRLMTAPGVGAVVALTYRATIDQPQRFVHSRAVGAHVGLTPKRYQSGEVDYDGRVSKCGDALLRTMLYEAAHSLLIQSRKWSWLKAWGIRVAQRRGIRRAIVAVARRLAVVLHRMWVDGSEFRWSKNSTAVPKAA

SEQ ID NO: 157717 - protein, 356 aa, unidentified
MVQSNKKDFSGQNISIGIDVHLRTWSVTVLTPSGFMRTHTQKASAKELFEHLNKHYPNGSYHAAYETGFSGFSTYYALTELGIKCTVVHAADVPTTQKEKVSKSDPVDSKKLAKALMRGELGSVYIHSKDSLDDRALVRHRATIVKLSGGIKSRIKHLLYNNGVEYPEEYFRSNRHWTRCFITWLQNDVRLLSDTRVSLDLLIAEVLHYRERLLDVNRRLRSLARSDRYAEKYGILMSVPGIGSTIAMSLLTEIDDIGRFSNQRQFASFLGLVPMMSSSGDKEYVGEKTFRGNKFLGPKIVEASWIAIRHDAELSAKFGALCTRGMKSQEAIIRIARKLSNIIFSVLKSNRRYECR

SEQ ID NO: 157718 - protein, 550 aa, unidentified
MDVIVERCAGLDVHRDSVVATVRVPGTGKSRRRRAQQTRTFGTTIAQLEQLADWLAGFAVSLVGMEATGVYWKPVFWVLERRFECWLINAEHLHNVPGRKSDVIDSRWLCELLELGLVRPSFVPPPEIRRLRDLTRLRSTQAEERTRAIQRLEKVLQDAGIKLTSVASKTYSVSARAMLEALLGGVSDPARLAELAKGRLRAKIPQLTEALANRFDTTHHGVLVAGLLAHIDALDQAVATLDARIASATDAELIDLLSTIPGVKRHIAEVLIAECGLDMSVFGSAQRLVSWAAICPDTNQSGHRRRPGKTRHGNPWLRTALTQAAHAAARSKNTYLASHYRQIRGRRGDAKATGATHHDILIAYYHIVSDRVPDRELGPDWLARRHSPEHRTRRLVKQLEALGHTVTLEAAAQSTDPGTTTTARRACGPTARAWSQPPPNPAGIHTTGDRRESVRGLREVPADQLLRCRRGRRQRAAASTERPRSACEPPGWPRIAVAERVCAASVRRPRSVHRPLKRERVAKRDRVFAAVAGEAAVVALDHRDARADET

SEQ ID NO: 157719 - protein, 464 aa, unidentified
MSRKAQNQQERRSARPKVDWKALEVVHPDAAGIDIGGSEHWVAISPDRDEHPVRCFDCFTADLEQMADWLKARGVRSVAMQSTGVYWIPVFEILQQRGMEVYLVNARHTKNLPGRKSDIAECQWLLKLHTFGLLQNSFQPSDEIRAVRTLWRYRSGLVAQASSTIQRMQKALIEMNIQLTNVLSDLSGVSGMAIVQAVLDGKRNPEELASLADPQVKASKEVIAKSLRGNWRPELLFVLGQEMDSYRTYRKRIADCDREVQQQLQRMESKVDLSTQPIGPRPKGKRARGNAPQVFDLRSELYRLTGVDWSQVDGIDVQVAQTVIAEVGADLKAFPSEKHFANWLGLCPTNETSGGRVLKRRTPKVVNRAKAAFRQAASTLIRSNSYLGAQYRRLRTRLGAPKAITAMARKLSCLFYRLLTKGQKYVDRGAQYYESRYREQQIRSLIKRAQRLGLQVLSPEVKPA

SEQ ID NO: 157720 - protein, 341 aa, unidentified
MGEVTTIGLDLAKSVFQAHGADASGAVAFRKRLRRDQVLGFFASQARCLVAMEACASAHYWAREIATLGHETRLIPPAYVKPFVKRQKNDMADAEAICEAAQRPTMRFVGAKSAEAQGAAVVFRTRDLLVRQRTQLINALRGHLGEFGYVVRQGAGHVAKLLDLVADPASDLPAEARPILLVIAESLASLQARIAVLDREIAARAKADPIAKRLMTIPGVGPIVATALVALAPPASTFRRGRDFAAWLGLTPKQHSSGGKERLGRTSKMGERSLRRLLILGASSAVKVATRDNARAGPWLAGMLGRKPRMLVTVALANKMARIVWALMAHGGSYRAPAVAA

SEQ ID NO: 157721 - protein, 388 aa, unidentified
MIVIGVDTHKRSHTMVALDAATGATRGQLTIAASDDGTLEALRFAGELDDERVWAIEDCRHVSGRLERGLLAGGDRVVRVAPGLTESSRRSVRVPGKSDPIDATAIARAALREGIDTLPVAFLDEQAHEIRVLTDYRDQLVNERVRHINRLRWHLVQIAPQLEAQIRPAGLEGPRIRARLARQLGQLPRSPQLRVAKATLKRICEICREEQALLAELKTLIEVHCPQLLAERGCGPVTAAIIIGHTAGAKRFPTDACFARHAGTAPIPASSGNTQRHRLHRGGDRQLNRALHIIALSRARTDPTTRAYLDRRHSEGKTKKEAIRCLKRHLARRIWRLLYTTATAPLPAAATDSTRPADPDQYPIPPRPATRCPVDHTIPAAAPTSCIT

SEQ ID NO: 157722 - protein, 364 aa, unidentified
MDPRPSSRSNVGRELQRGRIIMQVVRIGLDLAKYVFEVHGVDGQGNAVIRKTLRRGSVSTFFANLPPCLVGMEASNGAHYWARLLTELGHKVRLISPQFVAPYVKSNKNDRNDAEAICEAVSRPTMRFVPPKSPEQLAIQALHRIRQRLVQSRTRLVNQIRGILAEHGIVIARDIWRLRRALAEIMGRATDDLNALVRVLVMEAQAELIELDRRIASCDRRIRELYRSSVLCQRLGEIEGIGPVTATALIAAVGDRSCFKNGRQFAAWLGLVPKQRSSGGRSRLFGISKRGDRYLRTLMIHGARAALGKAGSKQDPRSRWLAGLRQRRHPNIAAVALANKNARIVWAMLAGNVSYESTRSVQAV

SEQ ID NO: 157723 - protein, 371 aa, unidentified
MNHVTSIGLDVHARSVTAVALDSITGEVRSQKFGYSPAEIAGWILQLDSPKAVYESGVTGFHLVRELREMGVDCIVGAVSKMHKPASDRRKKNDRNDAEFLARQLMAHNIVEVFVPDVETEGARNLSRALEDVRDDLTRAKHRLTHLLIRWGYIWNEFNEDGKRRGSWTHAHWEWIRGIELPDAAARESLDYYISEVRHIESQKKAIEKRVAQCASRPRWRDRVEALRCMKGIETVTAFALTVEAGVFSRFDSARAFASWLGLVPSEHSSGERASRGGITKAGNSHLRKLLVEASWHYTRATKERKRSLYDESVPASISNHAAVGVKRLVERRRHLSCELRKRPAVANVATARELACWIWALGRMSEGALA

SEQ ID NO: 157724 - protein, 419 aa, unidentified
MKEMSSSETKTDRVAKPRGTGKKRGPVQRDVKEVVAELVLKLSQQLEPQPERAREGEGQRECVPRPNRGRLTVGVDLGDQWSNYCILGLEGETLAEGQLRTTQQDFTEFFQSMAAARVVMEVGTHSAWGRDVVAGCGHEVLVANSRLMEGPKRRKRKNDRIDARKLARVGRVDPQSLCAIEHRSAEVRQDLVAVRARDAVVAVRRDVINTTRGLVKALGARLPKCSSQSFSKKVEGSLPTEVHEVLLPLVRLVETLSSCIKAYDERIERLATEKYPHTELLRQVKGVGSLTALAYVLTLEDPKRFAKSRDVGAYLGLVPKQEDSGDRQPQLRITKMGDMMLRRLLVGSAHFILGPFGPDTDLRRYGLRLCEPGGKNAKKRAVVAVARKLAVLLHRLWVSKEVYEPLRHTPPPATEQDAA

SEQ ID NO: 157725 - protein, 389 aa, unidentified
MEARTVSSLPTAAPHHDVVRCLLAIELSKASWIVAVHTPLSDKISRYTLEGCDWKGLLELIERIRKRVTREFGPSMEMISCYEASYDGFWLHRLLEGHGVRNHVIDPASLQVDRRARRAKTDRIDAARLLRSLMAHVRGEPKVWSVVRVPSVAEEDDRRLHRERDRLINERGQHVNRIKGLCAVHGIYDYEPMHSKRMLRLERLRTATGDQLPRRFKEEIERELQRLELVLRMIKAIETERDAIASAKASTHTNAKKIQKLVKLRAIGAEFATVLVSEVFFRPFSNRQQIASYVGLTPSHFQSGSMSRDQGISKAGNPKARTTMVELAWMWLRHQPGSSLSAWFRERVGTLKGRIRRITIVAVARKLLITLWRYLEAGVLPTDIALKKG

SEQ ID NO: 157726 - protein, 313 aa, unidentified
MRIFVGVDVSKDSLDVYRPDTAEQIKIDNSEAAVADLCQQLQKKKRHLIVVMEATGGYERLLVNQLALHDIKAAVINPRRVRDFAKGVGMDAKTDPIDAKILSQYGEVVSPKPMAVKSEHEQKHAALVARRNQLLELISQENNRLQQTWDDDAKQSIRDVLEMLKKQLKSIDSQLAKMLKADAKNQRTIEILQSAKGVGPVMISTLIAELPELGRLNRAEIAKLVGVAPINRDSGKKSGKRFIGGGRGQVRRVLYMATIVAIRHNEKIRTFYQHLKSKGKESKVAIVACMRKFITILNLLVKTDQLWQTKTSA

SEQ ID NO: 157727 - protein, 311 aa, unidentified
MKKIYVGIDISKEKCNLCFRSGLEIVREEECSNDVKALKKAFKAVLKALGASLEEVLVCAEYTGRYIYPLTVACQELDIFLWMDDPTRIKNSMGLTRGKNDAIDAARIAEYAFRYSDKAVRYSIPDAALASMKNLLADREFLLIDRKRYQSQLTDQKKYMAPGDFKHKNSRWKKVIKSIDEQIAAIDAEIDALISADPVLVRQKELLVSIDGIGPRIAINMIAITGGFTRFQNARQFCSFAGLTPYKYDSGTSVRSKAKISKRANQTMKALLHMSAVNVATRMKSGEYKDYYERKLKILKEIQNSMLIHYV

SEQ ID NO: 157728 - protein, 421 aa, unidentified
MKVMTNPPPSTALGVPPGNLVAGIDTHKDTHHVAILDHIGRPVRDRQFTATPDGYRRIVDFLHSAGAVERVGIEGTGSYGAGVTRVLSAEGFNVAEVARPNRRSRRLRGKSDPLDAKQAALNVLADADTSVPKSGSGAVEVLRMLLAERRSASKARAQVMNQIHALLVTAPDTVRDGYRSLGSIVLVGVLARSRPRTGTGPEYVARQVLKRLAVRHVALTAEIAVIEQEMSPLLLAANPALISLNGVGPVTAATLMVAAGDNPERLNSRSSFAALTGVAPIPASSGQRSRFRLSRGGNRQANSALHRIVLLRMRHHEPRTDAYFARRRAEGLSDRDIMRCLKRHIANEVYRVLMEPGLENPVGRRLHELRDEVGVPLSVLANTLGVPRQRLQRLEAGIRADAELEARATVTLTQIGHQLAA

SEQ ID NO: 157729 - protein, 349 aa, unidentified
MISHTTRKRAKFVGIDYHKKTSAITIGDKAGKVLEQFNLLNHGNIVRDFFSDFGRLECAVESCRGYEWLVELLRDMGHTVHVADSRGVKLIAQSRCKTDKIDSKILMELLAIGFLPTTYQPTEKEREYRELLRHRCSLVRTATRSKLRVHSLLDKENKGFPYPFTLKGRRQLDTVELRQYRQEILNQELSVIDFVEEQAQTQEEKIRKLARYNPDVHRLKKMPGFDVLMAMSFVAEVGDVRRFRNSDQVAAFIGLVPRVYASGGTMRTGRITKTGSRFLRWMLVQAAWSAIKKSPNLRARYTSIARRRGKSVAIVAIARKLATIAFRILREKTDYQEEKLDAGLARASF

SEQ ID NO: 157730 - protein, 415 aa, unidentified
MSEVFRWFVGLDWARNQHRARVLNAEGKSVAECDVGHDGAGLSELCDWLVEITAAEPAQIAVAIETPRGPVVETLLERGFAVYSINPKQLDRFRDRFTVAGAKDDSRDAQVLGDSLRTDRHAFRRLSMDDQLIIELREWLHIEDHLKQDRTRFSNRLRDQLWRYYPQANQLADDAAADWFLDLWEQVPTPAAAARVSETTVRQILQKHRIRRFDAIAALAILRQQPLHVAPGTVEAATAHIRGLAAQLRLVNQQIKQAEQRLDELCAAIEASAPGQICGQHDVAILRSSPGLGRITIAALLAEACQPLRQRDYQVLRMLSGIAPVTRRSGKSLFVRRRYACNNRLRNALFHWARAAVQYDAVSKRRYDALRRRGHNRARALRGVGDRLLFVLCTMLQRQTLYDANYKATQIAMTP

SEQ ID NO: 157731 - protein, 417 aa, unidentified
MWNKATKVRRSVDEASHFSSEVLVMMVSVGIDVSKDKHDCFIVTSDGEVLSDVFTIPNTINGFHCLLRRIQDCTSTQDKIKVGLEATGHYSYNLLGFLLDNGLTTYVLNPLRTNLYRKSLSLRKTKTDRVDARTIAFMLLSDASLNPYTDTAYHTEELKSLTRYRFDKVKERAKLKSSIARLVCILFPELEKLVPSLHIASVYALLEEFPGAKQVAATHLARLKALLETASKGRYKRDMALEIRKAARNSIGSWMPAKSLELQHTIRLIRELDNEIAEIEEQIQSIMDELHSPITTIPGMGFRMAAMILAEVGDFSRFESPDKLLAYAGMSPSTYQSGQLKNCYPHMEKRGSRYLRYALYNATKYVCQWDLIFAAYLAKKRTEGKHYNVAISHAAKKLVRLIFAMEKSGRPYCTSAA

SEQ ID NO: 157732 - protein, 344 aa, unidentified
MDHFAGLDVSVKETSVCIVDETGNIVREVKLASEPDALVAVLKNAAYHFKRIGLEAGPLSQWLFSALAEAGLPVICVETRHMRAVLKAQINKTDRNDARGMAQMMRVGLYRPVHVKTLRSQKLRMLLTHRQLLLSKAIALENDLRGTLRNFGLKVGMVGKVKFEARIRELVENLPDLAVLVEPMLIVRRVLREQIVILHRRLLAIVRDDEVCQRLMTTPGVGPVVSLTYRATVDIPARFRKSKSVGAVFGLTCAKYQSGEVDWDGRISRCGDEMMRTMLYEAAQAMTRSKKWSWLKAWAMQIARRRGMKKAIVALARRLAVIMHRIWVDGTEFRWTREQAAVAA

SEQ ID NO: 157733 - protein, 293 aa, unidentified
MHSENIAAYIGLDVHKETLAVAIAAPERLGEVRYYGTINNEAQAVRRLFQKLQGLYGNILSCYEAGPCGFGLYHQLTAMNIKCQVIAPSRIPKSPTDRIKNDHRDAISLARLLRAGELTPVWIPDLTHEAMRDLIRARAAAKRDSRVARQRILSMLLRTDKHYAGKHWTGKHRTWLANQSFSQPSQQIAFQHYCQSLEQIEDRILQLDQEISRLLPEWSLCNLVCQLQALKGVGQLIAITLVAELGDFSRFSNPKQLMAFLGLVPGEYSSGNSIRPRGITKVGNSELRRLLFV

SEQ ID NO: 157734 - protein, 276 aa, unidentified
MKLYGGIDLHSNNSVISIKGEDGQIKARKKLPNNLPLIFQFLRPFQEALVGLVIESTFNWYWLVDALKEANFRVHLANTIAIQQYSGLKYADDKSDADWLAEMLRLDILPEGYIYPKEERAVRDLMRKRMQLVQQSTRNLLSIQGLYMRHLNYKLSSNKIKQLTTAKIEEDFQSTNTIQGVQSNLMIMNCIKEQIRKFESLILAQTKLRSDFKELKKIDGIGDILSLTIMLKTGDIGRFNKVGHYASYCRCVSGARYSNGKKKGKTNSKNGNKYLA

SEQ ID NO: 157735 - protein, 334 aa, unidentified
MSFTNFIGIDISKNTFDLALIKENSPEKTVTAKFSNTHKGIVALEQFIRKQDLVKEQILFCIEHTGLYCRVLSNYLVENQYAVWLEMPVQILRSLGIQRGKNDQLDAKRIATYAFTFRDKARLWQPPREEVQKIHDLLALRDRLIESRKSILTPIQELEATGLSEVADTLRKHCKKSIESLDKEIKQIEKELDEIIDKDTNLKNKYKLARSVPGIGKITAMTLLYYTNEFTLFRSAKQLACYCGVAPFARESGTSVRGKTRVSNFANKALKKLLHLASMAAISSDKELKAFYLRKVTEGKNKMLVLNAIRNKILQRLVAVIKRNTPFQPKYQIA

SEQ ID NO: 157736 - protein, 415 aa, unidentified
MKKRSWKQQILTTQTLLATVDIGKAQNFGYYRCPDGTDVPAFRFANDGEGFKKFWQRLTHAMQQYGLTEVVVGFESTGSYAEPLMHFLRKHGARLVQVSPAHVKRVKELTDNSPNKTDEKDPKVIANIIALGGALTVVIPQGAAAELRRLSQARERTLEERTARYNQLHSVVFLVFPEFLEIFPKLDRKSVHDLLENYPTPAQLLGLTLEELTQRLRRLSRGRWQGPQAEALYSAAQNSVGVFEGQHSLVLEIQHLLRQIDGCDETIMTLETHMRTHLAQIPYSRFLQSLRGIGTVTLAGLIGEVGDFNNFKTVDELLKYAGLNLYEISSGEHKGQRRISKRGRSLMRKLLYLAALNVVRQGGILHARYQSYLAHGMVKLKALIAICRKLLGIMLALVRTQCEYRANYHAVVQLT

SEQ ID NO: 157737 - protein, 368 aa, unidentified
MNTVKFIGMDVHKKTITIAIIDEGRQKQSRIYGTIANDLDALDKFCRKMVSTSIRLYFVYEAGPCGYGIYRDLTDKGFDCMVAAPSMIPRKSGDRIKNDRRDATMLARLHRAGELTAVYVPDARDEAMRDLSRAREDAVMVAKKAKQRLKAFLLRNRVVFAGRSQWSKAYFNCLADIAMPYPAQQVALQEYIDAVHESLNRVGRLTDQIRQLVPAWRLAPIVSALQAARGISLVVAVTMLAELGDLSRFDKPSQLMAHLGLVPSEHSSGDSIKRGGITKTGNGHARRVLVEAAWSYRMQARVSRLLLKRQQGLPDQVCQIAWKAQLRLCARYRRLVAKGKVKQKVVTAIARELSAFLWAMAKQVQPLA

SEQ ID NO: 157738 - protein, 320 aa, unidentified
MYVGIDVAKAELVVAMGATGPVTTFPNDDVGLTALVGAMREAKPTLIVLEATGGYEIACTAALAAALLPVAVINPRSVRSFAKATGTLAKTDRIDARLLAQFGERVQPEPRPLPTAAQQELEALVTRRRQLLEMRTAEQHRLGQALGGPRQRVKQSLRKHLAYLDRELRITETDLRDRMQASPVWRARDDLLQSVPGIGPTVSQTLVAELPELGRLNRREIAKLVGVAPLNRDSGTRRGRRMTLGGRASVRAILYMACLSAIRHNPVLRAFYQRLTRAGKVKKLALVACMRKLLTIVNQMVRTGQHWSPSPSIACQLQPT

SEQ ID NO: 157739 - protein, 373 aa, unidentified
MPKYSTAFGMDVHLRSTTVCALDADTGEAVTRRFPGNPWGEIAGWMDGFPGPSLAAYESGYLGFAPQRELAGLGVECVVAAVSKIPRSAADSASKNDRNDAARMAKAILSHDISPVWVPSPEVEGIRDLAGAHDGATARLAAAKQRLLAFLAKRGFVYGGTTPAGNPRKYWTYDFLRWLDKVRPEDDGGVRTLAALRNEVEAAAEARADLLSEYRAAVDASPIAAEVAALQSIKGCAFALAAAFSAEVGDFTRFRSGRQVTAYFGLAPSQRSSGDSVRLGGISGAGNALVRKLAVEGSWCYAAARHQPKLMPRDTGVPLEIRTHGRKGSERLLRRREEMVARGMPAAKANAATAAELVRWLWALGMMCREGGE

SEQ ID NO: 157740 - protein, 405 aa, unidentified
MDVVYDRCCGLDVHKKMVVACVLTPETKEIRTFSTMTDDLLEMVDWLGKHGCTHVAMESTASFWKPIYNLLESAEFNVLVVNAKHMKNVPGRKTDVKDAEWIAGLLRHGLLQASYIPNREQRELRELIRYRRSLIEERAREVNRIQKVLEGANIKLSSVASDTLGKSGRAILEAMIDGEKNPEVLSELAKGRMKTKKPELQKALNGLMGEHQRMMLAAQLRHIDYLDEEIARLDEEVKRRMLPFEEDLELIDTIPGVGRRTAEQILAEIGTDMAQFPSAAHLCSWAGLAPGNNESAGKRKSGKTRKGNQKLRAALVEAACAAARTKNTYLSTQYHRIAARRGKNRAAVAVAHSILTIVYHMLQRRHPYIELGPTYYEERRKDAVIKQAIRKLQSLGMEVSVKPVA

SEQ ID NO: 157741 - protein, 382 aa, unidentified
MPAYADPTPKPISADTIFLAFELSGTSWLVALHAPDADKVERHRLPAGVAAEVLGLIARTKARVTRRLGTTPRVACCYEAGRDGFWLHRVLEAEGIASHVMDPTSLQVDRRARRAKTDRLDAQALLRALMAWLRGERQVCSMVRPPSPEHEDERRLSRERGTLLKERLRLSNRIKGLCAAQGIYDYEPLGAARRERLARLVTGDGRALPGRLAAEIGRQLDCLELVLRHLAEVEAVRDARAAQAREEGGSKLAALLRLKGIGPELATVLELEVFHRHFATRRDLAAYTGLAPSPHASGGTSREQGISKAGNRRARKALIELAWLWLRHQPESALARWYRDRVGTATGRVKRIAIVALARKLLVAIWRYVETGLVPAEAAVRT

SEQ ID NO: 157742 - protein, 335 aa, unidentified
MQIKHFIGIDVSKDTLDLSVVLNGKVLTHYCIGNSSKEIKSTVNKIMNSLGGSFEDSIFCMEHTGIYNRPIVKWLHNNQGKMWLESGVHIRKSLGLVRGKNDKIDSSRIAMFAYTNQHKIKLWNLPRQVIEKIAALLSQRARLVKVRKQLTTANKEQKKFLEKDVMHSLNIYTDRTVSVIDKQIEAIESEISALIKEDEKLDRMYKIITSINGIGFVTASYILVTTNEFININDPKKFACFSGVVPFGHTSGTSIRGKNRVSHIANKTIKTLLHLSALSTLNTPGEIQDYYKRKIAEGKNKMSIINAIRNKLILRIFACIKQNREYEKNYCYKFA

SEQ ID NO: 157743 - protein, 475 aa, unidentified
MNLKGTKKKNQVITANIFEQQELLKKAEVIREKLTASTWHELETNGKFGKNEKLSFVSDDMLILGCDVGSDTHYVRAIDTRGRELSKSAFPFSNTLEGFQGLIDWATKLAASNDKEQIILGLEPTGHYWFCLATWLIGNGISVVQVNPYAVKQTKEVEDNSQLKDDRKDPKLIANLVKDGNFGMPYLPEKLYADIRRLSMLRDQINEDRIRDLNRLHREMKIYFPEYKDAFGKIDGAFCLEVLKVAPFPEDLVTLGAEGIRRIWHEAKLRGRGYVNATAIFENAKKSIGIQDGAKSSKLAVKWFVHRMIESNEQLTDIERRLHQMCMEIPYAENILAISGIGENTLCGILAEMGDISRFDDVKEIQKLSGLGLVACSSGKHKGETKISHRGRKRLRYWLFQAAKSAVAHADEFKELHTYYTTRKDNPLKKMQSLIVIACKILRVIFAILTKGTTYDPKKMLRDIVRPNEQSVQVA

SEQ ID NO: 157744 - protein, 346 aa, unidentified
MKKIFIGIDFSKEKFDATVIKAVGVEECAERKHEVFDNKVSGFRRLLRWVKSVADEQDTGLWLFCGENTGGYSKALCNYLYGSGYDMWLENALSIKRSSALQRNKSDKADSNIIAEYAMRNYDQMRLYKPLGKNLERLREVFLYRHNLVKLKASMTMRKGEKKLTQEKSDISRFMAMSSKHLISEFNKKIAECDMRIEKIISEDEELRRNFEIITSVPGVGMQNAVCLMVYTDNFNRFDYNSRKIACYYGVAPFGRQSGTSVNTPPHVSPFANKLIKSLLSQAALSSVRSCPHLAMYYHRLVEAGKKSPVALNNLKNKMLHIITAMVRKGEKYDPDHDYYAAIKAA

SEQ ID NO: 157745 - protein, 386 aa, unidentified
MAQPSSVSQRAINYDHTLVLAIELSNKSWVLAAQVPGLPQTKAQRTIEPNKNALLAAIDGYRARAAAVGYVADRVIVTYEAGWSGFWLARWLVAQGIEVHVVQPSSVPVDRRLRRAKSDGIDAELLLRTLLAWLRGEPRVCSMVPIPDEADEDARRSVRERTELLSDRVGLTNQIGAVLATLGVNDYNPLLQSRRRRLAELRTGLDEPIPPNALAKIERLLARLELVLAQIAELERGRNEVAAAEAPDRAGKMIQQLTSLRGIGVQSATVLVREGFVRHFSNGKALGSYAGLTSTPYSSGGTDREQGIGKAGNRRLRTVMVELAWLWQRYQPGAAQVTWFRDRVGSTGRRIRKVMIVALARKLLIALWRFVIDGVMPEGAMMKPSI

SEQ ID NO: 157746 - protein, 342 aa, unidentified
MTEVTTIGLDLAKNVFQAHGAGSSGEVVFRRKLRREQVMSFFASQSRCLVAMEACASSHFWARAISELGHNVRLIPPAYVKPFVKRQKNDMADAEAICEAAQRPTMRFVAVKSEAKQASAVIFRTRDLLVGQRTQIINALRGHMGEFGFIAPQGAANLDRLVVEIEDPSASVPEAARTCLLRLVEMLRGLQAQIEALDAEIAARAKRDEASRRLMTIPGVGPLIATALEALAPPPETFRSGRDFAAWIGLTPVQKSTGGKQRMGRTSRMGERTLRRLLIIACSGVVRWAKRKGGTPNVWLSGMLARKPAMLVIVALANKTARIAWAVMTRGEIYRAPIAAVA

SEQ ID NO: 157747 - protein, 346 aa, unidentified
MEQITRIGMDTSKNVFQLHGVDATEKPVLRKKLTRREMTRFFEKLPPTVVAIEACGSSHHWARLLGSFGHEVKLIAPQLAKPYVKRGKNDAADAEALCEAMSRPTMRFVPAKSAEQQAALMLVGMRTRLIQKRTQLANAIRGFAAEFGVTAATGMCRIDPLLDRIAVDETVPKLARDLFALHGQEYAQLKREIEQVDDRLMEWHRGDECSQRLARIPGVGPIGASLLMMKTPDPRMFKSGRDFAAWIGLTPKDHSTAGKVRPGVITRAGDELLRSTLVVGATAVVQHVRRAGGKNASPWLLRLLERKKPKLVAVAFANKVARIAWKLMVSGEHYHTTDLPSPAVAA

SEQ ID NO: 157748 - protein, 343 aa, unidentified
MNIVRIGLDLAKYVFHLHGVDERGKVVLRKTLRRPGVAPFFANLPRCVVGMEASNGAHYWAKTLSEFGHDVRLISPQFVTPYVKSSKNDRNDAEAICEAVGRPNMRFVSVKSAEQLAIQAVHRIRIRLVASRVRLVNQIRGLLGEHGVVVAQAIGNLRRALPPIIDDEANGLNSIVRALIGELREELSNLDGRITIYDRKIINLYRMSEACQRLGEVEGIGPITATALVAAAGDGKCFKNGRQFAAWIGLVPKQRSSGGRSRLLGISKRGDRYLRTLLIHGARAALGRTRGKQDPRSLWLLKMRERRHANVVAVALANKNARIAWGLLASGMNYDQHLTVSSA

SEQ ID NO: 157749 - protein, 421 aa, unidentified
MQVLYQRCAAVDVGKDVIAVAVRLPGDGPDGRQTIKRTFKTFYGVLREAARWLDSLGVTHVAMEATGIYSMPVYHALIEHGSFEQVLVCNAGHVKNVPGRKTDLADAEWLVHLLECGLLRGSFIPPADIKAARDVIRYRTRVVQSRTSELQRLGNVLQDAGIKIDSVASSIATKSGIAMIEALIDGERRPAVLADLALRRMRSKIGDLELALEGRFGDHHALMCRLHLDHIGHLDEMIGKLDQQIEAMMAPFRAERDLLTTIPGIGPLAAAAVISEIGAGPAGSFPAAAHLVSWAGLCPGNHESAGKRHSGKRRHGNPHLQAILVEAAWAAVRHQGYLKSLYHRHVMKWGGYRSPIAKKKAIIVVAHAMLVIIWHVLAGGAPYDELGTDYFTRRLDPEKETRRLIGKLEALGHQVTLRPPP

SEQ ID NO: 157750 - protein, 319 aa, unidentified
MKRVKHITVAAPVAGIDVGKRWLDVWSLTSGEHQRFERTSCGLFVLVSWLRDQGIIRVGLEATGGYERIVCEALHDADFEIVVHQPAQVRYFAKSQGIRAKSDKMDARIIAEATASRHNATLYRPSDSPTLTGLMTLYQHIATLLAKAKTFAEHVELDAVEVMHQAVMADLEGRKAEVLRSVLVVIRKNPSRQARFDLLKSLPGIGPVVAAGLLAYMPELGSLAHGQPAALLGVAPFDSDSGEHRGKRFIVGGRRRPRDLMYLSALAAKRMDTPFKIFYDRLLSAGKPAKLAIVAVMRKLIETANLVLKRQTPWVKQIG

SEQ ID NO: 157751 - protein, 416 aa, unidentified
MNAVGIDVSSRKSTVAVLRPLGEVVCLPFDVTHDIAVLASLAEKLKAIDGETRVVMEHTGRYYEAVAKALHEAGFFVCAVNPLLIKEYGANSLRRVKTDKADAIKIARYALDNWADLRDFTPMDAIRYDLKTLNRQFQLASKQRTASANNLIALLEQSFPGIRKCFDSPVRSDGTQKWVDFAHSFWHVDCVRKQPFPAFCERYRKWCKRHAYLFKQSNAEEVYALAKRAVVLTPKSKAVKVLVQEAANQLISISRSVEVYRAEMDRLAAMLPEYPVVMAMYGVGKSYGPQLMAEIGDVRRFERKQALVAFAGIDPMPNQSGDKNVRSNKSSKRGSPYLRKTLFNVIRTYLQCAPQDEPVFQFLNRKRAEGKPFYVYMLAAANKFLRRYYAKLRDYFASLDTLQPVAPIPTILKAAL

SEQ ID NO: 157752 - protein, 336 aa, unidentified
MFQLGIDVSKNTLDLCLLREGVKGRVKTRRLKNDVNAASSVITWLGKQQCAPADVHIIMEATGVYHEPLAYGLYKAGAKVSLANPHRSREFARGMDILTKNDQIDAYMLACYGALKEPEPWVPPPESIRYLSALLRRRDALVTDRSREKNRLEKCRATDIPPVIAESIENVLRNLSAEIERLDELLLTHLNQHPELKKDFDLLTSIKSVGFQLGLNMLVILRGHRFDTAGQLAAFLGVVPVEKSSGTSIRGKPKLSKNGPPEIRAKLYLASMCGLRFNPVMKEMYERLCLSGKAKMCAIGALMRKLVHLCYGVLKTQKPFDAEHLSSDARSACKAA

SEQ ID NO: 157753 - protein, 838 aa, unidentified
MNNYSKYVGLDVHKETIVAAIAKAGRGDAMQYGEIDSTAEAIQKLAKKMSANGERVLFCYEAGPCGYGIYWQLKEMGQECMVVAPSLIPRKAGDRIKTDSRDALTLARLSRAGELTAVWVPDKEQEAVRDLTRAREDMKVMEHHARQQLGAFLLRHGKRYPGKSAWTQAHFRWMEALRFEHSCQQIVFQEYVDMVKHAQGRLEALEQQMLAVLETWSMREVAIALMALRGVKLIAAMTILAELGDLSRFESAPQLMAYLGLVPSEHSTGQKKKRGGITKSGNGHVRRVLVEAGWSYRFPARKTAALQRYAEKTSDEVQEIAWKAQKRLCMRYRHLLLKGKLKVEVCTAVARELTGFIWAIACEVIFGRLWKELGIGSVLEELLKERKYQFPVERAVFMTTLHRLSVSGSDRAAEKWAESAMIEGAQKIELHHLYRAMAWLGEPLSAEKQEGCTPFAPRCVKDLIEEKIYERRRDLFGDLSLVFFDTTSIYFEGDGGQDIGAHGHSKDHRPDLKQMVVGIIIDGQGRPVCSEMWPGNTTDVKSLLPVLGRLRRRFAIGRVCIVADRGMISRETVRELESTPSVDYILGVRIRNQKEIGVEVLSRAGRYEEVTPKGKGSKSPSPLKVKEVLHDGRRYIVCLNEDQATKDRADREAIVAALSDKLKQGDKALVGNKGFRKYLKYGGSGFAIDEAKVKQEVKYDGKWVLTTNTALSARETALHYKQLWMVEQVFRTMKTVLTTRPIYHKCDETIRGHVFCSFLSLLLMKELAERMEGRGWKAEWADVVEDLERVKEIRIETDGKTVYLRSELKGEAGKAFQSVGVAVPPSVRILKKDDSSNA

SEQ ID NO: 157754 - protein, 299 aa, unidentified
MHYIGMDCHISTLDFAVVNEAGRLVKANSVATSVNGFMEFVKTVPPPRAIYMEEGTLAAWALETCVRFREKLVITDAKKNHWIGSSGQKDDPLDALKLAQLARGGYINEIHHPVGQRRRFRELMIAYHDTVRSTTRIKNKIKAKFRQNGIQCTGVTVYSETYREEWKGKLPQEATLLLILEGLWRQLEQSEQTEKELLATARAQAKYYPEIKHFEALPGIGFISAATISAILETPYRFADKRKVWMYAGLGIMTRSSGGKLYSEKLSTDYNRLLKYTLNKPQKPLFRLRIILTGVNIWI

SEQ ID NO: 157755 - protein, 345 aa, unidentified
MKVTTVGIDLAKNVFQVHGVNEHGKAVLRKQLKRHQVIEFFTNMPPCLIGMEACGSAHHWARRLQALGHTVKLMAPQFVKPYVKTNKNDVADAEAICEAVARPNMRFVPIKNVEQQAMLAMHRARQGFVKARTAQANQIRGLLAEFGLIIPQGIAHIAKRVPELIEDATNELPGSFRLLVQRLMEQLKELDRQAGELEAQIAAWHRDNKLSRKLAAVPGIGPITASALVATVGDAKNFANGRQLAAWLGLVPRQNSSGGKNVLLGISKRGDTYLRTLLIHGARSVLFAAQRKKEVIDGWLGKLIERRNANVAAVALANKNARVVWALLAHDREFRVDYKPAKAAL

SEQ ID NO: 157756 - protein, 331 aa, unidentified
MDHCAIDLGGRKSQVCVRSPDGQLLFEGPYDTRSLPEFLRLLPRSRVIVETAAEAFRVADAAKEAGHEVRVVPATLVRSLGVGARKTKTDRRDARALSEVSCRIDLPSVHIPSARSREWKAICGMHDALITARTKLINNLRGWLRGQGLRIGKGKAETFAERMMKFKPLPDYVTSQAEALAALTKKIRESDKRIESLAKDELCQRLMTVPGIGPSSAVRFMAAIDEISRFESAHKVESYLGLVPGESSSSERQQRLSITKAGSSSVRWVLGQAAWSLQVRCQNRAARPLQLWAAEIARRRGPRIATVALARKLAGILYALWRDGTKYEQRQ

SEQ ID NO: 157757 - protein, 364 aa, unidentified
MREHITHVAFDMHQASITAAWLLPSANIPELRTIPHEPKPFRRLVKEILTRGPARACYEAGPLGYAPQRQLEAWGLPCEVIAPSLIPRRPGQRIKTDKRDATKLVGLYRAGELTAIRIPTPAEEDVRELVRCREACGTDALRAQQRLRTFLLRRGLRSPDGPAGSQAWWAWVQALRLPDPAAQRTLDEYCLAATTLRARWKALDPEVAALAMREPWAPAVARLRCLRGIDTLTAVTVLLEVFDFRRFNTPRPFMSFVGLVPREHSSGGKVVRGGITKTGNAHLRRVLVEAAWHYQHRPRPNKAVQARRAGQPPAVVALAEQAEARLHRRFARLLARGKRPVIAATAVARELCGFLWATMVAVPA

SEQ ID NO: 157758 - protein, 478 aa, unidentified
MAPKEKLRPDLVPVPMLLHESLYVGIDIGKAKHVAGFVSITLLERHQRFEACPALVIENSREGFRTLIDRMHSYVPLEQVFALVEHTGHYHRALVEYLQEFDISVYVMPVQKRPAGMLKTDKRDALGLANHLFNQLEKGIQLSDKTHLVRRMLPPTDAARQLKGWMRHRYELIHESTRRKNKLISICDELFPEMTQVLKDPTRPSALAIREKFPTPHAIATTTLSSLAELRIKHSYPSNAQLAQLQQLAAQSIGTKDLVRQRGLVLEQGQLIRELRLLQEHIQQLDTEISQIVAPSREGQILTSIPGIGLVQAAAIMAAVGNILNFERACDLKSYFGWAPVSEFSGKTLDRVQLTPGGTRPMKQMLFLCVGHAIQMDCEWARLYERLVPKKCSYDERRRAYRGKLKVLGRIAGQMIEMIYAFLKQDAELLSRVPPGQTPPPPTLYDPEIHKRHRNGEYRPMKNVPRQRKVIRLPERHP

SEQ ID NO: 157759 - protein, 311 aa, unidentified
MYVGIDVAKDTMFVAILPTGETWEERITEDGLKRLVAKLRPITPQLVVMEATGGYEAPIFEVLWKHNIPVAVVNPRLVRSFAKALGRLAKTDKIDATVIARFGEAVKPKPKVRNDQQEKILGDLVARRRQILRMIVAEGNRKKRAVGEVQKLIDKHIKWLNKALEEIEKKLEAYISKTVEWRERNEILQSVPGIGKIVAYSLMAELPELGKLNRKQIAALVGVAPLNRDSGNMKGKRSCWGGRASIRTALYMATVVAMRFNKTIKAFYERLCQNGKHKKVAITACIRKLLCVLNAMMKNHVRWGEFKPAET

SEQ ID NO: 157760 - protein, 365 aa, unidentified
MQKISTMRANGKNIFEGQLTIGLDLGDRSSAYCVLNAAGEIVLEHELATTPEAMKQVFGSMPRCRIAMETGTHSPWVSRLLTALGHEVIVGHAQKVRLITKSRRKDDRLDARTLARLARIDPELLSPVKHRSAQAQLHLAEIRARAGLVSARTALVNAARGLVKSYGERLRKCGTEQFRRETTSGLSAGLREALEPLLREVESLNEGIQEYDRRIAKMAKEKYPETALLKQVKGVGDLIATTYVLTVEDPQRFRKSRDAGCFVGLQPGRRNSGESEPQMRISKEGDEYLRTLLVQGAHYILGPFGEDSDLRRWGQKLSARGGKNAKKRAVVAVARKLAVLLHRLWVSGEVYEPLRNSQKAMSAAA

SEQ ID NO: 157761 - protein, 216 aa, unidentified
MKQSSTTLYVGLDVHKDSIAVAYAPELRGAEVISLGTIGTRPCDIDKLIRTLKSKAGRLLFAYEAGPCGYGLYRYLTRKQLTCLVVAPSLIPKRPGDRVKTDRRDAAMLARLLRAGDLNPIYVPQVQDEAVREQVRDWRLYPVVQALQALRGVQFIVALTVVAELGDLTRFDNPRQLMGYRQLAARGKHANQVVVAIARELAAFMWAIARTVPPVP

SEQ ID NO: 157762 - protein, 382 aa, unidentified
MQTIDTINPTILLAIELSASTWLVAARVPGLEKPHLHRIDGGDTAALLALISSLQARAARGLDATIGVVCCFEAGRDGFWLHRLLTAHGVVCHVLEPTSILVNRRARRAKTDRLDAEGMLRVLAAYLRGDHQACSMVRVPTPEEEDAKRTHREREKLVQERQRIENRIEALLFTQGIRKRPSLRSWERDLAVLRTGDGREIPRHLRAELDRLRRRLVMTLELIREVEAERDQAAKTKPQDQAIHKIAALCRIRGIGENFAAVLTREVFYRSFDNRRQIASYVGITPMPYQSGGMDRDRRISRAGNPRARTTMIQLAWLWLRYQPDSELAEWFRERVGTLAGRTRRIAIVAMARKLLIALWRYVETGVIPTGAEIRAETTVAA

SEQ ID NO: 157763 - protein, 319 aa, unidentified
MNTTTAANINRSERNVGIDIGKSMLDMCIYEVDIYTQYPNTPEGIRQLLKQLSRYKVTRIVVEATGGYERALVETCADKELPLIIVQPMQVRQFAKAQGIIAKTDKLDSRLIAQFGAVMKPEPKPLNSKKIRYIRDLLSRKRQLNDMRTQELNRQHKVPAILAATHKRMIKVLDKEIEWVNKLLAKAVNEVTEWQRTYEIVSSAPGIGDGVAFTLLGELPELGNLSARKIAALCGLAPFNRDSGAMKGRRRIQGGRAPIRTVLYMAMLSAIQCNPVIKRFYQKLVAQGKHKKVALTACMRKMMTMLNAMVRDNCEWQTN

SEQ ID NO: 157764 - protein, 474 aa, unidentified
MKEHKKAKAKTKSELSKTIREQEPNAAGIDLGAEEIWVAVPADRDQNPVRRFEAFTEGLLAIVQWLVGCGVRSVAMEATGVYWIPLYQLLEDAGLKVCLVNARHVKNVPGRKSDVRDCQWLQYLHSVGLLLGSFRPAQTICATRSIYRYRQNLLSLAGQHLQHMQAALEQMNIKLHHVIDDLSGVTGQAIIAAILSGQRDPVQLAKLRDRRIQASEQKIVKSLEGDWRKEHLFVLAKAWAQYQEVQKQIQDCDRELLEYTRELEACTTVGKPVKVVRLEAQLLGAEPVSNPAPKKKARRKTSKNQPEGPWQGELERFFGVDLTVIPGISVLTTLTLMTELGNDLSAFKTEHHFASWLCLCPDNETSASKVLRRGTRRSQNRVRQALRMAASSPHHDKSYLGDKYRRLRARLGAPKAITAMAHQLARIIWILITRQVPFDLNLFAEQQRLNDQRRLKRLAASARQMGYQLTPVAA

SEQ ID NO: 157765 - protein, 362 aa, unidentified
MDVHSTNYTLASFMFGNEQPFAVTQVDPDYKHILNYLKQVQKNYGGPCEFLCGYEAGCLGFTLYEQLKAHNVPCVILAPSKMPKVKNEIKTDKRDAMKIAKCLAYNDYSAVYVPTKEDYQVKEYIRMRDAHKTALKKVKQQILAFCLRNGFQFTAGKNYWTGKHMAWLRALQMSDLMREALDEYLATYQASLDKIERFDKRIEELAADTRYAEKVRMLSCFIGIRTHTALSLIVETGDFRRFAKADQYASFLGLVPGEHSSACDKNYLGITKAGNSHLRRLLIESAQCLARGRVGYKSKVLKAKQYGNPAQVIAYADKANERLRRRFYHLTLKLKKKRNIAVAAVARELSCFIWGMMTERIS

SEQ ID NO: 157766 - protein, 338 aa, unidentified
MKELYYIGLDVHKKSISYTIKQADGRIVGQGEVEARRAALSAWARAIGKPWVGALEATLFTGWIYDHLRPFAEELQVAHPAMLKAIACGKKKNDRLDAEKICDLLRCNLLPRCYMAPAQMRELRRVLRYRHLLLSEAVRMKNKISGLLLEVGEPYVKQKLHRRRYFQELLGNLRDTPASVLEMLAISRGSLELFDGLQRKLLRGLRRHPLLAARVERLRTIPGVGEVLALSWALETGSPERFSSRRRAISYCGLCSAQRESAGKNQRGPISKQRNKHLQHVLIEAAKLAPRWNPPLRRLHERELQRGSRNRASLAVARKLVAYLLAVDKSGRAFVPQA

SEQ ID NO: 157767 - protein, 421 aa, unidentified
MRAFGLDVHRDFCEVAIAEDDEVRSAGRIPTRVAALELFAQSLVASDVVGLEATAGTDRIVAVLQAHGIRVVVANTRKLRVITQAKAKTDRLDARTLARLLRSGLLDQVWTPDERTRTLRRLTNRRERLVRARTRAKNEAHGVLARNLCERPPVTDAFGTGGRRWLAGLELPFDERLTLDGCLRQIDFLDLEVATLDGEIAKQALAWPEVLRLMSVPGVNVQTAATFMASVGDIGRFSSPRKLVSYLGLDPRVRQSGSSAARHGRISKAGASEARHMLGEAAWKVMLTPGPLRAFFERVRARRGPQIAATATARKLVVLFWHLLTREQDYAFARPAMTRNKIRRLELLAGAPSQKGRKGIAGNKSKQLFESERELSRQAEIAYRRLVSDWHASGPPKAGAGATPGRASSWPSRGKATRQTP

SEQ ID NO: 157768 - protein, 406 aa, unidentified
MNAVGIDVSKGKSMVAALRPMGEVALLPQEFLHTGVGLEQMAYAILALGEDTRVVMEATGRYHEPVAAALHEYGIYVCVLNPLYIKQSGGGSIRKVKTDKADAMKIAKYGLDNWVDLREYTPMDTVRQQLKLCSRQYNLYMKTVVSLQNNLISLTDKTFPGVNELFSSPERADGHQKWVDFVMTFWHCDCICRVSENAFTERYQKWCKRKGYHFSTEKALDIYAGSCGHFTTLPKNDNTKLLITTAAQQLLAGKMTLAALRAEMTRLAMQLPEYETVRTMYGVGETTAAQLMAEIGDVRRFPRRSSIVGFAGVDPGVDESGKHSAKSVPTTKRGSPHLRKTLYQIVCTYLRKAPTDEPVYQFLDKKRNEGKPYFVYMTAAQNKFLRIYYARVKECLEAFDAQQGSV

SEQ ID NO: 157769 - protein, 307 aa, unidentified
MSYIGIDVSKDTLEVHVRPEGTQWNTTNDKHGLITLVKTLKKCEVELIVMEATGGLEQEAADKLAKAGFGVAIVNPRQVKDFAKSTGKLAKSDKLDAGVIAHYAEAIKPEHRHVVDKVGQALKELVRRRRQVVDMIAAEKNRSVTAKGKALESIRSHIHWLQKELEEIDSDLEGEIKDQPEWKEKDEILRSVPGVGPVTSIVLLSSVTELGSVNRKEIAALAGLAPFNQDSGTMHGKRAVWGGRADVRSIMYMATLSAIRCNPKIKEFYDRLVKAGKAFKLAMTACSRKLLTILNKMIHDRTVWHTT

SEQ ID NO: 157770 - protein, 387 aa, unidentified
MNVKARRTKKQVNVENWAINLLPKEELSKKIEVVEKELRSYTWRDLETNGKFAKNDKLSFITDDMLIVGCDIGSENHYIRAIDVRGRELSRGAFEFSNTSEGFENAKAWVLALAAKHDKKQIVLGLEPTGHYWFALAAWMISNGISVVQVNPYAVKQSKEIENNSQLKDDRKDPKLIANLVKDGNYGMPYLPEKVYADMRRLSMFRDQLTEDRIRNINRLHRELKIYFPEYMDAFGKIDGAFTLEILKVSAIPSDITALGAEGMKNIWHNAKLRGRGYSRANEIVSYAEKSVGLTDGTDAGREAVKWYAEQILRLDEQLAEIESALHEKCREIPYAENILAINGVGENILAGILAEMGDISRFDDVKEIQKLSGMGLVACSSGKHKG

SEQ ID NO: 157771 - protein, 340 aa, unidentified
MESRESFWVGFDVGKNSFSAALDCHGKNIRAKITSLPCRDFKRTPEGVEQFFLWAKKTIPGHDIRIVMETTGCYSQHLTDWINQLHPEISVTIENARNIHAFIQSLNLPHKTDKLDAQAIARFGSERHPKPTNRPSKTILTIRELSRERTALIKARVNLENRRNTLTSPVVRKINAQTLATLTTQIEKIDREIKACVVQDEELLSEVHIMTTMPGVSFISAYSILAEIGSLKQYSAKELSALSGLAPRIIESGSSVHSSYLSRRSSGRLRQILYLDSVPGVPKIPVLQEFHQRLIGKGKKKMTARCACMRKMLLILRSMVVHNTPFNDKFPNNQRKELDF

SEQ ID NO: 157772 - protein, 379 aa, unidentified
MRHVCGLDVHKDSVFVCILNEKGVVFQEKFGVLTPELERMVGVIMEHGVTEVGMESTSVYWMPVWRVIDPYVEQKLVNPYFIRQLPGKKSDVKDAEWIATCILKGLVRGSYVPEERIQRLRQYDRRIFDLNDDIVHKLTRLDAALQRCNIRLSNYVSTTDCKSYGDVVDAIARGETSPDALLRCVHGRIVNRHGADVIRSALTGVITPVDVDVIRQLREEIELARRHRDECQRRMDGLCSEWYPEQYANLQTIPGVKARSATAIIAELGTDMSSFEDAAHLVSWAGLRPRNDESAGRIKARGITHGNKYLRKTLIECAWGASRTRGCFYSRFSHHQTVVRRKSRMKVQVAIARKMLSAIWFILHDGVAYRDFEGDANAA

SEQ ID NO: 157773 - protein, 337 aa, unidentified
MALYCGIDLHANNSVLAVMDEQDKALYEKRLPNDLSQIIGALRPYQQELAGCVVESTYNWYWLVDGLMDAGFPVHLAHTGAVPQYAGIKYTNDESDARHLAHLLRLGILPEGHIQPKEQRALRDLLRRRLLLVRQKTLHHLSLQSLIARYTGQRLSANEIKQLDAKAITELLEEPIVLGGQITCLARRWLEEAIDVLEHEIQKQLKPRLEYQLLTTVPGIGRALGSTIALETGDIGRFPGPGHYASYARCVKSEKISNNKMKGRGNAKNGNKYLAWAFMEAAHYAAIWSPPIKRYYQRKQARSHILVAKKAVANKLARACYHMLSRQEAFDVNRAFG

SEQ ID NO: 157774 - protein, 400 aa, unidentified
MQFVGWDWASTSHAVTILDPVGAVIDRWTLGHTEHDLDTILARLAERGDPADLPVAIERSDGIVVARLLAAGHPVVPIDPGAFHAARPRWGAAGAKSDPGDSYKLADYLRTDGHRLRRLEPVDGVTRELQALVRLRDDHVAAKTAASNQLGALLDAHWPGAKQLFFRLASKITLAFLAEYPTPQAAAQLDQAQLAAFCRRHAYRGGRHPHELLERLRSAPHPPAGLDSGVLCQVIGAQVQLLRTLLATIADLDQAIVTRLGKHPKAHLLARLPRVGQLSHAQLLAELGPILDRTSSAEHAAAEAGATPVTQASGKTSSVHFRLAANRRARQALHIFADNSRHSSPWAAKLYADARARGKRHPQAVRVLGRAWLRVIWACWHTNTPYDPAKHRAEQRLAGA

SEQ ID NO: 157775 - protein, 407 aa, unidentified
MLFVGVDWAESHHDVCVVDDEGRVLGRRRINDSLAGVGELHSLLGQHVGDGGDPHSIVVGIEKDRGLIVTALLAADYQVFAINPMAAARYRERHAVSGAKSDPGDAKVLADLVRTDRHNHRQVAGDSSLAEATKVLARAHQNALWSRQRHVNTLRSALKDYYPGALEAFGTDLAHHDALSVLAAAPTPALGRTLSRSKLVSALRRGGRQRRLDERAEEIQTKLRLEQLRQPSIVEHAYGLTTKATVTVIVQFNVAIAELEAGLAEHFEQHPDAKIIHSLPGLGTVLGARVLGEFGDDPNRYADVKSRRNYAGTSPITRSSGKSKVVLARHARNKRLADALDQWAICSMNTSPGARHCYDELRSRDKTHRQAMRRLANRWVGILHTCLERGCLYDEAIAWPTREKIAA

SEQ ID NO: 157776 - protein, 332 aa, unidentified
MDNFYFIGVDVSKKKLDFCVLFEGKVLREEQVSNHQQAVARLIGELKNDLEMDNEQFLICAEHTGQYTFPLVCACKSVECKLWLENPSQIKYSSGMQRGKNDKVDAKRIAIYASRFGDKVKYYDRPTEEIERLKQLERERALYVTDLAKYKGQMYDQKDFMPAALYRKKTKRMKGLIQELQAAIDAITAEMDKIIGSTEVLARQMELLMSIDGVGKVVALNVIIETEAFSRFDNPRKFCCHAGVAPFSYTSGSSQHSKNKVSHRANKNIKKLLHMAAVSVTHRKEGELKAYYMRKVEEGKNKMSVINALRAKIVARMFAVIKRNEVYTPIYS

SEQ ID NO: 157777 - protein, 346 aa, unidentified
MLYAGLDLSRKRLDFHLLDAEGATVEVGAAPPDADGLRGLTQRLDRHGAPIRAAIESMNGARFVHDRLERAGWQVEIADAQKVKGLAPLACKTDRIDAWVLAELSRRELVPAIWLPDPAVRGERERARWRLHLVRHRASLKQRVHAVLLAHGKPCPVSDLFGVRGRQLLARLGLPEPWQGTVEASLRLIDELDRELNDCEAELRRLGAEHRYVPLLCTVPGIGWVLAYTIAAEIGDIARFPSPRKLAGYTGLCPRVYQSGERDLRGPLAKQGPRYLRWALVEAATHACTHPLYRDRYQRTKTRVGKQRGAKVAQIDLARRLAEAIWHMLTRNQPFAPAGATDPLAA

SEQ ID NO: 157778 - protein, 365 aa, unidentified
MWEAPVKIQRTSVGLDVHARSVVACALDGDTGEVFQRRMTPDHGEIVGWLNDLPGPVAASYEAGPTGFGLARALMAAGIACEVAAPSKLIRPAGDRVKTDARDAAHLARLLHLGQITAVTVPTAAQEAARDLVRARDDCRGDLMTARHRVSKLLLRQGIVYSGGKAWTGKHELWLRAQRFDNPALQLSYEAAFDAMLACVDRRNRLDKAITTMAADSDFTPVVHRLGCIRGVATLTAFGLAVEIGDWHRLTGRSIGAYIGLVPSEYSSGESRSQGGVTKTGNQHVRRLLVEAAWHHRSQYRPGAELRRRWELASPAVRARGQSANRRLHTRWVGFDARKKLPVIANVAIARELAGWCWSLAVMPD

SEQ ID NO: 157779 - protein, 443 aa, unidentified
MGLAPQTTVMTERTDTMKTYILRDPKTVEPQTPHHHARRDDPALTATVDVICGPARPVPPVLGCRVLFVGLDVHNDTIAVSLAPSDSTEVRRYGIIGGQHDDVLKLIKKLSAAHPGALLKFCYEAGPRGYPLCRFLRSHGAECLIVAPSKVPRQPGDRVKTDRRDADQLARLLRAGELTGIYVPDPQDEAVRDLIRARYQVQKQQHRARQQLKMFLLRLNIRYAGTKPWTQKHLNFLATVKLPFAEQQFVFQEMVNVITEAGQRLERYEKQIAAVVESWRWQPVVAALMSLRGVALLTGATLVAELGDLHRFASAPQLMSYLGLCPGEHTSGTTRQQGGITKLGNGIARKAMIEAAWNNSRAPRLSRTVLARQEGLPKAVIEAAWAAQTRLHQRYQHLTGVGRKKSQVAAAALGRELAGFVWAIGRMVQPHPVKPELPKGKTA

SEQ ID NO: 157780 - protein, 464 aa, unidentified
MTAHKILWRNRKERKEWARRLQSEDPGLEVVHPHAAGIDVGNSAHYVAVRPDRDPEPVRRFDCFTGDLHRLADWLQSCGVKTVAMQSTGVYWIPLYEILEERGFEVYLVNARHTKNLPGRKSDVQESQWLLKLHTYGLLSNSFHPPAEIRVLRTYWRQRGEHVAGGATCILRMQKALTQMNVQLANVISDISGLTGQTIIRTIVAGERDPLTLAALSDPRVHASQEEIAKSLEGNWRPELLFVLQQEVDMYDIYQKRITECDQRLQKHLASLTHPLQVQPPTQKPTTKKPAAKNAPRFDLSSELQRVTGVDLTRIDGIDVMIAQTLLSEVGLDMSRWKTESHFASWLGLCPDNRISGDKVLNRGTRRVVNRAATALRQAANTLMRSRSYLGAQYRRLRTKLGAPKAITAMAHRLARLVYRMLKYGQTYVDKGTDYYEERSRQQQIQLLRKRAAKLGLQVAEIHA

SEQ ID NO: 157781 - protein, 351 aa, unidentified
MDTTQYITHYIGFDIHKKWIFYCVKTKGGEIVEEGKIEATRGALRLWAQQRQEPWMGGLEATIFAGWVYDELKPYAAELQVAHPAMLKAISASKKKNDRIDAAKIADMLRCDLLPQCYMAPSWIRELRRMLRYRNLVVSQAVRLKNRIAGLLMEEGVGYDAERLHRKGYFAELLDSLQTPDSVLQLLRLSRASLEMFQSVERRLVRELENNPRLQARVELLCSIRSVGVIVALTWALEVAEVNRFGSIRQAVSYCGLSSAERQSGGKQYRGPISKQRNRHLQTVLIEAAKLAPRWNPELAALHQRELARGNRNRATLAVARKLVAYLMAVDRSGKPFEVRAATTSVAVAAD

SEQ ID NO: 157782 - protein, 348 aa, unidentified
MVILGIDAHKRTHTVVAIDEAGRELGEKTTVSTTTEAHLELVRWADRFGTPRRWAVEDCRHLSRRLEADLLAAGEELARVPPKMMAHARDAARTYGKSDPIDALAVARASLREPNLPVARLDGPSRELRLLVDHREDLVADRTAHINRLRWHLHELDPSWDPKPRSLVRFKHLDAVAARLEPLDGMVARIALDLVGRIRELTDKANALQREIRHRVRSLAPTLLGLTGVGELTAAKIVAEVADVRRFRSKDAFARHNGTAPLPVWSSNRVRHRLSRTGNRQLNAAIHRIAVTQKRCHDGAKAYLERRMANGNTKREALRAIKRKLSDVVYRALLADAPSMDVAVGEAA

SEQ ID NO: 157783 - protein, 350 aa, unidentified
MRFYHIQPQQHYFCGIDLHTQMMYLCVFDQHGTIVLHKNIRTRPEAFLKAIAPFRDGLVVACECIFCWYWLADLCQREEIPFVLGHALYMKAIHGGKSKNDKLDAEKIALLLRGGMLPQAYAYPKQKRATRDLLRRRSYLVRMRADLLGHVQLTRYQYNLPAFKKRITYKTNREGIAERFSDEVVQANVALDLALIGSFDEQIRPLELYLVRQAKIHDPQAFYLLRSVPGIGKVLALTMLYEIEDIHRFKRVQQFVSYARLVKGQKVSAGKRLGTMGAKMGNRHLKWAFSEATVLFLRESEQAKAYLARLEKKHGKGKALSILSAKLGRAVYFMLLRREPFDIEHFFAQL

SEQ ID NO: 157784 - protein, 350 aa, unidentified
MNTVAATQPLVTGGVDTHLDVHVAAALDHIGGLLGTAQFPAAAGGYRELLAWLRGFGEVGRVGVEGTGSYGAALARHLTGQGVTVIEVSRPNRQVRRRHGKTDVVDAIAAARAVMSGEATATPKTHDGSVEGLRMLKVLQRSANKSRTQALNQLRGLLVTAPAELRAKLQHLARRDLLATCAAFRVAPDDDSLPGLARFALRDLAQRIQSLDERLKQVDTRLRRITTAAAPDLVELHGVGPDTASTLLITAGDNPERLASERSFAALTGCSPIPASSGKTHRHRLNRGGDRQANAALWRIAIVRMASDERSQKYVAKRISEGKSKIEAIRCLKRYIAREVFDALPQTAAA

SEQ ID NO: 157785 - protein, 408 aa, unidentified
MNPLFVGIDVSSKNNVAYLMKPDGSKHSSFSVQNNLGGAKLLSERIVSALGSMQLERVVIGLEATSIYGDSLVYALREDGRLGRFQRKIHVLNPKQVRKFKEAYSDLPKNDWVDAFVIADHLRFGRINREVYMDDYRYKALQTLTRARFDVIQNLTREKQRFANYLFLKCSGMAQDKDIQNTSATTIALMEHFETVDDLANADLEELTAFITETGRGKFADPDATAKAVRAAAKGSYRLPKTVNDTVNQAMAVSIASMRALKGQVKVLDKAIEQQFEIIPNTLTSIPGIGKVYSAGIIAEIGDIHRFDSQASVAKYAGLVWNRNQSGDFEAEHSRMIKSGNRYLRYYLLEAANSVRRCDSEFRRYYDLKFKEVNKYQHKRALALTARKLVRLVFRLLKDNRLYIPPEG

SEQ ID NO: 157786 - protein, 420 aa, unidentified
MSFKIFRKNCCGLDVHKTWIYACIGITDTNGRTTYKQTRFSSFSKGLKELSTWLAKYQCTEVCMESTGKYWIPVFNVLEKEDVSVILSHPKYTKPQKGNKTDRKDAKWICDLFMCDMVKRSFIPPADIRHLRDLVRYRFKLICMITGEKNRAQNCLTVSNLKLDDVFSDVFGKSSRSITEYILKHPGDLFDVTPFVDRRCKTPIEEIQAAVDGAISPEQAVKLRQCLNHIDELEKHLEEIEQEILRLSDKYQAALDLIRTVPGFDKNPMTAIQVLSEIGGDMSVFPSAKHLVSWAGCCPRNDQSNKKIKSTRISRAGSYFKPVLVQVANGLLRSKKHLEITDRYKRIKARRGHKKAIIAICRMLLTAIWHILSDLKPYTAEGFRESRPVNESKVLTTSQALNLLKQRGYIIKDDLAPAMN

SEQ ID NO: 157787 - protein, 355 aa, unidentified
MNDAKYIGLDVHQATISVAVRDSEGKLVMEAILETKAETILQFVRGLRGSLHVTFEEGTCAAWLYALLKPHVTQVLVCDPRKNALLKVGNKNDRIDSRKLAELLRANLLSSVFHEDTGLRAVKELARSYLAMTKDLTRVMVRLKALYRSWAIPCATKQVYAPRHRAEWLAKIREASVHRRAELYYQQLDALRSLQQQVKKELLIEGRKHNATKLLRQIPSIGPIRAVLLLALLQTPHRFRTKRQLWSYCGLALETRTSGEYRMVHGQLQRSKKPVAIRGLNKNHNHDLKNLFKGAALRAAAVEKPFQEFYAALVAKGIKPEMARLTLARKIAAITLIVWKKGARFDAEQLKQQAA

SEQ ID NO: 157788 - protein, 338 aa, unidentified
MTIVEMTRPVTGGVDTHADVHVAAAVDANGGVLGVETFATTPRGYAELADWLAGFGEVVRVGVEGTGAYGAGLARSLRARDLMVIEIDRPNRQARRRHGKSDTVDAIEAARAALSGRASGVAKTADGDVEAIRALLVARRSGRNVRVKYLNQIRHLIFTAPDELRERLRDVHRDRLARTTTDAATYATKLAIVTLARRVLALEADGKRLDRHLEQLVRRSAPSLLAVYGVGIHTAAILLVAAGDNPQRLKSEAAFAHLCGVAPIPASSGKTTRYRLNPGGNRQANHALWRIVFTRMSNDERTRTYVARRLAEGKTIREIMRALKRYIARELYLHLVTR

SEQ ID NO: 157789 - protein, 403 aa, unidentified
MISVGIDVSKGKSTVCIMKPGGEVLSAPFEITHTKSELLDLINIIKSQNEEVRVVMEDTGHYHLPVATLLVDNDIFVCSVNALRMKKYCSQSIRRAKTDKIDSVHIASYGIAYWNELQSIPCSDDIYKELQLLARQYYQSVALLVKAKVNFSNLLDRVMPNIQSIITDNSSNSKLTDFVARYWHFSRILEMGEKRFISDYCKWAKKKGYRMCECNAKEIFALAQNGIPVLPSSQSTKIVITEAVRVIHELESSRDTILGLMQSFAKTLPEYSVVREMPCIGDVLAPRIIAEIGDVRRFKNKHSLIAYAGIDAPPYQSGSFNATERHISKRGNSYLRKTGYEIMQSLIKHKPENDSVYDFIVKKRCEGKCAKEVMIAGLNKFPRVYYGKVTELYDNLEYCNLTA

SEQ ID NO: 157790 - protein, 353 aa, unidentified
MRDYSRAERVIGLDLGDQRSHFQVLKESGEVEEVGQVPTRRREMERWGQQQKAARVVMEAGTHSPWVSRLLEACGHEVVVANPRKVQLITKNVKKRDAVDAELLARLGRVDVELLSPVKHRCAEAQQDLAVIRSRDAVVRTRSQLIHHVRGAVKAVGGRIGSCSAPGFARRAAEQMPAELKPALGPVLEVVAQLTRQIRQYDRVIEQLGKQKYGVTELLRSVAGVGAVTSLAFVLVIDEPARFRRSRVVGSYLGLQTGSRQSGQQDPQLPISKQGDQLLRRLLVNSAQYVLGPFGPDSDLRRWGLRLAERGGKNAKKRAVVAVARKLAVLLHHLWVCGEVYEPFNATQRRVAA

SEQ ID NO: 157791 - protein, 408 aa, unidentified
MNPLYVGIDVSSKSNVIYLMLPDGAKHSCFSVANSQDGSSQMVKRILSAVTSRSLDTVVIGLEATSVYGDNLVYFLREDASLAPFNRKIHVLNPKQVKNFKEAYNDLPKNDYMDSFVIADCLRFGRINKEVYLGDYRYKALQNLTRARFFAVQNLVKEKQRFINVLFKKYSTMTQEKVFSDTFSTTALAVYEEFESAEALAAMDLQELTDFIMEKGKNRFPNPGAVAKAIQKAARSSYRLPKTVNDSINQVLSISITSIKALDAQIKQFNKAIEAQMELLPNVLISIPGIGPVISAGIMAEIGDINRFPGQAQLGKYAGLAWTQNQSGDFEAENTKLIRSGNRFLKYYLCEGALSLVRCDTEYSSFYHSKYKEVNRHQHKRALALTARKFVRLVFRLLKDNRLYRAAE

SEQ ID NO: 157792 - protein, 330 aa, unidentified
MKQYDHVFGVDVSKKTVDITHVINQQFTHRQFTNNDAGMVQLMQWFKELTPEFDRTLFCMESTGLYCFTITHFLASHSIDTWIEHAAQIKNATALARGKNDKVDSQRIALYAIKNLDRLRLWKPINATLEKIRHLASLRERLVDTKKRLSIPIKEFEDVGNLAMAKVLTKTIKSSLAAIDKDLKNIETKIINSINEDDNLKFLYKLVTSVVGIGFVTAVNLIIHTNGFTMLKDTRKLACYCGVAPFEYSSGSSIRGRTKVHYMANKKLKCNLHMASLTAVKLDCDLKAYYERKVEEGKSKLSVLNAVKNKLLARIIAVVNKQQEYVKKTA

SEQ ID NO: 157793 - protein, 376 aa, unidentified
MNKTEIYIGLDVHKETITAAVAEGGRAGEVRQAGTITNDLHALEKLLRRIRGDRERTLHVCYEAGPCGFVIARRLKQFGVSCVVVAPSLIPKKPGDKIKTDRRDAEKLARLLRAGDLSPVYVPEATDEAIRDLCRARTDAVDDKRRARVRLKAFLLRNGFHYTGKSTWTPAHMRYLRELVLPHPAMKVILEDYLCAIDAANERVNRCEEAMGDLLVSWQLRPAVEALMGFKGFKIVAAMITVSELGDIHRFAHPRQLMAYLGLVPTEATSSDKRKQGGITKCGNPHARWLLVECSQHYDTPPKVSKELSMRQAKLDRRAKEVSWRAQNRLHSRFNRLRGRRLQRNKAMTAVARELTGFIWELLRELSCYTKVANAQ

SEQ ID NO: 157794 - protein, 384 aa, unidentified
MSAHPTQIQAAAQLQANTLFASLELSKARWLVTVSAPGSDKLSRHQVPGGDGQALLELLWRLQAAAARRSAPVMIIVIQEAGLDGFWIHRLLVQNGITSHVVDPASIAVNRRHRRAKTDKIDGVKLLRTLMAWMRGERQVCTMVQPPSPEDEDRRRLARERARLLKERIQHTNRIKGLLSGQGIPDYDPLHRDRRGRLAALTTGDGRPLPKRLETEIGRELDRLELVASQLAAVERERDALMAQTAEADARAAPAALIRLRGIWPELAALLWLEALFRRFENRRQIAAYAGLTPSPWKSGGIDREQGIAKSGNPRLRRAMIELAWFWVRHQPGSALSRWFVERVGAARGRVRRIAIVALARKLLVALWRYVTQGVVPEGAVLKG

SEQ ID NO: 157795 - protein, 340 aa, unidentified
MEGLYAGSDLHGNSNFLGIIDAQGKRVFKKKMPNELALIRETLQPFQGELLGIAVESTYNWYWLVDGLMEAGYRVQLANPSAIQQYSGMKHSDDRHDAFWLAEMLRLGILPEGYIYPKEERPLRDLLRKRGHLVRLRTSLIISLQNILSRNLGRKVNVNDVKAVKEDRISVLLEMDEDLALAGRVSKEAIDHLTRQIHKIEWVVQKRIVLKEPYRYLLTLPGVGKILSLTIMLETGPISRFETVGDYVSYCRKVPSQWMSNGKWKGAGNRKNGNKYLAWAYSEASEFARQLYPEPRAYYNRKMQKTNAACAHSALAHKLARAAYYIMKDHVPFRPEKLFG

SEQ ID NO: 157796 - protein, 318 aa, unidentified
MKANTAAVYVGVDVAKATLQVHQQGRQIELHNVPAGLTQFCKKLKALEGAHVICEATGGYERALVQALHKVKIPVSVVNPAQVRGAAQAQGQRAKTDRIDALMLTDCGQRYQPQPTPPASQSQRQLAALAQWLKQLVDAQAVAKTQAEHHEDPFVRKQHKTLLDHYQSQIEAVETKLKALMRKDPVLAQRVECLDAIEGVGLRTAFMILAHMPELGQINRQQAAALAGLAPWTRDSGTMKGMRCIGGGRSEVRLALYMSALSAARCNPVLSAFYQRLIAKGKLPKVALTAVMRKLLIYMNHHLKALDAQPAPDAQKQN

SEQ ID NO: 157797 - protein, 339 aa, unidentified
MPYYVGLDASKNTTNICVMDAKGAVIREGVVDTDPRAIVRFLRGRGVRYAAVGMEAWAVSNWLSEGLAEARLRIVCIETRHAHGVLKARAIKTDRSDARGIADLIRTGTYRPVHPKSVESRQVRALLAARQLLASKALSLENSIRGLLLGLGLRIAARQRGKFAARVMALASKNEFAVGLVRPLLEIRATLLDEAAKLEKRLVQLTRTDPVCRLLMSAPGVGPLTSIAFKSAIDDPNRVTDSRAVGALMGLVPRVRQSGGTERRGRITKTGDRMARSALYLAAMVVLRRGAPASWLKSWGEAVAARRGVKRARIAVARRLSVVLHRMWVTGTPFRPALA

SEQ ID NO: 157798 - protein, 345 aa, unidentified
MHIASIGIDLGKATFHLVALGEHNKVLLRKKFSRPQLLAYTANLPASLIGLEACAGAHFMGAALRGQGHQVRLIPAQFVKPYRKSNKNDFIDAEAIAEAVTKQNMRFAQLKTQEQLEWQAMHRVRDRLVRRRTALINEIRGFLLERGITFAAQPIHLRKNLPAVIEDAEQNLSPRLRWLLDRMWQEWKQTETEIQAITDEIERISEEDARCRQLRQIPGIGPLVSTATVAAIGNGSAFRRGRDFAAWVGVVPRQYSTGGKQKLYGISKRGNVYLRRLLIHGARAVLFRVKYDTAGFGQWVHRLAQRAPRNKVVVAIANKLARIAWAVLSSGKDYRHQPLLQLAAA

SEQ ID NO: 157799 - protein, 347 aa, unidentified
MNFYHSTHRHYCGIDLHARSLYVCILDQQGEVLLHKEIKARPEPLLTLLEPFRDDLVVGVECMHCWYWISDLCEEHGIHFILGHALYMKAIHGGKTKNDRIDSFKIAMLMKGGNFPLAYVYPKEMRATRDLLRRRTRIVQHGAMLKAHVVNTTSQYNLPPNKVNLKNVGAREQVRATFADRDVQHNIDLDLAIIECYHRELSKLGEHLERQAKQHDPTSLSVLRTIPGVGRILALTMLYEIGDIQRFETVQKFASYARLIKCKAESAGKVYGTQGNKIGNAHLKWAFSEAAVLYLRGNDKAQRYLQKLQKRMNKPKALSALAHKLGRAAYFMLKHQRVFDEQRFLKG

SEQ ID NO: 157800 - protein, 392 aa, unidentified
MEIYVGIDVAKETHWACALDARAQVLLDRAVDNDQAAIERLVADLRGLGGEVVVGLDITGSLARFLEAILLAEGLRLVHAPGIAVNRAGQGFSGGERKSDPRDAHTIAELVRTRDLRPILPDDETAIALRLKVTRRRELSDDQTRRISRMRQLLGAIHPGLERRLDLTAKGPLVLVTRYVTPAEIRRAGLKRIMTHLKRTPHLHAVEALAQRALEAAEGQSIAVPGEASFADMVRELAAEALQAREAIARIDRDLEALLERHPDGALIRSLPGMGAVLSAELIANIGTIERFHSADALASAAGLTPVIRQSGKSRNWRRAYGGDKALKRVFFQSAFCAVSTRDPLSKAFYDRKRREGKHHTQAIIALARRRVTVLWTMLRTRQTFDPTQKAA

SEQ ID NO: 157801 - protein, 327 aa, unidentified
MKKNPLPVYVGMDVAKATLQVHLQNRQIQFGNDVAGHTLLCKELGRFPTAHVVCEATGGYEDAIARAFAAAKIPVSIVNPAQVRHSAQAQGKRAKTDPLDAALLTDYGQRFQPPATPPVLATQRQLEELTLWLSQTIQARAIAKTQAEHQSNPFVCAQHQERLDHYTAQIRAVEAQIQALLQQDQILARRVECLDQIVGVGPRTAWLVLAHLPELGKLNRQQVAALAGLAPWPTDSGEVKGIRHIRGGRHEVRRALYMAALCAARSNPVLKEFYQRLILRNKPAKVVLTAVMRKLIVHMNNEVKKLAARHVETKTAKTQKTKKSLAK

SEQ ID NO: 157802 - protein, 382 aa, unidentified
MGWMAPLRHLSAKLLSDRNSSEWEPSMGEVTTIGLDLEWEPSMGEVTTIGLDLAKHVFQVHGVDAEGATVLRKQLRRAQVLAFFSRLPPCLVGLEACATAHYWTRELRALGHEVRLMPAQYVKAYIKRNKHDAADAEAICEAVQRPTMRFVPVKTADQQAAVLLHRGRERLVRQRTGLVNALRGHLAEFGVIAPQGLRNVGKLIAIVRDEGDGRLPDLARQVLQVLAAQIEQLEAAVAAIEKQLMAWHKSNPVSQRLASVPGIGPIIATAIAATVVEPSGFRSGREFAAWLGLVPRQNSTGGKHRLGGISKRGNPYLRRLLINGASANLLRSKATNADPWVIGLRQRRPSLVVAVALANKTARIAWAVMHRHENYQRVAAAA

SEQ ID NO: 157803 - protein, 452 aa, unidentified
MAKVQKNTRQSNSKNKKAKLEKIKLNAAGIDIGAEKIYIAIIDQEVKEFKTFTSGINEAISYLKSYNITSVALEATGIYWFPIYEAIEEAGIEIYVVNGAHVKNVPGKKSDVLDSEWLRELHSYGLLRSSFVPQAQIRKLRYYLRLRNDFIRDGARHVQHIQKNFDAMNIKLHNVISDIMGESGQKIICAILNGERNPGELLKLCKFEMQKNKGEDIIKSLEGNYREEYIFGIKQAYEMWKTFQQKITECDTEIEKHLQEITKDNDEPENLSHPKRIYHHKPEIQDFHYLMMKMTGNKDATKIAGINDYNLLKLVSETGLDLSCWPTEKHFTSWCGLSPTVNKSGKTNKKSRRQRKKVNEAGEIFKQIALNVGKGKHCALSGFYRRIKSRSGALVANKATARKIAVYYYNLMTKGFEFVDEGLNKYEERYNAQRMKALEKKANEMGMKLISA

SEQ ID NO: 157804 - protein, 358 aa, unidentified
MKTELNRTSFFENILLFIGIDVHKSKWVVTVRTYDLELKTFSMKPSAEELENFLLKNYPGADYRIVYECCFSGFWIYDYFSEKGYKIIVTPTNRIYKDGSTTKTDKIDSRKLAFQLSRELLREVIVPAKRIREYKYIFRIYDKQKMRQGQILRQIKAFLEQKNHPLKWPNWNKGLLEKLKEIKFEDKLFDLKFGNLLKEYEYLIEQIKDSQKILEKIKEDQELGIRINILEKINGIGIISAVRMCLYLFDRKDRFESSEKLNHYLGLTPSERSSGDKVTRGRSGMSGNRQLRSIIIQLAWMAVRKDGSLLDKFDKVYKASSSKQKAIVASARKLMTKIYAAIQKEEDYIVNVRTVKVA

SEQ ID NO: 157805 - protein, 341 aa, unidentified
MQVSTIGIDLAKNVFQVHGVDAIGKVTITKKLRRSQVLALFDRFPRCLIGMEACATSHHWARELRALGHDVRLMPASYVKAYVKRNKNDAADAAAICEAVTRPSMRFVPVKTADQQSALMLHRTRDLLVRQRTQLINAMRAHLAELGLVAARGREGVQSLIALVRDNVSQLPDLARSALQAILSQLDALGQQIANIERHLHAQHRVNEVSQRLETIPGIGVIGATAIAATVTDPKVFKSGREFAAWIGLVPRQNSSGGKERLGSISKQGDRYLRRLLVIGATAVIRQARTHPDVHPWLIQLLARRPAKVVAVALANKTARIAWAVLARGGTYRAPALAARV

SEQ ID NO: 157806 - protein, 391 aa, unidentified
MIYVGIDVAKDKHDCFITKSDGEVLFKAFTITNNLDGFNELHQKITSVMDDVTNVKVGLEATGHYSYNLLGYLIDKGLPTYVINPLHTNLYRKSLSLRQTKTDKVDARTIASMLMSDVNLKSYSDISYHNEELKSLTRYRFDKVKERAKLKTSVSRLVCILFPELEKLVPTLHITSVYALLSEFPGAKHIATAHLTRLTNLLSEASKGRYGKDTAITFRDAARASIGSNMPAKSLELKHTIKLIQELDSEIDEIENEIKIIMDEINSPILSIPGINYRMGAMIIAEIGDFNRFDSPDKILAYAGFSPSTYQSGQQDSAYAHMEKRGSRYLRYALYNATKYVCHWDPTFAAYLAKKRAEGKHYNVAISHAVKKLVRVIYHLEKTKQQYIKAA

SEQ ID NO: 157807 - protein, 315 aa, unidentified
MNEAADVIVGIDVAKAALDVAVRPSGEARHLANAAAGIGELVGWMQALSPEVIVVEATGGYEAPLVAELGIAHLPVAVVNPRQVRDFARATGRLAKTDRLDAQALAHFGQAMRPTPRPLPDEDTQALAALVERRRQVVAMRTAEENRLGATRVAPVRARIQAHLAWLEADLGEIDGDLQQQLRASPLWREQDDLLQSVPGIGPIIALTLLAQLPELGRLSHGQIAALVGVAPLNRDSGTLRGRRAVWGGRQAVRTALYMGTLRATRCNPAIRLFYDRLLAAGKAKKVALVACMHKLLTILNAMRKHQTPWQAQAA

SEQ ID NO: 157808 - protein, 350 aa, unidentified
MQIIGVDLHTRQQTVAMLNVETGEVIEKTLQHEGDSVREFYSNLPRPTRVGIEATGSMQWFLELMEELGIDCQVGHPAKIRAAEPRKQKHDRRDAALVLRLLVENRFPSIWMPSREQRDVRSLILYRHQWVRIRTRVQNALQAIALSHGLRRGSSLWSKAGQHAIASLSLTRYTAERRTALQSLYRHLEEQIADLNRKVEELAWQRPQARRLMTHPGVGPITALATETFLGEPKRFVDGKAVASYVGLIPSEHSSGGRQRLGSLSKQGNPLLRFLWCEAVGHAVRKDAELQRFYQHKLVQKGLGKAKVAAARKLGIRLWILLRDQIDYQEFCRRGQLRQKHGGAHAGVPA

SEQ ID NO: 157809 - protein, 311 aa, unidentified
MDAVYVGIDVSKDRLDVHVLPSGEVFGVARDGSGLADLCGRLRPLAPAAIVLEATGGFETVVAAGLAGAGLPVVVVNPAQVRAFAQAIGQRAKSDPIDAAVIARFAQATKPAIRPRPDAETQLLADLVARRRQIVAMIGAERQRERRAPARVQKSIRRLVKALEKELASLDGDIDGAVRGSTAWREKEALLTSVPGIGPTIARTLLAEMPELGTLDRRQVAALAGLAPWTRQSGQWRGKSFIGGGRASVRSALFMGALVAARHNPTLKAFRDRLVASGKPKIVAVVATARKLLTILNAMLRSNSPWQPQNA

SEQ ID NO: 157810 - protein, 405 aa, unidentified
MFDTEDVGVFLGLDVGKSNHHGHGLTPAGKKVFDKPLPNSEPKLRAVFDKLAAKFGTVLVVVDQPASIGALPLTVARDAGCRVAYLPGLAMRRIADLYPGEAKTGAKDATVIADAARTMPHTLRSLELTDEITAELTVLVGFDQDLAAEATRTSNRIRGLLTQFHPSLERVLGPRLDHQAVTWLLERHGSPAALRKAGRRRLVELIRPKAPRMAQRLIDDVFEALDEQTVVVPGTGTLDIVIPSLAASLAAVHAQRRATETQINALLEAHPLSPVLTSMPGVGVRTAAVLLVTVGDGTSFPTAAHLASYAGLAPTTKQSGTSIHGEHAPRGGNRQLKRAMFLSAFACMNADHASRAYYDRHRARGKTHTQALLRLARQRISVLFAMLRDGTFYEPRTPTDVKLAA

SEQ ID NO: 157811 - protein, 308 aa, unidentified
MAKNFIGIDLSKARLDIHDPQTGKDSCCPNARTGLRRFVRGLGPDDIPVFEATSGCDRLLIEELTLGKRRFVRVNPLHAWHYAQSLNLPKTDRVDARMLARFGTERQPAPTPLRDPARDELAELTGRRDQLKRMETEEKNRLARTANPIAARDIRASIKTLAQRIARFDAEIRACIAHNPKLSETARLITSVPGIGPVVAAGLMAWMPELGTLDRRAVASLGGLAPKARESGMYKGHRRLGQGRCHVRRMLYMAALSLWRNPGVVGDMVPRMRERGKPNKVILIALARKILTFANAVLRDRKPFQSNA

SEQ ID NO: 157812 - protein, 338 aa, unidentified
MLFSGIDLHKRSIAIHTLDAEGTVVRAANLPARRGALTAYCGTLPGPHRAVVECTGMWYWVRDLLVPQGIDLRLGHAKYLKAISYAKVKTDAVDAATLAQLLRVDLIPEAHMISPALRETRDLLRARLVLVSRVLRCQRSIGALLEKDNVATPADLPELPRLEATLHAEQHALLKTQVRRLEQQLRDRVLPTPDAQRLVWIPGIGAIVAYTLLLEIDDITRFPTVRQFHSYCRLVPGAANSDATRRHKRSRDGNRYLKLAFHHAAIRAAQYVPEIQTEYRRLVRRKGNAIARALIAKELGSIVYHVLTRQEAFNGRFRGLQLTRTKPRRWPRLASPPA

SEQ ID NO: 157813 - protein, 316 aa, unidentified
MSISETFIGIDVSKEQLDCASRPNGTTSSFKNSVTGIDALIKQLQEQRPRLVVLEATGGLERALVAALVVAQMPVVIVNPRQVRDFARAVGQLAKTDRIDAAVIAHFAEAVKPEVRTLPDQLTQEMDALMKRRGQLVAMLSVERNHLVSATSPVSNHVKEHISHLEELIKRLDQEIDQMIGKSPIWKAKDELFQSVKGVGPVLSRTLLAELPEIGQLSRQKLSKLVGVAPLNNDSGKRKGKRSCWGGRSGVRAILYMSALSATRFNPVIKEFYQRLLAKGKIKKVALVACMRKLLTILNSMVKNNTPWDPSFAQRG

SEQ ID NO: 157814 - protein, 407 aa, unidentified
MDLLKTVFGIDVSSRKSNVCIMVNGQKVNDYAISNDMVGFNRLLGDLKQVTKPQIIFEATGVYSRRLQAFLDMHELRYVMMNPLEAKRKTKDDLHQNKTDKLDALYLAKLQSEHPQRLAYVQNKEYQELMANNRIYEQASHDLITNRNRLHKAIQLTFPEIEHLMVNPRGKNYWSIVLRFPHPDIVLETKEADIIDFLKGLTGIGKKRANDIAQSLIRLAKVACPAVKKNSAHIRGLKMAINNILSAEEECQTALQEMAKLAPKRDLEILTSIPGIGENTALRIISELGDIRRFNNPSQLNAFVGVDPQVYESGNLTAHLSISKRGTAIGRKVLYLAINQIQSAKKAGKPCHIADYYEKRKRSSETASHKKAAIVSIHKLLRTIFALIKNDQLYNYDVAKHNQRLLS

SEQ ID NO: 157815 - protein, 322 aa, unidentified
MAKKKAPRSFVGIDVSKQLLEIAVHQSDYRFSLPNDPKKFPELLAELIALRPARIVVEATGGLEIPLLQALGAAGLPVVLINPRQVRDFAKAMGQLAKTDRLDARVLAHYAAATAELPLRPLKTAEDTELDALMGRRNQLSDMLGAEKNRRGSAASATARADIEEHIEWLKERIKELDKKLKAQLKRSATWQQKDKILQSAQGIGFVTSVAFLADCPELGQLNRHQIAKLVGVAPLNRDSGKQRGARHIFAGRAQLRSKLYMATLTAIRWNPVIKAFYERLIDRHKLKQVAITACMRKLLTIINVMVRDNKPWNVKAQPVSA

SEQ ID NO: 157816 - protein, 392 aa, unidentified
MVISVGVDVSKDKHDCFILSSEGEVLADVFTIPNNLDGFRFLLQRIRDCTHAQDKIKVGLEATGHYSYNLLGFLLDNGLPTYVLNPLRTNIYRKSLSLRKTKTDRVDARTIASMLLSDAGLKPYTDTAYHNEELKSLTRYRFDKVKERAKLKSSIARLVCVLFPELEKLVPSLHIASVYALLEEFPGAKQIAAAHLTRLKTLLETASKGHYKRDMALEIRDAARNSIGSWMPAKSLELQHTIRIIRELDDEIAEIEKQIQAIMDELNSPITTIPGIGFRMAAMIFAEIGDFTRFDSPDKLLAYAGMSPSTYQSGQLKNCYPHMEKRGSRYLRYALYNATKYVCHWDPTFAAYLAKKRAEGKHYNVALSHAAKKLVRLIFAMEKSRQPYCLVA

SEQ ID NO: 157817 - protein, 359 aa, unidentified
MKTTLSKKQRFFNQIKLTRDDDLYIGIDVHKANYHVALYLNEAHAIDFITPADNVKICTTLKKLAPAIKNIVYEAGPTGYSLARQLQQQSLPVQVIAPSKTPQYSARDSKTDRLDGRKLAEYAAKGLLRPIAIPTRRQEAIRQLPRLRLQFVKKLKQTKLQIKSLLLQYGIPAPEGLQHWSQRAVEKLKKLQLLDPIRYSLDMLIYEYDFLSTKVKDIEQKLNETFTKKPYAKKIAILQSHPGVGVVTSMMFTAEIFNPKRFKDTAQLAKYVGFAPTIIQSGQTIRDGPITKTGRPQLRSTLIQAAWIWIAHDHKAKQVYLRIAHNTGQKNKAITAMARRLSIHLWKMLCNNELYRKTA

SEQ ID NO: 157818 - protein, 322 aa, unidentified
MSVSNQRCADIDVSKSTLDIAISSITQQFTVPNEDGGINQILKELKRNETQLILMEATGGLESGVAGYLQSEGFDVVVINPRQARDFARAMGYLAKTDQIDARVLLQMAKVINQHPEREKYIRPLPDVHRQLLAAMVVRRRQLTIMLTAERNRLHPSHSQNHESIRFIISVLKSEMARVEAEMSAYISGNFSELSALLSAVKGVGAATVALLLAEVPELGTLSRREISALIGVAPINRDSGTMRGRRTVFGGRASVRTALYMSALVGTRHNPVIKEFYTRLVAAGKPKKVALTACIRKLLTILNAMLKNNEAWDPLYHQHAS

SEQ ID NO: 157819 - protein, 341 aa, unidentified
MQHELRTVAIDLAKKVFHLVGTDTTGKILWRKRLTRHAFMPFIAQLPPVLIGIEACGGAHYWARRFREHGHDVKLMAPQFVKPFVKSNKNDMRDTEAIAEAVTRPTMHFVPPKEVDQQDMQALHRVRERLIGARTALINEVHGLMHEYGIVLPKGVAKFRQAVVDKLESEKEKLTTLSQEMFWKLVEEFVTLEQQLAYYQEKLEALATTHPECQRLMTIPGIGPITATALVAAVGDVGVFKNGRQFAAWLGLVPKQHSTGGQTRLLGISKRGDSYLRKLLIHGARATLRWVKLQTDDRSRWIRGLLARCGWNRTAVAVANKNARIVWALLSRGGVYGDNAS

SEQ ID NO: 157820 - protein, 350 aa, unidentified
MTNLARSITGGVDTHLDVHVAAALDERGTLLGVKSFATTESGYKFLLGWLSGFGPVELVGVEGTGSYGAGLTRHLQAERVRVVEVDRPNRQRRRLKGKSDPQDAISAARAALSGDASGEAKTRDGNVESMRVLRVARTSARKGRTQALNQMRNLVSTAPEPIRAELRGLNVFHLLERASTYRPGAKRDIVSLTKFSLRMLARRAITLEEEITEIDAILKPLVKEAAPELVASLGIGTDAASALLVAAGDNPERLRNEAAFAHLCGASPLDASSGKNQRHRLNRSGDRQANSALWHIVITRMVYDPRTTEYIDRRKKEGLTKKEAVRCLKRYVAREVYGLLPHEKLGLDSP

SEQ ID NO: 157821 - protein, 468 aa, unidentified
MPEPEEIPDAEHELVIERVCAIDVAKASGKVCVRTPGRRRVSRVWDVSAMTGAVAELAEQLVELGIEKVTVESTSDYWRIWYYLLEAAGLDVQLVNARDVKNVPGRPKTDKLDAVWLAKLTEKGLLRPSFVPPQPIRQLRDYTRLRVDLIGERVRYWQRLEKLLEDALIKVSSVASKMDTQSVRDMIEALIAGERDPRRLAGLARGKMRPKYAALVEALTGQFDDHHAELARILIDQIDALTVQIAALTTPIEQRLAVMLGDQEPSGSAGGPTGADWRGTRPEQTVGTRSTSSIELSADTLAECAALTTIERLDEIPGIGPQTAQAILAEIGLDMTRFPTAAHLVSWAKLCPRTIQSGAKQRSGKSGKGNPYLKGALGEAANAAAKTDTFLGERYRRIVKRRGKLKALVAVARSILVIVWKLLTGPTARFHDLGPDYHTNRIATERRMRNHIAQLTAMGYRVTLEPAA

SEQ ID NO: 157822 - protein, 319 aa, unidentified
MSKIICGVDVCSVDLQARIGCEGPECCFANTTEGIAGLAEFCRQQGVELVAMEATGGYEKQAFSQLWALGLAVAILNPRCVRRFAEGMGWLEKTDRIDAGVIAWFAQVKRSRPCTPASAQQEHLQALVTRLRQLTELQTMQRNQRLLVTDPTVLASFTQVLALLASQIRALATAISEQIAADPLWQQLDQAFRSIKGVADRTVACLMAEMPEIGTLSNKAISKLAGLAPLARDSGTIHGKRAVRGGRAEVRAILFVVASVVRRYDPDFAAFDRRLTAAGKPKKVIRVALAHKLLVRLNAKARQIRAQLRETASGVLVHS

SEQ ID NO: 157823 - protein, 422 aa, unidentified
MLEETQDREEIVQRVAALDIGKAELVCCVRVPGEVGRSRRVREVRAYSTMTRSLLGMVDRLGELGVTRVVMEATSDYWKPPFYLLEAAGFDVWLVNARDVKHLPGRPKTDRLDAVWLCKVAERQMLRASFVPPPPIRVLRDLTRYRWDQVAVRTAEKQRVEKLLEDAQIKLSVAVSDIFGVSGRDMLAALIAGERDPKVLAQFARRRMRTKISLLEEALTGRFSDHHAFLLSKMLARIDAVSADIVELDARIEAEIALFAQAVARLDEIPGIGATAAAVIISEIGVDMSRFPTPAHLASWARFSPTVKESAGRNKGNGTTGHGNRYLARVLGEAAVSAGRTNTFLGERYRRVARRRGKKKAIVAVGRSILIIVWHLLANDETGFHDLGADFYDTRIRPDHKKRGHVRQLEALGYKVTLEPAA

SEQ ID NO: 157824 - protein, 338 aa, unidentified
MTTGLAAKTYELFVGIDIAATTAEVSTQRRGAKASRSFRIDQTPEGFNRLVKKLQATGHDPSHILVVMEATGSYWISLATRLVHDGFQVSVINPSQAHHFAKALLKRAKTDAIDAQTLAQLAMILQPEPWMPPPQIYYELQQRLAQRDDLLNLRQQVRNQLHALIQHPEVIEPVRLRMECLLSTFQLQIDEIEVEITAALNQDSAWAAAAERLQSIKGVGWVTAAWTLVTTLNFTTCDTVDSLTAYAGLAPMPRQSGSSVWHRPSIGHSGNGRLRTAYYMATLTAARFNPAIKTFYSRLIEAGKPEKVARCAAARKLLHIAWAVVKKDQPFDPNYAQG

SEQ ID NO: 157825 - protein, 299 aa, unidentified
MQSMYYIGLDVHKKTISYCVKDGSGIVHGEGAIPATRWDLDRWMKMLPQPWTAAMEATIFTGWIYDHLKPHAAALKVAHPLMLRAIAAAKKKNDRIDANKIADCLRCDFLPECYMASTEIRERRRTLRYRNLLVHQAVQLKNKISGLLMEAGVSYNKQKLHKVGYFKELLATNPDINEGLRPLLRLCRETLVRLQKTESALARSLQRDSLLAERVQRLMTIPAVGPITALTWVLEVGDVKRFSSIKKAISYCGLCGAEKSSADTIKRTPISKQRNKHLQSVLVEAAKMAPRLSSELALI

SEQ ID NO: 157826 - protein, 399 aa, unidentified
MLDDGSQPTKLFNADNNQLGAEALVERIYSIAKEHCVSDILIGTEATSMYDWHLLEYLAESKLALEFNLKLYRFNAKWIKNFKKSLAPRGKTDPIDSFAIAERLRMGRLAKEYIPDTKYQPLRKLTRFRFHLMQQIAREKNFFLANLFLKASAYSRVSPFGSTFSATSLSVINDFFSVDELAAMPVEELTEFILEKGKSHFSKPAEIVDNLKRVARESYRLKPELAPTVNLILASTFNNIRCYKEQVKLVDEAIAENLKAFRHTLDSISGIGPVYAAGILAEIGDVHRFLNDSSLAQFTGLTWPKHQSGRFQAEETRMSHAGNQYLRYYLVEAANSVKRCDATYKAFYEKKYAEATKHHHKRALVLTARKLVRLVWTLLTRQTLYQPGYCSFEDLSKIG

SEQ ID NO: 157827 - protein, 442 aa, unidentified
MSNFATVNPNAAGIDIGDSEIVVAVGPEKCEENVRTFGTFTSDLKSIIEFVSHYSIDTVAMECTGVYWVQLYLLLEEHGIKVIVGNARSIKSVSGRKDDESDAMWIQRLHTCGLIRPCFQPDLLSRELRELMRYRKNLVQNRSQCTNRIMKALELMNIKVHTVISDIDGKSGRAIVDAILKGERNPAALALHADPRIKASRETLEKSLEGNWNDVQLFILSEQFQLYDYLNNAIRKTDQQIEQHLLKMIISRGGDKDITIDKSMSRKRTTSKNQIPFHATAFLKTLLGINLTAIPGINELSALSFIAETGFNMDRWPTDKHFKSWLNVVPSTEKTGGKIKSEKVRKIKHHAGQVLRVAANSLRTSHSELGSYFRRKQTKGGPAKAIIATADKIATSIYHMISRKEEYNPILLVANGQKRKLIEIEKLEKRLKKLQSEVMDAA

SEQ ID NO: 157828 - protein, 421 aa, unidentified
MNSQNNHSFTAYIGIDWADTKHDICIQAADSDEREFDCIQHKTDEIEQWAVTMHKRFGEPIAIAVELSKGPIVYALQKYDFLVIFPIHPMTLAKYRQAFSPSGAKDDPTDAEFGLDLLLHHPDRFKPLRPQSVGMRTLMSLVEQRRRLVNDRIRITNRLRDALKQYYPQALEWFPRGVDTVLFCDFIARWATLKQVKRARKNTLIRFFHEHRLWRTQVLEKRLKAIKSAQPLTLDEAVIAPYRLQALVLVDQLRVLLQAIQKFENEINEVAKQHEDFFLFQKLPGAGASLAPRLLVAFGEQRDRFANAAELQKYSGVAPVLERSGKKEWIHWRYQCPKFLRQTFVEWAAQTINKSYWAGEYYRQQREKGCRRQVALRALAFKWIRILFRCWQTRTPYDESVYLKALERRGSPLLKPMNASA

SEQ ID NO: 157829 - protein, 411 aa, unidentified
MEVIYKRCCGLDVHKEIVVACLLIREGGKVVKEIRTFLTMTVDLVVLHDWLKARQVTHVAMESTGIYWRPVFNLLEEDFTVLLVNAAHIKAVPGRKTDVKDCEWIADLLSHGLLRGSFIPPEPIRDLRDLTRYRKSLTDERVREVNRLQKFLEGANIKLSSVASNVMGVSGRAMLEALTAGSTDPQVLSELAKGRLRKKLPELKKALEGRFRAHHRFIVAEILTHLDFLDEAIERVSQEVSNRIAPFSKKVELMDLVPGINQRVAEGVLSEMGVDMSCFPSHGHAASWTGLCPGNNESAGKRKSGKTRKGNQWLRRYLIEASWAAVRKRGTYLSALYYRLVPRRGKNKAIVAVAHALLVMIYHILKHQVSYRELGADHFNKLNAAYVQRHHVKRLESLGFKVILEPLSEAA

SEQ ID NO: 157830 - protein, 454 aa, unidentified
MKILALDLGKFNTMCCFFDSKTRKHEFLNATTDRNYLETIFKKHKIDLVVMEACGPSGWINDLAQSLGLKTLVCSTNEDAWKWSNVKRKTDKDDALKLARMAAMNELKAVHMPSEAHREFRSLVKYRKTLDSRINKMKCKIRAWFVNHGISIDTGEKAWNTGRERINSFRKPLTDCQPHEFWKGELDLELNQLDSLTTILDGVVKKLESIGKTDPRIARVQTIPGVGPRTAEILVACIDDAKRFENGRQVSQYFGLVPRQYQSGETDRNGRITKRGNPLARTILVECAWSSLRYNPWAKHVYDRICGKQKTRKKKAAIALARKIAVLAWALLRDEKDWEPKRMIEVTESYGRIPLGLKEKLLEMPKKECRHKRKNRRVSEERVAKRAAAEQAAQTPKSTLQPTKSTPKRSPVRSSAAGPAKRKPTTTTTKGKPTKTKAKPTANPRRIRKLETAG

SEQ ID NO: 157831 - protein, 320 aa, unidentified
MERSIGIDVSKDTLEVVIFDGTFSKNMHYENNLQGLAKLDDTIRNQGEAETLITMEATGVYHLQAAVYLYEKGYTVSVLNPLKIKRYSEMKMLRAKTDSVDARTIAAYGFHEEPCYFTSKEYKKEHIVQLLQQIDALQSTELENSNRLHALKRIPGANEQALEIYRELVRMMKEKEREVENKLYEIVNESYADEYRLLKKIPGVGNRLAALIIGYFGKFENFNNSKQVASFIGLNPSPVQSGISTKGRCAISKKGNRYIRKIFYMAALSASKYNKACNSLYERLVAKGKSKKLALIAMANKMLRQIFAIVKYGRVYDPNY

SEQ ID NO: 157832 - protein, 410 aa, unidentified
MSESPYAFYVGVDWASETHQFTVLTPERRLEAERRIEHTGRALGEMADWLTALADGEPARIAVAIEVPRGPVVETLLERGFHVFAINPKQLDRFRDRHSPAGAKDDRRDGFVLADSLRTDRPAFRQVHVDDPLLIQLRELSRAEEELQTELRRLSNRLWEQLQRFYPQVLRLSPAVDEPWIWALLQLAPTPVAARALRRATLARLLARHRIRRVTAETVLAELHSPALRVAPGTTEAAREHIAMLLPRLQLLHEQRGRCARRIEQLLDELEGSHAEHRDVTVLRSLPGVGRVIAATMLAEAARPLAERDYHAVRTQGGVAPITRQSGKSVLVSMRYACNHRLRNALYHWGRVSAQHDPSTRRHYRALRQRGHGHARAIRGVIDRLLVVLMAMLRTGTTYDPARRRVPAAA

SEQ ID NO: 157833 - protein, 349 aa, unidentified
MRFYQGQHRFYCGIDLHARTLYLCVLDQTGKKVLHKEVPSEPAALLEALAPFRQGLVIAAECMFAWYWLADLCAREGIVFVLGHALYMKAIHGAKAKNDRIDSEKIANLLRGGNLPQAYVYPHGLRETRDLLRRRMFLVHQRAELITHIQTTNAQYNLPPFGQKLIYAKNRQALKIAERFADPSVRKSIEVNLALVDRYEELIGDLELHLQRTVKVDDVNTYYRLQSIPGVGPILALVLLYEIHDVRRFATVGDFISYARLVRPDHESAGKKCGFGKKKIGNAHLRWALGEAATLMLRESDQAKRFVARLEKQRGKGKALGILAAKLGRAVYWMLRRQEAFDVKRFWRM

SEQ ID NO: 157834 - protein, 387 aa, unidentified
MARKRTLSTLDTSIAYEAVGLDLAKEDVALAAFDSDHKEPYLIDRIPYDKLYELLADMAPTLVAMEPCSGAHQIAEQIQELGHEVMMISGRHVQAWVKDHCNGQKTDLNDAFAILNLAYDRWLTPIRGKTREECRLLALQASYRQLKGQRTKTMVHVKATLHAWGFPIRAGSFNQKVLHELIDTNREAFGDEVVETLHLMINRVRDLDHDIATVLKLLTEATQRDPRASLLRSIPGFGVLTTSRWCAVIGDIARFDSPKQTMAFVGLVPNNRITGHHTETSSGREARGQGRMSKRGDKMLRSLCILGAASLCLMVRNDRLPDCPFVASIKERLASPRPWFKVLVYVAAKLVRIATALLKYGETFSYEKAGISKAVLKQWELEQAKAA

SEQ ID NO: 157835 - protein, 310 aa, unidentified
MDPNTNDLIAVDIAKVELQVRTDSELFKVTNNAEGFAKLLEHTKKLKQPLVVCEATGGYERALLACLHARNIPVALVMPSRIRAFARSEGVKAKSDPIDTEMILRFARQKRLTATPAPCPTRQQIGALMDRRSHLSEQLAREKNRAQNSHACIAKSIGRMIRVINKELEGIEAQIRKLIDADLDLKETSSTLQSVQGIGEVTAWSMIAYLSELGHLKRNQIVALAGLAPFNKDSGARKAKRSIEGGRAKIRKCLYMAAQSAARHNPVIKAYVEGLTARGKPYKCAMVAAMRKLLIHLHIQIKQQHFALVS

SEQ ID NO: 157836 - protein, 408 aa, unidentified
MIANPQEGPIHARGRAVVGIDIGKRKHSATAVSPQGEVLARLASFSNTREGIDLLESEVLQKAGGPGKTLIAMEATGHYWICMYWELTRRGYCCVVLNPIQTNARMGARIRKTKTDPIDSLGIARVILSGEARATRVPDEKTVELRLLVRHRWRLVQAHTDMERYAQTLLDRVFPEYESVFSKPLLPSTRALIREIGIDPRQIISRADEVRNLLRRVSRRQISDDKIDQLLQKASHSIGTPQATTLIAQQLHDIFQYFELIEQQVAQIDEQLEARILEAGSPLLSLGIGPVLAASIHAESDSIRDFSTPGQYVAYAGLDPSVHDSGDTVRGRSKISKRGSPTLRRALYQAAFVIYRKHDYFLRRYKKYRRKGRSHTEASIIVADRLARVVWRLLTDNRPFKKRPPKKS

SEQ ID NO: 157837 - protein, 346 aa, unidentified
MLHVGLDLSRKRIDVCLISDQGELIDRFTATPDREGLHGLARRVAVYGEPVRGVVESMNGARFVHDELVAHGWEVLVADAQKVKGLAPLACKTDKIDSGVLAELSFRDLVPAIWLPTVELRSEREISRWRLHLVKHRSTLMNRVHSTLITFGHQRHMSDLFGVAGRRLLGELEIPEPWRSHVDASLVLIDDLEARITQIAKNLRRSGADHRYIPILMTAPGFGWITSFTVACEIGDITRFSSPVKLTGYTGLCPRVKQSGQMDQRGPLSKHGPRYLRWGLMEAAIAASSHPLYRERYQRTRRRLGRQRGPKVAQIDLARQLTDAIWYMLTRNQPFAPAGAIFRLAA

SEQ ID NO: 157838 - protein, 370 aa, unidentified
MSEPTPLFVGLDVHKDSIAVAHAQGHSADPPVYVGAIGTRQADLDTLIRRLQAKTPTLVFAYEAGPCGYGLYRDLTGQGFACQVVAPSLIPKKPGDKVKTDRRDAVELARLRRAGDLTPVYVPTVDDEAIRDLCRARDAARLTMKNAKLRLKAFLLRLGLHDVGRADWNAAHQRYLAKVVCPTPAQQIVFQEAVKAVDEQVDRLARLEAELRACASAWRLAPIVHALQALRGVQWLVAITVVAELGDLTRFTSPRQLAAFVGLIPSEYSSGPSRRQGGITKAGNGRARRALIEGAWAYRHPAKVSQHIQTRIDGLPKPIQDIGWKAQVRLCKRFRRLVGRGKHPNVVVTAIARELIAFMWAIAKEIPMTA

SEQ ID NO: 157839 - protein, 348 aa, unidentified
MTIVAEKYDYVIGIDTHAQTHTYAIINTHTGAREHCQTFPVTTPGMNRAVAWIRRNIHGESIAAVEGTRSYGATISHALTQAQIEVVEAKPPRRKDQAGKGKSDEIDATAAAMSILPKDITKLLQPRSEGVRAALSILSASRGRIDAQRTINRNSLSALLRTFDLGIDARRSLTPRQIKQISGWREHSTDGIEQCFVREEAKFLATSILNADQQLKENSKAMSELDEQLAPELQQVFGLGPVTTAWILIAYSHHGRVRSEAAFAALAGVAPLQASSGKHERHRLNRSGDRQLNKALDVVAQTRMGHDEATKEYVEKRTAEGLGTREIRRILKRYICRSIFRKLEVLTA

SEQ ID NO: 157840 - protein, 377 aa, unidentified
MRKNIRFIGLDVHGETIAVGVAEPAGEVRSLGVIPNRPESVRKLLKKLGPASSLRACYEAGPCGYVLYWQLTQLGVHCDVVAPTLVPTKSGERVKTDRRDALKLARSYRSGDLTPVWVPDPEHEALRDLVRAREAATKDHLRARHRLQKLLLRRGLRPPEKMKSWTTRHMTWIKSLRLEPAALEATFLDYLSEVEHASERIERLERAIDEAIEAAPPATRAVIEGLQALRGIARISAATIVAEVGMLSRFQRPKQLMGYTGAVSREHSSGDRIRRGAITKTGNAHLRRILVEAAWSYRYRPAVGPTLRIRQRKASAEVREISWKAQHRLHYRYARLLGRGKPKQQVVTALARELAGFVWAVGVQVEKQLARGELRAA

SEQ ID NO: 157841 - protein, 377 aa, unidentified
MKKLVVGIDISMDDFHACIKLRTEDDSIKIKGTRTFDNSDKGFKECLSWALKQQKDNCPLQFVMEATGVYYENLAYFLYANEKKVSVVLANKIKNYIKSLNVKTKTDKTDSKVIAGFGIERRLADWQPMSPVYKSLRELCRELLSTKKDIQRAKSQLHALEKSHEKHPAIIKLKRAQIDFFEKTIKLLRKEIKATVDKDPALKEKIRKVETTPGLGFETVVILVCETNGFDLFNSIRQLVSYAGMDVTQNESGKYTGKTRISKRGNTRIRQALYMPALSATMANKPIKELYQRINERNPETKRKGVVAGMRKLLILTYTLWKKDEEYSRDYDWTISKEGIKKELKKQKKAEPESSALDRLQINESTKAFFKTKLENY

SEQ ID NO: 157842 - protein, 354 aa, unidentified
MIHIGIDLHFTNMVNSAINDNGEEIWKGKLPATRQSLGNFFSQFDEPVQAVVECTSFWYWVADWCQDHNISLVLAHAKMLKAISYAKVKTDKVDAKTLAELLRAGLIPEAHMQMGNQRNLRELTRARLRMVERRERLQSSVWNLAAKYNVNIHDVDSAWRYPDELNKWLQGQLPQVSYLEAQMLLEQILLLQKHIRRVEHTIEEQAEFTCELERLLAVPGIGLVTGWTILAEVGDILRFTSDKKFVSYCRLVPGSKNSSGSRRHKSGNKDGNRYLRMAFGQAAVSAYSQYGPVKKFYNKVKRRSGKNVARAVVGKELAKIVWHMLTKDEDYKGFKGHSTRMASKPSWPQPISLP

SEQ ID NO: 157843 - protein, 320 aa, unidentified
MTYIGIDVSKDSFVAAYPTKSGYTTKTFPNTTSGVRKFINSLPADCHCVMEATGNYSMLLLYLLQQANIIVSMENPQKIKHFARAMLSTTKTDEIDAKLIATYGEKMTPAPYKIPTESIILLKQKRTVLRQLKKQLTATINLQQSLAVLPKQDPASKVAIEQTIKFLRKQISKMEEEITNLSNKEFGRQVKLLTSIKGISVTIASALILATGGFTYFSNAKQISRFLGLCPTYQQSGTSVNFKGHINRNGDTHLRSQMYVAAFASIRYNAACRETYERLRARGKSGKLAVVAVANKLIRQAFAVVTNNQPYIDGFVSSYA

SEQ ID NO: 157844 - protein, 411 aa, unidentified
MIFVGDDWAEDHHDVFVCDSDGKRLALRRFPEGVVGVTGFHDLVAGLAGDPAEVVVGIETDRGLWVQALVEAGYEVFAVNPRAASRYRERHSQSGAKSDQADARMLAELVRTDRHNHRRVAGDSVAAEGLKVLARAHQSLIWDRNRAVARLRSSLREYFPAALTTFPDLDDRDALAVLGRAPTPEMAKRLSLAKIGSALRAGGRKRNIDTRAAQIAEGLRVDALEAPAAVAAAFAATTRSHVAIIAELNAQIAALEVELAHHFEQHPDADIYLSLPGIGVILGARVLGEFGDDPHRYTDAKSRKNYAGTSPITRASGTRHVVLARFVRNRRLADAIDRWAFCTLTISPGARAYYDLRRAKQDSHHQALRALGNRLVGILHGCLATHSIYDENTAWAHRPENQLEPQKRHAA

SEQ ID NO: 157845 - protein, 340 aa, unidentified
MEIDRVVSQCVGIDVSKKKLVATMCMFSQAEQAVYSRAAEFDNDKTGFNQLVKWSRKEAVKELPLRYVMEATGVYHEHLANHLVRIGCTAVVMMPTKAREFAYWEGMISKNDTIDSRVLALVGCVKRSMRPWNPTNPLYRELRTMSRFSQDAKKLRTEMKNHLEALEHSHEAERSVIKHYESLVASLDRRIEKNLENMKKKVASDEELSKKVENIMTAPSVGFLSAVTVIAETDGFALIQNRRQLTSYAGLDVRDSQSGTVNGVSRISKRGNSRIRAILYMPAVQCRLHNKHLRKAYDRIIAKHPDKKMIAVTAMERRLLLLIYALWKGDRPYSEDYDKE

SEQ ID NO: 157846 - protein, 451 aa, unidentified
MSRPQVIDDEEHERVHERVAAVDVAKDSGMVCTRTPHPSRPGARRSTVWTVKARMGAVRQLGRQLKNDGIEVVTLESTSDYWRIWFFVLEACGLAVQLVNAAQARNLPGRPKTDKLDAQWLARLTELGLLRASFVPPKAIRDLRDYTRMRTRLVQERTRCWQRLEKLLESALVKVSSVASKLTTVSAQDMVKALIGGERDPRKLAGLARTRMKAKHDDLVQALDGMFDDHHGELAGLLLDQIAVLDGKIAQLSARAAELTAAMPAAWGVDPDGTTGPDAGAAPDAPVLDAVARLAAIPGLSPDLARSIIAETGLDMSRFPTAGHLVSWAGLCPSARQSGPRTRAGKKGQGDTWLRGALGQAANGAARTATFLGERYHRIARRRGKAKAQVAVARSILVIIWHLLRNPEARFTDLGYGYYQARTDKDKKIKNHIRQIEALLGHPITITPKAA

SEQ ID NO: 157847 - protein, 413 aa, unidentified
METVNKFCAGLDIHKRDVVACRLYIDHAGRPGKDITTFEATTGGLLLLKDWLQAVGIEQVAMESTGDYWKPVYTILEGEFEVLVVNAQHLKAVPGRKTDVKDAEWIAKLLHHGLLKGSFIPPQIQRDTRELTRLRSTIMADRARTVNRLQRILEQANLKLASVVSDITGVSARTMLEAIVSGQTDPKLLADLAQGRLRDKLERLEQALQGRIRDIHRFMLADALAQMDYYDERMQRITQQIEELLRPFDQQLSNLDTIPGVGLHIAQIILAEVGPDMSRFPTANHLAAWAGVAPGNNQSAGKRLSGTIRHGSPALRRALVQAAHAASKTRGSYLSAQYHRLAARRGRKRALMAVAHSILKIAYQLLKQGTTYTDLGADYFDRKSRDGTIRHLTRRLQHLGFAVTLSDLAQPAP

SEQ ID NO: 157848 - protein, 340 aa, unidentified
MDVRTLGIDLAKNLFQVHGVDGQGRTVVQRQLRRRQLLPFVAQLQPSLVAMEACGSAHYWAREIAKRGHQVRLMSPRFVRPYVKSNKNDARDAEAICEAVGRPSMRFVAVKSQAQQDMLALHRVRSLLIRERTALMNQMRGLLAEYGIVVARGAIPLRRALPLLLEDRDNGISELLRELLAEMSERLRWLEERLKRYDQRIAECAGTDERAGRLMAVEGVGPLIATALIAAIGDARQFHSGRDLSAWLGLVPRQHSSGGRSVLLGISKRGDRYLRTLLIHGGRAALRFAARKRDPRSRWIQAVRERRGANIAAVALANKNARVLGALLARDEDYRVPAAA

SEQ ID NO: 157849 - protein, 424 aa, unidentified
MKVTYQTCCGVDVHKSFLVATIVKTTGGIEPSYQKKRFSTFNNSILEFKQWLLDNDCHDVCMESTGKYWVPVFNLLEDKINVVIANPKWVKAVKGNKDDTKDSKWIGDLFRLGLVKGSYIPCKKVRILREYTRYRYKLVSCRSSEKNRYQNALTVCNVALDSVVSDIFGKSSTSIIDYLLEQSGTSINHEEIASKLLRSLKSKEDAVIESVEGYQMTDAQKYRMRLVRAHMDYITAEINDVDKMIENMISSNPDFENAVQFLCTIPGVKRDSAITIISEIGTDMSQFSSSKRLCCWAGLTPGSNESAGKKKSVRITRAGVYLKPALVQCAHAAVKSDKSPYYKKKYESLVKRRGKKRAIIAIARMILTAIYQMLSTGEQWNPSDLYKIDMPVALVEKQKAKAIKQAKKLLQREGLLPPDEPLAS

SEQ ID NO: 157850 - protein, 361 aa, unidentified
MSLRKKTTSQSFEGKSIFIGIDVHKRSWAVTIIGQEYEHKSMSQNPDPDILAKYLFSNFPNAKYFAAYEAGFCGFGACRRLNELGVNCSVIHAPDIPTSHKEKVQKTDKLDSKKIARALRNKEIEGIDIPPPNLEADRSLIRQRFRLVRDIARTKNRMKSLLFQFGIDYSNEFSEAQARLWTKTYINWLKTLPIENNLKLTINNYIQIGEFQKNELLIVNKAIRGLAKSETYKNNYELLKSIPGIGIISAITFLVQIGDINRFNRLDDLCSYIGLIPRMHNSGDTVKTGRIINRGRKELKTILIEASWQAVRKDPALMLKFEDLSKRMIKNKAIIRIARKLLSRIRYVLINQKQYELGVIN

SEQ ID NO: 157851 - protein, 344 aa, unidentified
MNIMHYIGFDIHKKVISFCEKQMDGTIIEQGVIRATRQSLNEWVGKRQAPWIGAMEATLFTGWIYDHLLSHAEELKVAHPEMLKAITASKKKNDATDAEKIADLLRCNLLPQCYMAPEEHRNLRRILRYRNFLVREAVKMKTKTASLLMEVGAEYNKSKLHGAKYFQELLTNLDYVPESIINLLQMTRINMESFSRMQKTLICALRTNPQISQRVELLMSIQGVGEITALTWVLEVGDVSRFNRISQTVSYCGLCSAQKESAGKIYRGPISKKRNKHLQTVLIEAAKLAPRWNPQLAEVHEREIAKGHRNRATLAVARKLVAYMLAVDRKQQKFTPREVIAKAA

SEQ ID NO: 157852 - protein, 317 aa, unidentified
MAGKVTETAVVGGVDTHKDLHVAAVVDQNNKVLGTQFFSTTRQGYRQMLAWMTSFGALKRIGVECTGTYGSGLLRYLQNAGLDVLEVTAPDRMERRKRGKSDTIDAECAAHAAFSGIRTVTPKTRNGMIESLRVLKTCRKTAISARRVALQIIHSNIISAPDELREQLRNMTRMQLIRTLGSWRPDASEYRNVTNVYRISLKSLARRYLELHDEIADLDVMIAAIVDELAPELIKRNAIGYESASQLLITAGDNPQRLRSESGFAALCGVSPVPVSSGKTNRYRLNRGGDRAANSALHIIAIGRLRTDDKTKEYVAR

SEQ ID NO: 157853 - protein, 311 aa, unidentified
MNEPCVYIGIDVAKATLEVSPFDKGKSSIDNTKKALASLLRRASKLNTPIMLCCEATGGYEKLLITMALEAQIPIALLHAKAVRDFAKSKGILAKTDRIDALVIRAFAEQNKPRAIEPSPQWQADLKGLVDRRERLLLMKNAESNRLDPLPSKVLVKSITRIQKQLAKEIQVIETAIEELIQSAPELLESVRRLKQVKSIGNNTAQTLIAHLPELGQLSDKQVVALAGLAPYNQDSGAFRGVRRIQGGRAEVRRVLYMAALVAIRYNPILMTFYNRLKERGKPSKVALTAVMRKLVVLANRIMKDPNFIPV

SEQ ID NO: 157854 - protein, 377 aa, unidentified
MASFKKLKHMNKAIVGIDVSKDDFHVCFKVREGSQKSIIKGRRKFKNSEKGFKELLEWINKRERDTDVQVLMEATGVYHESLAYFLYEQGILVSIVLANKMKNYLKSLNIKTKTDRTDAASIAEYGTERHLVPWEPMSPQYKELRDMCRELLSQKKDLQKAKSQLHAYNSSFQKSPEIVDLKNEQVQLTEKLIASLEDLIQKTVNKDQALLKKLRKTETIPGLGFITSVILVCETNGFRLFNSIRQIVSYAGLDVTFNQSGKFNGKSHISKKGNSRIRQALYMPALSATQCNQPIKAQYERICLKNPTVKRKGVVAGMRKLLILAYTIWKKDEEFDLNYRWETKSTQPSKGACNKKNGANSPAQDRLQLSESTVAFF

SEQ ID NO: 157855 - protein, 342 aa, unidentified
MYYVGLDIHKKSIAYCVKQPDGVIVREGSVAARREDLRNWAATLLQPWTGAMEATLFSDWVHDHLAPFAEALKMGHPARMRAIATSKKKTDRLDARTICDLLRCDLLPPAYVMPPQLRQLRRVLRYRNLLVRASVQMQNKIAGLLLEMGVEYDTPRLHRKKYFGELIEEKQAEIPASARRLLAFSREQYETLHRMELQLLRGLEQHPDIAQRVARLMTIPGVGPVLGLTWALEVGPVERLGNLARAISFCGLSSALRESAGKQTRGPISKQRNAHLQTVLIEAAHLAPRWNPLLAEVRERELQRGHRNRATLAVARKMVAFLMAADRGHQPHPRAAPVTAVA

SEQ ID NO: 157856 - protein, 362 aa, unidentified
MNILAIDLGKFNSMCCFYDTDTQEHRFQAVATTRSYLTTVFTHYKIDLVVMEACGPSGWISDLCQECGLKTLVCSTNDAAWLWKNVKRKTDKDDALKLARLAMLQQLTPVHVPQHQVREHRLLIKYRKKLVGRINGIRNSIRGLFVCHGIEIAKGPKAWRSGREQIDSYRKPLTECSMKELWQGQLDTELTQLDSLGEQMTVVEQRLEVAAEKDERIQRVQTIPGVGRRTAEAIVTTLDDVNRFKNGRQVSSYIGLVPRQFQSGETDRNGRITKRGSRLLRTLLLECAWVSIQYNPWAKTTYERVHGGQKTRKKKAAIALARKIAVVAWAMLKNKTDWDPEKAGINLQSAVDENPSKSDKPL

SEQ ID NO: 157857 - protein, 384 aa, unidentified
MTGSEMGKVATVGMDIAKDVFQIHGVDDQGTPILRRKLKRGDLLKFFDSLEATCIGIEAGSNSHHWARSLSMLGHDVKIMPASYVHAYVKSQKNDAADAEAICEAVRRPTMRFVPIKTVDQQAVLVLHQVRSLLIHQRTMLINALRAHLSEFGIVARVGERGVFELLKHVGDKDDGRFPKIVRNSVKILAAQIRALSVRIAACERELKSWHKKIPYSRRLEKIPGIAMLGATALAAKVPNATIFGSGRELAAWIGLVPQQSSSGGVTKLGHITKRGDRYLRRLLFLGARNILFMASSGKCTLPPTIERLRERKPFGVVCVALANKMARTAGAMMIKQEEFSQAAYLGRGHPRRLQSVDEMSKSRNEGDGKKDSVVIRHRVRASG

SEQ ID NO: 157858 - protein, 356 aa, unidentified
MISSTKYIGMDVHKESISIAVRNAAGKIVMECVIQTKASMILQFFDGLRGDLQVTFEEGTWAAWLYDLLKPHVTKLVVCDPRRNALLQDGNQNDRVDARKLSDLLYMNKLNAVYHGDHGLRTLKELGRSYLTMMKDQCRVMSRIKAIYRSWAIPCSGKQVYGSRHRAEWLGKILEPGVHRRAELYYQQLDALRTLRQEVRKDLLAESKKHKIWKRLCEIPSIGPIRAAELLGILQTPHRFRTKRQLWTYCGLAVVTSSSADHEVDNGQLRRRKKRKETRGLNENCNHDLKNLFKGAAVVASIKPGPFAEFYSALLAKGMRPEMARLTLARKIATIVLIVWKRGVCFDAQHLKPQTA

SEQ ID NO: 157859 - protein, 350 aa, unidentified
MMIIGCDFHPRYQQIAMLNPETGELVERRLEHENGEARAFYARLAKPARVGMEATGYGQWFERMLAEQGHELWIGHASEIRAGVVRKQKTDARDAAHLLRLLVENRFPRIWIPSPAERDTRQLLRHRYKLVCFRVSVKNQLHGLAMSQGVCRKKKLFTAKGREELEKLSLGPWASRRRQELLAMLDQLNPVIEELDRAVQREAENHADAVRLMTHPGVGPVTALAFVLTLGPMARFQRSKQVVSYLGLNPKERSSGDKQHTYSISKQGNTMMRWLLVEAAQTAVRFDPELLRVYRRLKFNKGASVAKVAIARKLAVKLYWLLRATASCAQMAPMQGSSRGTLVPQVGSSL

SEQ ID NO: 157860 - protein, 339 aa, unidentified
MELYCGIDLHSNNLMAAIMDGTGKRILKKRLINDPQIVLAMLEPYRTEIVGMVVESTYNWYWLVDALMDHGYRVHLANPCAIRQYSGLKYLDDNHDAFWLANLLRLGTLKEGYIYPKEDRPLRDLLRKRWHLVKLRTSLIISLKNIVSRNFGLPMKTSHIKRKSLDSIVSPLPREDNVALVVRTNKASIDFLTVQIDEVESTVLKQAKNKPCYAKLLELPGVGKILALTIQLETGPASRFLKVGHYASYCRKVESRWFSNGKAKGRGNAKNGNKYLAWAFSEAAEYARRFHPASRNFYNRKLNQGNAPMAHNALAHKLARAAYYIIRDNVPFEEAKMFA

SEQ ID NO: 157861 - protein, 364 aa, unidentified
MSSVSHRSLTHLGMDVHKDSISVAILRPNDSMDVERLFHDEDSVRRFIARMGDPRRLTACYEAGPTGYELSRQLEHLGVRCRVVAPSLIPKAPGDRVKTDRRDCRRLARLDRAGELVAIRVPSPAEEAVRDLCRARGDMVIDLDRARRRLGAFLLRHDRIWRGGSNWSLKHEQWLLAQRFDDPALAATFSQYRSVVEERRLRLVAVESDLLAYCDQDPYAEAVNRLCCYRGVDCLGALTLVSEVCDWRRFAKASSFMSFVGLVVSERSSGEHVHRGHITKAGNEHLRTQLIESAWAYQRGPYVGARIAKAQERCGSETRERAWKAQVRLCGRFRRLAARKNVKSVVAAAIARELAGLLWGEMTA

SEQ ID NO: 157862 - protein, 322 aa, unidentified
MSECILGVDIAKRKFDAALLVNDKLKHKVFKNNREGFTELSSWIEKQRVGRIHACMEASSTYGDELATYLYDQEHTVSIINPARIKGFAQSELMRTKNDKVDAGLIARFCFAMHPEPWIPVSPEMRELQSLVRRIDALISMKTQEMNRIDVSHESIRSSLSNHIAYLDKEIASLKKQIAAQITDDPDLTMKSSLLKSIPGIGAATIAAILAELHIFERCNQVGKVVAFLGLAPREFISGSSIKGKPRLSKIGHARLRKALYMPALVSIQCNPIIQNFYHRLREKGKNGKVIVCAIMRKLVHIIFGILKSGKPFDPNYTTHCA

SEQ ID NO: 157863 - protein, 413 aa, unidentified
MGKINNMKPKTNAPHEVRILPQIDKACGFDIHKDKIVLFISDKEGKNQLLIEKTTFTEDLLWIRDLLLKEEVKNCVMESTGVYWLSLFDVLSHSGMNVVVVNPQQVKQIPKRKTDRRDARWLCTLLLNGLVRPSFIASGVQRELRDLCRYRNKRIHEVNRIANWMVKELEKSNIKIRSVLSSITSKSGISMVRLLAAGEKDVAKLKSVCHKRIRDKGELLDKALQGTLSEHGCKMLQMHLEDYDYVQCRIELVNKQIEDLVNQHYSAVMEPLQSISGIASTAAQIIVSEIGDDMSRFPSAEHLTAWCGVAPGNNESADKKRNTGVKKGNKFLKTAMVGAAWAAVKMKNSYWRFLFEHLKKRMKAIKAIVVIARRLLKVVYKHIISKMQYAEKGWEQFAELQRRNGLRKRPVVI

SEQ ID NO: 157864 - protein, 323 aa, unidentified
MSSKATKKRRSFIGIDVSKQLLEVGVYQSDYHFQCPNDPKKYSPLITELISLRPARIVLEATGGLERPLLQALQTIGLPVVVINPRQVRNFAKALGLLAKTDRLDARVLAHFAAAVQPPVSPIKTQQETELDALMGRRNQLTEMLTAEKNRRGSAATKTTRHDIEEHIEWLEERLKELDEKLKQQLECSAVWQRKDQILQSVKGIGFVTSMSLLADCPELGQLNRHQMAKLAGVAPLNRDSGKQRGTRHIYGGRAQVRCKLYMATLAAIRSNPVIKSFYKRLVDKGKLKKVAIIACMRKLLTIINVMVRDNKLWNVKAQPVAA

SEQ ID NO: 157865 - protein, 408 aa, unidentified
MIFVGHDWAEDHHDIVVLDDAGERLASARLVEGVEGVTGFHSLVAERVAEPDEVVIGTETDRGLFVGALVAAGYQVFAVNPKAVDRYRDRHRMAGGKSDAADAKVLADLVRTDRHLHRRVAADSVVAEALKVLTRAHKDLIWQRQSQVNQLRSALREYYPGVLEAFGTDLAHPDALAVLVLAPTPEQGVGLSQARIASALRRAGRQRNVEVRATTIRAALGAVQLSAPTMVSDAYGAATRAAVAVLVALNEQVAAIEMELAQRFEQHPDAEIYRSLPGLGVVLGARALSEFGDDPNRYESAKARKNYAGTPPVTHQSGKLRLVTARRARNQRLADTCYRWAFCSLHASPGARAYYDTLRARGKGHHAAMWQLANRWVGILHGCLSSRTLYDEITAWAHHFAETKADAA

SEQ ID NO: 157866 - protein, 340 aa, unidentified
MNIKRIGLDLAKNVFQIHGVDHHEKVVLRKTLRRAHMMTFFSGLSPCLIGIEACGSSHYWARELTRMGHTVRIIPPKLVKPYLKGNKNDANDAAAICEAISRPGMRFVALKSEAQQTLQAEHRVRARIIRERTALCNEIRGLLSEFGLVLPVGINHVRKALPEILSQQEQWNDRFIRLLCELSEEMQMLDERISRHDRRLQQAARDDIRIKRLMEIEGFGPIVASALVAAVGDAKQFKNGREMSAFIGLVPRQHSSGGKERLGHISKRGDSYLRTLLIHGARAVLRFSAGKTDRRSLWLQSVAERRNNNIAVVALANKNIRIAWAILSRSEEYRGVENAA

SEQ ID NO: 157867 - protein, 365 aa, unidentified
MMRKEYYIGMDVHKDTVQMAVFEETGDEPIYERRLNNDPALLVKETARFSREGKTEVAYESGCLGYVLQRAMEKAGIPCYVLPANKVAKKRDGRIKTDKRDARLIGRELRSKNIRPIAVPDSTDEAARDLLRCREDTNQDLRRVKQRLLKFLLRHGHSYSAGNNWTVKHWEWMDKIEFAHEYERTVYEEYRSQIRSLEERLTRLEKQVTETAESPRYRTAVNRLRAFKGIDYIIALAVVCETGDFRRFADAKAFMSYLGFVPSEYSSGGKRRQGGITKEGNGHLRKLLIEGAWHYTKNARAGRRLERRRAGCPASVIDAADKALHRLHKKYVRLLFNGKHKNVAVTAVARELAGFIWAVQVSAAS

SEQ ID NO: 157868 - protein, 394 aa, unidentified
MGKLYVGIDISKDRSSAKGIGIKGEKLFEISFGMDSSGFAELLKAIEANSDGYGDVIAAMESTACYHINLYSFLSAKGIDTVVINPLLISNFAKLSLRKTKTDKKDAGTIAQFILAHKDSVKQLAVSQDLQDIRDMARERESLCHQISAAKVEIRRLLHTTFPELESMCNPFTKVMLHFIQRFPSARLVSMAKPNIIAKTLREKPCSCRIRFTPTELINIARKSVATVSPGKEIILAGKIETLVHLQKGRDELGKALTKYCESSIVEDLKIVTSIIGVGNNTATAFLAEIGAIDNYASHKNLIAFAGIDPTVYQSGKYEGASKISKRGNRHLRRVIWLMTMRVINHNPMFRKYFLKKRNEGQPVKKAIFATSHKLMRVIFAMLSKRSYFREECM

SEQ ID NO: 157869 - protein, 346 aa, unidentified
MKITTIGIDLAKEVIQVHGVDERGKVVVRKQLKRKDVAKYFANLEACLIGMEACGSAHHWARKLSDYGHTVKLMAPQFVKPYVKTNKNDVADAEAICEAVSRPNMRFVAVKNVEQQAILAVHRARQGFVKARTAQGNQIRGLLSEFGIVLPKRIAAITQGMPEILEDAENGLPGAMRRLLERLTENLKEMDRHVKDLEAQIRSWHNENEDSKKLEAIPGIGPITASAIVASVGDAREFKNGRQLAAWIGLVPKQNSSGGKQALLGISKRGDTYLRTLLIHGARAVARFAEKKAEPESWLRKLMARRNKNVAAVALANKNARIAWALLSKGGTFRLDYTPAAVAAAA

SEQ ID NO: 157870 - protein, 373 aa, unidentified
MPKYSTAFGMDVHLRSTTVCALDADTGEAVTRRFPGNPWGEIAGWMDGFPGPSLAAYESGYLGFAPQRELAGLGVECVVAAVSKIPRSAADSASKNDRNDAARMAKAILAHDISPVWVPSPEIEGIRDLAGAYDGATARLATAKQRLLAFLGKRGFVYGGTTPAGNPRKYWTYDFLRWLDKVRPEDDGGVRTLAALRNEVEAAAEARSDLLSEYRAAVDASPIAAEVAALQSIKGCAFALAAAFSAEVGDFTRFRSGRQVTAYFGLAPSQRSSGDSVRLGGISGAGNALVRKLAVEGSWCYAAARHQPKLMPRDTGVPLEIRMHGRKGSERLLRRREEMLARGMPAAKANAATAAELVRWLWALGMMCREGAE

SEQ ID NO: 157871 - protein, 362 aa, unidentified
MNCVGIDISKGKSTIAVMRPFGEVVVSPFEVCHTASELSELARLLKSLDGETRVVMESTGNYHAPVAWLLHGAGLYVSVVNAMLVHDYGNNSLRRGKTDKKDAVKLANYGLDHWLTLPRYVPEEDARLMLKTCYRQYQQYSKVQTMLKNNLISLLDTAFPDANRLFTSPPRADGSEKWVDFVAAFWHCECVCGLSKKAFTTKYQKWCRKHGYNFSEDKALDIYASACGRFGVMPKTNTAKLLVEQAISQLQATSAALAALKQEMQSLAASLPEYPVVMGMFGVGPTLGPQLIAEIGDVRRFHSKKALVAFAGIDAPPYQSGQIDVRSRSISKRGSASLRRTLFLVMGVLLQCAPMDEPVYQS

SEQ ID NO: 157872 - protein, 336 aa, unidentified
MEQEKTPAMASNEARQAIVGIDVAKAKVDVALKLPAGKWKTKVVSNDQKGFAELRAWLGKHGVSCAHVCMEATGIYWERLAEDLVDHGFAVSVVNPAQIKAFAGAMGVRSKTDAVDAKVIAEFCAKTEPRLWIAPSKPVRRLRALVGRRDALIDLRTQEANRLEVATDGEIRRSIESVIAHLEQQIREIEQQIKKDVDDDPTLHDQRQLLQSIPGIGDRTATMFLAHYGGVLRFDKAQQAVAFAGLDTRQHQSGTSVNGKPRMSKTGHSQIRRALYMPALTAMSRTPWGKAFAARLQAAGKPKKLILGALMRKIVAIAYGVLKSGLPFDPAIHAAA

SEQ ID NO: 157873 - protein, 350 aa, unidentified
MEKISIIGLDLAKHVFQVHAADERGQCVQRKQLKRRQVLAFFAKLAPCVVAMEACGTAHYWAREIKKLGHETRLIPPAYAKAYVKRGKNDAIDAEAICEAASRPAMRFVPVKTMENQAVATLHRSRDLSIKNRTMLVNALRSHLAEFGFIAAKGIGKLADLIKIVSEAPAEALPDMVRAALSGFLDTIALINANLAAIEKELMAWHKKNEKSKRLETAPGIGLMGATALSALVPDPLLFKNGRHFAAWIGMTPKLDGTGGKTRLGRISKAGDRYLRRLFVLGATSLIRSLANKSTPLALWVQRLLARRSKRAVTVALANKLARIAWAIMAKGEAYKPLTAAQLASPAVSA

SEQ ID NO: 157874 - protein, 345 aa, unidentified
MKQYAGIDVSLEYSSVCVVDADGRIVREAKILSEPDALIAWFGAHGVAMERIGLEAGPLSQWLHAGMVKAGLCVELIETRHVRAAFKTMPVKTDKKDARGIAQLMRLGWFRPVHCKSLAAQEVRALLTARKLIQGKLHDVEMSIRGILRGFGLKVGPTTRCTYAGRIRELIAGHSTLETIATALLKVRDALVQEFTGFERRLRAIARQDDKALRLMTTPGVGVLVALTFVAAVDAPERFRSSRAVGPHFGLTPRKYQSGETDHSGRISKIGDGSVRTALYEAAHVILTRPVKGSDLKGWALAVARRAGPKKARVALARKLAVVLHCMLRDGTSFIARKVDPALAA

SEQ ID NO: 157875 - protein, 445 aa, unidentified
MTNATPVAKSEPEWAAYVAIDWADQKHYWKLVPAGSQRQEQGELQNTPEAVETWAAGLQQRFGGRPIAVCLEQARGALIYMLTKYAHLVLFPVHPTTAARYRETFCTSGAKDDPNDTGFLLDLLLRHRERLRQLQPDTVETRLLQFLVEERRRTVNERTRQSNRLTNCLKQYFPQILLWFDGVDSLLVGDLLERWPSLDTLRSAHPGTLRQFFQKHNCRSAERNQERIDAIYAAVPATNDAAVLEAGTLTARGLVALLRTLREHIAELDRRIEQLVMAHPDGALFASLPGAGAVLVPRLIVALGTHRERYDSAFEVQCYSGIAPVKESSGKTSWVHFRRTCPTFLRQTFHEFALHSIGQSEWDKAYYQHLREDENKTHQAAVRSLAYKWIRIIFRCWKDNKPYDEEVYLQSLRRRGSLIVGALGLPTGVGWRTVAGFQKLSENNA

SEQ ID NO: 157876 - protein, 466 aa, unidentified
MPDRPRRGRKAEPRQPFAVIDPHAAGIDIGSAEHWVAVPPGRDPEPVRRFGTCTADLEAIADWLAACGVTSVAMESTGVYWVPLFELLETRGFQVRLVDARQTKAVPGRPKSDRLDCQWIQRLHSCGLLAAAFRPDDQVVVLRGYLRQRHMLAAFAAQHVQHMHKALELLNVKLPEVVSDVTGVTGMAIIQAILAGERDPATLAKLRDRRCQQDEAAIARALQGNWRAEHLFALRQAVDLHAFYLGRIAECDKAVEAHLLTFADRSGGVSPPPRPPGKRKYRRKHQAGLPSFDARTRLYRASGVDLTRIEGIEENTALTLLGEVGLDMSRWPSAKHFCSWLGLCPQHRISGGKVMSRGVRPGANRAAQALRLAARSLGHAKSAMGAYFRRMKARLGPAKATTAAAHKLARLVYSLLKHGDEYVARSVEEGEREYRERQLRGLQRKARALGFDLVKPEEVAAGQTPQ

SEQ ID NO: 157877 - protein, 410 aa, unidentified
MEVLHPHCAGLDVHKETVVACVRHMVDGTIKREVRTFDTTTTGLLALADWLASEGCTVVAMEATGVYWKPVWHVLSDGDFELVLANARQVKNVPGRKTDVNDATWLADLLAHGLIRASFVPDADTQVLRNLLRTRKQLVRERSSHVQRLQKTLEDANIKLDVVISDIIGMTGRAMLAALIAGETDPGKLAALAHPRIKAPPAQLREVLRGRIMKHHRFLLRLHLQQIDAIASAIAEIDREVNERIEPFRTTVELLTTIPGISELGARIIAAEIGNDMSRFATAAHLISWAGLCPKNDESAGKRRSTRMRKGAPWLKTTLIQCSWAAARKKGSYIQAQFHRIRSRRGAKKAIGAVAASILTAIYHMLKNGTCYQDLGPDHFDRRAKTTKTKHLVARLQNLGYAVQITPLAA

SEQ ID NO: 157878 - protein, 373 aa, unidentified
MGKYDYTGKKVYMGIDVHKKTYACVSICEGNVVKKDTMPAEPSVVIAYIKNHFSNAIIETAYEAGFSGFHLHRQLINAEIKNHVVHAGSIEVASRDRVKTDKRDAKKIATQLAAGRLSGIYVPSLEQEAKRSASRLRDSIVKLRHQVGQKIKSLLFTQGLISGEDDTILSKKWLIKKMTEVQQLGYPEGYYYTIKQYSEQWLRFTEDLKKIKNELLAMQSEKEQMLLSLYKSAPGVGDITALKLKDELGDMTQFSNEKKLFNYLGFTPVEYSSGENIRQGHMSRQGRAVLRHIFVESAWVAIKKDPTLMEVYQRIAKTRGAKRAIVGVARRLAGRLRACVQNGVFYEIKPLQEQEADVKHQVMRDPVAVPVDS

SEQ ID NO: 157879 - protein, 350 aa, unidentified
MKTITTEQHIKIIGIDLAKSSFQIHAVAKSGLKITNKKMTRNKLKSYMINLPACLVAMEACGSAHYWARLFRSYGHKVKLIAPQFVKPFVKSNKNDAVDAEAICEAVQRPNMRFVAIKEVTHQDIQSLHRMRSLAVSRRTAQVNQIRGLLLEYGIDIPRGRSHVREQLPCILENAENGLTYLFRELLSDLYEELVRLDERVGDYEKKIKKIAQADEQARRLLTIPGIGPVVSTALISAIGDINMFKNGRELAAWLGLVPRQSSTGGKPRLLGISKRGDSYLRALLIHGARSILQHAEKKTDRTNYWINKLAQRRNKNIAAVAMANKIARTAFALLKHKQDYQLTTVPFSA

SEQ ID NO: 157880 - protein, 335 aa, unidentified
METIYFLGIDVSKKKLDSALTIDGKNYQQDEMENTAEAIQIFFRGIKKMFGMRSSQMIVCMEHTGIYCLPLLDFLAKNKIKTCLESALQIKKSQGITRGKSDRIDALRIAQYAYKNREELHYWKPQRGVVQQLKALLVTRERLVKIRTQLEVPIRECEEFIIESIRKDMIKNCRRTLKALDLDILRVEKAIDELIKADPTLAEQVKLATSIPGIGRITATNMIIATGEFTRISDSKKFACYAGVAPFPHKSGTTIRGKTRVSNLANMNLKKLLHLAAMSAIQCSEELRTFYKRKQQEGKNKMSVINAVRNKLISRVFACIKAKRMYQKNYRHALA

SEQ ID NO: 157881 - protein, 436 aa, unidentified
MDIVHPRVAGIDVHKKVIWVAVRLPGEAPGERTVVTRSFTTFWRQLQKMAAWLAELGVTDAAMESTGVFWWPVYHALAQAGIEVCVCNAAHMRNVPGRKRDISDCRWIAELHEHGLLRPSFIPAAEVAALRQRTRYRKKLIEQRTSEGQRLSKVLEDAGIKIDSVASKLLIKSGRKMIRALIAGERNPGVLADLAEGVLRRKTDELQMACDGRFTQSHGQMCALHLDACDHLTAKIAELDQLVAEAAAPFQRLIARLVTIPGIGQRTAEVIVAETGGDMTRFTTSSRLAAWAGLAPGDNESAGKRKKAPTRKGNQHLKTAMTESAWAAARTRTRPGARFRRLARRFGRDNTSKAAVAVAHTLICIAWAVMSQDQDYTDAGEDYYEQRDQRNREHLIRHHQQALARLGYQVTLTGPGDGSPPPGTHTPPASAPGQAA

SEQ ID NO: 157882 - protein, 368 aa, unidentified
MMGWMAPLRHLGAKVLVGQNQSADKEPSMNEITTVGLDLAKNVFQVHGVDAEGTTVLRKQLRRAQVLAFFSRLPRCLVGMEACATAHYWARELRTLGHEVRLMPAQYVKAYVKRNKNDAADAEAICEAVARPTMRFVPAKTAEQQAAVLLHRGRERLVRQRTMLVNALRGHLAEFGVIAPQGLRNVGRLIAIIRDEKDARLPGLARQVLQVLAVQIEQLEAAIAALEKQLMGWHKSNPVSQRLATIPGIGPIIATAIAAMVAEPSGFRSGREFAAWLGLVPRQNSTGGKNRLGGISKRGNQYLRRLLINGASANLLRSKATNADPWVIGLRRRRPSLVVAVALANKTARIAWAVMHRQENYQRMATAA

SEQ ID NO: 157883 - protein, 421 aa, unidentified
MRGIRGKRIRAIKEGTLIVTIDIGMASNTGYCTTADGRDIKPFKFDNSREGFEKFWHMIVASKNRFRCNEAMVGYESTGPYAEPLVQYLMDKPVTIVQVNPLHTKRLKEVNDNSPLKTDDKDPRVIADVLRLGHALSVVVPEGDAAYLRRLNNARERHVGERTALLNQIQQLVFLIFPEFKTVFNDVTIKTAGHILKKYTTPERIRGLNKDELGEEIRKRSMGKFGMEQAELLINLARGTVGIKEGVAGIVLDIQHILVQLQAVNAFVEEIETEMAKTLERIPCSTRILSMKGLGVVTVAGLIGEVGDFSKFRTQSEIMKLAGLDLYEISSGKRKGQRRISKRGRSLLRKILYNAAVATIRKNGIMYTQYESLIGRGMKRTSALIVIAKKLLRIIHAMVRDDRDYIQNYQSPKRVVIQKAA

SEQ ID NO: 157884 - protein, 410 aa, unidentified
MKQLFVGIDVGSQNNAIYLMKPNGEKHSSFSVQNNQGGAKLLSEKIVSALESQRLERVVIGMEATSIYGDNLVYALREDGKLGRYPRKIHVLNPKQVSKFKEAYSDPPKNDDVDAFVIADKLRFGRINKEVYMDDYRYKALQTLTRARFYAVQGLTREKQRFANYLFLKFSGLAQDKNIPNTSATTLALVEYFETVDELARISLDELTAFLIKTGRGRFADPEATAKAIQAAAKGSYRLPRTVNDSVSQAMSVSIATMRALDNQIKSLDKAIEQQLEIIPNTLTSVPGIGKVYSAGMIAEIGDINRFHSHASVAKYAGLAWTQHQSSTFEAEDTRLIRSGNRFLRYYLLEAANSVRRCDSEFRRYYDLKYKEVKKHQHKRALALTARKLVRLVFRLLKDNRLYNPPEKRA

SEQ ID NO: 157885 - protein, 395 aa, unidentified
MYSLLVGIDVSKDFFVTAGIDSEGKGSFSRSYSMDSNGFDDFLKTITSHGEDLSKVIVAMESTGCYHINLFSFLASQGVRTVVVNPLLIANFAKLSLRKTKTDKKDAMTIARFLLDHHEEVSHLSLSQDHQDLRDLSREREPLCHLIAAAKVEIKRVLKVTFPEFQSIGNLYTGAMLRFLQQYPSARLARAAKSKAIVKALKQPYVGNKLTYSAEDILRAANTSIGTVSSAKEIILEGKIATLLHLQGRLDEMTKLLTDLCKATRIDDLKILRSIKGVGPKTAAPFLAEMGEVQNYSSHKKLIAFTGIDPSLHESGNYVGMSKLSKRGNRHLRRAVYLMTAAVVSKNPFFKAYFLRRKREGLPPQKALFATAHKLLRVIFAMLTQRTYFNPKEVI

SEQ ID NO: 157886 - protein, 358 aa, unidentified
MGKFIKVISTVSAIGLDVADVWSDWAGLDESGRMVRCERVKTTESELRSVFGAIEPATIAIEAGTHSVWISRVLSSIGHTVVVANARRVALIHRNKRKNNRIDAELLARLVRADKELLFPIQHREERGQADLAVLRSRDVTVRSRTKLINHVRGTCKTFGVKLPRCSAEVFVVRCSGLVPAALHSAVNDVLALIAAMTAKIKSYDLTIAAMFKRHPAAQLVGKITGVGPLTSVAYVLTIEDPHRIVRSRSAGAYFGLVPGSDDSGEKHQQRRITKEGDRFCRCLLVNAAQYILGPFGAKVDSDLRRHGEAIASRGGKNAKKRAVIAVARKLAVLMHHLWVHNQDYVPLFNAAQKSVAA

SEQ ID NO: 157887 - protein, 408 aa, unidentified
MNTLYVGIDVSSKSNVIYLMLPNGDKHSNFSVANSHEGSTQLVKRILSALTSHSLDTVLIGLEATSVYGDNLVYFLREDATLAPFNRKIHVLNPKQVKKFHDAYNDLPKNDYVDSFVIADCLCFGRINKEVYMGDYRYKALQNLTRARFFAVQNLVKEKQRFMNVLFKKYSTMTQEKVFSDTFSTTALAVYDEFESAEALANMDLHELTDFIIEKGKNRFPDPDAVAKAIQKAARSSYRLPKTVNDSVNQVLSISITSMKALESQIKEFDKAIKAQMELLPNVLISIPGIGPVYSAGIMAEIGDINRFNSQAALAKYAGLAWKQHQSGGFESEVTRLIPSGNRFLKYYLCEAAFSLVRCDKEYSDFYRLKYKEVNRCQHKRALALTARKFVRLVFRLLKDNRLYCPAK

SEQ ID NO: 157888 - protein, 313 aa, unidentified
MSQNNTNILYVGLDVAKLSLQLHLAGTFHLLANDAKGHVQLLKRLRGHLAAHVVCEATGGYEQAVVRALQSAGVPVSIVEAGRVRYFARAQGQRAKTDPIDAAVLSAYGTTFKPAATAPASPQQQQLAELAQRRRQLIHLLVSERNHAEHYINSFRVRQSRQLIKALEKQITQCDEAITALIAQDPDLARKAERLKAIPGVGPVVAATMLAEMPELGKLTTQTAAALAGVAPYNRDSGGQTGARRINGGRAAVRCALYMATLSAVRYDRILKEFYLRLRAAGKKPLVAMTACMRKLVILMNRLLKNYDFQLAS

SEQ ID NO: 157889 - protein, 341 aa, unidentified
MDIAVLGIDLGKNSCSVVGLDDSGKVVLRRRMQRKTIVNLAAKLPPCIIAMEACCGAHHLGRLLAAQGHILRLMSPEYVRPYVKAQKNDERDAEAIAEAATRPTMRFVSLKSEEQLDMQTLHRARDRAVCERTSLMNQLRAVLLERGIIVPQGRAKLRLQVTELLREPCGELSQRIRLLIEDMLMRWQALDQRIAAFDAEFAAEAKHNEAACRLTSIPGIGPLNATALVAAVGDARTFARGRDLAAWLGLVPRQATTGGKPRLLGITKRGSKYLRKMLIQGARAAMPSLSRGSTRLGQWLRSLLARAHSNRVVVALAAKMARIVWALLRHGTTFEQRAIAG

SEQ ID NO: 157890 - protein, 339 aa, unidentified
MHVTTVGLDLAKNIFQVHGITEDGTVAFNRSLRRTQLLAFFERLEPCLVGMEACGSSHYWARELSKLGHEVKLIAPIYVKPYVKRGKSDAADAEAICEAVTRPTMRFVEIKSPEQQAILSIHRARDLIVRQRTQTINMLRGLLAEFGVIFAQGVGHAVNFAKRVTEGHSPDLPQAARDVITDLSEQLLALHLRVNWYGRRMTAAAKSEPRIALLQTIPGIGPITASAIVATVGSGEQFQSGRDLSAWLGLTPINKSTGGKERLGRISKMGDRYIRRLMVVGMTSRIKQIKSAPERFDPWFADILQRKPAKLAAIAMANKTARIIWAVLTHNKPYEIRTA

SEQ ID NO: 157891 - protein, 377 aa, unidentified
MHSENIAAYVGLDVHKETLAVAIAAPERLGEVRYYGTINNEAQAVRRLFQKLQGLYGNILSCYEAGPCGFGLYHQLTAMNIKCQVIAPSRIPKSPTDRIKNDHRDAISLARLLRAGELTPVWIPDLTHEAMRDLIRARAAAKRDSRVARQRILSMLLRTDKHYAGKHWTGKHRTWLANQSFSQPSQQIAFQHYCQSLEQIEDRILQLDQEISRLLPEWSLCNLVCQLQALKDVGQLIAITLVAELGDFSRFSSPKQLMAFLGLVPGEYSSGNSIRPRGITKVGNSELRRLLYEAAWSYRTPAKVGAWLIYYRPDSVTQYSKDIAWKAQQRLCSRYRSLTAKGKKSQVAITAVARELTGFMWDIALAAQSSFSQQKQN

SEQ ID NO: 157892 - protein, 392 aa, unidentified
MDEQIGQVVIGVDPHKRSVTIEVMTADESIVGGGRFATDAEGYARLLDYARSWPQRVWAVEGCAGIGKHVADRLVADGEMVVDVPAKMSARVRVFATGQGRKTDATDAHSIALVGVRMAGLRPVLADEQAELLRMCVDRRASLGREHTRKVCQLHRLLLELIPGGAKRSLSAAQAKELLKTVRPTTTVGKVRKAHAAELVADLATIYARSKAADKELKALVKTTGTTLLDLHGIGPSGAARLLAEVGDVTRFPDRNHFASWNGTAPIDASSGDHTRHRLSRKGNRAINRVLHIMAVVQLRNATEGRVYYDLKKAAGKTSMEAMRCLKRRLSDLVYKALLDDLAEHATTGPGGHSGDDSDSSATGSQPAAGSSDKPLPGPATTKPRTTLPAAS

SEQ ID NO: 157893 - protein, 418 aa, unidentified
MLKIVFPICCGIDVHKKFVVATIGSTNKSGVTEYQTRQFSTFTENLLQLLEWLKAHSCVHVCMESTGKYWHPVFNILEEYCDVVVANPKYVKGIRGKKTDKKDSIWLCDLHKHGLVPSSFIPPLLIRQIRDLMRYRFKLINFKSSEKNRIQNSLTVSNIMISSVVSDTFGVSSMRIINHILENPDDKDFDVSSMLHASMKDKAETITKSINGNLTKPQADKMRVCLHHFESIEKHIADIELTVLGLAQPYLPQIEIILSLPSIKDVFTAIAIIGEIGSDMAVFISSKHLCSWAGLTPQNNESAGKKKSVRISRAGVYIKPLLVQCANAAIKSKKCPYFKNQYDQIKKRRGHKKAIIAIAHTLLNCIYHMLDKNEPFNYELYKIDSKPKQTYASQITEEMAIRFLQTLGYQIPDMRNTT

SEQ ID NO: 157894 - protein, 349 aa, unidentified
MSITMIGLDTAKSVFQVHGVDGAGQVVIRRKLHREELLAFFEKQGACTVAMEACGAAHHWGRALTDLGHTVRLIAPEAVRPFVKWGKKNDAADAAAICEAASRPGVTFVPIKSLEQQGTLAVHAARSLLVKQQTMLANAMRGLAAEFGLTVPKSMGKLGDLMTLVDVDEAMPEEARQVLGALFGQCRALKGSIGALEAKIVAHARRDDAARRLATVPGIGPITSSLIAATVADIGVFQSARHFAAWLGLVPRQHSTGGKTRLGRITKAGNREIRRLLVLGATSMVHRAAGWNSAAGAWTRGVLQRRPVRLVTVALANKMARIAWALMTRKEVYHAKGRPAVAATAPAAA

SEQ ID NO: 157895 - protein, 380 aa, unidentified
MRTVALDLGNRISFCEVAQGSVIKRTTVDALEGLLPLLGPRTPKARVAIEACREAWVIHAKLKEWGHEPVLVDTTRARKLGIGQHRRKNDRIDAETLARALEQGLIPPAHVLSSHRQQLRLQLSVRQVLVETRAKYVTVIRALARSRGKRLKKCAVEDFRARVEEAVLGEEVRHLIAPLVALLPSVEQSIAQAERKLEALCAREPAVALLQTAPGVGPVVAAAVVAVVDDPKRFRNAHQVESYVGLVPAENTSGKRRLGSITKQGNGYLRALLVQAAWTVLRNRQADPLKEWGQGILSRRGKGNAAVAVARRLLGVLWAMWKRNTVYDPEIVGRDSAAGIERQAQSARKRAQAIEKAGRKAARHQRWIEKVLRERNAVTM

SEQ ID NO: 157896 - protein, 313 aa, unidentified
MRNDKEGFKELLRWLKEQGVRPQDALIGLEFTGYYSDALEQFLTSKKLCYAMLPTTVVKHYQRGARDKNDKIDSAKIADYLFRFHDTECIKLRVLPSKAMQDLKALKSERKFYVRHRTDCENRQKVAKSRDEQKNLQKIIDLYDKEIERIDQKMADVVTSDEEIHLTYMRLMSIPGIGSVNAINTIANTQNFTAFETARQYAKYVGVAPSEHSSGTSVRWRGRPSPHADLQAKADLSMAAMRAVEFSFEMNVYYERKLGNRPDDKDVKRKALNAVKFKLIRQMFSVAKQHRSFKPLEQTQTQAEIHNTDKRVN

SEQ ID NO: 157897 - protein, 402 aa, unidentified
MKKDIAKAIDQQTAAALDATKNCSRYGAFVGLDVHKETIAVSVALPGRGEPEYRGEIANEPKALKKWLERLGAEFGGMLLQFCYEAGPCGYGLYRQLIAAGHECQVVAPSLIPKKAGERIKTDPRDALKLARLLRAGELTAVWVPDTEQEAMRDLTRARDDMKSQERKARQQLNAFVLRHGQHYPRGKTRWTAAHYNWLESIRFEQAWLQIVLQEYIDAVKAATQRVKDLTQQLMRALPGWSLAPVVDALVALRGIDKLAATVLLAELGDISRFDSPKQLMAYLGLVPSEHSSGGRRRQGAITLTGNGHARRMLVECAWSYRFPARQTMHLKRKAKDASEQAKSIAWRAQKRLCGRYRQLSQAGKNIKLVCVAIARELVGFIWDIVRQEMPRLTLQCSAVAD

SEQ ID NO: 157898 - protein, 387 aa, unidentified
MSCSTDHPDRDATATRPHDAAVLVSLELSRRAWLVTSLAPGSEKLSKHVLAAGDGHGLLAFLAELKAKAERQALGPVAIVTIQEAGLDGFWLHRLLENNGIASHVVEPASIAVPRRHRRAKTDAIDGEILIRVLAAWRRGEPRVCAMVRPPSPEEEDRRRLSRERDQLLQERIRHTNRIRGLLFGQGIGDFDPLRKDRRERLDALVTGDGRPLPATLKAELRREITRLELVITQLAEVEQARDRLVEVLADGAAQPAAALLGLKGIGPAIAVRLWLEGLFRPFENRRQVAAYAGLAPSPWQSGGMDREQGIAKSGNPRLRHAMVELAWLWLRHQPDSALSVWFRNRVGAARGRVRRVAIVALARKLLVALWRYAVHGVLPEGAVLKA

SEQ ID NO: 157899 - protein, 327 aa, unidentified
MRQPVLGIDISKATFDVVLLIGEKKLHRQFANNSEGFNQLDSWLHKNGANKVHACMEATGQYGEWLAEYLYQNGHDISVVNPARIKAYAGSKMRRNKTDKTDAELIAEYCLKENPSLWSPPEADFRDLQAMERHLEDLQAMLLQEQNRLESGVKTFWVVEELLNHIKYLKERISATKGAMQDLIKTNAKLKREHDLLVSIPGIGELTAAKILGEIRDIHQFESARQLAAYAGITPRQFFSGTSVHKKSRITKTGNSNIRRILYMSAISAKKYNPIVAVFCARLLQNGKTPMQAVCAAIHKLLHLIFGILKSGRPFDPNYLQVSTITP

SEQ ID NO: 157900 - protein, 341 aa, unidentified
MTEIKRIAIDTSKSVFTLHGVDDAGRAVLRRNLRRGELLRFFERLPPVEVALEACGGSHHWGRALSAFGHQVRLIPPQYVKPFVKRSKNDRNDAEAIAVAAAQPSIGSVPIKSVEQQAAAMLLSVRELLVRQRTQLVNAMRGHAAEMGVVAPLGEEGFKELQAAIATADDAVVPAAAKQAIALLGREVERIEIRLRAIEATLMQQHKTNPLSRRLAAIPGIGPIGALNLALRVDAGQFASARHFAAWLGLVPRECSTAGKQRLGGISRAGDERLRQLLVLGATAVIQHARPGRPATSQWLLNLLSRKPRKLAAVALANKMARIVWAMMTSGEAYRPRPVVA

SEQ ID NO: 157901 - protein, 354 aa, unidentified
MKHNRRRRPGKPRVSPSVLERINPNVAGIDCGSAEHFVAVPPDRDPNPVRSFPTFTSDLQRLADWLSTCRVTSVAMEATGVYWIPIYEILEARGFEVHLVNARHVKNVPGRKSDVSDCEWLRELHSVGLLRGSFRPTDAIVALRAYLRHRQTLIESAGAHIQRMQKALVQMNLQLPLVVSDITGVTGLRILRDIIAGRRDPSQLAEHRDHRCRASKAEMVAALTGNYRPEHVFVLQQNLELFDVCQTQLAACDSAIEAHVQTLTASMSAPATPLPPPRVTKKPRDNEPRFEIRTPLHQLTGGVDLTQIDGITSYTALKLLSEIGTDMGRWPSEKHFTSWLTLAPKNKISGGRLL

SEQ ID NO: 157902 - protein, 344 aa, unidentified
MDHFVGLDVSVKETSVCIVDDTGRIVKEVKAASEPQALLKVLGNPAYRFKRIGLEAGPLSQWLFSGLAEAGLPVVCVETRHMQAVLKAQINKTDRNDARGIAQMMRAGLYRPVHVKTLRSQKLRMLLTHRKLLQSKAIAIENDLRGTLRNFGLKVGMVGKVRFEARIKELVESLPDLAELVEPLLIVRRALREQIVILHRRLLAIVRDDEVCRRLMTTPGVGPVVALTYRATVDVPARFRKSKSVGAVFGLTCARYQSGEIDWSGRISRCGDEMMRVMLYEAAQSMMRSKKWSWLKAWAMQIARRRGMKKAIVALARRVAVIMHRIWVDGTEFRWTREQAAAAA

SEQ ID NO: 157903 - protein, 303 aa, unidentified
MQYIAFDAHKHYTWALVQDKKGKVMAEQRIDHIRGALAGFLETFEPGSPVAVETIGNWYWITDEIEAAGMVPQLVNARKAKLMSGSINKTDRLDARGINRLQRSGTLPTVWIPPRELRDARELPRTRMVLVRQRTQLKNRIHANLAKYGLKAGGVTDLFGVQGRKILDDLLNEFPVQTRYATEILIDSLDHLQGELKDIEVRMSELFGDLNSLELIETLPGVALILGVVILTEVGDIQRFPSASHLASYAGKTPRIHASGGHIRYGRTRPDVNHYLKWAYAEAANSVMMHRRKHPERHVSRLY

SEQ ID NO: 157904 - protein, 422 aa, unidentified
MTPDEKLAFARSFPVQIGVDTGKRFHVLVARGPDGRRTKPHKVLVSRAGFDATLIQLRAWFPTLMPAQMLVGLEFAGHHGFTFAHFLAQAGFPVVNVLPLHTKRLKEVEDNSPLKTDAKDAALICKLVGDGTFVRFPFLTPPYAELRVLTTQRHRLTVEAVRFKNRLQGLLDLAWPEFFSVMGILRKATPRAVLARWPLPQDLLAASPRTVARAIHTASRGHISPERIRALRQSAIDTVALPSAAPERRLEIQHLLARWQLVETQVAELDARIAALVESCPEARLLTTIPEVSATCAATLIAEMGTPADYQHPRQVLKLAGMNLIEKSSATIRGRKRQSKRGRPMLRRQLFLLAGRWCQARGRYRQDYLALLARNGGLKTKAVCAIARKIVPLLLRVMQSGQPFDDARWQARRHARPAVVSA

SEQ ID NO: 157905 - protein, 452 aa, unidentified
MAKSTPHTRKKTKSATRVRPELRPDAAGIDLGATVHYVAVPPDRDKQPVRSFGTQTTDLHAVADWLIACKITTVAMEATGVYWVPLFQILEDRGLEVCLVNARHVKNVPGRKTDVQDCQWLQYLHSVGLLHASFRPPAAVCAVRALVRHRDSLVRAGSEHLLRVQKSLDQMNVQVHRAVTDITGETGQAILAAIIQGERNPEVLAQHRDHRCKKTVAEIAAALRGDWRPEHLFTLRQSFEAWQYHQKLIAECEAELRKQMDGLADQTKRAAPPKARPDKRCDEKTRQHLFEKFGVDLTAVDAINTQTAYMFLSEVGPDVGKFESPEHFASWLGLCPDNRKTGGRAIGVSTRPVANRLATALRMAAQSLYRVESPLGEWFRRMKAKLGAPAATTAAAHKLARVLYAMIKSRKPFDPARLGNPTLRRIRKENALRRAAKELGFDLQPIQAVAVS

SEQ ID NO: 157906 - protein, 325 aa, unidentified
MKEVITTIGLDLGKKVFQVHGVDAAGRVRVRRSLRRAQMLGWFGKQQACLVGMEACATAHYWGRELSRLGHEVRLIAPAYAKAYVRRNKNDAADAAAICEAVSRPGMRFVAIKTAAQQAASGLHRMRDLLRKQRTMLINQLRGLMAEFGIVVAGGPQHVKDLLAVLADPADARVPELLRGPLLGLAQVLGDVERRVATLERQIVAWGRGNATYRHLITVPGYGPILAGAFAAFVVEPSTFRSGRDFSASLGLVPRQEGTGGKLRLGSISKRGNGYLRRLLVNGAMSILNTAEPARTRGSPGCSPASRASSWRWPWPTSWHGSAGP

SEQ ID NO: 157907 - protein, 307 aa, unidentified
MSNDDAGFKKIGSWVAKVGKDFDTFLFCMEYTGLYNQNFRLWLESKEYIYGMVEPRKMHRFEPDLDDDQRSLDRIKTDELDAFRIAIYCEQNHKKILRNPSKLPSPVYFKLKRLLAERKQNTKQSTLYKQQLHDICAYDTDLSVERKKLLLKNMQENQKAIDKEIDSYMNEDTSIRKNYNLLTSIPGIGRIIALETIVLTENFTAISNPRKYACYIGIAPFKKESGTSVRKKTGVSKKGFSEAKADLSIAVLSAIRNNPSIRDYWIRKRKEKCGGIVLNAVKFKLVLRMFAVIKRGTPYVETDAYKN

SEQ ID NO: 157908 - protein, 421 aa, unidentified
MKNSAARKLRQVPAGYLVVGIDPHKRKHAAVAITGDLQVQAKFKFANSRAGFEQALENARIEMVKTSCRGVIFAIETGGHFWRNFAYYLEGRGIPFRLISPLTLKRMRDGRDLNRRKNDFRDAEMAAGVFLTGDFTESKLLQGVYADLRSTHNAYYRLVKERTRIINLLKGLLDGLFPEFTQVFKNPCGRTALVVLSTCPSPSAIASMSEDAFVQAIRIGRQGRLMRGKLRVLHQAAQTSIGIKPGSDAVAMEVSLLVGRYQLIEQQVDRLVKSLIGLVDRTEEGKYLLSIPGVNYLSTAALLAELGPLKSYSNAKQLTKMAGANPIQSESAGKRLGKTPMSKKGRPRLRYSAWSAVIPLFRHNPDFRAWAKRLRERPAYANPLNGKEVVGAALNRLLRLVYVLAKKQEFYRSPQVALVAN

SEQ ID NO: 157909 - protein, 469 aa, unidentified
MAIRIGIDVACRAVHRAACADATGSLLWKNVRFRTSAEDLEALWQRIPAGEDDITVVMEPTRNAWVPLAAWFRRHGAKVVMVPPEQSADLRDYYNKHAKTDRLDAELLARLPGLHPDGLHIEQGLGCAEPLRRAVKIRSTLVRRRVTCTQRLDALLEILGPDWTCALGTVMTATVLLFLTRWPDPQQVLRLGHKRLTDWLARHSRGIWGAQKAEAILNAAAATLRLWGTDGMDFAALAADIALEAQLARDLDRQIKAIDKRIATYYDQADPEHIALSAPGVGQVLAAQIVGRLGDPQRFTNLAAVRSYSGLVPRQNSSGVASAAGGPTKQGDACLREAIFLAADHARRSDPTLAQRYHRLMVENGKHHTSAICSIGAVLLTRIAACLRKGESYVLRDVDGMPITVQEGRATIKERYSVPEAVRKARRTVHRSDSQQPIDVMMGGRGSSTKKGVARRSKVSTTPQPACIG

SEQ ID NO: 157910 - protein, 370 aa, unidentified
MLDTTTFIGLDVHARSIKAVSLDVMTGEVRCATFGYDAGAVAGWVRSVDPRARCVYESGVTGFDLQKRLSGLGVDCVVGAVSKMIKPSADRRRKNDRNDAEFLARMLSVGNVVEVWVPDDECEAARDLTRALEDARDDLSRSKQRLSKFLLRHGLAFDERTPTGRRKGNWTRAHWSWIESIRFAEGADNDVLAYYVDAVRRAAEEKARLEGLVEDEARKPRWRRRVDSLRCLKGVDTATAADLVFEAGEFSRFRNARSFAAWVGLTPSEHSGGESDRRGAITKAGNKHLRKALVEAAWHYLTCSGRPKDLAKGQAPDRVARRHAAKGVRRLVERREALLARGVHNNKANVATARELACWVWAVGLMAEEA

SEQ ID NO: 157911 - protein, 412 aa, unidentified
MELTPIYKRVIGLDVHQAKISACAVAEQADGKVTVESREFGGFKRDRRALAEWAKSFGPEVVVMESTGIYWKSPYAALESAGIAAWVVNARHVKTVPGRKTDVADAQWLATLARAGLLRASFIPQADIRYLRLISRQRQKLGGMLASEKNRLHKLLADAGIRLNVLVSDIHGQAGRAMVKALIAGKSMHEVLDLAGRLRASRAELFEALQPEELSGAHLFVLTEIMAHIEELEARMGRFEQALLAGLSAWRPQLVLLQTIPGIDIMGAAMLLVEISADMHSFGSAERLASWVGICPGNNESAGKRKSGKTRKGNAWVRRLLCEFAQAAARSRCALKDKFAALSIRKGHKKSIVALAHKMLRIVFAVLKSNMPYRDRVVDYEALSVQRNAPRWMKMLIKHGFIQAGASPVAAA

SEQ ID NO: 157912 - protein, 340 aa, unidentified
MALCIGLDAHAKTCVYVVKDDAGTTVDRGTLPSTPADLSLLAERYPGAEVVVEASSVTEWIVDRLTDLGMAVVPAHPVNIRRVLGKKNDEVDAGFLVDAHRLGCLPRSYVPPKPIRALRQLARRCAFLTKERTRFKNRVHAILKRRGIRFLDPDTEDDVPDVFARKHRDRLLAVDDPEIPVLLELIDAVTGKREALDEELLAVSQGTPDVRWLRTIPGFGPLVAVALYAEAGDLSRFRSADAFAAYLGLVPTEAQSGETRVRGHITRRGPGHVRWLLNQAAWQHARLCPSSSVTKDYRRLLRRAGRKRAITAASRRLARVGYCLLRERRPFTLNDHGRAS

SEQ ID NO: 157913 - protein, 421 aa, unidentified
MLVSTERDEPVIDRVAALDLGKAELVCCVRIPAPEGAGRRLQEVTRHRTTTPSLIGLADRLRTFGVRRVVMEATSDYWRCAFYLLEAAGFDPWLVNARDVKHLPGRPKTDRLDAVWLAKLAERGMLRPSFVPPEPIRRLRDLTRYRTDLVGERTAEKQRVEKLLEDAQIKLSVVASDSFGVSGRAILAALVAGERRPARLADLARGRLRGKRAELTEALTGRFTDHHAFLLARMLRRIDELDGDIAELDQRIAEEIRPFAALLSRLTEIPGVATTSASAILAEVGADMSRFPTPGHLASWARFAPGVAESAGKKKGRSSTGHGDRYLARALGEAAVCAARTNTFLGERYRRIARRRGARAVVAVGRSILVAVWHLLNDPATPFVDLGPTWHIQHTDTARRRRNHVAQLEALGYKVTLEPAA

SEQ ID NO: 157914 - protein, 411 aa, unidentified
MDPIVERACGLDVHQRTVVACILRGHPTQRPRQEVRTFGTTTPELRALRAWLAECGVTHVGMESTGVYWRPVYAVLEGGFQLLVGNAQHIKAVPGRKTDVKDSEWLAQLVRHGLIRPSVVLPRPLRALRDLVRARRTLIESRTTERNRLLKLLETANVKLASVVADVFGVSGLRMLRALAAGEANPAALADEARGRLRGKRPALQAALTGCLEPHHRVLLTLHLERLEQLATQVARLTAVIDEHLAPYAAAHARLQQIPGVGPEVAAVLLAELGDDMTVFGDVHHLAAWVGICPGNHESAGKHRSARIRKGNIALTTALVEAAHAAARTRGTYLREKFHRLRVRRGYKRAIVAVGHKILIAAYHLLAGAPTYRDLGPDYLDARHLRHTVRHLTRRLERLGFTVVLHPLPAT

SEQ ID NO: 157915 - protein, 348 aa, unidentified
MVLIGSDFHPSWQQVSWLNQETGETGDVQLVHEPGAVEKFYRQFPAGSQIGMEATGNCQWFVERMARLGHEVLVGDAAKIRASDARQQKHDKRDARLLVQLLVENRFPQIWVPSREQKDLRQLLIHRYKLVRIRAQVKNGLQHLAMNQGVLKKHKLWSVAGQKVLRELPLASWASRRREDLLKMMSELDAKVDLLDQAVSEAAEKNEKARLLMTQPGVGPITSLAFVLTMGDVSRFPRGKQVASYLGLIPREYSSGGHQRLGSISKQGNSFLRMLLVEAAQGAVRCDPEFRNEYMHRCHSKPKGVAKVAAARKLAIRLYWMLRTNTGYPEIVRIGSSSRVALVVRHGG

SEQ ID NO: 157916 - protein, 373 aa, unidentified
MNHTTKFVGLDVSKESIAVAVADGTQAPPRYLGGIPNTPEAVRKLIKWLSKPEELLACYEAGPTGYGLYRQLSQLGVPCVVVAPSLTPVRPGDHVKTDRRDALRLAQLLRAGELTPVWVPGKEDEALRDLVRARESAKRDLRRARQEISSFLLRHGIEAPKGTRRWSKTFLRWLDTVSFAQRATQVAFQEYLRAAHEAAGRVERLEAEIHAVATESDRAPVIQALQALKGVREITAVTVVAEVGEFSWFGSPAQLMAYSGTVPRESSSGARVHRTGITKTGNAHLRFVLGEAAWAYRYKPAVKAPLRARQRGLDPETTAIALKAQERLHRKYWRLISRGKPSGVAATAVARELLGFMWAIACPVEAQRQKVAA

SEQ ID NO: 157917 - protein, 320 aa, unidentified
MEASLGIDIAKATFAVALLTADGRVRHKSCANTPAGFRDLATWLQRQHVTTVHACLEATGTYGDALATWLHDAGHVVSVVNPAIMHAYARTQLTRSKTDRLDAELIARFTATQPPPAWTPPAPEIRQLQALVRRLDALQGMRTQELNRLEAGVAVAEVRASIEAVLAQLDAQIAHVKQLIRDHLDRHPRLRAQRALLVTIPGIGETTAAVLIAELFDKPYTRARQAAAFAGLVPRIVESGTLRGRSRLSKIGPGRLRKALYLPAVAALRCNPTIRAVRARLQAAGKPPMVIIGAAMRKLIHLAFGVLKSGKAYQSTYAHS

SEQ ID NO: 157918 - protein, 410 aa, unidentified
MDTIYRCCAGLDVHQETVAVCVRLMDEKGQTSEQVRVFGTTTAQLLALYDWLSACQVTQVAMESTGVYWKPVWNILESGFELLLANARDMKNVPGRKTDVKDCQWIAQLLQHGLLKASFVPRSQQREWRDLTRQRVQLIAQATQVANRVQKVLEDANIKLSSVASDVMGKSGREMIQAMIDGQLDAKVLASYARGRLKRKAEPLRQALEGHVTEHHRFLLKLLMDQLQQLEALLKRIEQRIEQVMLPFARQIELLDTIPGVDQRVAQTILAEVGPEMSQFPSAQHLASWAGMCPGSYESAGKRKKATANKANRWLRRALVQAGWAASHTKNTYLSAQFHRLVGRRGKKRALVAVGHSILVSTYHMLKTDSAYKDLGVNHYQQLQPARLTRHLVKRLEALGHRVILERAAA

SEQ ID NO: 157919 - protein, 349 aa, unidentified
MLKAQKGEPAVMYCGLDMGKKSSHFCLVDEKRKVLEEDKVRNTEADLRKAFGKRPPMRICIEASTKSFWLADRLRELGHTVVVVDPGKTKAIGAGMIKNDKLDARVLATLCQADLMAAVDQPAESERLARMMVVARDGMVRSRVSLMVMMRSLLDSEGIELRHATAEGFPAVVKELLPELPPAMVAALEPLVKGIEDLSVQVARCDKALEEAARDNDTIQLLMTAPGVGVIVASCFVNAIRDPKRFETSRDVGAYLGLVPKLYQSGTVNRKGGITKHGNRQARWALSMAANNILACTKKKSALREWGIKLSKKRGRKKAVVAMARKLAGILWAMWKNNTSFEARLPKAA

SEQ ID NO: 157920 - protein, 404 aa, unidentified
MQEGRFAGVDWASEEHAACVVDENGRILEGRRYGHDERGITALCERLLKLGVTLVAVERPDGLLIDRLLDAGLAVIAVHPNQVCAMRPRFSAAGGKSDDFDSFVLAELARTDSHRFRVLVPDSDQTKALRAMTRAREDLVAARVALANELRAQLQCFWPGAAKIFAQIDSPIALAFLARYPGPIDARGLGEQRLAGFLARHGYSGRRTPRELLARLRNAAEGRAGEIESHARRQVVLGLLAALTPLVAQIRELTRQISAALDEHPDAATFCSLFKDPNSVVTAATMLAEIGDSRERYPTYRALAADGGQAPVAIESGKSKRARFRWACDHRLRDAIATMADASRHHNPWAADIYQRARARGATHPHAIRVLGRAWCQVIWRLWQDHSAYDPAQHAARRQLSAAT

SEQ ID NO: 157921 - protein, 369 aa, unidentified
MKRIVKTIGLDVHKNSISIGIADDGRDGEVRYYGRIDNNMDQLNKVIRKLISKGAELRFVYEAGPCGYAIYRYLTKNAMDCVVIAPSKIPQQSGNRIKNDRRDSLSLARLHRAGELTPVYVPTEEDEALRDLVRGREAATCAVRTAKQQLGAFLLRHDIIYTGKTKWTKAHFNWLADIALTHPAQQIVFQEYIDTVTNCCNRVQRLTEQVRLQSRQSRQHELIEALQSMRGISLIVAATIAAELGDLTRFKNPGKLMAFLGLIPSEHSSGERVSKGSITKTGNGHVRKALVAAAHAYRFPARKSKAICKRQEGLPEGVIEISWKAQCRLCTRYQYLTSKGKNVNVTKTAIAREIAGFSWAIAQELSKAA

SEQ ID NO: 157922 - protein, 316 aa, unidentified
MAENPYIVGGVVHHARLRRDTHKDLHVAAVVDHFDRLLGVESFPTTRQGYRQLLAWMRSFGDLRRIGIECSGSYGAGLLRFMQEAGVTVLDVIAPDRLDRRLRGKNDDFDAESAAHAAYAERRTVTPRSRDGMVESLRVLRVCRKTAIQARRIALQMIQTTIVCAPDKLRDPLRKMTRMQLIRTLAAWRPDLSAYREVDVAYRISLKFLARRYLELHDEIADLDKMIDAIVKDRTPELLERPCVGMNSAAQLLLTAGDNPGRLKSEASFAALCGVSPVPASSGKTTRHRLNRGGDRAANSALHIIAIGRLRTDART

SEQ ID NO: 157923 - protein, 366 aa, unidentified
MRKVMAGMDLHGNNVMVGIVDDQGARLQHRRLACELPEIIEFLDPYKSELESIAVESTFNWYWLVDGLRAAGFPVVLANPAKIDQYSGIKHADDKNDAYFLAELQRLKILPTGYVYDPELRPVRDLFRRRMSLMRQRTTLFLSAKSLHQRTTGRGLELRRLKAMEPEEAAALYTHPANQLIAQIQKEHIDSLDQSIRQIEKAVLKVALQQPYYQRLQTIPGVGIILGLTISMEVGNIDRFAGPGQFASYCRTVDAKRISNGKTKGDNNQKCGNKYLAWAFVEAAHGARRFDATCRRWYDRKAGKKCTTVATKALACKLAKAAWYVMAKGTEYQAGKIFPGLTEPKAEEISGEQASASKGVGPNPED

SEQ ID NO: 157924 - protein, 355 aa, unidentified
MSSEKYIGLDVHQATISVAVLDSTGKLVMESILETKAATILEFFAGLRGTLSVTFEEGTWAAWLYDVLKPHVAKLVVCNPRKNALLKDGNKSDRIDAHKLAELLYLNKLSSVYHGETGVRMLRELARSYLTIVKDLTRVMCRLKAVYRSWAIPCAGRDVYYTRHRDEWLGKINEAGVRRRAERLYQQLDMLQYLRQQARRELLAESRKHAITVKLRQIPSLGPIRSALAVALIQTPHRFRTKRQLWAYSGLALETRTSAEYCYVKGGLRRSKKQISIRGLNQHHNHDLKGWFKGAATRASVLPGPFQDFYQRSLAKGIKPTMARLTLARKIAAITLTLWKKGENFDADKLKSQAA

SEQ ID NO: 157925 - protein, 387 aa, unidentified
MPQPNDLSRSLVALDQNSTIIAVVELSQSSWLVGGMLPGIERQPCKKLEPSPERLLAVLHRWRDEAVKADRIITRIALAFEAGRDGFWLARWLAARGVEAHVIHASSVAVSREHRRAKTDRLDTELLKRAFLGWLRGEPGHCSMARVPTIAEEDAKRPNRERDCLVGERTRIVNRIKSTLARLGIRNFKPTLRKAAERLATVHTPEGMPLPPNTLAELQRDMARLGFVVSQIREIEEARQKRLEQQHETGSHAMVRRLARIVGVGVETADMLVHELLSRAMRDRRAVARYAGLTGSPDESGAQRREQGLARAGNARVRRGMIQLAWRFLLFQKESALALWYRARTADSRSGTRKTMIVALARKLIIALWRFVTTGEPLEGVVLRPAS

SEQ ID NO: 157926 - protein, 334 aa, unidentified
MIAVGVDTHKDCHVAAALDRLGELRGELTIDANERGYAELAAWARRFGDDVAVGIEGAGSWGAGLCEYLQGEGVVVFEVERPRRRERRVGKSDRLDALAAAKRVLAGEGLSTPRARGVRGAVQALLVAHRSCVGERTRLLNQLQALHTTAPLALRERIGEGNGKQLERRIAAMHAGACGPVEERVVFAVLRDLARRSRALGAETRRYKRELAAMIGVLDPTLLAEPGVGPISAAKLIACDPARFKHEAAFARCNGTAPLPASSGKTVRHRLSRGGDRQVNNAIHTIALSRSVHHAESRAYLARRVSEGKTEREAMRALKRHLSRRLYKRLTQCP

SEQ ID NO: 157927 - protein, 429 aa, unidentified
MPYRIAGIDVHKKMLAVVVSDVEIDSEYQFERKKFGSNPKQLRSLAAWLVEQATEEVVMESTAQYWKPVWEALERYWKPTCEKREGARRKSGTLHLAQALSNRGRRGRKRDFPDAERLVKRLVAQELTLSFVPDTEQRLWRTVTRKKYQLRCDRIRLQNQLESLLEEAHIKLTSFVSDLLGLSAQRMLKAISEGETDPAVLAALADKHLRATPEQLCDALGACTQLNPVYRRLLKLGLEELRLIDDQIGRLDREMASLLGEHQDAVQRLAEVPGLGVDSAQQIIAEVGPTAATFPSAKCLSSWVGACPGDDETAGVNYSHRSPKGNRQMRRILNQSANAAARTKGSIFEIVYRRSVPRLGHNQAIGAIAHRHCRLIWLILHRGVRYEERGPAVTRRSKQLRTWRMIRQLRSLGYHIAPPNPQPSQEQAR

SEQ ID NO: 157928 - protein, 343 aa, unidentified
MQIRSVGIDLGKTTFHLVALGDNGKVLLKKKFTQKQLIAFTANMQTCLIGMEACSGSHFLGRALREQGHDVKLIPAQFVKPFVKSNKNDFIDAEAIAEAVDRENMRFVPIKTDDQLDLQAIHRVRDRLMARRTSLINQIRAFLLERGIVFAKSPIRLKEALPEVLENANENLTPRMRNLVAMLWSEWKDLELQIVQMNDEVERIASSDAACRRLRQIPGIGPLVATAIVASIGNGAAFRKGREFAAWMGLLPKQHSTGGKARLYGISKRGNSYLRKILIHGARAVVLRSKRDRIAMGAWMTSLETRAPRNVLIVATAHKLARIAWAVLSTGQDYRAVPEALTV

SEQ ID NO: 157929 - protein, 352 aa, unidentified
MIQTQTKTRRKLWIGIDFHKKTWKVHFRSDLFSGNPFSMEPNPENLLKKVQKEFPDFKIHVVYECGCFGFWAHRAFRSFGWQSVVVNPSDIPRRAKHNFQKTDTIDARNLSEQLKAGALRSVSIPEIQREQFRGHFRRRNDLVKSSRVIKSRIKSILLYYGTKIPEHMDNANWSKEFKQWLLDLKWEFETGQCMMQSRLRELEFNHKEILQVSNEIRKYCRINHKEDYDLLQSVPGVGPLTAICFLVEVGDIKRFKNFKQLASMVGLVPTIYQSADTLQTTGLTPRCLRLMRSYIVEASWQAVRIDPVMQEYYRKHVGKKPNDIIIKVARKLLSRMCGVLRTRQPYEIGLVQ

SEQ ID NO: 157930 - protein, 317 aa, unidentified
MSKDITVCAGIDTGKHKLDIAIDGSAERLQVDNNSEGRRSLSSWLRQHQVERIGLEASGGYEQAVVSSLRADGFVVIVFQPVQVRAYAKFVLQHAKNDAIDAILIARCTASATDIREPPDARLALLAQQLTMIEQLTQDVGQLKTRREASREQRIREFWKQEINRLKVLLNSELKQLVAVIREHRDLADRLDLIASVDGVGLRTAVAILVRMPEIGRVTREQAAAIAGLAPYDDDSGLRRGSRHIKGGRQRLRQSLYAAALPAVFYWNPQLKTFYKRLLSAGKSHRLALVACARKLLIFVNTVVARGTPWTPSAATT

SEQ ID NO: 157931 - protein, 412 aa, unidentified
MLKIVYPICCGIDVHKSFVVACVASTSSQGVTTYKSHRFSTFTKGLRELLQWLLQNDCRDVCMESTGKYWIPIYNILEPTCKIVLAHPKYVKSIRGKKTDKKDAQWIADIFKHDLVSGSFIPPSDIRQLRDLVRYRFKLTNYTTGEKNRAQNCLTVSNLKLDDVFSDVFGKTASAITDRLLDSGASFDVSPFLTKGIKASVEEIQLAVDGVMCPEQAEKLRIIRSHMDALNLAKLNLESLILSVAEKYLPQLNLVLTVPGIQSFSAIAIIGEIGVDMSVFPTSKQLCSWAGLTPQNNESAGKKKTTRINRAGAYIKPLLVQCANNAIRSKANPEVRNRYLALKKRRGHKKAIIAISRMLLTAIYNILKKNEPYNPSLYRDSDRHPVNREVSVDEAVYILQRQGYLISAPVTT

SEQ ID NO: 157932 - protein, 353 aa, unidentified
MLIIGCDFHPGFQQIAIFDNQTGAYEERRLSHRAEAEQFYGSLAGQEVRVGMEACGHYPWFERLLAELGFELWLGDAAKIQASVVRQQKTDRRDAEHLQMLMREDRFPRIWVPSLEERDVRQLLVHRHKQVQARTRTKNQLHALAMSQGVQKKRKLWTAAGRAELESLELLPYATQRRRQLLHRLDALEAEIAGLNRQVEEEVKGRPAAVKLMTHPGVGPVTALAMVLTLGPAERFRDGRKVGSYFGLIPSEYSSGGRQRLGHISKQGSSFVRFLLVEAGQSAVRKDAELGRFYRRLGARKHRALAKVAVARKLAVRLYLMLREDWTYAQLCRAVVQASPSHSVAASSNRPLE

SEQ ID NO: 157933 - protein, 309 aa, unidentified
MKQSVVYIGIDVAKAHLDVAWAGTFRRLPNERSGHAVLVRWIKQSATPVQLICEASGGYEQGLLESLEKSEVKVTLVQAVRVRQYARAAGILAKTDQMDAKVLAAFGSAMQPPPTPPLCAEQKRLRQYEAQRRHLSRVLVAEQNRLAQLSCAELRTLSRGLISKIKKQIETIDTRIGDLIAQDQTLREKAQKLTAIDGVGVRTAALLLAQMPELGQLNRRQAAALAGLAPFNHDSGSICGKRAIFGGRRALRSGLYMAALSAARFNPILSRFYRRLRTKGKPHKLALTAVMRKLLLALNQTLKPIPSLA

SEQ ID NO: 157934 - protein, 343 aa, unidentified
MEIRSVGIDLGKTTFHLVALGDNCKVLLKKKFTQKQLIAFTANMQTSLIGMEACSGAHFLGRTLREQGHDVKLIPAQFVKPFVKSNKNDFLDAEAIAEAVDRENMRFVPIKTDDQLDLQALHRVRDRLIARRTSVINQLRAFLLERGLVFAKSPARLRERMPEILENAEEDLTARMRKLLAQLWNEWKDLEQRVVDLNQEVELIASSDAACTRLRQIPGIGPLVATAIVAAIGNGAAFRKGREFAAWMGLVPKQYSTGGRAKLAGISKRGNRYLRKIFIHGARAVVLRSKRDRVAMGEWMTALEARAPRNVLIVATANKLARIAWAVLSSGQDYRAVQEPVAA

SEQ ID NO: 157935 - protein, 402 aa, unidentified
MNCVGIDVSKGKSTIAVMRPFGEVVVSPFEVCHTVNELSELARQLKSLDGETRAVMESTGNYHAPVAWLLHDAGFYVSVVNAMLVHDYGNNSLRRAKTDKKDAVKLANYGLDHWLTLPRYVPDEDTRLMLKTCYRQYQQYSKVQTMLKNNLISLLDTAFPNANRLFTSPPRADGSEKWVDFVATFWHCECVCGLSEKAFTAKYQKWCKKHGYNFSEDKALDIYASAFAHFGVMPKTDTAKLLVEQAISQLRATSAALAALKQKMQSLAASLPEYPVVMEMFGVGPTLGPQLMAEIGDVRRFHSKKALVAFAGIDAPPYQSGQIDVRSRSISKRGSASLRRTLFLVMGVLLQCAPMDEPVYQFMDKKRSEGKPYRVYMMASANKFLRIYYASVKAYLDSLEHD

SEQ ID NO: 157936 - protein, 325 aa, unidentified
MLDSTRSVSINPAGSCWGIDVSSDKLDVACHGAGEVRTFANSWEGIELILTQVRQGPVALIVLEATGRYHRALALALQEAGLPVAVVNPRQVRSFADALGQMSKTDALDARVLARYAHDLRPECRVLPGENLQLFAELVARRRQLLQLHTAETNRRKQTAYTTVRTSIDAVLLVLKKQLHELDEQLSQLISDDEEWRRRDELLQSVPGVGPGTSRALIAELPELGKLDHKQLAKLVGIAPRNRDSGKFQGRRSIGGGRGTVRAALYMAAFVGSKHNTLLKAFFDRLVAAGKPRKLALIACMNKLLGILNAMVRNGTTWKIPCQNA

SEQ ID NO: 157937 - protein, 449 aa, unidentified
MRKPVEIDSDDDGPVIARAAAIDVAKATGMICTRVPHASKPDRKVTKVWEVDATTAAIIELAGHLTALGIERVVLEATGDYWRCWHYLLSSAGLECWLVNARDVKNVPGRPKSDKLDAVWLCKLNEKNMVRRSFVPAEPMRQVRDWTRDRFDLVADRTRVRQRVEKLLEDALLKMSVVITDIFGVSGRAIMAALIDGQRDPAELAALAVPRIIKNKRGALEQALTGRFTGHHAARLEMLLTQHDQLTALIDQVTTRIDQAITALPPAPPADPASGPGTPAAGDAYLSAVERLCEIPGIGPEIARSIIGEIGLDVTGVFGTARRLCSWAKVAPRTVQSGASKRSGKTGKGNFYLKSGLGQAATGAAKTDTFLGERYRRLIKRMPKAKAKTAIARSILVIVFELLADPAKRYKDLGSGHYAKRMDTGRRTARLTGELRALGWEVTLAPLTA

SEQ ID NO: 157938 - protein, 323 aa, unidentified
MAKKHVGIDISKDTFNAAYQISKGCWSDAEFENNAPGRRKLLEWAGADAVFTMEATGYYHMETALFLHGKKRLVHVANPMLVKRFSQMCFQRGKTDKADARMIAEFAVCNEDRLRDWKPAEGRLGEARTLLSAIKQVNKQITQSSNCLEALKLTKAGKLAALAMAVLLRSQRRTLHALEDSLQTIVKKEFEGMYNAIMTIPGIGPKTTAALIVCTNGFKDFNNKKQVCAYVGLSPRVYESGSSVRGKGHICKLGNPYLRKLLYMCGVSSLKHNPVCKAFSDSLEDRGKKKKVAIVAVGNKLLRIAFSVAKTGTTWNPGYAMTR

SEQ ID NO: 157939 - protein, 405 aa, unidentified
MWTNLTTGSDSLSNSSGFITHAVIQSAAVFSLSGRITIRVYYPLLRTWTDGAKWLSDYKIKRLIIMQTEPQFFLGIDISKPYFDASLLAVINHQKQQMESERFTNDAAGIKLFHKWLKFFKLSFDENTMLVIENTGIYHRLVWDFCTQKNIPIHIGNAAHIKWSFGIARGKNDKIDSQRLCSYAYKHSDELKATPALNPALMQLKDLMTSRSKLLSQLNGNKTYLNELKQVSDKTIQATLEKAYKAAIEGIKQSIKNIEQLIKDCIANNDLFQQHYQLLITVPGIGHLTAVYLICCTNNFASKISGKQLACYAGVAPFEHTSGISVRGRTRVHKMANKDLKKLLHLSALSAIKNYPEFAVYYQRKKAEGKHSLSILNAIRNKIALRAVAVINKQKQYVNNQQNAA

SEQ ID NO: 157940 - protein, 428 aa, unidentified
MHPWKGHRMKDWKDLTHYAGFDWARNHHAVVIVNSVGEIVADFAFAHSLEGWKSFEQKTAAWPSLAVAIETNQGAAVDQLLQRAYIIYPVNPVASESYRKRKAPSGTKTDYIDAWGLADALRVDGHGWKTLQPLDPLAQQLRLLCRDEVSLIEQRTALINQLQQALVEYYPAALEAFEDWTCPFTWDFIIQFPTPRLLAQAGKRRWEKFLHTHKLWRPETVEKRLAIFVQAYQFKISEPITQARSLLALSLCKLLRTLQQQLDDYRKQIEALFKSHPDHDLFGSLPGAKKVLAPRLLAAIGTDPQRYGSHNVLQCFAGTAPVSYASGQINRAKIRWACDKFLRHTVHLWADCFRKASAWGQTYYQKKRSQGMTHACALRCLGQRLLKILFKMLTDKKPYDAELHARNQQKHGSWVLTLSPETLTPKIL

SEQ ID NO: 157941 - protein, 566 aa, unidentified
MLPLVSRPSFKKKEKIAPAVSVVNVYENVSSLGDRKMSTATLKRKRGKAKRSAKFSQAVLGKPSGIIQPRVQEVGPQHFGVVSIDCGKARSKWLLADFFGNVLIPPTEVEHRATNFKLMVSSIRSAIERHQLKDIVVCVEMTGTYHKPVFRAMKKAGFETRLVHPFASSHYRLAQHGDVKTDDNDLAAIFRAAVNGFGLIQKEVPAIYSELQILCRHRRDLVQKKSKLQSQIRHHLQQCLPGFCDLFEGDKLWQQTTPIPLLKALAARGGTAHQLVQAGFEGVCQWFIDAGIKFRKPAVERVILWAADAASHDAMAPTHTLVWQSLIDDWTSKKSQITELEIKIANVLVQTPYILLLSHPGINVVSAAELAGELGPIENYASAKAISGRAGLFPSRYQSDGVDRGGKLSRFRNGRLRAAWMLVADNMIKCNQYWQLKSANWRTQGHDPRDIRCRIANRMTRVVFQMISGKKLFSHPSQLSRGYVLEKLMVFLQGHGVPPHLIVRDLDLAAKQVPQSAWTDEAKPLQRAHEKSKRSRRANPASLGSLLVAVLAKLGIGGEDDDSVES

SEQ ID NO: 157942 - protein, 442 aa, unidentified
MRIVYQRVGGLDVHKKSVVATRMQITEDNRLEWETETFGTTTPDLLLLHDWLQEWRCTHIVMESTGDYWKPVFNLLESDFEVLLVNAWHVKHVPGRKTDVTDSEWLAELLLHGLLKPSFIPPRPQRALRDLTRYRTKLVQERVRIVNRVQKLLEGANIKLASVVTNIMGVSARDMLAALGDGETDPVLMAELARGRLRNKIPELEKALTGVVEPHHRFMLGKQLLHIDFLDEQISDISIEIAQRLEAMSLPPRSPDLRGDPTTEPAGADAEALPLTWSEAVALLDTIPGVNQKVAEVMLAEMGLDMSQFPTAKHLAAWAGLAPGNHQSGGKRYSGRTRKGNRPLSAIMVQAAWSAVCTKDTFLKARYQRLAARRGKKRAIVAVAHSMLVSAWHMLTYRQSYQELGGDYFDQRKKQSKISYLIRRLERLTGGSVSVEMQPATA

SEQ ID NO: 157943 - protein, 317 aa, unidentified
MAQKQVSVGIDVAKEKIDAAIRFGAEASFANSTEGRRELLAWVKEHGVCKAVMEASGGYERSWAALLRGAGLEVVIVDPKRVRHFAKSAGQLAKNDPIDARMIAWFGEVFGQASGQPHDEERQELDQMVTARMGIARLKEQIEGWAEHDQPKAVQKAHQALLKAVVLQLDKLEDVIAAKIDKTEPFAQRDEIIQSVPGLAGTAAAGIIAFLPELGLVDRQAASALLGVAPFNDDSGKRHGERHIQGGRRKLRKLLFMPIVGAATQHNPVLKAYYQRLIAKGKKAKVALIACMRKLIGILNTMLARREKWDPTKHAIA

SEQ ID NO: 157944 - protein, 355 aa, unidentified
MNSVRYVGLDVHRDTISAAVLSESGRMVQQSILATRAAAILDFIGGMRGTLHVTFEEGTHSAWLYDLLARRVARLVVCNPRKNALLKSGNKSDAIDARKLAELLRADLLSPVYHGEKSAQEVQHLARSYTMLTEDTTRVMGRLKAVFRGQAIACAGKKLYGRKHRETYLAELGTGALRRRAECLYAELEALQLLRRQAKRDMIAECRRYPESKLLCSVPFLGPVRAAVLIGRVQTPHRFRTKRQFWAYCGLALEMRDSGEYRMVDGQVERRKRPAQIRGLNWNHNHELKNLFKAAATSASASEGVFREFYLGLLKKNMQPEMARLTLARKIAAIALKIWKKGEAFNAEHLKLQAA

SEQ ID NO: 157945 - protein, 314 aa, unidentified
MTWVGVDVSKRKLDVCVGAEGEPRVFAQPEELDRAVDYMAAQKQPHVVLESTGGYERALFAALAARDIACSVINPARARDFMRSTGRLAKSDPIDAQMLAVFGERMKPAPTEPPNALRLRLQQRVKRRHQLVELQTTQKNHREHSDDKQVVASIERVERVLVHEIKKLDAAITKLVEEDAELRDKSRRMQTVKGVGPAVSSGLLAHMPELGTLTKAQAAALPGLAPYIRESGQSRGKRRIRGGRSSARRLLYMAALVASRHNPVLKAFYLRLLAKGKPKKLALIAVARKLVVMLNAMLKHREDWKPPSLHTSVA

SEQ ID NO: 157946 - protein, 419 aa, unidentified
MAIDLGEDKQVAALLDHDGRVLGRRVARDKAHALGGLLRWAVEQAGRHGFVGVVVGCEPTGHRWRSVMQLADAAGLGFVCVQSLRVHLAREADDYTRDKTDHKDAVLIGKLIARLDCYLPERAEEDWARLRHLGQRRFRLVGEMVACRNQIDDLLSCCWPAALECAVKPFDSTTWLACLAVTVDRCNGNPAKLRGLGRGRFSAAVRRELPRFGAQRVCHKVADRFFAALTDGRGVTVQRRGALERVGMLIDDWRSAIARLGEVEARMVAVLDGLGLTTLVTSVPGVSAVGAAVILAETGDLSRFATARSVVKHAGLNPAENTSANFRGQTRVSHRGRPALRAAAWRAAWGALPHNPVLGARFTHLTTRERDRLAPGQARVACAATLLRWLYAIVTTRESWNPDRAAGIRAGQAGEAAAA

SEQ ID NO: 157947 - protein, 343 aa, unidentified
MQTVTTIGLDIAKSVFQVHGVDAEGNVLIRRKLKRRSVLAFFQKLSPSLVGIEACATSHHWSRQLKRLGHTVRLMPPAYVKPYVKRQKNDAADAEAICEAVTRANMRFVETKTPEQQSCLMLHSTRQLFIRQQTSVINAIRAHMAEFGIVAPVGRKGVEQLLAIVTDASDPCVPEVARACLIALAAQLRMLKAQILEFDRRIMAWHRSNETSRRLDAVPGIGPALATALVASVADPKAFRSGRNFSAWIGLVPKQHSSGGKDRLGNITKQGDRYLRSLFTAGALAVIRYAKINGTQHRPWLAALLARRPTKVAAIALANKIARMAWAMMAKGERYKEPVALAA

SEQ ID NO: 157948 - protein, 431 aa, unidentified
MSEGIEVTPEPQFAALLALDWGDQKHAWCLLSAGAREREHGEVEHTPEAVDAWVLQLCQRFAGQPIAVGVEQSRGALVFMLSKYEQLHLFPVPPSMTANLRKAFYSSGAKDDPKDGDLILDLLEYHRGKLRRLSPDSEATRRVQHLVEERRKLVDEKTAHSNRLMADLKIYFPQVVKWFPDLDSALVCDLLERWPSLQDLQKARPARLRDFFRQHHCRDQALLETRIGEIRQAMPAIRDQAVIEAKQETVKVSVGLIRVLQEGIRVMDRKIQEAAAAHPDFFIFDSLPGAGPVMAPRLLAAFGSQRQRYADAREVQIYSGIAPVVSRSGNSCWIHFRFACPKFLRQTFHEWAGHSIAYSGWARAFYERQRRQGKKHHAAVRALAYKWIRVVFRCWQSRVAYDEGVYLAALRKAGSPLAALCLQSAGEPICG

SEQ ID NO: 157949 - protein, 419 aa, unidentified
MDNINPIHPRMTRTYCGVDSHKDSHTIAFLNCFHEKLGEIKIGSAPSEFSKFIKRAKKYLQPDTTFEFAFEDTTAYGRAFVKYLVEKGYSVKHADASKVATERGQVLHKTDSYDAECAGRVLINQFDKLPDVDPQDKYWIITNLVTRRNSIVKMNVMVKNSLHGAIADNYPHYKKFFSAVIRDSALAFYEAFPSPHHLDNVTMEELAVFLHTASKGRLSNTKAETILKQIKSDQVRKSEFQDVQDFNVRSLVRQVKNNLDELAFIDIEIEKILTHFDYPLTTIKGINSLTAAKIIAEIGDIKRFKNAKALAKYAGVAPVTYASGMSSLQIANARGNRKLNEIFFKIALSNITPIGKNDALLNPIFYTYYHKKISEGKTKNQAIKAVQRRLVNIIFSVMRHNRPYENPGIAYLPKDTAVA

SEQ ID NO: 157950 - protein, 372 aa, unidentified
MMIIGCDYHPSWQQVAWVETETGECGERKLVHATGEAKVFYQQLGSPALIGMEATGNSQWFIELVEDLGHAIWIGDAAQIRASYVRKQKTDKRDAAHILRLVVENRFPRLWTPDREQRDLRQLVLHRHKLVEMRSRVKNELQHLAMNKGMQKKATLWSQAGQQMLRELPLKPWAGCRREDLLGLLGMLNQQVGTLDQAVQKAAEEHAQARLLMTQPGVGPNTALAYVLTLGDVTRFQRGKQVASYLGLIPREESSGGRQKLGAISKQGNRLLRSLLVEAAQIAVRFDPGFRKQYLHRCHQKPKGVAKVAAARRLAVRLYWMLRTQVAYPEIVRIESSPRVPRVGASQTDGLIGRSRIPQAAGCSHRRIMVEV

SEQ ID NO: 157951 - protein, 339 aa, unidentified
MKVSTLGIDLAKNVFQLHGVGCNGQTVLKKKLTRDKFLPFLMQLEPCLIGMEACASSHHFARVLRQYGHEVKLIPPQYVKPYVKTNKTDAADAEAICEAVARPNMRFVQIKTAEQQAILVLHTERNILIRERTACANSMRAILAEFGIIMPRTLSQLYKKIPEILEEYDNELSPFVRCSVARQLEHLQGVEDQITLIEQELSRWAKTQPACQRVMKVPGVGLMTATYLVASVGNGQQFHSAKQFAAWLGLVPREFSSGGKQRLGRISKRGERYFRYLLVHGARAVAAVIERHKDNMPWLYRLLNKKAYNVAVVAQANKTARILWSMLVHHTEYRTLSAV

SEQ ID NO: 157952 - protein, 351 aa, unidentified
MVVVGADVHKQTHTFVAVDKVGRQVGQCTVKATSEGHAKAWAWATREFGSELVWAIEDCRHLSARLERDLLTAGQRVVRVPPKMMAEQRRVARTRGKSDPIDALAVARAFLREPDLPVASHDEGSRELKLLVDYRDSLVSTRTRIINSLLWRIHELDPERAPAPRSLGRQVTQRAVREWLVDVPGIVTELALAELDDVVALTRRVNELEHRISAVVAVAAPSLVALPGCGPLTAAKLVGEAAGISRFATDAKFARHAGIAPIPVWSGRTEGRVRLTRSGNRQLNCAIHRIAVTQIRLPGSLGKTYYERTKAEGMSTAEALRCLKRRLARIVYNTLNQDHHAASGTSIPAAA

SEQ ID NO: 157953 - protein, 370 aa, unidentified
MKKHSTRPQSPRGAAARSKGPITIGLDVGDKTSRYCVVGDNGEVMSEGSVATTRKAMAQKFSGMGRCRIALEVGTHSPWLSRLLSKLGFEVIVANARQVQLISASSRKNDRMDAHMLARLARVDPELLRPIRHRSEQAQADLMTIRIRAALVEARTSLVNAARGFTKAMGERLPACDTDSLGVEKLEALPAALQPRLQPLLEQIEALTAQIKKLEGHIEQIARIEYPETRLLTQVSGVGTLIALTFVLTVEDRERFQKSRDVGCYVGLRPKQSESGQSQPQLRITKEGDRYLRTLLVQGAHLILNRRGSDTDLKRWGLKLAQRGGKNAKKRAIVAVARKLAVLLHRLWVCGEVYEPLRNSRPTPASKHAA

SEQ ID NO: 157954 - protein, 341 aa, unidentified
MEEYIGLDVSMKETAVSIRRAGERIWRGKCASDPSIVAELIRKRAPSVKRVVFETGPLSVWFYHSLRTEGLPAICIDARHAKAALDMATNKTDANDADGLAQLAEVGFFREVRVKGLDSMLTRTLVAARTRLVRITTELSNQIRGVMKTFGLLVPAGKGSTFEKNVRSLLADQDRLASIVLPMLEAWRGIRVRAAELGRQLVRDARQSRACRILMSIPGIGAITATSFTTAIEEPDNFRKSRSVGAWIGLTTRRYQSGEVDYDGHISRRGDRPLRGLLYEAAAVILTRSSTHSTLRTWGLQLRERIGFKRAAVAVARKLAVIMHAMLKTGELFNPNAGAAA

SEQ ID NO: 157955 - protein, 402 aa, unidentified
MAYDFVIGVDVGKYFHHACVLDPQGRQVLSKRINQHESSLRKLFGQFLADNASVLVIVDQPNNIGRLTVTVAQDMGADVRYLPGLAMRQLSRIHVGNSKTDVRDAYVIAHAGLNLPDSLRSVDRVEEVFTQLKVLNGIDEDLARAYTRLINQMRSALVGTYPAFEHVLRGQVIHRKWILHLLAKYGGPTKIRRVGRARLAAFARSHRARNPEPVIDAMLAAIHEQTVSIAGAEYAELGVAMSAKDALAKLENRKEIEAQVLKLIQDIPQTEILLSMPGIGPRSAAQILMTVGDMSDFPDAAHLASYAGLSPRTNQSGTSIMSNSPNRAGNKKLKNALWQSSFASIRFHERSRQFYERKRKEGKRHNAAVVALARRRLNVLFAMMRNGELYRDISTVQEAAAA

SEQ ID NO: 157956 - protein, 433 aa, unidentified
MGLIVPTARHLERADQPLPYEWCVGIDWGSQRHQVCVLDRNRRLVGERTVSHDGASLAQLASWLWTLSEGHPQRISVAIEVPRGAIVEGLIERGFHVFAINPKQLDRFRDRHSVAGAKDDRRDAFVLADSIRTDLPSFRRLRLDEPQLIVLRELSRAEETLLAEFRRSANRLREQLHRFYPQMLQLGLAADEPWLWDLLELAPTPAHAALLSAEQVQRVLKAHRIRRVKATEVLVCLQAPALPVAPGVLEAAQAHCGFLLPCLRVLTEQLRLCAQQVQALLHTLAEEPGEAGGPSDVAIVQSLPGVGRKITAWLFAEASQPLAERDYQVLRTHGGVAPVTRQSGKRRQVVMRRGCNPRLRQALYHMARVAMQRDAHFSGVYAALRAKGQRHGQALRHIGDRLLRILVAMLRHRTCYDPSRIRQGLVVQMGRKM

SEQ ID NO: 157957 - protein, 427 aa, unidentified
MNFTQNEKLKQVSERSIVIGVDIASELHYARAFDWRGVELGKVFKFENSAEGFERFNAWIEYLKGQSAKDSIMVGAEPTGHYWFGLASYLKEQSIKLVLVNPFHVKRSKELDDNHPSKTDAKDPKTIAKLVIEGRYNEPYIPEGIYAELRIAMNCRTRIQKELNSIKNRIQRWLKIYFPEHATVFGKFDATSSMLVLQVAPLPRDVVSLGAEGINQIWRDHKLRAVGMKRAKSLCAAAQRSIGCTEGESCSRMEIKLLLQDYHNKMDQYQVVIETIDGLCNQIPEVAKLLEIKGVGLITVAGFLSEVGDIRRFKSPKQIQKLAGLALRESSSGKHKGQTTISKRGRARLRAILFQAVMPLVAKNREFAEIHNYYTTRPKNPLKKKQSLIALSCKLIRVFYVILTKGTDYDPQKLTGDIQRPVEYLAA

SEQ ID NO: 157958 - protein, 425 aa, unidentified
MATKVREVAYVGLEAVLAYCCGLDVHKKRITACLLVGPVDQPPKELLSTFTTTTKGLTALRDWLSSYDCTHVAMESTGIFWRPVFNILEGSVTILLANARHMKQLPGRKTDINDSQWIARLLRWGLLKPSLIPPKPIRELREMCRYRKKLTQEVGAEKNRVHKTLEDANIKIASVATEIFGVSGLAMIDALIAGNLSPQETAELARGRMRSKIPELVEALVGKIEEHHRLLLRKHLDHLSYLQQAIAEMNRLIEEKIKPYQSQIELLRTIPGIDTVAAQQAFVEMGGDITVFPSEGHFASWIGICPGNNESAGKQRKAKALKGNRWLCSLLVQSAHSVGRTKGTYAGAFYHRIARRRGNKRAAVATGHYLAKCIYHILQDGKPYQDLGANHFNRRGNDALKKQLLSRLERLGYQVELTPQLATVN

SEQ ID NO: 157959 - protein, 404 aa, unidentified
MIFVGDDWSEEHHDIEIQDEAGMRLRRKRLPEGIAGIVELHAMVAGYASDPAEVVVGIETDRGLWVAALVAAGYQVYAVNPKAVARYRERYGGGSGAKSDAADAKVLADLVRTDRHNHRPVAGDSEAGQGIKVLARAHQRLVWSCQRQVNSLRSLLREYYPAALAAFDDLDHRDALAVLSGAPTPAAGRRLSRAAIATTLRRGGRQRSIDDRAAEIDTALRAPQPEPPTTLADAYGAAVAATVAVITEMTRQLATLEAELERAFGAHPDAAIIRSLPGLGTILGARVLGEFGDDPHRYTNDRARKNYAGTSPITVASGKRRVVKARYVGNRHLADACYLWAFCALTHSAGARRYYDQLRAKGLEHDGALRALANRLVGILHHCLAKRMTYEEAKAWPAAEAKAA

SEQ ID NO: 157960 - protein, 342 aa, unidentified
MNITTVGIDLAKTVFQVHGVDQRGKVVVQKRLRRKQVLIYFAQRSPCLVGMEACGGAHYWARKLQAQGHTVKLMAPQFVKPYVKANKTDAADAEAICEAVSRPNMRFVPIKNTEQQAVLSLHRARQGFVRARTAQANQIRGLLAEYGIALPQGISHVANRLPEIIEDAENELPGLFRGLLQRLVAHLRELNHQVQDLEEQIDAWHRANEASQKLAKIPGIGPLTASALSASIGDAKSFNNGRELAAWLGLVPRQHSSGGKPVLLGISKRGDAYLRTLMIHGARSVIRVAERKSTPTDRWSTGLLKRRHMNVAAVARANKNARIVWALLAHGREYNADYKMVA

SEQ ID NO: 157961 - protein, 357 aa, unidentified
MKSQDGKYVGIDCGKKSLEVVRINTENLLERRQFSTTENGINSLLKWLTLNDIVGLEAGSQSFRIAKSILNKGIQVIVLNPGDLATIYQSLKKTDKEDSLKIARLIQRYPKEELPVVPIPTDEEEDNRRLCTEHENWTKQLTQGKNRLHSSFTQAGLTHITKKHLRTKTSREASVTLLPDRYKKEAERILKVLDLVALNLKLIEEEIKEALKKNQSYVQTIMSMPGIGIITSLAIMSYMGDCKRFSSAKQAAYYSGLVPRVDISGDTVRYGRIVSRGCHAIRRVIVQAAWSLVRCQHGGKIKEFYERLYVKKGTKKSIIATSRKMIEVLYTMIRTGNLFDSMPEEALNRKLAQYGLM

SEQ ID NO: 157962 - protein, 355 aa, unidentified
MQYYKDIEKFVKGKKVFCGIDVHLKFWVVCFYCDGEVLEKTRINFGYPELRDFLKSYNSAREIRLVYEAGFSGFWLYRKLMADGYHCIITPPALIPRSASKVKTDKRDAVKLASYLAAGILKRIYVPPVEVESDRRVVRRRSQLVKKQTRCKNEIKAFLHLHGIGKPVDIKTCWTSKYMSWLNNLHFSSESDQFTIAQLIKHYLRVREDLAEINLYLKKLSQNPRYHMNYQRLYRLRGIGLITAMTYLLEICDFTRFNRSKQFSSFLGFTPSQFSSGENVRLGHISNQGNAHLRRVLVESAWTVIKHDPHLRAKYERIRQRGTNGKKAIVAVARSLAVRLRRCLLDETDYVIGVS

SEQ ID NO: 157963 - protein, 407 aa, unidentified
MRLFVGDDWAEDHHDVELMDAAGRVLARKRLPEGVAGMARLHELIGQQLGEDGEDTEVLIGIETDRGPWVAALVAAGYTVYAVNPLQASRYRERHGVSGAKSDRGDAHMLTDMVRTDSHQLRAVAGDSADAGAIKVVARTHKTLIWERTRNGQRLRHQLREYFPAALEAFDDLDAPDALELLAKAPDPARAAKLTRAQISAALKRARRRDITGKATAIITALRSGQLGQPPAVTAAYAVTVRSLIAVISTLNEQVKALEGQVEAYFGRHPDAEIYLSQPGLGYVLGARVLGEFGDDPDRYVSGKTRKNYAATSPITRASGKKKVVAARFIHNDRLIDALMAQAFAAMNASPGARALYDAERASGTDHNPALRKLANRLVGILHGCLKTRTLYDEATAWSHHENKLAA

SEQ ID NO: 157964 - protein, 412 aa, unidentified
MTAIDQFAAHVGLDWADKKHDVCVQFKNGERIFYVVEHTPEALDIWLSEFHQKVKGRIAIALELKKGPVVYALQKYPFVSVFPVHALSLARYRQTFWPSGAKDDPQDAELALDLMLRYPQKIKAIEPDNADIRLLLQLVEQRRLLVEDKRRFVNRLINTLKQYYPQPLEWFSHRDSSLFCELIIRWPSLQQLKRARSDTVRHFMNARGGPAVAYTEQRVTSIANAIPLTTDKSVIEANALMATALASQIKLVGELIRTYDERIESLFDTLPDAELFKSLPGMGPCMGPRMLAALGDNRDRFNSAEEIQNYAGIAPVTERSGQKSWVHWRWQCAKFVRQTFVEWAAKTVNSSYWAKLYYQGMREKGKSHQSAIRVLVFKWIRIIYRCWKTRTQYDEAKYLQALEARHSPLLKS

SEQ ID NO: 157965 - protein, 422 aa, unidentified
MRSVALDVHLDFCEVAIVEDGELRSAGRIETKPEQIELFASSLAPDDRVALEVTGNAWEIARLIEPHVAQVLVVSPSDTGIRQARAKTDRLDARTLARLLAAGSLDGVWMPDRWTWMMRRRLSRRSQLVWARSRAKNQIHAVLMRQLVGRPPFSDVFGVKGREWLRELQLPAEESETVDSAMRQIEFFDSEISESERLIAQAALESAEIKRLMSVPGVNVIVAASFMAAIGDINRFQSPRKLAGYLGLDPRVRQSGAGPATHGHISKRGSVRARHALVEACWTTVRQPGPLHAFYQRIRARRGHSVAIVAAARKLACLFWCLLTREEDYAYQQPSLTKKKLRRLQIAAGAERYTARAAGIWSANDAVREAERELARQAEVAYARTVHDWHATQAVKVGASVTPGRASKKPSKGEAARQTTSP

SEQ ID NO: 157966 - protein, 419 aa, unidentified
MLKIVYPICCGVDVHKKFIVATIASTDNSNITTYKTRKFTTYTNDLLNFKKWLSDNNCSVVCMESTGKYWIPVFNILEDSCDITIANPKYIKAIPGKKTDKKDSLWIADLHKHGLVKGSFIPPRDIRELRDLMRYRTKLVNIRSSEKNRIQNSLTVSNIMISNIVSDSFGKSASAIIRYAMNNPDKTDVDYTKFLHKSMIHKADEINDSMQGIISREQASKMAVCFNHLDYVENCISQLDLAISLIAKEFEPQIQLLATIPGITTKSAISIISEIGVDMAVFPDSKHLCSWAGLTPQNNESAGKKKSVRISRAGVYIKPLLVQCANAAVKDKKCPYFYYRYQSIKKRRGHKRAIIAIARMLLVCVYNILLKNEPFDFELYDGYFNNCTKAETRPSIEHAILFLESRGFEVTKIARESSP

SEQ ID NO: 157967 - protein, 425 aa, unidentified
METSPSIPPIVAWVGLDWADQQHVGRLQASGSAQVEAFVLDQKPEILRAWVQQLRTRFPGGAVAIALEQSRGALLYALMNYDFLVLYPVPPRSLAAYRRAFYPSGGKDDAVDADLLLDFLRKHQDRLRPWRPDDALTRQIRLLVEQRRKLIADRTRLTNRLSAALKEYFPQALEWAGELASPAACQFLSRWPTLEKLQQASRRQVRDFYHAHRRLTPVEWEDLQEQIRKAQPLTSDLAVVQSWALVVPLWVEQLRCLLPALERLDTALQQLFQQHPDHLVFDSFPGAGEALAPHLLAAFGSDRERFQDAAEVQRFSGIAPVTQRSGKTHYVHWRLACAKFVRQSFHEFAAHSRHWSPWASAYYQQLRERGVSHHAALRALAFKWIRILYRCWKDRTLYDEQRYQQALKRRGSPLCLALLSQEVPA

SEQ ID NO: 157968 - protein, 416 aa, unidentified
MKKIHTKLKYVNSNVLLATVDMGKDSFSGYARCPDHSEVKTSDFSNNLSGFRHFWDILVRTQKAHGLEQIVLGFESTGPYAEPLLHYFQDKGLRLVQVNPMHTKRVKELCGNSPNKTDQKDPKVIADIIELGHALSVVIPKGAAAELRRLTQARERAIKRRTALFNQLHDLVFISFPEFLQVMKSIKTKSARYLLQHHAGPEDIAALDLDTLTKVLNRISRGRLGSAKAQALFEAASNTAGIREGRIGVSLEIQEMLEWIEACDRFVERLESEMIRHLEKIPYSRRLLSMKGISTITAAGVIGEVADFTHFETQKEILKLAGLDLFEISSGKHRGQRRISKRGRPLLRKLLFFAALNTVRKGGIMYDRYQKHLAKGMPRTKALIAIARKLLGIMLALVRTQSEYTATQITELSEAA

SEQ ID NO: 157969 - protein, 429 aa, unidentified
MNYNTQNAKIASITEKTLIIGIDVGSETHYARAFSWRNYEYSKKPFTFSNDEAGFAAFKEWMDDIAEKHGMEVIIPGMEPTGHYWLNLGAYLQEQGMKPVHVNPHHVKKSKELDDNNPSKNDRKDPKTIAGLVNEGRFSYPYIPTGIYAEIRNLSNLRIQTQEEITRIKNRMARWFSIYFPEIKDVYRNPDAVSGLMVIKQAPLPCDIRELGVEGVNKIWRDARLKGAGIKRATTLVTAAEHSIGNTEAPRSARKEIRNLLEDYEGYKKRMDELMEEIEKTLSEIPYIDKLMEINGIGIKTVSCFIAEVGDIGRFDNPKQVQKLAGYAIVADSSGKHNGESRISHRGRKRLRYALYEAAISVIGKNKEFKEIHSYYRTREKNPLKKMQSVIAVACKLIRIFYTILTKGVDYDGQKMLNDIVRPEIQLAA

SEQ ID NO: 157970 - protein, 375 aa, unidentified
MAGISRLHAMVGRHAGDAEDVQVVVGIETDRGMWVQALVAAGYQVYPVNPLQAARFRERLGVSGAKSDPGDAHTLADVVRTERHQLRPIAGDSDTAAAVKVAARAHKSLIWERTRHLARLRHALLDFFPAALEAFEDLDAPDVLELLGKASDPDAAARLSRAQIRAALKRARRSDVDAKTERILAVLRAPQLRQPAPVTAAYAASVQAQVAILTALNTQIQAMQAQVDAHFGQHPDVEIYRSQPGLGVILGARVLAEFGDDPDRYADAKARKNYAGTSPITRQSGKMRLVRARYVHNDRLVDALNYQAFAALRVSPGARAYYDRQRARGVSHHAALRQLANRLVGILHGCLKTHTCYDEATAWLGQATSARQQAA

SEQ ID NO: 157971 - protein, 342 aa, unidentified
MTSLAEVVDVVIGVDTHKHSHTASVVAAATGAELGHETVTTDPEGYGQLVALGEHHGGLRAWAIESTGGYGAGLKRHLEALGEWVIELDRPNRPARRNGAKSDPLDATRAAREALAREHLAQPRAAGDRAALAVLVAARRSAIEGATVAQRQLHALVTAAPEALRARFRGHKTRGMLTVAAKLGIHTSWDNETATTARTLRCLARRNLALEGEARDYERAILAIVRSWRPDLLDQFGVGAIVAAVVLCAWSHPGRCRNEAAFANLAGVAPIPASSGQTVRYRLNRCGDRQLNRALHVIVLHRMRHDPTTRAYAVRRRAEGKTDREIKALRRPPALPPARTTP

SEQ ID NO: 157972 - protein, 350 aa, unidentified
MQYVGIDWGYGRARWCARAPGGEVLAEDWMTADEDGLVRLAVRLGPEVQACVEMMSGAAWVRDQLALAGWKVQIADARRVKALAPVAAKTDVVDARLLAELCRRELVPEVWVPTLTERALRERLQRRMHLVRLRTSAKNRVFGLLSQWGVRIRVEHLRRGDAMDMLERRGVPPVWRRSVAEALAVIDLLDERIAPLDRELGPIARADNRVQLLVTIPGLGDLLGLTVAAVIGDIARFSSAKKLVGYSGLAPRVRQSGESSRTGRLSKAGPKLLRWAAVEAAQCAWRPTNPWHELYSDVAKRHGKNPAKSAVARKVLISAWHVLARNQPFKSTRPRSNHRVSASSMTPLAA

SEQ ID NO: 157973 - protein, 420 aa, unidentified
MNTVSNKSFSAFIGIDWADAKHDVCVQAAGDERREFSCMPHKVEAIDNWAQSLYRRFGGQMAVALELSKGPLVYALQKYDFFVIFPVNPSTLASYRETFTPSGAKDDPTDAEYVLDLIMRHADCFEPLQPQSVEMRTLVSLVEQRRRLVDDRVRTTNRLRDTLKQYYPQALEWFDRIDTSLFCDFIERWPTLVQVKRARRTTLQRFFHQHNLRSAHLLDTRLSSIKAAMPLTLDEAVITPNRLQALVLVDLLRATLVAIKRFDEAIAELSPKHPDYALFSPLPGAGPSLAPRLLVAFGEQRDRFKSAAELQRYAGIAPVTERSGNKHWVHWRWQCPTFLRQTFVEWAAQTINKSYWAGLYYRQQRDKGCNHQAAVRALAFKWIRILYRCWQTHTPYNEALYLKALKRRGSPLLNQIEATI

SEQ ID NO: 157974 - protein, 355 aa, unidentified
MNATTVAVDLAKNVFALAVADGNWKIVECARLTRAQFERWFDNRRVDLVVMEACGSAHHWARVLRARGIEVRLLPAKYVRAYVKRDKTDATDARALLEAARASDIKPVAVKSIEQQALQALHRTRSGWMSTRTRRINTLRGFCREFGLVVPEGAATGLACMARYLADEHSRLPELLRPSMRLMIEEIRLTEARIGQLEQALSQLAKHSPACHWLQSVPGVGLLTSTAMVAAVSDPKSFASGRCYSSFFGLTPREFSSGNSRYLGRISKRGDRYIRMLLTHGARSVLRAATVARRTGRPLDRLRTWALQVQQRTNHNKAACALANKLARIAWAVWVKQENYQATRVPSRSAEALGV

SEQ ID NO: 157975 - protein, 419 aa, unidentified
MSFKILKFNCCGLDVHKTWVYACIGITDSNNRTEYKQARFSSFTKGLNELCDWLAKYNCKDVCMESTGKYWIPVFNILEQHDIWVTLSHPKYTKPMKGNKTDRKDAKWICDLYMCGMVKPSFIPPADIRELRDLVRYRFKLTCMITGEKNRAQNCLTVSNLKLDDVFSDVFGKSSRSITEQILQHPGEIFDVSPFVDGRCKTPVEEIQAAIDGAISKEQAVKLRQCLDHIDELQKHISEVEREILRLSDKYEAALNLIRTVPGFDKNPMTAIQVLSEIGGDMSVFPTAKHLVSWAGCCPRNDKSDRKIKSTRISHAGSYFKPVLVQVANALIKSKKHPEFTTRYKRIKARRGHKKAIIAICRMILTAIWHILSDLKPYTPEGFLESRPVNKEKVLTTSQALNLLKQRGYTIKDDVVPAI

SEQ ID NO: 157976 - protein, 343 aa, unidentified
MERYYYIGLDIHKKIIAYCVKAIDGCLIDQGKIKADRQSLGAWVKELPGPWIGAMEATMFTGWVYDFLKPHAVVLKVAHPAMLKAITAAKKKNDRADAEKIADLLRVNLLPECHMLSEEIRELRRILRYRNHIVRTAVKMQNKMSGLLMEVGVSYSKKRLHGKKYFRELLERVEEIPPSVKELLLLSRSSYEMFRSFQKRLVETLRTDSLIRDRVHRLMTISGVGEITALTWVLEIGDPGRFSSIRKAVSYCGLCSAQKESAGKEQRGPISKKRNKHLQTMLIEAAKLAPYWNEQLAIVYEREVKKGNKNRATLAVARKLVAYMLAVDKKQADFKLPAETQVA

SEQ ID NO: 157977 - protein, 410 aa, unidentified
MDVIVARQGALDVHKAQVTACVRVPGADGDRVERVEQFATTVRGLLVMSDWLKAHAVTHVVMEATGDYWKPVWHLLEHDFELMLVNARDVKQLPGRKTDVSDSSWLCRLAEAGLLRASFVPPKPIRDLRLLTRYRRTQIAERKREAQRLHKALEDTGIKLDCVATDILGKSGRAMLDALVAETTNPEILAELALGKLRKKIPALREALEGRFGTLHALLIGAILAHLDFLDEQIAQLSEAIEEQMLPFAAAAELLCTIPGVAQRTAQVIIAEIGVDMSVFPTAGHLASWAGQCPGNDQSAGKRRSGRTRKGSKNLNFALKDAAMAALRSNDSYLQALYRRKKPQLGHGRALGAVKHSMICAVRHMLSTGELYNDLGGDYYARRDPERQTRRLVAQLDRLGHTVILEQQAA

SEQ ID NO: 157978 - protein, 431 aa, unidentified
MSERKSLEIRVSVDVGSRSHQVAIGLSSGEVLEEFEIAHRVEGFEDLFSRIERHRKGNSYRVAVAMEGFNGWARPLDSMVRGRGYRLYNINNLKLARFKEIFPGAAKSDRIDARKGLELFQLRDHLPLAKEVLQEVVGTPHENEVLKRLSRRRRRLVDERVRVVNNLQADLQAVCPGLLEITKEAGNQWFLNFLISADTLPQLARLRRTTLLKIPSVGVKYARLIQDWQERAHFSEEVEWVSAMIQEDARRILELDETIKALEVKTAEVAETSTIAKLLRSIPGYGAICTSELAGEIGTIERFNKEGSLALYLGMATLDNSSGKYQGTKRPKHINTRAKAAMMTALDRHRKYVPQSQKYYEKKRAQGKSHNQAIRALGRHLCRIIYKMLKEKREYEVRPLKRDTQAKVTSRSSRIGQIGKKKIRRKDKITI

SEQ ID NO: 157979 - protein, 355 aa, unidentified
MNDAKYIGMDVHTATISAAVRDSSGNLVMEATLETKAETILEFVHGLRGSLHVSFEEGTCAAWLHDLLKPQVTEVLVCDSRKNALLRVGNKNDREDARKLSELLFLNKLHPVYHGETGIRTLKELARSYLTITRDLTRVMNRLKAIYRGWGIACAGQQVYAPRYRAEWLAKITEAGVRRRAEIYYQQFDALAALRQEVRRELLAESRKHPAMRLLRQIPSIGPIRAAQLIALMQTPHRFRTKRQLWAYCGLALRTYDSGEYRFVGGQLKRSKKAVTIRGLNKNHNHDLKNIFKGAATRAAATAGPLQNFYEARIANGMKPPMARLTLARKIAAITLLVWKKGVRFDAEQLKQQAA

SEQ ID NO: 157980 - protein, 344 aa, unidentified
MPSIVGGFDIHRKQLTFDYLDTVAGEVRRGQITPADRGHLRAWLARLENPQDAAFAAEACTGWRYVTEELARAGVQAHLAEPADTAAARGRKKRAKTDRADARLLRDLLAEGRLPECWIPPEHIVECRALLECYHDLRAEHTAWVQRIHATLFHQGAPPFQGLRQADGPGQLTALAREHLSPAGQAQIAVCLRVLAALEAELTAMRHRLLAAAAHLRGVKALTGAIYGVGPITGLALTCWLGGAGRFSSARKAVRFAGLDITVYSSDGKRSPGHLSRQGPPVLRWCACEAGKVSAHATAPDHPYYAAVKDRAGGKRAALAEARKIIRRACHILTELGDDAFTTG

SEQ ID NO: 157981 - protein, 394 aa, unidentified
MLVKEAIGKDAGKAGLLMSRKASPRPDLVALPMLAHETLYVGADIGKKAHVAGFVSSTLLTRHQRFEHCPALAFDNSREGFRSLIDRISTYVPLTQVQVVLEVTGHYHRALLQYWQELDIPVYVLHVQKRQEGLLKTDKRDALGLANMLYNQLEKGIQVGDPLQAVRRLVAPTEAAAQLRGMVRHHYELTAESIQRKNKLTAICDELFPEFTRLLRNPNLPTALALRSRFPTPADLAAATWFELREARGRTCSVSDAKLIELQRLAAQSIGTKDPARVRGLVIEQKQLIRELDLIGQHLAQLEAEMIQIVGNSREGKILTSIPGIGPLAAATLIALIGTMANVERASQRKLVCGLGPKGSTIGVHSGLDTLVVAWGQTDETDDVSHRVEGYPMG

SEQ ID NO: 157982 - protein, 315 aa, unidentified
MEFIGIDVSKAHLDVSHRPSGETYRVTNNEVGIAELGRRFSAQPPTLVVMEATGGYEGPCAAGLALAGVQVAVVNPRHVQDFAKATGKIAKTDALDAAVLAHFAEAVRPVVRPLDDEQTQELSGIVGRRRQLVDMITAETNRMHACRTQAVRTQIRKHVTWLKKELHDVDNDLDTQIKKTPLWREKDEQLQSVPGVGPVLVRTLLADLPELGTLDSKQIASLVGVAPMNRDSGTMRGKRATWGGRAAVRRVLYMAAVSASKYNPVLRAVYERLIAAGKAKKVALVACMRKLLITLNAMTRDKSSWAPPGLAQDSC

SEQ ID NO: 157983 - protein, 369 aa, unidentified
MKKIVKYIGLDVHKNSITIAIAEEGQKRGVNFYGVINNDMDQLHKFLRKQISQGFEPKCVYEAGPCGYNIYRSLADKGINCVVIAPSLIPKKSGDRIKTDRRDAETLARLHRAEELTAIYVPSMEDEALRDLVRAREDSVNTLKRAKQQLGAFLLRHHVCYSGKSKWSKAHFNWLVTISMPHPAQQITIQEYIDMVQDGKKRVERISEQIKSLSGQSRLNTLNMSLQSLRGVSQIVSAVVVSEIGDLTRFDSPSKLMAYLGLVPSQHNSGDKKRPGKITKTGNGHVRRALIEAAQAYRLPARKSRAIAKRNEGLPQEICKIAWQAQVRLCSRYQRLVLRGKNSNLVKTAIARELAGFMWAIAHAVPKTT

SEQ ID NO: 157984 - protein, 460 aa, unidentified
MSKRIIEKKVKQSKVDAMAQINSNAAGIDIGSEEVYVAVPPGRDEESVRSFPTFTVDLQSLADWLKSCQIETVAMESTGVYWIPLYEILEERGFQVCLVNARHLKNVSGRKTDVLDCQWIQQLHTYGLLSPSFRPSDQIVAIRSMVRHREMLVQYRSAHIQHMQKALTQMNLRLTNVLSDITGVTGLKIIRAIVAGEHNPEVLASYREPGCKESEAEITKSLEGHYKREHLFALKQALELYDFYDHQLRECDTELEDLYQQFGPPEDPGTPPPTPRRNKPRKNQAHFDLAPALYRMTGVDLTQIDGLDALTAQKVLSEIGTDMHKWPTEKHFASWLHLCPNNKITGGKVIHAGVQPTQNRASTALRVAASSLTRSDSALGAYYRRIRARHGAPSAVTATAHKLARIIYFMLKERKPYHDFGADYFEQQHRTRFLRNLNRQANRLGFRLESTSQPTLQEVS

SEQ ID NO: 157985 - protein, 341 aa, unidentified
MKVVYTGLDVGSRLFQIASMDESGELLFCKKMAMSEENLIAAFSALEGEVHVHLEAGEMAPWIRDVISRLVHRVVISHPMNNAWIAKDPNKCDRIDAIKLADLLRMNRFHEVYYSDDRTRREFKLLVQHYNDLTKQQAGIKRKIKARFRAQGIIVHSLELFTARGKEKALALLSSDWLRMAVEQLYEVLEQSQTAQQQARQLMCKQGQAFAEIKLLQSVPGVGPIGAARYSAYIQEPTRFSSRRKVWRYSRLGVSFRSSDGEPLSHPRLDRNGCGVLKDVARVAFNAALRAKVENSFQRTYKQALKSTHNAVHARLSVMRKIVSVMRAVWVTNTPYRDDLG

SEQ ID NO: 157986 - protein, 340 aa, unidentified
MQEQVSRQYVGIDLHRRRSVIVRLDDAGKVLGTVRVDNDPVELALAMAEAGEGPEVALEATYGYYWAADLLKANGAHVHLVHPLGLHWDSRRVKNDVKDATELAKRLWREDLPEAWVAPPEVRELREFVRYRAKLVALRTSAKAQVHAVMAKQGILPGLDDMFGPGGQVLLDKMPLDQPYRYRVDSLRRLIEVFDDEVDIAESQVHKRLRGHRGYRAIQALKGVGPVSAAIFVAEIGDITRFSDARHLCSWAGLTPSHHESNDKAQRGHITKQGSTLVRWAAVEAVVRSHGGTPIAPAFRRIQERRGTPIARVAAARRLLTLVFYGLRDGELRCLTKKAA

SEQ ID NO: 157987 - protein, 316 aa, unidentified
MKVTYQTCCGVDVHKSFLVATIVKTTGGIEPSYQKKRFSTFNNSILEFKQWLLDNHCHDVCMESTGKYWVPVFNLLEDKINVVIANPKWVKAVKGNKDDTKDSKWIGDLFRLGLVKGSYIPCKKVRILREYTRYRYKLVSCRSSEKNRYQNALTVCNVALDSIVSDIFGKSSTSIIDYLLEQSGTSINHEEIASKLLRSLKSKEDAVIESVEGYQMTDAQKYRMRLVRAHMDYITAEINDVDKMIENMISSNPDFENAVQFLCTIPGVKRDSAITIISETGTDMSQFSSSKRLCCWAGLTPGSNESAGKKKSVRMH

SEQ ID NO: 157988 - protein, 417 aa, unidentified
MPTGDYDFFVGVDWGSERHQVCVLDPARQVHGERAVEHSGPGLAALADWLVAVAPGAPARIAVALEMPRGAIVDALLARGLHVFSINPKPLDRFRDRHSVAGAKDDRRDAFVAADALRTDRGAFRRLEPDHPLILQLRECTRLDQEMQQELTRLANRLRDQLLRFYPALLRLAPAADDPWLWAVLALAPTPAAGAHVPRARLTRLLQTHRIRRLSAEDVHAALRAPALPVTPGTVEAAARHVALLLPRLHLIHAQRAQGTRHIDPLLAAYLAEAPAAGPPRAHHDVAILQSLPGVGRLVVATLLAEAAPLLAARAYPALRAQAGIAPVTRQSGKHRSVLMRYGCNHRLQQAVYHWARVSTQCDAHSRAHYTALRQRGQSHPRAVRGVADRLLALLIAMLKSDTLYDAARPRRREMAA

SEQ ID NO: 157989 - protein, 367 aa, unidentified
MENHSIVWVGMDTDAKKNQIALYRGWEKEPAAEWEAGMDAKGIKKLIERLEREEQEIRCVYEAGPCGYELYRKLRKAGIHCDVIAPSLTPRKPGDRVKTNRRDAQNLARLYRAGELTVIGVPDEKQESLRDLTRAREDVREDLTRRQHRLNRFLARQGYHYQDGDKWTEKHWAWIRKIHFEDANAETVLEESIRAADQSQEQLKTYDAKIEENASKPEYAKKVQRYETLRGVRTVTAMTILAEVWDMRRYGEAPQFMGSTGLVSSEHSTGDHERRGKITKAGNAHLRRVLVEASWHYRHGTSAGKAIKKRRKGQPAAVVSIAERADQRLNRKFRRMVDRYNKKPVIAAVAVARELAGFIWAIGQFND

SEQ ID NO: 157990 - protein, 466 aa, unidentified
MKPFYLGIDVSKGYADFIIINSKKQSVVQGFQLDDTFDGHRSLYNTLGRFLAEHSGSTLFAGMESTGGYENNWYNSLIEFQGSLKIQTARLNPFGVSHNSKADLKKNTTDKISAQNIAEYLVAHSEKVVYQNQDRLAGLRKQWGFIRMLTKQSTQFLNQLNGLIYSANPELLSYCQNGMPGWVLKLLIKYPSAANLKNAHAETVAKIPYVSHQKAQQLIANAKRSVASTKDITTEQLIVATVQQILHLKKIISDQTNRMLCECSIPEIELLKTFTGISDLSAVGLIIEIQTIKRFTGVKKLASFFGVHPVYKISGDGVGGIKMSKQGRKAPRQILYMIALSAIQHNPLIREIYEKHRKEGKHNMAVIGICMHKILRILYGMLKNNKPFNPTIDIANRLRSVRLKKDTPADNKNRRFQKYDQKAPVSRRQKKKRLEREMSQSVCDTHSGITAPVPLANIITNILPQL

SEQ ID NO: 157991 - protein, 345 aa, unidentified
MTTRYFGMDVHKDYVVVAAVDASSGEIVEPVRVDMPKLKEWIDQHLTPDDEVALEVSNNAWHVYDLLAHQAGQVVVSNPAKTRLIAQARIKTDKFDALALARLLASGFICDIWVPVSKVREQRTLAAHRQRLRKQSTQVKNRIHALLRRHDLRCPTSSVFSPEGRAWLESLDLSPIEALERQQLLAQLELAQTQLDEANTFIAQRAQYDPRVTRLMQITGIGFFTAFSVLAAIGDIHRFPSPKHLASYAGLVPSVHQSGQKHFTGHITKAGPPLLRWLMVEAAHIAIRWDPHWQAVYQSIAKRRGNGVAMVAVARKLLVVIWHLLTHEVPYRYLNSSTFTRKLKE

SEQ ID NO: 157992 - protein, 348 aa, unidentified
MVIIGVDFHPEFQQIASLDTDTGEIQEKRLAHRGETEKFYRSLAGQKVRVGMEASGHARWFERLLAELNFELWIGDAAVIRTKRVRKQKTDRQDARLILQLMLEDRFPQIWVPSWENRDLRQLLWHRHRMVQARTRIMNQLQAVALNEGLRCKKRLWREHGREQLESFRLAPWASRRRRDLLELMDRLNPTIAELSQAIEQEVEKCPEAQRLRTHPGVGALTALAFVLIIGQAERFQCGKQVASYLGLVPLEDSSGNRRRLGHITKQGSSILRFLLVEAAQVTVRSLPEWRSKYLHLMMRRGRKIAKVAMARKLAVRLYWMMRQGWDYQQWVKFGSHAGQPGHRHGAQ

SEQ ID NO: 157993 - protein, 351 aa, unidentified
MTRKTDAVVARTIGIDTGKNTLHLIGLDDKGAIVLREKLARGRIAARLANVPKCLIGIEAGMATHCVARELIALGHEVKQVPPVYARPFRQGHKNDFRDAHAVAEAVQRPSTRCVPVKTDDQLDLQALHRVRSRLISERTAVINQIRGFLLEHGIPVRQGLRFLRQQLPDILAKRIDVLSSRIIRIIEDLSGDWRRLDERIENVTEEIEELAHGTEGCRQLMTVPGIGPIIASAMVAAIGSGTAFARGRDFAAWLGLVPKQMSTGDRTILGRISKRGNRYLRTLFMQGARVILLRPANWAKHSFGPWLAAAAKRLHHNVLATAVANKLARIAWTVLVQARSYETRVTSEMA

SEQ ID NO: 157994 - protein, 345 aa, unidentified
MELHTIGIDLGKTVFHLVGLNLRGEVVVRKKFSRKQLLHFTANLQVKLIGMEACGGSHFLGRALREQGHEVRLMPAQYVKPYVKTNKSDYIDAEAIAEAVERPKMRFVPIKSDDQLDLQSLHRVRERWVMRRTAVINQIRGLLLERGITLRQGRRHVDEALPGILEDASAKLSGAVRLLLAQLKLELDHLQMRIDEADAVIQKIAGENEACRRLVAIPGIGPVTATAIIAAIGNGAAFKKGRGFSAWLGIVPGEYTTGGKQKLLGISKRGNSYLRRLLVQGARAVLQQRAKQSSGLSAWLAQLTTRVHSNVAAIALANKLARMAWAVLAKNEPYRPPMLAAAATT

SEQ ID NO: 157995 - protein, 350 aa, unidentified
MVVVGADVHKRTHTFVAVDQVARNLGEKVVGATSAGHAEAVMWARERFGAQVLWALEDCRHLSARLERDLLTAGQQVMRVPPKLMAQTRASARTRGKSDPIDALTVACAVLREPGLPVAAHDAVSRELRLLVDRREVLVAQRTATINRLRWRVHELDPERAPKPGSLDRAKHRDWLRGWLDTVPGLVAELARDELADIIRLSVAIDALTKRIGERIRQVAAVLLALPGCGELTPAKLVGEVAGVMRFKNDAAFARHTGVAPIPVWSGNTVGRVRMTRSGNRQLNAALHRLAVTQMRLDGPGRDYHRKRLAAGDYSTEALRCLKRRIARIVFAHFHTDHQTHNQPCQPAAA

SEQ ID NO: 157996 - protein, 423 aa, unidentified
MQKPKHIMKSWQDLTHYAGFDWAKDHHSVVIVDCQGHIVADFEFAHSLEGWKSFAEKTAAWPNLAVAIETSQGAALDQLLQRQYTVYPVHPVAAQSYRERKAPSGTKTDHLDGWGLADALRVDGSGWKPLRPMDPLTQQLRLLCRDEVSLIEQRTALVNQLQQALSEYYPAALEAFADWTDAFAWEFVLAFPTPDALVSAGKRRWEKFLHTHRLWRPQTAPKRLELFAQADQFQASEPIVRAKSQLALSLCKLLCTLGQQLKLYRKQIERLFEEHPDHDLFGSLPGAKKILAPRLLGAVGTDPDRYGSQEVLQCIAGTAPVSYQSGKISKVRVRWSCDKFLRYTVHLWADCFRKASAWGQAYYQKKRQEGMSHACALRCLGQRLLKILFRMLKDQKPYDAELHARNQQKHGSWVLKLVTQPAP

SEQ ID NO: 157997 - protein, 342 aa, unidentified
MGQYVGLDVSLETTKVHVLDDQGKRVWRGTCVTHPTAIEATIRKHAPEVVRIGLETGPLTTWLWQALTDAGLPMVCLDARQAKAALNMKINKTDDNDAEGLAQLVRSGWYREVRVKSREAMLERSLLGARTQLLNMVTDLSNQIRGLMKTFGLVVPKGAGTVFETNVRRLLEDEAAVAAIVLPLLDAWRAVRARAADLDRQLLSRVRENAACRQLMTIPGVGAVVALSFVAAIETPETFTRSRDVGAWIGLTPRRYQSGEVDYEGHISRRGDARLRSLLYEAAMAILTRVRGESELRSWALALRRRLGFKRAAVALARKLAVIMHAMLKTGTDFDPKPAARP

SEQ ID NO: 157998 - protein, 304 aa, unidentified
MYGIGIDVSLSTLDVAVHEQAFRQFSNDKRGFVRLIQWLKQWPITQVVLEASGGYERAALEALHEAGLPMVRINPARARRFAQATGRAAKTDRLDAAVLAQMAHLLPLTRYVPPAPWQRRLAEFAQCRRHLVQMRVSEMQRLRQLIDPVLITLKQRHLAQLSEDLKQLDKAIAEQLAAQPGWKSIGTLKGAGPILVSTLACELPELGTLGSKAIASLVGLAPMNRESGTWQGKRSITGGRAVVREALYMAALTAIRYEPRLRDFYATLKAKGKASKVALVAVMRKMLVILNARMRDAQSESIPA

SEQ ID NO: 157999 - protein, 350 aa, unidentified
MKKVAYLAIDVHAGHCVLGHMDFDGTFLGNRRFPTSERHIIEALKAVKAKEKYLALEESNLAYWAAQVARPYVTEVISSDPRENALIYRSANKRDKVDTHKLCRLLRLGELNRVYHAENDERAIFKAAVQHYIDLRDQQVVLKNKIKAMYRHWGVIEVTGQAVYGTARDDYLQRVKHLHIRNQLHRLYCLMDETEAMQKKALTAMKQLGRKYPEIKEFQKMPGIGEILSHIFDAFIQTPHRFANKRKLWRYCRLGVTDRSSDGKPLGYKRLDRSGVSELKALSYRAWLCALGGDNEVRRFYSRSLRQTSDHVHARLNTQRKILAVMYGMWKRGDAYRPQLFLDSPKMSVV

SEQ ID NO: 158000 - protein, 414 aa, unidentified
MFAVGVDVSNGRSTVAVLGARRKVVMKPFEVPHTADGFASLAEKLNGLDGETRIVMEHTGRYYESFAMSMYRAGFFVSAVNPLAIKDYQEGISVRKVKTDKADALKIAQFAIDKWEILPQYTPMDTIRYNLKTLHRQFQLSSKTRTALNNNLIALLEQSYPGANRYFDSPVRPDGSQKWVDFVGTFWHVDCVARVSQKAFVERYRKWCKRHGYNFSERKAIEIHMDARQKFPLVPKSDTCKLLVKEAVSQLNAVSRTVETYRTEMDRLASQLPEYETVMAMTGVGKSMGPQLMAEIGDLRCFAHQKSLVGFAGTDPIKDDSGDKVSDSKPSSKRGSPYLRKTLFVIMTILLQLQPQDDPVYQFLDKKRSEGKKYYVYMTAGMTKFLRVYYGRVRDCLKEKGLWDSPASQEVNPD

SEQ ID NO: 158001 - protein, 461 aa, unidentified
MSETLEVIHPRCAGFDVHKETVAVCMRLVEEGGRLRTVVHTYRTETRDLSRLVAWLTSERVTHVAMESTGIYWKPIYNILEEQGKFDEILLCNAQHVRNVPGRKTDVKDCEWLARLLQHGLLKGSFVPPKHVREMRDLTRHRAKLTDQQTAVANRIHKVLQDANVKLSSVASDILGASGRDMIDAIIRGESDPAKLADLARRRLRGKIPDLELALDGRISEHHRFQLEMLMEHVRYLEQLIHKLDVRIAEVMNGGPDRGPPDPPQGAGPLFADVPDLDAPVENATDEPPPLPFDEAVQLLITVPGIKQRTAENVLVEIGTDMKQFPTAKHLASWAGLCPGNDQSAGKRRSGKTRKGSKWLRATLTEAANAAARTKGSYLQAQYHRLYPRRGHGKAITAVSHSILTIAWHMLTTGELYRDLGGDYFTRQNPDRLTKRLIQQLEALGHQVTLAPKQHPEEITA

SEQ ID NO: 158002 - protein, 421 aa, unidentified
MNYTQQHRIEQITENTLIIGVDIAKAKHVARAQDSRGIELGKRLIFENSNTGYIKLLSWIQQIKQKHAKGQIVCGMEPTGHYWLPLAQYLLEAKILVVAVNPLHVKKIKELDDNSPTKNDVKDAKVIAQLVKDGRYSEPILLKGIYADLRVAMVQRERVVVQLIQIKNQVQNWLDRFFPEYLTVFKNWDGKTSLSTLKHFPLPEDVLAQGVTGIVPQWRKEVKKAVGIKRAMSLVEAARHSIGLTQGLKMARQELKMLLEQYQLYMQQLEEIEGYVQEMLATMPGAQAMMKIKGIGWITIAGFLAEVGDLFNYNHPNQIVKLGGLNLRENSSGKHKGQTTITKRGRSRLRALLFRAVMVLVTKNPEFKQLHQYYTNRPENPLKKLQSIVALTCKLIRILFAIGRRQTSYDPQKVTRQLLAS

SEQ ID NO: 158003 - protein, 338 aa, unidentified
MMYGAIDLHLRYSEIRVVEADGRVVREKRVVTSRETLTAAFAGLGELRVLLETGTESEWVAQTLEAAGHAVVVADPNYAPMYGEVRRRVKTDRRDVAALAEANRRGWYRATHRRSRAQRTLQQILRSRRQLVAMRTGSISVVRALLRQEGYRLPSGSAAQVPARLARVPLPDGLAATLAPLRQVIDTVTRELAAIDTRLGTYAAADPVVTRLQTVPGVGPVVALTFRATLDEVTRFQAAGQVSAFLGLVPREDSSAERRHRGHITKAGSGELRSLLIQAAWACWKSRGSGTLRAWAERLAGRRGRRIAVVALARRLSRILYAVWRDGTTFDGARVAAA

SEQ ID NO: 158004 - protein, 336 aa, unidentified
MQKDYQIFIGIDVSKDKLDYCIVNSNFQNPQQFGVVANQAKAISKFIQTIRKNFQRESKILFCLENTGIYSMPVCYWLQAAGFDYWVVSALEIKRSKGISRGKTDRTDAKDIAYYAITHLHQIKLSHLPTNDFIELRLLLAEREKIVKSIGAFNTTKENKNFLPKENLKTILKHNQVTLSFLQKQLKEIEKLIDKLVQNNETFKQQNELLQSIPGIGKQTSVTFIAYTQAFTLFKNHRQFACFAGVAPFEYSSGSSIRGRTKVSHLANKKIKTILNLAALSAKKYDPQLKHYFDKKLAEGKNKMLVLNAIRCKIISRAFAVIKRNSKFVNTFKAVA

SEQ ID NO: 158005 - protein, 387 aa, unidentified
MIYVGIDIAKLNHYASAISSEGEVLLEPFKFSNDNDGFYTLVSKLNQFEKDKVIIGLESTAHYGNNLLAFLVPKGYHVCLINPIETSTMRKNNIRKTKTDKVDTFIICKTLMMQPHRFITLYDIGLMQLKNLGRFRQKTVKQRTRLKIQLTSYVDQVFPELQYFFKSGIHQKGCYALLKEAPSPESIASMHLTHLTNVLKSSSHGHFKKETAVELRVLAQKSVGTSDKCLSIQITQAIEQIELLDRQLELIESEMQDIVKSLDSVIMTIPGIGYTNGGMILGEIGDISRFSNPSKLLAFAGLDPSVYQSGNFEAKHTRMSKRGSKALRFALVNAAHNVVKNSKTFATYYNQKMSEGRTHYAALGHCAGKLVRIIYKMLTDNVEFNLE

SEQ ID NO: 158006 - protein, 341 aa, unidentified
MKPELSVVGIDLAKSIFHLVGMDERGTIILRKRLTRGEVMPFMAQLPRVLVGMEACGGAHYWARQLRAQGHEVKLMAPQYVKPYVKTNKNDLRDAEAIAEAVTRPNMRFVPIKNVAQQDLQALHRGRERLMGARTALVNAMRGLLAEYGIVLPTGVNAFRHALVEKLEVEHAKLTPLSQELFGKLCAEFKKLEIEVAYYDEKLQALATTHPESQRLLTIPGIGPITATALLAAVGDVGSFTNGRQFAAWLGLVPKQHSTGGQTRLLGISKRGDSYLRKLLIHGARATLRWARTKTDRRSQWIRGLLERRGWNRTAVAVANKNARIVWALLYRGGVYGESTH

SEQ ID NO: 158007 - protein, 345 aa, unidentified
MNFYHSTHRHYCGIDLHARSLYVCIIDQQGEVLLHKEIKAQPKPLLALLEPFRDDLVMGVECMHCWYWISDLCEEHGIHFILGHALYMKAIHGGKTKNDRIDSFKIAMLMKGGNFPLAYVYPKAMRATRDLLRRRTRIVQHGAMLKAHVVNTTSQYNLPPNKANLKAIGAREQVRATFADRDVQHNINLDLAIIECYHRELSKLEEHLERQAKQHDPASLSVLRTIPGVGRILALTILYEIGDIQRFETVQKFASYARLIKCKAESAGKVYGTQGNKIGNAHLKWAFSEAAVLYLRGNDKAQRYLQKLQKRMNKAKAEIRLMPKRLPVLLITGVLPIGAHVVPLW

SEQ ID NO: 158008 - protein, 444 aa, unidentified
MKIIYKRVAGLDVHKKTVVAARMQVTEEDRVEWETKTFSTTTPDLLELHDWLYEWELTHVAMESTGDYWKPVFNILEDSFEVWLVNAQHVKHVSGRKTDVKDSEWLAELMLHGLLKPSFIPPKPQRALRELTRYRTRLVQERARVVNRVQKLLEGANIKLSSVASDVMGVSARAMLAEIVAGQTNAELMANLARGRMRSKIPELEKALTGIVQPHHRFVLAQQLDHIDFLDEKVETFSIRIGQQLESMSWPDKPAEPDASKSPEEETQVADESELPLAWDAAVALLDTMPGVNRRIAEVMLAEMGLDMSQFPTADHLASWAGLAPGNHQSGGKRYSGRTTKGNKPLASIMVQAAWPAVRTKNTFLKSRYHRLAARRGKKRAIVAVAHSMLVSAWHMLTYQQPYQELGGDYFDQRKKETKVSYLVRRLEKLTGGSISIELQSATA

SEQ ID NO: 158009 - protein, 407 aa, unidentified
MGITCGIDWSESHHDVALIDEHGTVVARTRIDTGAIGFHILLALIAEHGGSVDDTPIALETDKNLLVVALAKAGFTVYPINPRAVARYRERYGQAGGKSDPGDAAVLAHILRTDRHLHRPLPAVSEEGRAVKALARQHQEAIWALHQTVSRLRSVLLEFYPQALQAFPNLKHKAALTVLAAAPTPAAGQRLTRGRVVALLRRSGRGNHPALVEQILTDLHTPALGQPPRVEEAYGHTVRGLVAIVIAMGQAVDDLDTELAREFDQHPQAAILRSVPGLGPVLAARVLGEIGDDPARFDNPQGLRAYAGTAPVTIASGRLRYVKARKVRNKRFGDACHWWAYTMLTKSAGARAHYDRRRAAGDHHNAALRNLANKLLGRLWWCLVNNQPWDEHGAWPDHGHTENPTAA

SEQ ID NO: 158010 - protein, 421 aa, unidentified
MKNAVASKLRQIPQGYLIIGVDPHKKTHAAVLITQDFTTHAKFKFSNTMEGLEMMLQRTKAEMIKTGCRGVIFAIETGGHYWRNLAYVLDERGIPFHFINQFTLKRRREGKDLNRRKNDYRDSEVAAQLLCTGEFTESKLPQGVYAELRAAHNAYRRLVKERTRITNLLKGLLDSLFPEFTQVFKDPCALTAMSVLSTCAIPKVISNMSEDEFVTTVKAGHHGRLMRKKLLVLHHIARTSIGIEASAGSVSMEISFLVEKFNLIKQHIHTIEGTLVRLVDETEEGKYLLSIRGLNYIAVAGLLAEIGSFKQYSNAKQLIKMAGSNPTESESAGKRGSHTPMSKHGRPVLRYCAWTSVIPMLRFNSDFRAWAKNMRERPAHANPLNGREVVGACLNRLLRLSFALAKKQSYYQMPELARTAV

SEQ ID NO: 158011 - protein, 340 aa, unidentified
MESFAGADLHKRVTQLAVLREGQPPSQFRFANDPQTVHGVLKKLPRGTKIAVEATGSWWWFVEKARELGHEVSLSHPKQTKAIAHARLKSDKVDAVMLARLLKADFLPTVWIPGERERYVRELLAHRARLGRTRTAVINELHAVYAKRNIEVPGMIWHRIRPVAWRAEELSGYGPRIVTENAELLKLINQQIQNLDKELAKAGQEDPQAKRLMTIPGVGVATAVAVSCWIGDIRRFPSAKKLVSYFGIAPKVRQSANREIHGHISKEGSGMVRWLILQAALVGIRMSKGPGRGQYLGVSRRRGKKIARIAVARKLLGTIYHMMREEIDYEEFVRRGSNAQ

SEQ ID NO: 158012 - protein, 403 aa, unidentified
MVFVGIDWAEAHHDICVVNEEGQVLAKRRVPEGLDGVGKLHALIAEHAEDPSRVVVGIEIDRGLLVGSLVAAGYQIYAINPLASSRYRDRHATSGAKSDPGDARVLADLVRTDRHKYRPLAGDSNLAEAVQILARAHQGLVWTRQRQVNQLRNALREFYPGALSAFDDLDAADAVAILQQAPTPIRGRALSQAKIISALRHGGRERNLEAKAAQIQAQLRLPQLEAPALLVEAYGHSVAATVAVIKQLNQQIAALEQELAASFEKHPDAEIYLSLPGLGVVLGARAMAEFGDDRTRFLHPKARKSYAGTAPITKASGTRKIVLARVARNRRLADACYQWAFSALTRSEGARHRYDVLRARGQTHHQALRALANRLVGVLHGCLVNRQAYSERIAWSALVEVAA

SEQ ID NO: 158013 - protein, 342 aa, unidentified
MNHFAGLDVSVKETSICIVDDRGRIVREVKVPSEPEALLKVLGNQAYRFKRIGLEAGPLSQWLFSALAEAGLPVVCVETRHMQAVLKAQINKTDRNDARGIAQMIRAGLYRPVHVKTLRSQKLRMLLTHRKLLQSKAIAIENDLRSTLRNFGLKVGMVGKVRFEARIQELVENFPDLAGLVEPLLIVRRALREQIVILHRRLLAIVRDDEVCRRLMTTPGVGPVVALTYRATVDVPARFRKSKSVGAVFGLTCSKYQSGEIDWSGRISRCGDEMMRVMLYEAAQSMLRSKKWSWLKAWAMQIARRRGMKKAIVALARRLAVILHRIWVDGTEFRWTREAAVS

SEQ ID NO: 158014 - protein, 315 aa, unidentified
MDEPRPVSTCAGIDVSKDRLDVHLLPSDEAFAIARDGKGLESLVERLAALDVSLIVLEATGGFETKVAAALAGAGLPLAVVNPRQIRDFARALGKLAKTDAIDAQVIALFAERIRPQPRPVASHEARMLGELVARRRQVVEMIGMESNRRRRAAGKRLAKKIDRHLAFLEKELVDIDVDIDNGVRASPAWRETEDLLTSVPGVGPVTARTLIAELPELGALDRRKLAALVGVAPFNRDSGAWRGHRMIGGGRSCVRNVLYMAALVAIRHNPLVKATYQRLVQRGRPKKVAIIACLRQLLTILNAIVRTKSEWQNA

SEQ ID NO: 158015 - protein, 327 aa, unidentified
MLTAGLEIGSRELVLFTSGSWSRFSNDVGGHRKLVRYLGKRGAVRVCLEATGRYHLDVSLALHRSPQVQLHVLNPWAARRFAEAGLRRAKTDRVDAAALAEYAERMPLREWEPPTLTALHVQAITRRMQQLADRKSSEGSRLHALSASQALPQVVVHSVRDELSHLDAQLAALQLEARELVRGDEYLDQLLQRLLTIPGIGERSALYLVGELAPLGGDMSVRQLVAHAGLDPRPIDSGSSVHKPRRISKRGNARLRRILYLTALVAARFDERFGAFYAALQQRQKTKRAALVAVMRKQLHAVWGVWRSGTAYDRDRLFPHFKGVSSP

SEQ ID NO: 158016 - protein, 356 aa, unidentified
MLNDKKYIGMDVHKESISIAVRNDAGKIVMECVIETKASVILQFIDGLRGDLQVTFEEGTWAAWLYDLLKPHVTELVVCDPRKNASMREGNQSDKIDARRLAELLRLNHLNPVYHGEHGLRSLKELVRSYLTITKDLGRVMSRVKAIYRSWAIPCTGKQVYARRHRAEWLAKITEPGVRRRAEFYYQQLDALRALRQQVRRDLLAESKKHPAWKRLCQIPSIGPIRAAVLLGILQTPHRFRGKRQLWAFSGFGIETQSSADHRSVDGQLQRVKKPSSIRGLNRNCNHDLKNLFKGAAILASSKPGPFQEFYTALLTKGIRPEMARLTLARKIATIVLIVWKRGASFDAQHLKPQTA

SEQ ID NO: 158017 - protein, 342 aa, unidentified
MKPTIAVDIAKSVFEVAVSKRPGRVAQRQRLSRKRLLPFFAQQPPATVLLEACSSAHFWARQLRDLGHDAVLLPPRHVRPYRQGNKTDRADAKALLEAHRNDEIRPVPIKTVEQHALAALHRLRSGWVGTRTARINAVRGILRELGITIPVGATHVVSHVRALLDDPDACPPESLRVSLLEACDEIRDLEEKIRSTELQLKALARQDQAVAYLRTVPGIGLLTATALVAFVGNVQRFPSGRHLASFLGLTPKEHSSGNVRRLGRISKRGDAYLRTLLIHGARSVLWAAKSKKEPDRLRRWALELEQTRGHNKAAVALANKLARFAWVVLNERRDFQTTRRAA

SEQ ID NO: 158018 - protein, 327 aa, unidentified
MMFIGIDISKEKIDLSWLRDQLTNKIKTKVFKNKRQDFVTIEKWLLNTTKSAANELVITLEPTGVYHEALMYFLHEQGFNIILANPGKAKKYADALNIIHKTDKSDATMLAHYGCAKHAVVNYWQPEALAIRELKALIRRLDALESNRQREANRLEASEFSNVSARVCQSIKVTIAFLDDEIKQLKSDIDNHIDNEPDLKRNRKLLESIPGIGPVLSRELTYLFAAKKFNKAKEAAAYCGLIPRHNESGKLKGRTSISKLGPARIRCKLYMAAVVAGQWNKTIKRHKLTLINNGKTPMQAVCANMRKLIHICFGVIKNQEAFKLQES

SEQ ID NO: 158019 - protein, 338 aa, unidentified
MTYYAGIDVSLESASVCVIDAAGKTIGEGKVASEPEALADWLKATGVSLERVGLEAGPLSQWLHVGLRQAGIAAELLETRHVRRAFEIMPVKTDRKDAHGIADLMRMGWFRPVHCKSIDAQETRAMLTARKLVQKQVFEVESSLRGILRGFGLKVGKTTPVKFEGRVKELVAGNPSLERTADSLLATRAVLRREFNGFERQLRGMARNDTRARLLMSTPGVGTIVALTYAAAIDDPSRFTSSKTAGAHFGLTPKRYQSGQIDYSGRISKLGDASVRAALYEAAHVILTKPLKGCTALKSWAMRIARRAGMSKAKVALARKLAVIMHRMLANGTTFQSA

SEQ ID NO: 158020 - protein, 349 aa, unidentified
MIHLGIDHHKKYCHVVALNDKAEIVWDGRLASERRAFAELKKQLPQDEPIQSVLEAGWNWGKLYDALHELGFNPKLANPLKTRLIAESYVKTDRIDALVHAQLLRVGMTPLVHVPTPEQRDQKNVLRRRIWLVRIRTALKNRIHALLDRNHLEPRAALDLFAGRGRNWIDGLQLRDPEDRLLKAERALLDEVAEHIRQTEKWIAEELKTNALFPNLMTLPGVGRILGAVIALEVGDIDRFLCAERLCSYSGLVSSTYSSGGKTRHGGLIPTSNAYLRFAYVEATWSAIRVSPYLRAFYQRLKLRVGTSKAIVATARKLCEISFYCMKQQRAYIEKPYRFRSGSLGRVLT

SEQ ID NO: 158021 - protein, 379 aa, unidentified
MKKDTRYVGFDVDSEKIAVAVAEPDGEVRSLGEIPNQEESIRRLVKKLGPASRLRVCYEAGPHGYGLYWLLTKLGVHCDVVAPTLVPVKPGDRVKTNRRDALKLARSYRSGDLTPVWVPDAEHEALRDLVRAREVAKKDQLRARHRLGKFLLRRGLRAAAGMKSWTSKHLLWVKTLRFEHAAQEATYLDYLHEVEHAAERVARLEKAIDQAIEGLPAEMRAVVAGLQALRGIKTVSAVTIVAEAGPLSRFPRPKQLMGYSGMVSSEDSTGSSVRRGAITKTGNAHLRRIAGEAAWAYQYRPAMSPEMKKRQEGLSEEVKEIAWKAQSRLCTRYRRLVAKGKLRQKVTTAIGRELLGFIWAIGTQVEREQRNAKLARPAA

SEQ ID NO: 158022 - protein, 370 aa, unidentified
MKEPITSFVGLDVHKDSIAIAVAEAGRQAPRFIGTVVPSLPSLRRVLRGIGSAPRTLVVYEAGPCGYGLARRLNADGYSCEVVAPAHIARSPIDQRIKTDRRDALLLAREARAGNLVPVVMPDERDEALRDLSRTREDVLAARLRAHQQMKALLLRHGRTCPGRIAWSAAHERTLSMIRLAYPAQEVAFVEYRNAIKDAHERLERITEALRLQSTQWRMRPLVQALMCLRGLDFIGAVTFVAEIGDPRRFAHPTALMSYLGLVPSEFSSGRTRRQGGITKAGNKHARRILIEAAWTYCHSPRVSRPLQVRQQGQPKSVRDISWRAQLRLTQRFRHLRMGRKLPQNKVCVAVARELCGFIWDIARQVKPLA

SEQ ID NO: 158023 - protein, 433 aa, unidentified
MKVLYERVAGIDVHKDMIKVAIRSPGEKPWTRTTEIFEYRTFYGVLQQMAADLRKRGVTHVVMEASGVYTEPVYYALAEQDFEEVAVINPAHAKALKGHKTDAKDCARLAELFECGLLRGSCIPAPELKEVRDLTRYKIKTVQARTSEIQRLGKALESAGIKLGSVASSITGVSATSMIEALIDGERRGGVLADLALGRMRSAGKLADLSMALAGRFTDHHALLCRLHLDRIKVFDDAAAGLGAQIAARAAPWQRELDLLKSLPGFGDVVAQAWIAEIGPAPHLYFASHEKLACWVSLCPGNNISARKRKHGRTGDAGTYIKPLLVQAAWSAIRVRGRLQARYNRLVRRFGGDKNPAAKKKAITAIAHTLLKIAYQVLKTGTPYQDLGADFYTRRESPVQRQAYLERQLQKLHPGCTITITISPPEAALPPGA

SEQ ID NO: 158024 - protein, 339 aa, unidentified
MRIIGCDLHKAKQTIAMLDRDTGEVVEHTLSHDGEAVREFYAALPKPAVVGIEATGSMGWFVRLMEELGLTCRVGHPAAIRTAEPRRQKHDRRDAQLLLRLLLEDRFPAIWLPTAEQRDLRALLLHRHQWVRMRTRVQQALQAMALGQGVRRGGTLWSTEGQAVLAALPLLPHATDRRDALQALYRQLAAHVERLDEQVQAFAEQRPGATLLMTHPGVGPVTAATDVFLGDPSRFPNGKALASYVGLIPSEYSSGARQRLGHLSKQGNPFLRFLWGEAVMGAVRRDPELRRFFRRKLPQKGLGKARVAAARKLGIRLWLMLRDQITYDEFCRRSRRRPS

SEQ ID NO: 158025 - protein, 344 aa, unidentified
MTVDHYVGIDVSLEASSVCVVDASGKIVREAKVLSDPAALIAWFKGLPFGLARIGLEAGPLSQWLYAGLKQAGFAVELLETRHVRDAFKAMPIKTDRNDARGIAQLMRLGWFRPVHCKSAPAQETRAVLTARKLVQGKLYDIEMSLRGILRGFGLKVGRTTKTGFASRIMELTEHHPALKAIAKALLAVHAVLLKELNGFEAQVRKLARSDSRVRLLMTAPGVGVIVGLTYVAAIDDPARFSSSKTVGAHFGMTPKKYQSGETDITGRISKTGDKGVRAVLYEAAHIILTMPIKGGALKSWAAKLAKRVGMRKAKVALARKLAVILHRMLANGASFDAAKAAAA

SEQ ID NO: 158026 - protein, 368 aa, unidentified
MKDVTTYVGIDAHKKDLFIAMLVGTQATPLTWTVANEPNAIRRLVRKLEREAPGPVRSCYEAGPCGYALQRRMTTTRVVCQVIAPALIPRKPGERIKTNPRDARKLAELLRAGLLTEVQPPTPEEEAVRDLCRARDDAREDLQRSHHRLGKLLLRRGLHYSGRNWTRAHRQWIDSLAWAHAAERVVVDDYLLAIDHLEARLIELDARLTAIAATEPYREPVAWLRCFRGIDTLTAILILAELHDFRRFQSPRALMAYVGLVPGEDSSGETHRRGRITRTGNALVRRLLVETAWHYQHRPSVGVALTRRRKGQPTRVIAIADKAQQRLCRRFRRLAEHHKPAPKIAVAIARELAGFLWAVLQPASVSAS

SEQ ID NO: 158027 - protein, 389 aa, unidentified
MKIYVGIDIAKLNHFAAAISSDGEIILEPFKFTNDADGFQLLVSKLESFDKNSIIIGLESTAHYGDNLVRYLVAEFYQVCVLNPIKTCQMRKNNVRKTKTDKVDTFVIAKTLMMQDDLRFITFFDLDMMDLKALGRFRQKTIKQRTRLKIQLTTYVDQVFPEIQYFFKSGLHQNAVYALLKEAPSPKEIASMHMTHLANLLKVNSHGHFTKEQAKELRVLAQKSVVANDSAISIQITQTIQQIELLDSQLEKIEAEMTDIMKFNDSVIMTIPGIGYINGGMILGEIGDIHRFSNPNKLLAFAGLDPSVYQSGNFQAKTTRMSKRGSRVLRYALVNAAWNVVRNNATFKAYYDAKRAEGRSHYNALGHCAGKLVRVIWKMLTDEVEFNLE

SEQ ID NO: 158028 - protein, 310 aa, unidentified
MDAIYVGIDVSKDRLDVHVRPSGEAFAVARDGKGLEQLVERLRAVSVGLIAVEATGGFETIVAAAIAGAGLPLAVVNPAQVRHFAQAVGKRAKTDPVDAAVIARFAEAVKPEPRPLLGEAARLLAELVGRRRQIIEMLVAERQREKRAGNPRVRRSLGRHIKVLEKYLAEIDDEIGTLVRGSPAWREQEDLLVSVPGIANTVARNLLADVPELGTLDRRRIASLVGLAPFTRQSGCWKGRSAIAGGRAPARSSLFVAALVASRYNPPLKAFYQRLLAAGKPKMVALIAVARKLLTILNAMLRDKKKWQTA

SEQ ID NO: 158029 - protein, 322 aa, unidentified
MKQKPFLGIDVSKAKVECGLLWADRKYRSKVVSNHPDGFAQLRQWLQKYDAGQAHVCMEATGVYWEELAWALRAQGMPVSVVNPAQIKAFGESCLVRTKTDKVDARLIAEFCRAMQPPLWQPPSPSAQALRALVGRLEALQRMRIQESNRLGVARDAVRSNIEAHLHWLDEQIKALTQQIDRHIDQDPDLRRKRDLLDTIPGVGGRTSALFLAFCSRTEAFANARQCAAFAGLNPQQHQSGSSVRRKARLSKIGHALLRKAMYMPAVVTLYKTAWGKAFRSRLSAAGKPPKLIIGAMMRKLIHVAYGVIKSNKPFDPTLHAT

SEQ ID NO: 158030 - protein, 387 aa, unidentified
MKKLLFIGLDVHAKSITIGLAESAGEARVYGTIANDLHALEKVLAKLKKAHPGTELRVCYEAGPTGFVIARRLGQLKVDCLVVAPSLIPVRSGERIKTDRRDALKLARLLRAGELTAVHVPDAADEAMRDLCRARTDAVQDLRRGRAQLKAFLLRNGYRYTGKSAWSEAHRRYLRELVLPHAAQRVVLEDAIQSIGSAEGRIGRLEEQMEALLESWQMRPVVAALMGMRGFALVGAMVLASELGGAWRFEHPAQLMAYLGLVPSESTSSEKRRQGGITKAGNSHARWLLIEAAHHYRLSPKVSKELSVRQRGLGEEVKAVSWKAQTRLHKRTVQLSARGKQKNKVTVAVARELCGFVWHIFVLMRPQMTQAAASPPELGAGRRKEAV

SEQ ID NO: 158031 - protein, 462 aa, unidentified
MARTKRAPEEILDEEYEQVFERVCAIDVAKEFGQVCVRTPRADGKRSSKVFAVDATTGEILKLGESLLEQGIEMVTLESTSDYWRIFYYLLEACGVPVQLVNARDVKNLPGRPKSDKHDCVWLAKLTERGMLRPSFVPPHEVRVLRDYTRTRIDLTRDRTRHWQRLEKLLEDALIKVTTVASKITTMSVRDMINALVRGERNPEKLADLARGIMRHKRRELVRALDGRFDDHHAELARILLGQIDSLTAEIDRLTARIEQLVDKLPAPERPVDPDSDQPASQAPTGQDTTSTNPVPAQRRPPIQRLADIPGINLDAAEVILAEIGLDMSRFPTANHLVAWARLTPQLIQSGNKRRGGKTSKGNPYLKGVLGSAAASASRTNTFLGERYRRIVKRRGKGKALVAVARSILVIVWHLLANPTATYRDLGADFYAGRIDKERRKRHLVQQLEALGLQVTLTPAAA

SEQ ID NO: 158032 - protein, 344 aa, unidentified
MTKTPIAMLGIDLGKNSCSLAGMDASGAVIMRKRMTRDAIVAFAATLPACVIAMEACCGAHFLGRTLAGYGHTIRLMSPEYVQPYVKAQKTDNRDAEAIAEAATRPTMRFVSLKSADQLDLQILHRVRERLVNARTALINQLRAVLLERGIILPKGRVNLMRRLGELMAGDPAVSTRASKLLEDLRDEWSALDLRIKAYDDELMALTREDAQARRLATIPGIGVINATALLAAVGDGSAFAKGRDLAAWLGLTPRQHSTGGKTKLLGISKRVNGYLRKQPIHGARAAMPHLAAKPNPSGAWLQNMLTRAHPNVVVVALAAKLARIAWAVLRKEEDFDRQAFVAA

SEQ ID NO: 158033 - protein, 309 aa, unidentified
MATVVIGVDPHKGSHTAVAIGAAEEPLGELRVRASAAQAQRLLAWAVAWPERTWAVEGAAGLGHLLTQQLLAAGERVVDVQPKLGARVRLLAAGAVNKNDPNDARSVAIAALRSPSRREVRPDDHAAVLKVWSKRHRDLGRTRTQVACRLHAVLCELIPGGIAKEITAAHAAHLVQSITPSGAVEAARCELAAEFLEDLRRVDAQMRDTKKKLTAAVRASGTTLTDVFGVGPVIAATVIGCVRDVSRFPSRDRFAACNGTAPIEVSSGNRKIYRLSRRGNRRREDDCGFRPSMDVSCPSEGSPVTGPVL

SEQ ID NO: 158034 - protein, 320 aa, unidentified
MMYIGIDVSKDSFVAAYPAKSGYTTKTFNNDTKGVRQFIKSLPEESHCVMEATGNYSMLLLYLLQQAGFPVSMENPQKIKHFSRAMMSVTKTDEIDAKLIAMYGEKMNPAPYKIPSESILLLKQKRTVLRQLKKHLAATLNLQQSLAVLPKQDPTSKTAVEQTIKFLRKQISKMEEEITNLSNKEFKRQMDLLTSIKGIGNTLASALIVATGGFTYFTSAKQISRFLGLCPTYQQSGTSVNIKGHINRNGDTHLRGQLYVAAMASLRCNTTCKEMYDRLRANGKSGRVAIVAIANKLIRQAFAVVNNNQPYIDGYVSTFA

SEQ ID NO: 158035 - protein, 363 aa, unidentified
MIVIGTDTHKRTHTCGAVFAGTGQLAGELTAQAREPGFRELLAWGRGLNEERIWALEDCRHVSGALERFLVASGERVVRVPPKLMGQSRRGERAAGKSDPIDALAIARAALREGPETLPAAYLDEDAMQVKLLLDHREDLVKARSEDQCRLRWHLHDLWPELEIPAGALDRMVWLDRLARKLARAEQSTRVKIARELLTEIRRRTRRTNELEREIAALVKAKAPELLELEGCGALTAAKLLAETAGAGRLGSDAKFARLAGVAPIPASSGKRIRYRLDRGGNRQLNCALHRIAVTQGRVHPPARDYLARKQAEGKSRIEAIRCLKRHLARRVWRLLVDSERGRSMTTVDTQRGSLTPQFAVAA

SEQ ID NO: 158036 - protein, 375 aa, unidentified
MRAVFGIDVSKTSSEVAILVNGEKVHGYTILNDAIGFNRLLGDLKTVHNPEIIFEATGVYSRRLQAFLEEYSYAYTRLNPLEAKKQLDSLRVRKTDKIDAEKLAKSQLVHNRKPTYVQEEVYQHLRDLSRFYQNMTEDLVRTKNRLHKVLQVTFPELETLLSTPTGEQYWNLVMAFPCKEFVLSLSQSNLCEIVRQSTSKRISEKRITYLTDKLIKLAKQSFCAVKNTSPMLEEVRYYAQELLRLSERRQVVLNDMVALAQPLPEYDILRSIPGIAETTATSIIGELGDIRRFQSTNQINAFIGIDLRHYESGNFLAKEHITKRGNPYARKILFKCIHNIASASHTNPCHIADFYGSIIFVVGKSPIDIMEPILL

SEQ ID NO: 158037 - protein, 357 aa, unidentified
METAYDGRQIVGMDLHRRRSVLVRMTGDGRRLGTARIINSPQDLRREIARAGKSPRVVLEATYGWYWAADTLEAAGAEVHLAHPLGVKAFAYRRVKNDVRDAADLADLLRMGRLAEAWIAPPEVRELRELTRYRHKLVHLRTSCKDQVHAVLAKLGVPVTCSDVFGVAGSAWLDGLGLPQPYAGKVTSLRQLTAELSAEITMLSEVISDLLAGDRGYQVIQQLPGIGPVLAAVITAEIGDVTRFKNAAQLCSWAGLTPRHRESDVKVARGHVTKQGSRLLRWALIEAIQHAPADSPAGALKAAIIARRGKEARNIAKVAAARRLLTLVFYGLRDGQIRCLPASPAGPPVPKLPAQAA

SEQ ID NO: 158038 - protein, 271 aa, unidentified
MTVYIGIDIARKKFDAAELCDGAYRCKTFENTPAGFTALYDWLKAGSIPDIHVCLEATGNYGTALATFLYEKNLKVSVVNPARIKGFAASELTRTKTDKADSRLIARFCKAAQPDPWRPVPAPVRKLQALVRRIGALNGMLRMECNRRENADIDAQESVERMINHLKMELESVRRAIKEHISNVPELKKQNDLLLSIPGIGTVSASLILSFMASKEFTKAKEVTAFLGLNPRHHQSGTSVRVKWHTEFGHLNRGDMLTSEQHRCSNEKKKF

SEQ ID NO: 158039 - protein, 339 aa, unidentified
MGQVSTVGLDIAKTVFQVHAVDHEGAVVARHALRRGRVLKWFAGLTPCVVGIEACASANYWARELAKLGHEVRLMPPAYTKAYVRRNKNDAADAAAICEAASRPSMRFVAIKSEQQQAAAGLHRVRDLLLRQHTMLRNQIRGLMAEFGIVAARGRQGFAALLAILADSEDQRIPSPLREALLSTAEVLRDVDRKIAAIDRQLVAAGRDNATYRHLITAPGYGPIVASAMVAMAVDPKAFRRARDFAASLGLTPRQDGTGGKVKLGPISKRGNGYLRRLLVNGAMAVLNGKRAKDDPWLTKLLATKPRKVVAVALANKMARIAWALMSRQEDFRRLPAAA

SEQ ID NO: 158040 - protein, 421 aa, unidentified
MKKTGTGKIGRVKEDTLIVTIDIGLEMNRGYCTTTDGRDIKPFRFDNTRAGLDRLWSMIVVNKNRFRCDEVIVGYESTGPYGEPIGHYLSKKPVTVVQVNPMHTKRVKEINDNSPLKTDDKDPRVLADIILLGHSLSIVIPEGDAAYLRRLNNSRERHVGERTALLNQLQQLVFLLFPEFRTVIKDIQLKTALYILNKYLTPEIIGGLKKEELGEEMRKRSRGKFRESHAEMLIRLAKDTIGIREGAAGLSMDIRHILIQLELVNRLIAEIENEMEIALGRIPYSSKLLSIKGLGTVTVAGLIGEVGDFKKFRTQSEIMKLAGLDLYEVSSGKWKGRRRISKRGRSLLRKILYYAAMQAIRKNGIMHEYYTRLTGRGMKSMMALVAVSRKLLRIIHAILRDEGEYIVDYESVKGQVIKRAA

SEQ ID NO: 158041 - protein, 473 aa, unidentified
MEKADMKHTQQRKRTGKAERRASVSLFERIQPDAAGVDCGQKSHFVAVPPERDPEPVREFRTFTADLQRLAQWLAQCGVKTVAMESTGVYWIPLYEILEQRGFEVVLVNARDVHNVRGRKSDVSDCEWLQQLHSVGLLRASFRPAAAMVPLRSYLRQRAILVEELTARIQRMQKALTEMNLMLHTVVSDITGVTGLKIIHAILAGARDPERLAVHRDGRCHASHQELVAALTGNYRGEHLFSLRQNFTAYQFHLQQIAECDAAIEALLNTLAAQQPPPSAALPAPRAKTTKKHAPAFDIRTPLHVLTGGVDLSQIHSIGPQAALQLVAEIGTDMSRWPTEHHFASWTTLAPNNKISGGRLLSSRTPPSANRAAAILRRCAMSLGRTSTALGAFYRRLAVRIGKAKAITATARKLALLVYRALSGKLAYRDPGATAYLKLHRARELKSLRKRAKLLGFELVDRSSGEVLLDPVS

SEQ ID NO: 158042 - protein, 422 aa, unidentified
MQVLYERCAGVDVGKDVIAVAVRLPGGGPGGRVTVKRTYKTFYGVLAEAAKWLVSQGVTHVAMEATGIYSMPVYHALLEHGDFEQVLVCNAGHVKNVPGRKTDLADAEWLAQLLECGLLAGSFIPPADVKAVRDVIRYRAKIARQRVSEVARLGNVLQDAGIKIDSVASSIATKSGRAMIEALADGERRGQVLADLAKGKMRSKIPDLSMALEGRFGDHHAMLCRLHLDHLDHLDAMIAKLDAQVEKMMQPFRAARDLLITIPGIGPLSAAAVISEIGADVRAFFPSAAHLASWAGLCPGNHESAGKRHSGKRRPGNKHLQPVLVECAWAAVRHDGYLKALYHRHVMKWGGYRSPIAKKKAIIVVAHALLVIIWHVLATGKPYGDLGADYFTRRQDPDQETRRLIAKLEALGHRVTIEDTAA

SEQ ID NO: 158043 - protein, 344 aa, unidentified
MLFYCGIDLHARESVLCIIDAQDTIHFRDKVPNQLSHILEILHSFTPKPKVALEATLNWYWLVDGLQEAGFEVKLAHPFGLQVIKKAKVKTDNRDAFHLARLLRLDALPESYIYPKETRPLRDLLRKRQKIVSLRAAEYTSLHRTLLQHGIVDIPATQAKEFNSRDIEHYFEHPVIQCRCAMELERMQFYTRQIKILEEIILGNATEEPDFLLLQTIPGIGKLLAAIILYETGDVNRFPTAKQYCSYSRVVPGIAQSSNTVRRGKGSKQGNPYLKYAFMRAAALAVRFDGPIRRFRLKHLNRRRSKARKLISVSIVAHKLAVAAYQILKDKKTFQVENMFGPYI

SEQ ID NO: 158044 - protein, 390 aa, unidentified
MDVMHPVCCGIDVHQKSIVCCILDGPLTSNEPKKYQTTFGTTTKELNAALDWLLEHQVTHVFFESTGQYWIPLFNIFSDSNLELILANPQHIKNVPGRKTDVKDAEWIAQLGRCGLINQSYIPSQEVLQLRYLTRYRLSVKQRLTQIKNHIHVILQRANIKITSYLTDIFCKTGQALLTLFIDGEVINEDNVESCIHGRIKASTRQLIEAMEGKLSTVDRFLIKECMEEYQLQKKISDELNKEINEYILEHFSKEYQLLLTIPGISDNCCATILAEIGPNVDAFKTEKKLASWAGMCPGSNESAGVKRSSHTTQGNKYLKQALVMSVLSVQRAKEETFSLFYQRISSRGSKMKAIIACGHKMLRIIYKILQSHQPYNSQKALGLRQQTNA

SEQ ID NO: 158045 - protein, 399 aa, unidentified
MNGRSNVTQVGLDVHRKFSTASLRDASGRVIAREKLQHLNRSELKERIATWPQGTPVILEGSFGWGWISDELLALKMDPHLASSRKVGAWRAGRGLAKSNNLDADLLGELWNEKPTIKHGRIHRWWEVWLAPQEVRDQRELLRHRMGLVQIQTVVKNRVHAVLHRHGVIGQLSDLFGVTGRRMLQMLADDEQLLRESARRNLKDLLILLDTLRRLIARLTREFRATVRRSETGRRLTTLPGVSTVLGYTIAAEIGKIERFPTPRALVRYSLLAPQADDSGEELGGKPMGRRLGHAGRTTLQWAWIQAAHGAVKKDASFRAIFNRRTDNGKQDRGRGYIVVANRMCRIAYAMWKKQTDYQEVPPARPGSKQTLQNSSRPGTGQPLAAMATDLNQVREATV

SEQ ID NO: 158046 - protein, 461 aa, unidentified
MLVVAMPTSPSYWVEEERENAMAKVIIGVDPHKLSATIEVVDRRERLLGSGRFSTDQAGYTAMRTFAKAWPERVWAVEGSNGAGRPLAQRLLEAGEHVVDVPAKLAARVRLFDTGHNRKTDARDAHSIAVVAVRTRTLRVLAADGELEGLRMLCDRREELTRLRVQTVNRLQRLLAELIPGQGQKDLTALQAKAILATVRPRDIAGKTRRRIAVEELADLVAVEAKMKKATAELKTIVLARGSRLMDIHGVGPVVAARILADVGDITRFADRNRFASWTGTAPLDASSGEQNRHRLSRAGNRRMNHMLHIAAVTQIRLDTEGRAYYSRKRAAGKKPLEAMRCLKRRLSDVVYRQLVADAERAAMTASSGEAGTGPGGHCGATQESSAVDLPPHIDTSDQPLPGPAHPTLPATKPHANPCAASAPRRSRRRAGAVKVERPTGRTTLTATGTGAHSEESIPTS

SEQ ID NO: 158047 - protein, 368 aa, unidentified
MDGSRDEPKTTAGLDLGDKYSYLCLIDQDSGEMIEEGRLRTTPEALKRRFASEQSLRIAIEAGTHSPWVSRVLEACGHEVLVANARKLRLIYANKRKTDEVDAENLARLARLDPKLLYPLKHRGEDSQSHMAIIRSRQALVGARTQLVNHVRGAVKSFGGRLPKCPARSFHKKASEHIPEALWAALGPVLEQIGSLTQRIRDYERQLEAISKERYRQETDLLRQVEGIGPLTALTFVLTLEDPHRFEKSRSVGAYLGLVPASDRSGDRAPQRRISKEGDEMLRRLLVGSAHYILGPFGSDSDLRRHGEKIASRGSKNAKKRAAVAVARKLSVLLHRLWVSGEVYDPLYNTHRREQQQQQEEEEEEEAA

SEQ ID NO: 158048 - protein, 391 aa, unidentified
MVCVGIDVAKDKHDCCILDSEGTPLVDCFTIPNNMDGFKSLLQTIQDCSQKSDKIKVGLEATGHYSYNILGFLLDNDLPVYVMNPLHTNLYRKSLSLRKTKTDRVDAKTIATMLLSDVDLKSYTDTAYHNEELKSLTRYRFDKVQERAKLKQSVSRLVTILFPELEQLVSSIHGTSIYALLSEYPGAKQISEAHLTRLANILVKTSRGHYRKDKATHIRDAARTSIGSVMPAKSLELKHTIKLIQELTSEINEIEDAIRKIMDELKPPILSIPGMGFHSAAMILAEVGDFSNFNSPDKVLAYAGCSLSTYQSGKLTNCYAHMEKRGSRYLRYALYTATKYVCYWNPVFTEYLTKKQAEGKHYNVALSHATKKLVRLIYALQKSGKAYLAVT

SEQ ID NO: 158049 - protein, 403 aa, unidentified
MSINGAPVMTATVVAVDVGKNRAALSVTDAGRRCLLGPVDFAMTAPALAAVLGRVCAVLPAAAVKVGIEAAGHYHRPLLVAAVWPVGWQLLELSPARVAEQRRVQGRRRVKTDAIDLEAITELVLAGHGVPVAARAAAVTELTGWAAHRRRRVQTRTATKNQLLAQLDRCFPGLTLALPDVLGTQVGRLVAAEFADPRRLAALGVTRFVRFAAHRGLRVRRSAADRLVAAAHNALPSPEAGVARQVLADDLMLLADLDAQILAAEAHMARLLPDTPFQPLTTVPGWGTVRAGNYGAAVGDPHRWPAARQLYRASGLSPAQYESAGRRRDGTISREGSVPLRRALIDLGIGLWHADPAARRYGQALRARGKKGAVIGCAMAHRANKIAYALVRDQTGYDPARWA

SEQ ID NO: 158050 - protein, 338 aa, unidentified
MAEVYAGLDVSDKLTHVCVTDGSGSVVWAGACATDPDVIAKTLKSRAAGLARVVLETGPLSAFLYHGLAERSVPVICVCARHAKGVLSARVNKSDPHDAEGLAQMARTGWFKAVRIKDEATHMDRARLKIRERLIDARQALAGQLRGLLKLFGLRLGKVTAHRRRERLEALFALKPELEPVLTPLIESLEALEVQIARSSRQLAAQAAADPVAARLMTAPGVGPITALVFKTSIEDPGRFERGEDAGAFAGLAPRRNQSGERDRKGRISKAGDPMLRAALYEAANVLLGRVKRPCALQAWGKRLAEAKGAKRARVAVARKLAVLLHRLWLSETDFRWA

SEQ ID NO: 158051 - protein, 346 aa, unidentified
MGEITRVFIDTSKQIFQLHGVDAGEAVVVRKTLKRSQLATFFGSIPPTVVGLEACGASHHWARVLGSLGHEVRLVAPQHVKAYVRRNKNDARDAEGGCEAMSRPTMTFVPVKTVEDQAVLMLVSLRDRLVRQRTQVTNAIRGHASEFGLVAPTGLDKIDDLLARIACDETLPILARELFAIEAQGLAQLQARLKQVDTKLMAWHRADETSRRLAQVPGIGPIGATLLRVKTPAPEVFKSGRQYAAWMGLTPKDHSTAGKTKLGVITRAGDEALRAVLVSGAMSVIRQARTRPDRASPWLIALLERKAPKEAAVALANKMARIAWKLMITGQAYAPGHSQQPGLKAA

SEQ ID NO: 158052 - protein, 375 aa, unidentified
MQEKLRFLGLDVHAETIAVAIAEPEGEVRSLGTIPNRVESIRKLIKKLGSAEELRACYEAGPTGYVVYWQLAGLGVPCEVVAPTLVPTKAGDRVKTDRRDAEKLARCHRAGDLTAVWVPDEGSEALRDLVRAREAAKQDQTRARHRLSKFLLRAGQRPPSGVRPWTRPYLIWVAALRFPQIAQETTRQDYLHEVEHMRERVKRLEQAIMDAVKLASPELQQVVNDLQALRGIADISAVTIATELGRVSRFGSARQLMGYCGVVPSEASSGKRTSRGGITKTGNAHLRRIVIEAAWSYRRPPCIWYGLRRRQESISEAAKEIAWKAQDRLHKRYRKLGAAGKDNRKIAPAIARELLGFIWAIGTRAEAIAGQQAVA

SEQ ID NO: 158053 - protein, 387 aa, unidentified
MIYVGIDIAKQKHFATAMTSEGEVLVSPFSFTNDCDGFELLLSNIKDFNKNELLIGLESTAHYGENLVAFLFNLGFNISVINPIQTSSLRKTGIRKTKTDKLDCLLIIKSLIVNEHRQYTKADADTLKLKNLCRFRQKLKKSKAKLKIQLVTYVDILFPELQYFFKSGLHINTCYELLKKHSAPDDIAALHLTYLGNLLKSASHGRFNKEDAIALKSLAKSSVSTKNANISIQITQTLAQIELLEKQIEVLDATIVSAMVEMNSIIMSIPGIGYINGAMILGEIGNIKRFDKPCKLLAYAGLDPTINQSGKFTAKHTKMSKRGSKLLRYALINAAWNVSLNNKTFDAYFKLKQSQGNSHYAALGHVAHKLVRVIFKILKDNVPFNLD

SEQ ID NO: 158054 - protein, 446 aa, unidentified
MPLEATPAAIGIDAAVVANHHVVIRRPGLSGAGETIEDFVVAPTLAGMEILTKRMSQWPGVMAVAEPTSMTWLPLSVALRNAGADLALIGNRHSARLRSALAGKNKSDPIDAAVLSRAGELFALQPARIPSPSELALRRAAQRRGKTLLEANRCLRRVISQARWAFPDVWNAFAGSRPTALAVLNRWPHLESLGRARTSSITEAVAQHTRGVGHVEARAERIRSAARNWAEFWSGHLDLDALAWETSELLEDLSVAEARLERANQQARRWWEQLWGDDPLLLSVPGMGPIVAPTVRAFLADGTQFETAKEAQAYVGLNPSNWSSGQMESPSRAITKEGPPALRLAFYQAANVARSHDPQLAEFYRHLMVERGHCHTKANCAVARKLVARTWATLVSGRSYEVRGLDGEPVTARQAKAIAESLAVPATVRRRSRAHSAATHRARLTH

SEQ ID NO: 158055 - protein, 388 aa, unidentified
MNFEADKSEPLTAVHTDLGAIFVSLELSRSSWLITSLSPGGGEKMSKHSVPGGDFAGLMERFARLQEKARLRTGQSFRIIVVQEAGLDGFWIHRALQNEGIESHVVDAASIATSRRRRRAKTDKIDGETLVRALLAYKRGEPRVCAMVKVPTPGEEDRRQLCRERKALTAERVRHVNRIKGFLYSQGVSGYQPLRRDRRQRLEGLRTGDGRAFPPHLKALVNRELDRLELLLKQIKTVEAARDALLAVEQTAKPASAAMLLDIRGIGPEFAAILWSEGLFRHFENRRQIAAYAGLAPTPWQSGAVDREQGVSKAGNPRLRTTLIQLAWLWLRNQPRSALSVWFHERVSRNGGRLRKTTIVALARKLLVALWKYVTAGVLIEGVTMKVA

SEQ ID NO: 158056 - protein, 370 aa, unidentified
MSVYVGIDVHRKRSQVAVVTEDGTVQLNKNTVNGTEPILRLIGDLPSGTPVAFEAAFGWGWLLRLLEDYGFDPHLVHPLRCKAIASARLKNDKVDAATLAQLLRADLLPEAWIAPLEVRQLRALLRHRTGLVRLRTQLQNRIHAVVADFGFDRSGSYLSGPGRGWLAGLELPAISRELVTDYLAVIDGLAPLTDRIDGELRQHAKADPRVKTLTTLPGVGQFTALVMLAEIGDITRFPSARKLASWAGLTPTVRGSDRTVRHGHISKQGSAWLRWVLNQAAQTAKRSPEFSATYAAIAKRRGKKIATIAISRKLLTRAWHLLAADQAPGPASPDASTATAAHPQTGRVTKPRARSHLRHEPASGRARSSD

SEQ ID NO: 158057 - protein, 341 aa, unidentified
MSSYVGLDVSLSETSVCVLEADGRVRFEGRVLSQPDALVRCLRERAADAQRIGMETGPTAGVLFRAVQAAGLPVVCLETRHAHRVLSARSNKTDRNDARGLAELMRVGWYRAAWVRCASATYIRSLLQGRRLLVHAKRTLENTLRGGVKRFGLIMSKTAGRPFTHRAASVLDRDPHYAAFAEPLLAVLRTILDQIRSYDRQLRAIARSDETAARLMTTPSIGYLTAPAFISTIEDPKRFRRSTDVAAYLGLVPRVQQSGEIDRMGRITKAGDNLTRSYLVEAANVLLTRIQRPCALRQWGLRIMQRAGLKKAQVAVARKLATMLHEMWTDGTEFEWGSEMA

SEQ ID NO: 158058 - protein, 375 aa, unidentified
MSITMIGLDTAKAVFQVHAVDAAGQVVIRRKLRRNELIAFFEKQAACTVVMEACGAAHHCARVLTGLGHDVKLIAPEAVRPFVKKGKKNDEADAAGICEAASRPGVRFVPLKSLEQQGILALHAARSLLVKQQTMLANAIRGLATEFGLTVPLGMGKLGELMALVDADEAVPAKARQALTALFDQCSALHESIETFEAEIVAHARHDDTARRLATIPGIGPITGSLIAATAQTSGFATVADIGVFQSARHFAAWLGLVPRQHSTGGKTRLGRITKAGNREIRRLPVLGATSMVRPGCGMEQCRRSVGQRGPGAPPGKAGDGDAGQQDGAHRPSGTPFGVPAPFGDGSLRDGGDDAQRSLPCDGTCCCSRRCGVTA

SEQ ID NO: 158059 - protein, 327 aa, unidentified
MSQAIYVGVDVAKARFDVAVVTPGDVAVSSSVQQFANDPRGIRRLVKHLTPVRPALIVMEATGGYEFALACALAEASLPVVIANPRQVRDFAKSMGRLAKTDAIDARVLARFAQSVQPPVRPLPDAELVALRALVDRREQLLEMRQMELNRLPMTTPAMQKSIRHVVRCLDHQIAALRDELDDHIRRSPLWHERLELLKTVAGVGNVVAYTLTAHLPELGELNAKQIAALVGVAPLNCDSGKSRGRRRTWGGRAKVRRVLYMAALSAIKYNDRIRAFSQRLKAQGKPGKVRVVACMRKLLVILNAMVATNTPYHKALPHTTDTATAA

SEQ ID NO: 158060 - protein, 570 aa, unidentified
MVVVGTDAHKYSHTFVATDEVGRQLGEKTVKATTAGHATAIMWAREQFGLELIWGIEDCRNMSARLERDLLAAGQQVVRVPTKLMAQTRKSARSRGKSDPIDALAVARAVLRETDLPLATHDETSRELKLLTDRRDVLVAQRTSAINRLRWLVHELDPERAPAARSLDAAKHQQALRTWLDTQPGLVAELARAELTDIIRLTGEINTLAQRISARVHQVAPALLEIPGCAELTAAKIVGEAAGVTRFKSEAAFACHAAVAPIPVWSGNTAGQLRLSRSGNRQLNAALHRIALTQIRMTDSRGQAYYQRLQDAGKTKRAALRCLKRRLARTVFQALRTVHQPSSEHTQPAAACHRSYCSSHLGEPPRLTDMTQKTRIQPLPPKRAGLLIRALYRIAKRRFGEVPEPFTVTAHHRRLLIANVVHEALLQRASRKLPPSVRELAVFWTARSIGCSWCVDFGAMLQRLDGLDVDRLTDIDNYATSSKFSDDERAAIAYAEAMTADPHSVTDEQVADLRARFGEAGVIELTYQIGVENMRARMNSALGITEQGFNSGDACRVPWAAPDVPSAENR

SEQ ID NO: 158061 - protein, 342 aa, unidentified
MDEYDGRQFVGIDLHRQRSVIVRQSESGDQLSAVRIVNDPVALRLELERAGTDPEVVLEATYGWYWAVDVLRDCGAQVHLAHPLGVKGFRYRRVKNDVRDAGDLADLLRMGRLPEAWIAPPQTRELRELVRYRAKLVAIRSGLKAQVHAVLAKAGVLIAVSDLFGVGGRQRLAKVPLGAAYAERVRSLLELIDVLDGHEARFAGLIANRLCNHRGYQALQQVPGIGPVLAAVFVAEIGDVHRFTSPAHLCSWAGLTPKHRESDTVVHRGHITKQGSKLVRWAAVEAIQRYPTTSKIALDRTRIESRRGKNIAKIAAARKLLTLVYYGLRDGHIRALDRPRAA

SEQ ID NO: 158062 - protein, 342 aa, unidentified
MRCYVGLDLHSNNTYVGIIDQDGRRVYKSRVTNLIAVVLHELDLFKNHIEGIVVESTFNWYWLVDGLMEAGYRVHLANPSAIKVYEGLKYTNDYHDAFYLAELLRLGILPEGYIYPKNERAIRDLLRKRLMLVRQRTSHILSFQTLYNRQKGCAFRSSDLHRITEDDVDDLLKSPLVALAAKADVAVIRFLDRRIKEIEQHILEMMKLWPQFERLKTVTGIGDILAMTIALETGDIARFPAVGNFASYCRCVGSKRLSNEKKKGENNRKNGNKFLAWAFVEAANFALRYCPYARKFYQRKLSRTNKIVALKALSHKLARASYFVMRDRVDYDPQRAFGLKEN

SEQ ID NO: 158063 - protein, 423 aa, unidentified
MIDSGEIKVAYAAFIGLDWGSEKHSIALQAAGSNEIETFTLKQTPEDLHGWFIRLRDKFDGRPVAVAIEQTRGAVIHALLSHSFVHVFRINPLSLASYRKAFSPGGAKDDPTDARYLLQWVMLHRNQLKPWVPDDAQTRALQRLVEFRREVVNQRVAFTNQLTQVLKEYFPQALDWAGEVDRVMACDFLSKWPTLEKIKKARPDTIRAFYRQHGSRSAEVIEERLKAICTTQALTEDPPVIETSVCTVQTIIRVLRPIIESIARLDKQIEERFNQHPDMEIFDSFPGAGPVLAPRLLAAMGSDRSRFESASEIQQYSGIAPVTDRSGKHVWIHRRFACPKFLRQTFHEFAGQSIKYCSWARAYYDMKKGEGKGHHAAVRSLAYKWIRIIFRCWQDRVRYDEQTYIRALHKSGSPVLTFIDEAA

SEQ ID NO: 158064 - protein, 347 aa, unidentified
MRFYTDQHRYYCGIDLHARTMYACVLDGSGEIVAQRNLRTDPAMFLEFLAPFRPDVVVAVECIFTWYWLADLCADEGISFVLGHALYMKAIHGGKAKNDRIDAHKIATLLRGGMLPRAYVYPREMRATRDLLRRRLYLTRLRGLLLAHIQNTNHQYNLPPIPAKLHYPSNRVGFLARFEDPSVHKNMEADMTLIAGLERTIRDLELYIARQAKQQQSDLFHRLRSIPGIGKILALTILYEVQDIRRFERVQEFASYCRLIRCAKESAGKRKGSSGKKIGNVHLKWAFSEAAALFLRANPAGQRYLAKLTKKHGKGKALSILAHKIGRTAYYIMTHKRNFDMNKFLAA

SEQ ID NO: 158065 - protein, 415 aa, unidentified
MEIRYPRIAAIDVGKKEIAAAVRTPGDRPGERTQQIRKYKTFYPVLRQMVAWLVEQGVTHVTMEATGVYWKPVFHALGEVDSLEVLLVNARHVKNLPGRKTDAKDAEWLAQLLECGLLRGSFIPPKDIAAIRELTRYRKKCIQARTRELQRLSKVLEDGGIKIDSVASSITTLSARDMVEALIAGERDPKVLAEFARGVMRKKIPDLTMACAGRFGDHHALLARMHLDHIDQLTTMIDGLNTRIEEVVDPFSEQLRLLKTIPGIGEGAAQVIISEIGVDMSRFPTAAHLASWAGLCPGNNESAGKRKSGRTGKGNAEIRDILTECAWSASHTGTYVGAQFRRMHRRFGKKGGGKAAIAIAHTLIVITWHVLHDQVEYRDLGSDYFTRYDNPDAKKQRLIRELQALGHKVTVEPAA

SEQ ID NO: 158066 - protein, 398 aa, unidentified
MDLPVYYELETNNGNRDYRIQIGGHYMNYNTVYVGMDVHKESFTLCSCKYEDEKASHYQRTPASYKNVLRYLAFLRTIYGEDTRFVCGYEAGCLGYSLYHQLENFNVECVILAPTTMLEQRSKRRIKTDKRDAEIIARSLAQHNYSPVHIPTETDNQTKEFIRMRDDHKAELKKIKQQILSFCLRQGYQYDGSGNWTAKHVKWLRSLKPAGLYKEILDEYLLTYTILTDKLNRLDQRIEELASKEEYKESVSKLTCFLGIKTHTALSVIVEVGDFQRFVSARKFAGYLGLVPGQHSSGDDRNGLGITKAGNTHVRRLLVESAQSYTRGKIGYKSRVLRSRQAGNSPQGINYADRANERLRRRYYKMVLKDGKKYNIAKTAIARELACFIWGMMTDNIY

SEQ ID NO: 158067 - protein, 342 aa, unidentified
MQIYTGLDLSRNRLDWHALSIDGTLVEAGAVPPDPDGLAQLVRRLGDADVLAVVEVMNGARFVHDQLELRGWDVRLADPQRSRALAPLACKTDRIDAWVLAELARRDLIPEVWLPDPAVRAERERARFRMHLVKHRTMLKNRIHQTLIAHGQPRSHVGLFTQQGRSPLDRLELPEPWRQTLQASLALIETLDRQIDELERELGRLGADHRYVPLLCTIPGIAWVLAYTIASEIGDIARFASPRKLIGSTGLCPRVYQSGEQDRRGALSKHGPNYLRWALIEAAHTPARQPALQAIVVRQRERHGRRRGSAIAAVAIARQLAEAIWWMLTRNQPFAPAGAKSA

SEQ ID NO: 158068 - protein, 479 aa, unidentified
MNFIGVDLHKKSITVCVMDEKRKVLARKTLACTQTKEIVEFFRQFRPFKVVVEATASYPWFVELVEPLAEKVVLANPKKLRVIAESTKKTDRLDAQVLAEFLVLDMIPESYQPTLRQRQHRALVRHRQYLQGRITSVRSKIRHILSNYNADRKDLFSANCGPADFKEVRLSDVDRFVTKQLWAEWQDHLAQRLAVSKKLKAFVAKAPQREAEARAILKTAPGVGPVTAEVVLSELGDISRFRNAKTVCAYAGLVPVVRQSGEKKSKDLKITKQGSGLLRWALVEAAWRLVRESPKWAALFARLRHRSGKKRAIVAVARKLLCVLYAMLRTSTPYQIVTTGTTAPQTTREKLVRISKADQTTTPVITAPDQTTTTVTATPDQTTTTETPAPQTTRKKLVRTSTPEQTTTPEPPAPQTTRKKLVRTSTPEQTTTPETAPRTTRKKSIRAATPDQTTTPERTPRTTRKRMLRTSIPDQTTTM

SEQ ID NO: 158069 - protein, 324 aa, unidentified
MNSHNYVGIDISKVTFDVAVNYQDEYHYYKFSNDVNGFKAFLGLLSKEHQVVMEASGPYYLQLACFLHRNDVSVSVINPLVIRRFCQMRLCRTKTDKKDARMIAEYGKTEQPANWKPEEKYVLELKQMQAAMDLLNKHRTDILRQLEAFRANGYVCKEAVQSISKANDANVKQIAQLEENMQKLIEQFHGQMYRQLQSIPGMGKKTALLLIVISGGFTKFENSKQLSSYIGLCPRIFESGTSVKGKSRITKMGMGRIRAMLYMCAWSAKRYNKACKELYERLVSNGKAKRQALIAVSNKLLKQALAIATSNMFYQENYIKNPCF

SEQ ID NO: 158070 - protein, 361 aa, unidentified
MSSIPLTRADVIIGVDTHKQQHVAAAIDGHGGTVGEPVTIDATPDGYAALVAWATGLGTVFSFGVEGCGSYGSGLARYLRRHGFRVEEVARPPRNSERRLAGKNDAIDAEHAARAVLAGGQTATPKVREGTVEAIRVIKIARDSAVKQRATTMITLKTVLVTAPDVTRAALEKLSDRELIAGCVALNTAAKPDDPQNASSHALHALARRHEMLSVEIDSHTTLLEELTATAAPDLVAVYGVGPDSAAELLACAGENTSRIRSEAAFAKMCGVCPIPAGSGQTNGRHRLFRGGNRQANAALYRIVIVRMRWHPKTIAYVDRRTAEGLSKKDIIRCLKRYVAREIYQALPQDQTIEHRYDPAA

SEQ ID NO: 158071 - protein, 429 aa, unidentified
MSYRIAGIDVHKKMLAVVVSNVEVESEFQFERRMFGGNPEQLRLLAAWLLEQEAEEVVMESTAQYWKPVWGTLERYWKPIREKREGAKRRSGTLHLAQAQSNRGRRGRKKDFVDAERLVKRLVARELTLSFVPDAEQRLWRAVTRKKYQLRRDLVRLNNQLESLLEETHIKLSSLVSDLLGVSARRMLKALADGETDPAALAALAHQRLRATPEQLCDALGACTDLKPVYRRLLKMTLEQLQLLEQQIGQLDQELATLLHPHQDAVHRLAEVPGFGVDSAQQIIAEVGPTAATFPSEKCLSSWVGACPGDEESAGVNYSHQSPKGNRHMRRLLNQAANAAVKVKGSIFEVIYRRCVPRLGHNQAIGVIAHRQCRLIWLILHNGALYEERGPAVTMQSKYKRTWRMIRQLRQLGYRIDPPNLQPSQAQAQ

SEQ ID NO: 158072 - protein, 340 aa, unidentified
MSEKEAILGIDISKDKFSAALLKGEKKSQVKEFANNLEGFEQLKKWLEQNQLERVHACLEATSTYGHSVATYLHGLGHIVSIVNPARIKGFAQSRLSRTKNDQADATTIARFCAALKPQAWIPPSPEMAQLQSYSRRLRALEQMATQEKNRLKTTVNESLIEDIEAHLVFLETQIDNVKKRQKELLNEYSSLKSQADLLTSIVGIGEPTAMTILAEIGDINQFSSARQLAAFAGLTPQEHQSGTSVKGKTRLCKIGNPHLRKALYFPALSSIRHCSPIKDLRERFLEAGKNKMQIVGVVMHKLIRIVYGVLKSGKPFDQTKLALPNVVLEEETDFLPASP

SEQ ID NO: 158073 - protein, 344 aa, unidentified
MQKIQTIGIDLAKNVFQVHCVDEKDQIVLVKQLRRNQVIAFFAKLEPCLVGMEACATAHHWARELIKLGHDVRLIPPVYVKAYVKRSKNDAADAAAICEAVTRPSMRFVPVKTEEQQAALMVHRARDLLMRQRTQLTNALRAHLAELGIVAETGREGGMQLVKIVGQARSSGALPPEMIEALSALIDQIFSLEEQINELNKCIKRQYRTSEVAKRLEAIPGIGIITATAMAATVTDPGQFKSGRDLAAWLGLVPKQYSTGGKVKLGPISKKGDRYLRRLLVVGGTSVVKLAKIFPWRYPWVAKLLEKKPAKVVAVAVANKLARIAWALMNSGGNYRPQLRGARP

SEQ ID NO: 158074 - protein, 388 aa, unidentified
MRTSITRASMDTHKKEHTVAVVYADTGELEVFTVRNTVKDIRKMVRKVQRQAPGEVHFCYEAGVCGFALKRQIEALGSRCEVIAPSLVLTRSGDHIKTDRRDARKLRSQFVAGQLTEVEAPSLAQEAAREITRCREAAKENLKRTRHQLLKFLTRHAYIYRDGRHWTQKHDRWLRSLQFDQADLREVFDWYYTELQHCVQRLATLDKEVAALADREEYREAVGALRCFRGIDTLTAVTVLTEIFEFGRFPSPRKLMAYLGMVPSEHSSGETRRTGGITKAGNRRVRRLLVESAWHYRHRPFVSKELKRRRQDQPQWAVDLADRAMARLHKRYWRLLDRGKAPGGVVVALARELAGFLWAVLHEQQWRAARAEAWGVPVTQEDGRRVPA

SEQ ID NO: 158075 - protein, 340 aa, unidentified
MQVSIIGIDLGKNSCSLVGLDAAGKVLLRRRLRRENVVAFLAKSPRCVVAMEACCGAHHMGRALAEAGHEVRLMSPEYVRPYVKAQKNDDRDAEAIAEAATRPTMRFVALKSEEQLDMQSLHRARDRLVGERTALMNQIRSLLLERGFVVPQGKAKLAAALADLADGEAGALAPRMRALMMDMREQWRALDKRVATLDVEFSEAAKADEGARRLLSIPGVGPLNATALVAAVGDAAAFARGRDLAAWLGLVPRQVTTGGKPKLLGITKRGSKYLRKMLIQGARAALPTLRASDTRIGAWLRSLLARAHVNTTVVALAGKMARIAWALLRRGQIYAAVPAA

SEQ ID NO: 158076 - protein, 324 aa, unidentified
MQTIPIGCDVSKDKIDLCVWLNDGKQEYLLIGNNQKGYLKALAEIKRLNIKPHICMEATGIYYEGFADFMAENGYLVSVVNPLKIKKFAESEFQKTKTDKQDARLIACYCLKMQPKADYIKPNPEQYAVRRNIALLKQLNADLSGIKNRIKVAKDEFVRQILISQQKEIKKHIKEVRQHIVKITEQTAAGHVAEKLESIPAIGQTTALILAHYLNMYRFDSENKFVAFAGLAPGKHESGSSVRRPDKLTKYGNRTIKGALYMPAMVAYRFGYFGTFVNRLKNKGKPPKVILIAIMRKLAAIAWNLWKNGQTFDPARYGLNSKTA

SEQ ID NO: 158077 - protein, 338 aa, unidentified
MQFKQFIGIDVSKNSLDITVLDSQGNQMAYEQTSNNLSSIKKCFSKIQKETKISLSDSLFCMEYTGIYNLPLVQWLSELSAHIWMESGAQILKSQGVVRGKSDKVDSLRIAKYAFLNRNQVRLWKAPRAIIQRLASLMSLRRRFIKIKSQLSVGVNEQAGFLDKETLNALKKHNKAPLDSIKKQIEKIEIEILEIIKSDERIHQLYKIITSVDGVGLVTATHIIVTTNEFINITDGRKYACYSGVVPFEHRSGTSIRGKNRVSHMANKKIKTLLHLAAISAIRVKGDLKEYYERKVAEGKHKMSVLNAIRNKIVLRIFACVTQERMFEKKINFCLEKP

SEQ ID NO: 158078 - protein, 344 aa, unidentified
MVTTIGIDPHKATHTAVAIDDDETVLGEFTIRADKDQTTKLLDWATSVDGDGRVWAVEAATGLGHLLSQQLVASGETVVDVPPVLASRIRVLSSGRSNKNDENDARSVAVAALRRESLAEVKREDDAAVLRMLAKRHRELTALRTQAVCRLHAMLAVLRPGGMGHRLSAKQASRMLQGLRGLDAVGEQRRILAKEHLADIRRLDRDLAANKTQIRRAVAAADTSVTDIYGVGPVVAAFLVGYTPPIERFTTPDKYAAYNGTAPIEVSSGGKTRHRLSRRGNRTLNHAIHTAAVTQISHHTEGRVYYDKKLDEGKTTKEALRALKRRISNAVYRRLITDAQRHSS

SEQ ID NO: 158079 - protein, 373 aa, unidentified
MLIKIVRVAVITAFATFKQPYKDMKKFIIGIDFSKETVDASIVQKEQPETLIAYKKFRNNLKGVDGLIAWAKSKVAQDGEIIFCGENTGTYSTLFSDELTDRGFIIWIEHSMNIVRGMGDVRGKDDKTDSLRIASYAARFYDKMKPYVRPKDETRVLKTLLAKRDRLKSFLKAEITNTKENPLMLQDSNIASSINEFFKRLEESLRKELKELERMILDVVMSSSEYAKNFNILTSMKGIGLINAVALIVYTDNFTKFNFNHRKIATYWGVVPFKNESGTSVRRGTHVSPKCNSWLKALLTEATLCAIRYNSRIKAYHDRLMARGKAIGIVFNNCKNKMLKILVAMVRDSKIYSDMDVSKDPHTTTTTSSIVVC

SEQ ID NO: 158080 - protein, 366 aa, unidentified
MIVIGTDTHKATHTCGAVDARTGQLCGEKTARARQPGFRELLDWGRGLADERIWAIEDCRHVSGSFERFLVAQGERVVRVPPKLMGQSRKGERARGKSDPIDALAIARAALREGPETLPAAHLDERALEIKLLCDHREDLVRTRSEEQQRLRWHLHDLWPELELPAGCLGRAVWLERIARKLARAEQGARVRVGRDLVRSIRERSRRAAELEREIAALVETQAPDLLALPGCGALSAARILAETAGVERFASDAKLARLAGVAPIPASSGNRRRHRLDRKGNRQLNCALHRIAVTQGRVHEPARAFLARKQAEGKSRIEALRCLKRHLARAVWQALRASRDRESINSLSLIDEVPKLRPVEGLALT

SEQ ID NO: 158081 - protein, 358 aa, unidentified
MNNSQYKYIGLDVHQATTSIAVLDGKGTLLMQVTIPTQASTLLEFLSGLQGTLSLTFEEGTQAAWLYDLLAPRVENVVVCDPRYNSLLKSGNKNDRIDARKLADLLRTGMLKPVYHAPGGGGRRLQELNRSYFTLVQDTTRVMNRLKAIFRSRGIACRGSRIYSPAARIHWLQQLREPGARQRATLLYQQLDLLQGLRREARRALLAASRKHPAHRVLLSVPGLGPIRVALLLARMQTPYRFRTKRHLWAYAGLGLVTRSSADYRIGPGGLERTRKPVAVRGLNQNHNHDLKEVFKSAALRASRLPGPWREFFTARVAQGMKPELARLTLARKLAAITLTLWKKGERYDDQKLIAQAA

SEQ ID NO: 158082 - protein, 396 aa, unidentified
MLSTNLQNPIDFNGQKFYVGLDVHKKSWAVTIRSLGIEIARFTQPPSAEALSGYLQRNFPGGQYYSAYEAGFCGTSTHEQLCKLGIKNILVHAADIPSTDKQKKNKTDLHDSRSIADYLEKGSLHSIHVLTQEQQELRSLFRFREAKVIEVTRSNNRLKSFLMYYDIKIPETVSKKEYLSLKALAWLDFEMTTAAGTIALQELIEELKYQRKRLFEITKQLRKQIQVLHAESYKCLLSVPGIGAVTAMGLIAEIADFGRFDDPDEYCSFLGLCPWEDSSGETTKTKGMQPRCNQHLRPILIEASWTAIKKSRTLFAYYSKHAGKDSKKAIVKVTRKLALIARGVVLKQQLYQEDYLQKKNDEQSAQKKTSNNRFSSGITEQHINKQPDNVLTSWPG

SEQ ID NO: 158083 - protein, 335 aa, unidentified
MQIYGIDLAKEKFDVSFFDLTSKKVSNQPSHKVVKNNFKSIGRFLETLPSDAVLVAEHTGVYGDTLLKCCMDSNVKIAFVGGYVIHRYRATPDRAKTDVLDCALLREFGERYPDKLKYRKFPEEALYELRQLARHREMLVEQRKQLMTADKSEDCRPIRSLAVKRSMDRIKEMLDTEIAETEKEMLKVIDGHDSIHHNYEIVKSVKGVGLVTAVELLVKTDNFTKITTARQYAAYAGTAPYEKSSGKMDKGAHISKIGNRRSKTLLYICAESARLHNKEIKLYYERRTLIDKKPRHYVLNAIANKLLRIIFTLVEKGEFYDVNYIRQDPRLVKHN

SEQ ID NO: 158084 - protein, 412 aa, unidentified
MDVLIDRCAGLDVHQKTVAVCVRSPGAAKNRREEVRTFRTFLGELARMREWLIAEEVTHVAMEATGVYWKPVWYALEGGFELLLVNARHVKAVPGRKTDVKDSSWLAQLLECGLLRASFVPPPAIRELRDLTRYRKRLIQARTSETQRVAKVLEDANIKLGSVASETLGVSGRLMLDALIAGERDGEALAALAKGRLRDKHDDLAEALVGRFAEHHQLLLGAILSHVDHLGAAIARMDERISVVSAPFDEQLARLATIPGIGPRSAQVVLAEIGADMTQFASAAHLASWAGMCPGNNESAGKKSSGKTRKGDAWLRGMLAECAWSAARTKDTYLSAQFWRLARRIGREKAAIAVGHTILVIAYHVLLNEADYRDLGGDYFARRTDTHFLQQRLVRQLEQLGNRVTLEPIPAA

SEQ ID NO: 158085 - protein, 405 aa, unidentified
MERVFGIDVHKNVLVTTIITEESEETRWSGVGAKDLKNLMEWLKEKNCLKGVMESSGIYWVPIYVTLADNGFQITVANAHQVKAIPGRKTDELDSQWLARVFSAGLVKPSYIPEKKIMELRSLTRLRVSLLEAQTAFKNRAHKILQICNIRLASKLSNIFGKDGQMLLNALMKRESIEEVIEKYGSKRLKAKKEEVKESILGVLNETDIIQLKICLENINRLEEQIRQLNAKIATLVNKKDVERISKVPGLGETSASAVIAEIADPRRFQNDKKINSWSGLAPSTYQTAGKTAKTGHITKKGNKWLRRILVQCATVAVKARNSQIRLFYLRIRGRRGHKIAIVATARKLLDIIWHLLITGEEYIDKHYVKKTITKSRKETLKLALEEAIPLLKQAGYTIIAPRLA

SEQ ID NO: 158086 - protein, 375 aa, unidentified
MDEITRAPIVRVGVDLAKQVIQVHAVDASGRRVAARAFKRDQFFGWCAQLPASCMVAMEACSSAHYWARKLRALGLDARLIAANFVTPYRMEGKSGKNDATDATAICEAASRPGMRFVPVKTCEQQGVMSLHRVREGLKEERTACINQIRGVLTEFGLVFGKSPKVLRVVLADVIEDASNELSTTARLVVQRAFEHWRELDEHMKWCDRQVGQHVRASPEAKRAAKVIGIGEIGASALTAGVGDFTQFKSGHQFGAWLGVVPRQASSGGKIRLGRITKRGDDYLRTLLIQGAKAAVMSADKRDDPTSRWLAQLTARVGWQKACVAMANKNARILWAVMTREAGFDPKHVSVKPQAKQSTRQPVVAAPSSPAACAA

SEQ ID NO: 158087 - protein, 388 aa, unidentified
MNGVPDKSEPLTAIHTDLGAIFVSLELSRSSWLITSLSPGGGEKMSKHSVPGGDFAGLMERLVQLQKKAKLRTGQSFRIIVVQEAGLDGFWIHRALQNEGIESHVVDAASIATSRRRRRAKTDKIDGETLVRTLLAYKRGEPRVCAVLKVPTPDEEDRRHLCRERKALTAERVRHVNRIKGFLFSQGVSGYQPLRRDRRQRLEELQTGDGRAFPQHLKALVSRELDRLELLLKQIKAVETARDALLAVKQTATPAPAAMLLDIRGIGPEFAAILWSEGLFRHFENRRQIAAYAGLAPTPWQSGAVDREQGVSKAGNRRLRTTLIQLAWLWLRNQPRSALSVWFHERVSRNGGRLRKTTIVALARKLLVALWKYVTTGVVIEGVTMKVA

SEQ ID NO: 158088 - protein, 366 aa, unidentified
MKKSSTAAIDRIQIFKGNQLTIGLDLGDRTSHYCILNEAGEVILESKLPTTPKGIEEVFSRIPRSQIALETGTHSPWVSRQLTQLGHEAIVAHARNVRLIGDSSRKDDQLDARTLARLARIDPALLGPVRHRSAKAQIHLTVIRARAALVSARTALVNAARGLTKSYGQRLRSCGTEQMNREMAKELSQELRDVLDPLLAEIESLTERIAEYDRRIEQIAKEFYPQVAVLRQVKGVGPLIALTFVLTLDDPHRFRRSRDVGCFVGLRPGRRNSGMSEPQLHISKEGDRYLRTLLVQGAHYILGPFGQDSDLRRWGRRLAERGGKNAKKRAVVAVARKLAVLLHKLWVSGEVYEPLRNNRKAMAAVA

SEQ ID NO: 158089 - protein, 386 aa, unidentified
MSVEPRSEPTAIRTDLGAIFVSMELSRSLWFITSLSPGAGERMSKHGVRGGDVAGLLMRLVQLQEKAKVRTGRTFPIIAIQEAGLDGFWIHRVLQSEGIESYIVDPASIATSRRRRRAKTDRIDGEALVRTLLAYKRGEPRVCAMVRAPTPEEEDRRRSGRERKTLIAERVQHVNRIKGLLFAQGIGDYEPLHRDRRNRLEGLMTGDGRPLPQQLKAQIGRELDRLELLLDQIKAVEAERDALLTPAEDIAPGPPSLLLGLKGVGAEIAAVLWLEGLFRTFTNRRQVAAYAGLAPTPWKSGSIDREQGVSKAGNPRLRTTMIQLAWLWLRHQPGSALSRWFQERVKQNGGRLKKPMIVALARKLLIALWKYATAGVVIEGATLKTV

SEQ ID NO: 158090 - protein, 371 aa, unidentified
MKEHSTFIGMDVHKNSIDIAIADAGRNGQVRHYGKIDGTLAALDKLVRKLVSTGNSLHFVYEAGPCGYQIYRHLSAQGLDCAVVAPSKIPKPSGNQIKNDRRDALMLARLHRAGELTAVHVPRAEDESMRDLTRAREDAKSDEKRSKQRLLSFLLRSGIRYPGSSPWSKAHMRWLSDIKMPHRSQQVVLQEYIGTVNQCKERVQRLTEQIHQLLPEWPLFPIVQALQSMRGVSTIVAATTVAEVGDLKRFHTPAELMSYLGLVPSEHSSGQKTKRGSITKAGNGHVRRVLAEAAWSYRLPARVSRALLKRQEDLPESICEIAWKAQLRLCSRYRHLWNKGKAKQVIVTAIARELCGFMWSIANEIEVPSNA

SEQ ID NO: 158091 - protein, 373 aa, unidentified
MPKYSTAFGMDVHLRSTTVCALDADTGEAVTRRFPGNPWGEIAGWMGGFPGPSLAAYESGYPGFAPQRELAGLGVECVVAAVSKIPRSAADSASKNDRNDAARMAKAILAHDISPVWVPSPEVEGIRDLAGAYDGATARLATAKQRLLAFLAKRGFAYGGTTPAGNPRKYWTYDFLRWLDKVRPEDDGGVRTLAALRSEVEAAAEARADLLSEYRAAVDASPIAAEVAALQSIKGCAFALAAAFSAEVGDFSRFRSGRQVTAYFGLAPSQRSSGDSVRLGGISGAGNALVRKLAVEGSWCYAAARHQPKLMPRDTGVPLEIRMHGRKGSERLLRRREEMLARGMPAAKANAATAAELVRWLWALGMMCREGAE

SEQ ID NO: 158092 - protein, 350 aa, unidentified
MGKHNKSGTTQKGQVTFLGIDLSKKSFQLHGVDAKGHVVIKKKLNRKALLPFIANLPQCAIGIEACGGSHYWCRKFTELGYDVRIMAPQFVKPYVKSNKNDAADAEAICEAMQRPSMRFVPTKTIEQQDIQSLHRIRSQAVARRTALSNQIRGLLMEYGVIIPKGIAFIRKQIPLVLEDAENGLTVLFRELLSELYEEMKHLDERVEKLEQKLETIAANNEACKLLLTIPGIGLLSATALFAAIGDISAFKNGREMAAWLGLVPKQQSTGGVPTLLGISKRGDTYLRTLLIHGGRTVVRVADKHDDRRNNWIKELDQRRGKNISAVAVANKNARIAWAVLTKQEPYKAAA

SEQ ID NO: 158093 - protein, 410 aa, unidentified
MEVLVSRGCGLDVHQATVVACLLTGEPGRLPRKQVKTFSAMTNALIELRDWLKSESCTAVAMEATGVYWKPVYNILEGHFELIVANARHIKAVPGRKTDVKDAEWIADLLRHGLLQPSYIPPPELRELRSLLRYRVKLLNARSGERNRITKLLESANIKLSSVVSDLFGASGRLMLDALKRGEATPEEMAELAKRRLRSKLPELKLALDGRMEAHHRQLLSFQLDRLERFDRDLKQMDAKLEVKLKPYARQMELLDGVPGIDWVVAATVIAEMGIKMSQWPTVGHLSSWAGLCPGQNQSAGKRGKSKIRPGNPYLRSALVEAALAATREKNCYFREKYYRLKARRGHKRAVVAVAHKILIAIYYVLSSDTPYQELGADYLDRLEPERLKLNLVRRLERLGYQVKIEPKRA

SEQ ID NO: 158094 - protein, 370 aa, unidentified
MAQSIRFRYVGLDVHADSITIAVADEGRDAAQALGAVPNDFTSLTKILRRLGPSASVLCCYEAGPTGFGLARQLTAAGWACSVIAPALVPKKQGCRVKTNRRDAAKLAHFLRSGDLTVVAIPDEATEAVRDLCRAREAAKRAERVARQQLSKFLLRHGRRFTGATTWGKAHREWIARQHFERPAQQAVLEDHIAAVDLASDRVQRLTLKLLEVVEAWDRAPLARALQALRGIDLVSSATIVSEVGDFGRFAKAPDFMGFLGLIPAEDSTGDEHRRGPITRTGNAHVRRILVEAAWHYRRPPLLSKALRQRSSTVAPAVRSIAWKAQGRLHRRMVRLLGRGKEPQKVAVAVARELAGFVWAIAREEVLVAS

SEQ ID NO: 158095 - protein, 402 aa, unidentified
MNSVGIDISKGRSMVAVMRPFGEVVVSPFEVRHTDSELSELAKLLKSLDGETRVVMEATGNYHAPVAWLLHDAGLYVSVVNAMLVHDYGNNSLRRAKTDKKDAVKLANYGLDHWLTLPRYVPEEDTRLMLKTCYRQYQQYSKVQTMLKNNLISLLDTTFPDANRLFTSPPRADGSEKWVDFVAAFWHCECVCGLSEKAFTAKYHKWCRKHGYNFSEDKALDIYASACRHFGVIPKTDTAKLLVEQAISQLQATSAALAALKQEMQSLAASLPEYPVVMEMFGVGPTLGPQLIAEIGDVRRFHSKKALVAFAGIDAPPYQSGQMDVRSRSISKRGSASLRRTLFLVMGVILQHAPMNEPVYQFMNKKRSEGKPYRVYMMASANKFLRIYYASVKAYLDSLEHD

SEQ ID NO: 158096 - protein, 417 aa, unidentified
MEVLYQRCAGFDVGKDEVVACTRVPAGSGGIGGGRRQEVRTYKTFSASLAALADWLHGQGVTQVVLEATGQYWKPVWSVLEERGFELLLVNARHVKILPGRKTDVGDAAWLAELLEHGLLRSSFVPPPAIRALRDLTRYRYRKRLIQAHTAEAQRIHKTLEDASIRLGSVASDVLGVSGRAMLRALLAGERDPAVLAELARGRLRQKLPELRAALAGRFDAHHALLLRLALDHVEQLERSITTLDQEVDRVIAPFAVARDHLDTITGVGKRAAEAIIAEIGADMGVFPTAAHLASWAAVCPGNNVTGGKRRSGKTRKGNVWLSAILVECAGAAAHSRDTYLAAQFWRLARRIGKKKAAVAVGHSILVLAWHLLDGDCDDAELGGDFFARRDSDRARQRAVAQLQALGYHVTLQPTAA

SEQ ID NO: 158097 - protein, 346 aa, unidentified
MDHFVGIDVSLESCAVCVVTQSGTVAREAKIACEPEALIAFMRAMDVSITGIGLEAGPLSQWLHRHLCAAGLEAVLMETRQVKGALKAMPIKTDRRDALGIAQLIRMGWFRPVHCKSVSAQELRALLGARRTLQKSMISIELSMRGMLRGFGLKLGQITRRRLPERARELADGNEMLTAMVTAMLRGHAALRSELAKLENRLRRIARADRVCRLMMTVPGVGAVVALQVKAGIDDPARFRSSKMVGPHFGLTPRREQSGERDVVGAISAAGDQNVRTALFQAATVMLYHSQTKSWLKAWGMQVAKRRGMKRAVVAVARRLGVVLHRMWSDGTTFSLTHPAGASVAA

SEQ ID NO: 158098 - protein, 364 aa, unidentified
MFQLLLRQEESEMNATTVAVDLAKNVFELAAADGSGRVVERARLTRTQFERWFGNREVGRVVMEACGSAHHWGRVLRARGIEVWLLPPHYVRAYVKRNKTDAADACALLEAARASDIKPVAVKSVEQQALQGLHRTRSGWMASRTGRINMLRGFCREFGLVVPEGAARGLAQIARFLADERSGLPTILRGSMRLVLEEIRLMEARIQSLEQELTELAKLSPACQVLQSVPGIGLLTSTAMVAAVGDPRSFDSGRRYASFLGLTPREFSSGEHRYLGRISKRGDRYIRMLLTHGARSVLRAATVARRCGRQLDRLKSWALQVQARTNHNKAACALANKMARIAWAVWVKHEKYRTEPAFTAQPGA

SEQ ID NO: 158099 - protein, 343 aa, unidentified
MEHYVGLDVSLKRTSICVVNHTGSVVREGVVDSDPEAIALFVRSNAPGAVRIGLETGPTTTWLWTELKRLGLPVICIDARHAKAVLKMQINKSDRNDAAGIARIMQTGWFKEVRVKDIDSHLVKALLVSRALLVKIKRDLENQIRGLLKNLGLVIGRAKFNVFAVRTEELIEDRPELAAVISPLLAARKAIEEQVGDLDRKVLKLARHDMQVRRFMTVPGIGPVTALCFKATIDDPTRFKRSRSVGAYVGLTTRRHASGEVDWSGRISKCGDAMLRMYLFEAAGVLLTRVPKWSALKAWGMRLAKRNGLRKAKVAVARKLAVILHRMWIDGTEFNWSTKNATA

SEQ ID NO: 158100 - protein, 431 aa, unidentified
MKNRTSQRIEEITIGTLIVGVDVAKEVHWARFVDYRGVEYGKAVSFKNNRQGYEKILAKIHEISKLKTLRYPIDTVMIGMEPTGHYWKALANYMMKEGYRVVGVNPYHTKKSKELDDNSPTASDKKDAITIARLVKDGRFFDPYLPQEIYGELRGLSNARVSVMKRNSAVKNTITAVIDEYFPEIYTVFKKPLKGKASRQILRSCPFPAFILEMDEDDVLAEIRKAVKKTVGIKKVRELKKTAKDSIGVGYGLDAARMRLKWLLDELELLERQISEVEQAMEAALYKTGYAEQILDIKGIGIVTAASFLGEVGDPLRFQNARQIANYAGYNLTEDSSGKSKSGTVISKRGRKQLRSVLYQMAFTMVGTNAEMKELYRHLTKRKNNPLKKKQALVVVSKKIITVIYSLLKKRDTYKPELVLGTVRRKMLKAA

SEQ ID NO: 158101 - protein, 459 aa, unidentified
MPDCCLEHVYQTRLLLLDPPGGDVRLTAIGRWRMDQVVERPAALDVHKEQVTACVRVPGEGGERREEVREFKTTVRSLLGLRDWLSESGVTHVAMEATGVYWWPVWAILEDGFELLLCNAAHVKNLPGRKTDVGDSQWLCRLLECGLLRGSFVPPKPVRELRELTRRRRTLVRDRSQETNRLHKALEATGIKLDCVATDILGVSGRLMLDRLLAGERDPAVLAGLAKGRLRVKNAALVEAFEGVRFGSQNALLIGGILRHIDFLDAEIAALGDAIETHLAAAREDDTPPFEPAVRLLCSMDGIQARTAEMLLGEFGTDMTRFPSDAHFASWAAQCPGNHKSAGKRQSGKTRKGPKWLDGALHDAAMAAIRVKDGHFARKYRRIKARSGHKIAIGAVKHAILIAIYHMLKNGELYHPPIVHPDAERKQRERATQRLLAQLERLGHTVTLQTATAEAAVAP

SEQ ID NO: 158102 - protein, 341 aa, unidentified
MSMVATAGCDPHLDSIALAVIDPMGRSLVSRTVPNSEPGWRQLAGVCEEMNVALVGVEGASGYGRALSQRLTQAGMVVIEVPTRVTARERRRDGNGKTDPGDARAIARAAARGDGSVWVDDTDLETVRLLTHRREALVGTQTRDINQLRALLAEIDPERAASTPRLRSRRQFDQLARTRYGGDPYRETTAMLIRDLAADCRRRLDQIRHLERQLKTVLPPVGHSLMTIHGVGLITACQLLAEIAGTGGFATAAKLAAWAGTAPLDASSGRQQHHRLNRGGNRQANRAIHTAVITQIRHGGPAADYVARRTAEGKPEKSAIRAAKRHVTRRIWKILRAHGLT

SEQ ID NO: 158103 - protein, 351 aa, unidentified
MALAEAGLRGEVRQHGKILNTSAALKALTVKLALMGRDLRFCYEAGPCGYGIQRQLAGMGHDCAVVAPSLIPRKPGERIKTDRRDATNLAKLHRAGELTPVWVPDQAHEAIRDLVRARQAAVRTLRQARQQLSGFLLRQGYHYHRPAWTQLHRRWLASLKFEQAVHHIVLEDCIAAVEAATARRDRLEAHIEAALPEWSLAPVVQALQALRGVGLVAAATLVAELGDITRFANPRQLMAFLGLVPSEHSSGGTRRQGGITKAGNGAARRMLIEAAWSYRFPARISREQLLRQERLAKPIRDIAWKAQERLCRRYRRLARAGKLPTVITAAIARELAGFIWAIAQQAQPATS

SEQ ID NO: 158104 - protein, 413 aa, unidentified
MTGISHSVGSCPMVAIDIAKLSHEVLIEFPDGKRKRMKVRNSREGFESFFEHLKPFPKVIAGLEPSGNYHRNFAHFLLEKSVDLKCISSIVAARTREALHNSWDKNDPKDAQVILYLLKHNLTQIYHDPYKERTIDVQELAGKHYQISQRRTEIRHSIINHYFAIYFPEAEKFWNPNRGEWFGRLMLHFPAPSFVQSLTEDEFLNQALPLLKGRPMKEVLLRDFYLVAKNSIGVPTSIDSEMVRLFKDDILEMQQLTERLKKIEERSHEYLCHRTDYKVLRSLPGIGPVIALNIIAEAGDLKRFKHEKQFLKFCGFDLSTSQSGQYRGYSQISKRGNRRLRSMFWQAAKTAVHMNTNSFQKKFSDYISKDPKNKDLRRKAYTATAIKMARVAYALVTKETYYRPLSMEVGQVE

SEQ ID NO: 158105 - protein, 409 aa, unidentified
MDVFHERCAGLDVHKEKIFVCVLIGRGSGFQKITFQYGTFHHQLVEMRQKLVELGVTHVLMESTGVYWMPVYDVLEGFVEVVVGNAQHIMNVPGRKTDESDAEWLAKLLRFGLVKPSFVPAREFRELRQLTRYRRAVVQTRASEQNRVEKHLQISGVKLSSVASRVFGVSGTDMLNRIAEGTTDPGELAGLARGRLRKKMPQLRDAFAGSISEHTQHLISLQMEQMNRLESTIAQAELKIDEKVKPYEELLARLDDMPGLNLRSSIDVLAEIGTDMSPWATHRQIAAMAGLCPGNYISAGKRLKNRSRQGNPYLKSILVQAACSAINVDGSYYQAKFKALKKRRGHKRALVAIAHAMLVAIYHMIKKGEPYRELGAKVVSDHELSRKKEYLVKQFQNLGFAVSLTPLTA

SEQ ID NO: 158106 - protein, 348 aa, unidentified
MDKITAVGLDLAKQIIQVHGIDAAGRVVLRKAVRRERLLALLAQLPRCVVGMEACSGTHHWARELRQLGHEPRIMAAEFVRPFRKSLAAKNDANDAEAVCTAVVQPNMRFVSIKSVEQQALLSLHRIRQGLIEERTATINRLRGVLAEFGVVLPQSAVRLQRALPAVLADEECLPALVQRSVQMLREHLHDLDSRVAEFDRGIAQHAKSSAPAQHLVALSGVGPLTASAVVATVGNARDYRNGRQFAAWLGLVPRQYSSGGKRKLGRITRRGDAYLRALLIQGARSTLQAALRRAPARHDRLSAWIVQLAQRVGYHKTLVAIANKHARIIWALLARDQALDLARTTTR

SEQ ID NO: 158107 - protein, 418 aa, unidentified
MSRTLTKKLTIIKPGMLFVGIDLGKQTNVAVVIDQQARQLGRFSFGHNQEGYAYMIRQLQQICKHAGAAEMLVGMEPTGYFWKLVAVALERQGIKYRLVNAYTVKKHREGDQLDRAKDDNRDAFTIADLLRTGKFTETQRLTGVYAELREYHVAYYRLTQEIGRLKGLLDTAVGQCFPELRQLFKSLTGKTVRAMLWQHASAQAIRCLAETEFLASVAADFAGKRLQRKKLRQAYQLAQVSVGLTDTVACQLTIRCLLEELALKETQLAAVKRELMVCFFSCSEAEYMISLPLGDVVTAGILAEIGDPKRYSSAKQLVKLAGIQPSPNHSGQKTRSPTPMSGKGRAALRTMLFFGCLHLIRTEATFTAYYQHLKTRPKNPLTGLQAIGVLMGKVLHILWALIRQQTYYNPANWHLNYQ

SEQ ID NO: 158108 - protein, 376 aa, unidentified
MSTTQHTMMAVMVEISGANWLVASYAGGHVRPRRKSLAQGQAQERFAALVEEIQTARKRLGVLEGARVVVAYEAGQEGFWLVRALRQAGLEAEVIDPVSLQVDRRARRAKTDRLDVEALVMALWRYLQGERQALRMVRVPSEEAEDSREWQRERDRLKKETQGCADRIRKKLRTHGIWVLPKHWGSALRAGELRTFARQPLGNQLQQALVMELERLELAQAKLQALEKTAGELCASARQRIEALVQLRGIGRCGARALSTLLYWRQFDNGRQVGACVGMVGVPYDSGLLRQDQGISKAGDPKLRALLVELSWLWLRHQPNSVIAQWFRQRTEGAGRRGKRVMIVAVARRLAVALWRYLAAGIVPEGARFKAAVASV

SEQ ID NO: 158109 - protein, 388 aa, unidentified
MRRPTPSHEVRYTGLNNSTGSRPKRRELAVEQSISTTIGMDLGDRYSQLCVVDADGGIVEEGQVRTEESKLRASFGSRARARVVMEAGTHSPWVSRLLEGLGHEVVVANPRQLRLISQSDRKSDRYDAQVLARLGRVDPALLRPIRHRSAETLADREMLRARDTLVRARTQLVNHVRSAVKVTGGRLPASGTSAFVKKVSPAIPARVRPALEPVLGVITALNEALRHYERELETLADTRHPETACLRQVAGVGVVTSLAYVLTLEDPHRFAKSRSVGAYLGLRPRQHQSGDMDLQMRISKAGDRDLRRLLVQSAHYILGPFGPDTDLKRYGQRLAARGGKSAKKRAVVAVARKLAVLLHRLWVTGEVYEPLRAVARKAESERAEGAAA

SEQ ID NO: 158110 - protein, 401 aa, unidentified
MFVGWDWASTTHDVTVLDEAGAVVDRWAFRHTEQDLAAALDRLARLGEPAALPVIIERTSGLVVDRLVAAGHPVVPVHPTAFWAARPRWGASGAKSDAGDSYKLADYLRTDGHRLRRLDRSDPGLQELQALVRLREDHVRARTAASNQLGALLEAHWPGPKAVFYRLASPIALAFLADYPTPQAAAHLGEARMASFCRRHSYRGGKPPAALLARLRSVPTAPVGIPPATLATLVHAQVQLLRTLLVTIAELEATIAARVACHPRAKLLASLPGVGTINLAQLLAEVGPILDRVESAEHAAAECGAAPVTKASGKTSGVYFRWAANRRARKALTAFAHNSRLASPWAGRLYADARARGKRNPHATRIVARAWLRVIWACWQQATPYNPVLHTAALRAAARPT

SEQ ID NO: 158111 - protein, 382 aa, unidentified
MECTLVTSIHVIRKSGGTLYAPLVLQDRRVAEGPPEPFPERLPTLNSCWERSTTTDSANKDRSATMTDTYVGVDVSRAWIDTFCPLTNQHQRLTMDPAILDTFAAGLSSKGVVVVLEATGGCERALLHALTIHKVGYARVNPRQAREFARATGRLAKTDAVDARMLADMGEKFALKADDPIDPQRARLADLVARREALIGYITKEKQRLGTTVDLFIKDDIATTLTFLKTRLAALTKEIAAHIKSATQLAKLDAALQSAPGIGPVVAATLVAGLPEIGTTNRRALASLAGLAPHACDSGIRRGSRHIWGGRAQIRRALYLAAFIASSRDPVLKEFRAKLSNQQRPFKAIIIAVARKLLTHLNAMIRSGQPWSNQINAELTPA

SEQ ID NO: 158112 - protein, 389 aa, unidentified
MNKINVGIDIAKNEHYASFINSSGEILVKPFKFTNDLTGFKILEDKLKLYSTNDIIIGFESTAHYANSLMFYFFNKGYNLTIINPLKTHALRNINIRGAKTDRIDANLIATFLRSNDYKLVGQKFIDLIELKTLVRSRQNIVTSRTKAKIQLISVLDQVFPEYASFFKDSLHGKASYSLLKEYQNPKEISKLHLTKLTNLLLDNSHKRFDKNKAHALKELAKFSIGLENKALELNIKHYIEQIEMFGKQKTELEKRISILLGNLDCPLTSIKGIGTVTAATIIAEIGDINRFKNSSKLVAFAGLDPKVKQSGNFNASSVRMSKRGSRQLRYALIFACENLARNTTTFADYYTKKRDEGKSHYQALGHCAGKFIRILFRVMKDNTEFNLI

SEQ ID NO: 158113 - protein, 335 aa, unidentified
MKNYLFHIGIDVSKLKLDVVVLDIKLSNQTEHFVVENNQKGIKSILDYLKKNKVNPITTLFCYESTGVYNYPLNFFLSEKKLDYWVVPAIEIKRSKGISRGKNDKADAKDIAFYSLRNIDKLNLSSVPEKEIQQLKLLFSEREKLVKAILLFESSKENKGFISKDVYKEIELINAKTIHNLKNSLKIIERKMKTIISSNEQLKQQYDLVKSIPGVGEQTAIYFIMVTKGFKAFKTWRKFACYSGVAPFEYSSGSSVRGRTKVNHLADKKMKSLLQMCAMTTIKYDPQLKEYYQKKKEEGKNGMLVLNNIRCKIISRVFAVINRQTPYINTYKFAG

SEQ ID NO: 158114 - protein, 371 aa, unidentified
MNTIVYVGMDVHKESYTLCCYSYDTDKVEYKQTIPADYKLILKYMEQVRNRYEGEVSFVCGYEAGCLGYSLYQHLKEHEVDCKILAPTTMAITNKSHVKTDKRDAANIARCLAFHTYSEVYVPDDEDNAVKEYIRMRDDQNRMLKQIKQQILAYVLRSGKKFEGGKTYWTIAHLKWLKTLNLGGVNGEALKEYLITYDYLVEKIERLDQRIEELATNEKYAEKVKNMSCFIGVKTYTALSMIVEIGDFERFESAQKFSGFLGLVPSENSSGDSTHRYNITKAGNSHLRRLMVEAAQGYTRGAIGHKSLALKQRQKGCDPEVVAYADKANERLRRKFYRMTLNRGINRKIATTAIARELACFMWGMATGKII

SEQ ID NO: 158115 - protein, 384 aa, unidentified
MSRVVIGVDPHKASNTLVVIDAQERVLAQQRFANDRAGYRSMKTFARAHRDRVWAVEGARGVGAGLARRLVAEGEPVLDVPARLSARVRALGGGSGRKTDDADAFAVAVAGLRSRDLQVVRPDDTVEILRLLSTRRQEVVAQRIATVNRLHDVLCQLIPGGAKRHLSATRSRQLLSAVRPRDAVGKARKQLALDYLGELLRLDARLKDLKKSLTEVLDEHPTTLREINGVGPINAAKILAETGDVRRFASRHHFASYTGTAPVDVSSGDNNRHRLNRGGNRRLNHALHIAAVVQYRMPGPGQDYYRRKRDHGKTHLEALRCLKRRLSDVVYRHLTDDTAAGSPGGQVGASLQSSAADLIPMASTSEQSLPGLENDLTPVSAVVS

SEQ ID NO: 158116 - protein, 411 aa, unidentified
MNDLLQYLFVGIDVSKENNQVYAMNFSQEKLASFSTPNHQSGANLLEENLLDILDRHHLSKIIIAMESTGIYSAHIATYLSASKFLFPFEVKVYVLNPKISRNYRHSFSDMDKTDPKDAFILSDLARVGRCEKLTPFKGPQKIALQRLTRHRHHIAELLAKEKVYALNNVFLKFSEFKGILSNDFSKTAIELLLNFKSVDEIINVPLEELVEFVMTSSKNRFADSNQIALTLKAAARNSYRLDKMAYEPINLSLAASFNCISTYQTELKSIDLAILKQVKGLNQNHYLSLISIPGIGPVYASGILAEIGQIDQFDSDDALAKYAGITWRKSQSGTFDAEDTRMTKTGNVYLRYFITEAANLARIHNPVFKEYYQNKFDEVKTHQHKRALALTARKLIRLIFGLLSTDRLYK

SEQ ID NO: 158117 - protein, 346 aa, unidentified
MHYIGMDCHITTLDFAVVNEAGRLVKAHRVATSVNGFMEFVKTVPSPRTIYMEEGTLAAWALETCIRFREKLVITDAKKNHWIGSSGQKDDSIDALKLAQLARGGYIKEIHHPIGQRRRFRELMIAYHDTVRSTTRIKNKIKAKFRHNGIQCTGATVYSETHREEWKRKLPQEATLLLILDGLWRQLKQSEQTEKELLAAARTQAKHYPEIKLFEDIPGIGFISAATISAMLETPYRFADKKKVWMYAGLGIMTRSSGGKTYSEKLSTDYNRLLKYTLKQAAEVAIQAKDNPFRRKYLYMTLLHGIVPHRAKLTIARDMLATMWAMWRKGEKYSPEIGEKATCKQG

SEQ ID NO: 158118 - protein, 339 aa, unidentified
MTVKIVGLDLAKDVFQVHGISEAGRKIFNKKIKRAKLLAFFEALPRCIIGMEACGSAHHWGRELRKMGHDVRLMPATYVKPYVKRGKTDAADAEAICEAVQRPTMRFVEIKSEEQQAVLAIHRSRDLVVRQRTQVVNMIRSILREFGHILPTGIEAVSSFARSHGTKEQLAMPEIADGILGLMYHQLLGLNVRIDGLTKLIGQHAILDQDAKRLMRMPGVGPITASAIVATIGDAHQFRTGRDLAAWLGLTPLNKSSGGKERLGRITKKGDRYIRKLLIIGMTSRALMARNKPEKADIWTAKMLAEKPFRLATVAMANKSARIIWAILTKREEYRQPVV

SEQ ID NO: 158119 - protein, 353 aa, unidentified
MRKMQKHIVKSNRICIGLEDSKRTWKICVRCDRMIVHETSMPADYEILYSYLQNKFPDCQIQIMYEAGFSGFWLHYSLQSDGIECIVTPAHKVTQPKVSKVKTDKVDARRLALNLESGDYSRCFVHDRELREDRQIIRTLNQIQNKITSTKNQIRKFLDCHGLNKELAPGAWRSSHYASLKTMKLRKSLQICLHTYLDLLDYLLEVKDKLLEQLKELCKKEQYSKSVALKESHPGIGWLTAIRFTLEWGDLSRFPSGKHFASFTGLTASEHSSGEQIHRGRITCQGSGKVRSWLIQSAWRAIKLDPVLLHKYQSVWNNSGSKKKAIVAVARKLAVRIRAVELSGQPYAIGVIE

SEQ ID NO: 158120 - protein, 372 aa, unidentified
MLSPGGARGVQKAELNGNVDSTTTEAPQGHMYYIGLDVHKKTISYCVKDASGQVHQEGKVGATRWELDDWMKTLPQPWTVAMEATIFTGWIYDHLLPHAQQVKVAHPLMLRAIAAAKKKNDRIDAGKIADCLRCDFLPECHMASTAIRDRRRTLRYRHLLVRQMVQMKNRISGLLMETGVSHNKQRLHKVKYFRELLATNEEVNESIRPLLRVSRDTIVRLQKMEYALVSSLQRDPLLAERIRRLRTVPGVGPITALTWALEMGEVSRFPSIREAISYCGLCGDEKSSADKVTRTPLSKQRNKHIQRVLVEAAKLAPRQDHALALVYEREKQKGNANRATLAVARKMVAYLLAVDRGRRDFVPFPDSQSVAA

SEQ ID NO: 158121 - protein, 398 aa, unidentified
MRVSGLDVHKDTIFCAVHNGKKPEAVKEFLTLTSSIREMGTYLKGVGVETVAMESTGIYWIPVWNILETMGFKLMLINPYLIKQMPGRKSDVKDAQWIAMLLQKQLLRGSLVPGARIRELRTYSRKYVKLQQRMTTALQAIERTLELCNIRITSFVTKIESKSVLSVVKRIIQGETSPDHLVECIFGSIINKHGPKIKQSLEGFICEHQRFALELNYAEYEFLLGQSQRCEEMMYKLCTEHYSRELELLQTIPGIKLLAAMLIIAETGADMKAFENSGKFSGWTGLRPRNDESAGKYKSTAITKGNRYLCALLVQVAWGAVRTKGSSFQEKFARLAIRKSRKKALIAMARKLGVVVWNILYHDQPYNPQLVATYEPEKVLAKVNYHQREIARLQRRLV

SEQ ID NO: 158122 - protein, 340 aa, unidentified
MPGPRARIRKAGRSGVLNPSRKEHVNSTREIFVGIDVSKARLDIHVLPSGDLWTTENQTDAITTLVSRLRSLQPTLIVLEATGGLERRVLAALLTADLPAVAMNPRQVRDFAKGMGYLAKTDAIDARVLALFAEKARPEVRPLPDAQTQELEALMVRRRQVVDMLTAEKNRLSSAPPSKRVIRAIRKTISCLEDQLEDLDKDIDNAIRESPAWREKDEVLQSVPGVGRVLSRTLLGHVPELGTISKKKMGILIGVAPLNCDSGKYRGQRHCWGGRTEVRNVLYMATLSAIRRNPVIKAFYDRISSGKLRKVAIVACMHKLLTILNAMVRSNSRWSPAFSP

SEQ ID NO: 158123 - protein, 340 aa, unidentified
MKRLSSLTGLNLNSIEAIGLDVANEKIDICLFSSQQSLFYRIANNSQAICQFSTDLTKNGLLKTVPFVLESTWIYHLQCALQLTDDWWDVKEINPIITHQQIGYTIRWTKTDTTDSLLLAELWVTKWKKLHSFKRNRKIIELRKKISLLAWVEKTMQAIKAQYDSYIKSARILWINTNDVDFIRKSLDDLNKCKKELEKSIISESVDEGWTRRIEIIDSITWISPLIAKICYTTFASNDFESKKQMLAYVWLDPKLRQSWTKSWSYKMSKRWNAFTRKKLFQAAFCWIQHSKQYKYIYNREIEKWKHHFEAVLTVAKKMIYTIRSLIKKNEVFDPNYCAM

SEQ ID NO: 158124 - protein, 365 aa, unidentified
MPEGMRWVGLDVHAYETACAVFDAATGEVESGKLAGRPHELLEWLERVERPFRAVYEAGPTGYGLARRAAERGLELAVCAPGHIARKPGDRVKTDKRDALRLARLLAAGDLTLVVVPPVEHERLRDLVRCREDVRSDLMRARHRIGKFLLRRELYYPGRGRRGRNWTRHHLDWVAGLRFEDLASELTLSDYLHAHDVLLARRDRLDQSLEALAAESPWAETIARLRCLRGIDTLSALGLCAELSDWTRFGSRQALAAYLGLVPSEHSSGERRRQGSITKAGSAHARRLLVEAAHHYRRPPRLSSSLERRQRGQAAWIIDLAWRAQRRLHGRWRRLNAERGKGSGITAIAVARELAGFCWELAITD

SEQ ID NO: 158125 - protein, 425 aa, unidentified
MKITHIAEKINLNQVMDISVDVHKDNLNLFFAADSREYTDICSNRTDVIQRRIIKYQNIAKEHGMNNLRIICEPTGQYQNSLLRTARRNGCLTCYVNAESVKKFRVVETNDTGKTDIKDPRVISTLAKLNKVIKHRMIGEDYLMLRKLGKIYDETDVEIVRLKGRLSKLLVELFCDYSFKKDFLYSASGLALIEKYGCNPYRIVKSGFNKFSKTMKRAAPRIQTKTLKRLFEDAQSSVLNELPPGYIEVLQQRFYQLFQDYLRHDKRKEDIVRKMIEILEKLRKKDPNIPPPTLGVISAKNLARLLGETGPLYDFSNWRKLMRYFGLNIRMRQSGKYQGQYKITKKGRPLGRKVLDNIILPLVKKGCLYGDYYHLKKEKEKRPGNKAMTIIMRNFLKKFYGWYKSGKAFDEKRFFDSESLYLKAA

SEQ ID NO: 158126 - protein, 455 aa, unidentified
MPKRTTGDRPELKQVNVGAAAIDIGSKMHMAAVDPTCADMPVRAFGTFTQDLHDLADWFKACGVTSVAMESTGVYWIPAYEILEQRGFEVILVNARYAKNVPGRKTDVSDAAWLRQLHSYGLLRGSFRPDAEIATLRAYLRQRERLVEYAAAHIQHMQKALMEMNLQLHHVVSDITGATGMRIIRAIVAGERNPDVLATYRDVRCHSSIETIRAALVGNDRDEHVFALTQSLELYDTYQAKMLDCDRKLESLIKALTDKGAKTVGKLSRPRVKTKQVNTPSFDVRNALYGVLGVDLTEIHGLGPSLALKLIGECGTDLRAWPTAKHFTSWLCLAPGNKISGGKVLSSRTRRSSSRAAALLRLAATTIGRSGTALGAFYRRLSSRAGKAKAVTATARKIAVLFYNTLRHGMAYRDPGADHYEEQYRSRVLANLKRRAKSLGFVLQAVPCDAEVAVS

SEQ ID NO: 158127 - protein, 345 aa, unidentified
MDHFAGLDVSVKETSVCIVNDTGRIVREVKVASEPEALLAVLKNPAYHFERIGLEAGPLSQWLFSALAEAELPVVCVETRHMQAVLKAQINKTDRNDARGIAQMIRVGLYRPVHVKTLRSQKLRMLLTHRKLLQSKAIAIENDLRGTLRNFGLKVGMVGKVRFEARIQELVENIPDLAVLVEPLLIVRRVLREQIVILHRRLLAIVREDEVCRRLMTTPGVGPVVALTYRATVDVPARFRKSKSVGAVFGLTCSKYQSGEIDRSGSISRCGDEMMRVMLYEAAQSMLRSKKWSWLKAWAMQIARRRGMKKAIVALARRLAVIMHRIWVDGTEFRWTREQAAVAAA

SEQ ID NO: 158128 - protein, 345 aa, unidentified
MNIIRVGVDIAKSVFHVHGVDRYGQTRWQGKYSRNKWLDAVSRKVPVGAEIGMEACASSHHWARELQSRGYHVRLIAAQFVKPYVKSNKNDRVDAEAICEAMSRPNMRFVAPKTVAQQDIQAAHRIREELVGQRTAKANQIRGLVGEYGIIAPVGIQQLRRALPGWLEDAENGLSDSFRILLNGLAEDLRHLDDRIQALDDRISDSVKQDPVAKRLMTLRGVGPLTASALSGALGDGKAFRKGRDFAASLGLTPRQHSTGGRDRLLGISKRGDSYLRKLLVHGARAVLRHVEGKDDGLSHWLKALVARKHANVATVALANKTARIAWALVHNDTGYDESLAAANR

SEQ ID NO: 158129 - protein, 351 aa, unidentified
MLHAGLDLSRKRLDVCVLANDGTRLATTLCPPDADGLRHLVREVADLGGPVQAVIESMNGARFVHDTLELHGWDVEIADAQRAKGLAPLTCKTDKIDAWVLAELSRRDLVPSIWLPTPRVRAERERARFRLHLVRHRVMLKNRIHATLLAFGKPCSTSDLFGLEGRELLSRLDVPDPWRQDMATALSLIDTLDEEIRAIEHELAESGATHPYVQLLTTAPGIGWVLGYTIASEIGDIHRFASPKKLVGYTGLTPQVIQSGASDRRGPLAKNGPKYLRWALIEATTHAAKHPAYKDHFDRTAERLGRQRGRKIARVEVARKLAAAIWHMCQTGAAFAPGRSLGDSGHPMAPC

SEQ ID NO: 158130 - protein, 418 aa, unidentified
MEVLHERCAGLDVHKKTVVACVRLARDGGVEKEVRTFKTTTADLLALGEWLDGHDVNHVVMEATGVYWKPVWHILDDGDRELVLANAAHVKNLPGHKSDVSDCDWLSDLEAHGLIRGSFVPNRQTQELRGLLRTRKQKVRERSSNTLRLQKTLEEANIKLDSVISNVIGVSGRRMIEAMIGGETDPVALAALADRRIKAPPEVLCEALRGRVTGHHRFLLGLQLEHIDALDGMIDKIDQQIDASVEPFRAAAGLLTTISGVNQLAGRAIVSEIGIDMSRFETAGHLISWAGLCPRNDESAGKRRSTRIRKGAPWLKDILVQCAWAATRTKATYLHAQFVRIRSRRGPKKAIIAVAASILTAAYHMLKNGVPYRDLGPQHFHSRNKQAQAKRLLARLRDLGFTAEFDSLKPIPDAVVSY

SEQ ID NO: 158131 - protein, 329 aa, unidentified
MEQFIGCDAHKKYSVFVAVNERGEASPAIRVVHDREQYRQFLEGLPAGSQIALEAGGHYYWMVDEMEAAGHQPRLVHPLEAKKRMGKTSKKTDQVDAHGLGILLRNGTLPEVWIPPSGLRDQRESLRLRMFLVQQRTRLKNRIQGALARYNIQIAGVNDLFGGEGRLRLGQRLGELPEHTRQSVELELVTLDFLEVQLGDIEKRLEELMKVTAEADLLKTLPYVGRILSMVMTLEIGKVERLASAAHLASYAGLVPRVHASGRHTRLGQICGNVNHYLKWAFIEAGNLVVIHQKRLAGQHVVRLYQRVKRKKNHQKAVVAVARHLAEAA

SEQ ID NO: 158132 - protein, 349 aa, unidentified
MVTIGVDPHKKTHSAVAVDAVGAALDARTEPAKRDGFGELLTWARGLRDAERVWVIEDCRHVSGPLERFLLDHGETVVRLPPRLMAGARQSVRERGKSDPIDALAVARAALREGIDTLPAARLAGVELEIRQLAVHRQRLVDARTRLINELRWQLHDLWPEWEIPQGVLTGAGWQQQVARRLQRAEPTVRVRIARDEIRRIADLTTTINQLHRELAALVAQVAPQLLAEHGLGALTAAKLIGEIAGIERFTSDAQLARLAGCAPIPVSSGRTDRHRLDRGGNRQLNHAIHMLALSKIRHDPQTAIYIAKQRQRGKTNREAIRCLKRHLIRRVYNLLRDPISTPTTLCLT

SEQ ID NO: 158133 - protein, 499 aa, unidentified
MHSKVVSKPEKLDKRHIYGCQLKSLIATKRYPTDLTDAEWVRIDPLLPGFSKRGRKPSVDLREVLNAIRYMTRSGGGWRMLPKDFPPWQTVYWWFCRFVRLMLFRTIHDVALIMDCERCGHEASPEGGVLDRWDGCRPPQTASQCASMVVYEPRSGEDGEMKDMMIGVDLAKRVFQVHGALSNGEVQFRKKLTRQQFRDFMEKQAPSLVIFEACGSASYWAREIESLGHEVKLIAPQYVRPFVKRQKNDAADAEAIVIAARQPEMRFVMPKTVEQQARAALFRGRDRIVRQRTEDVNALRAVLYEHGHVFPAGLVHLKRIEALVEDDTCDLPTMIREECRDLLAQIAEKTGRIAARDKQLKDLATQTDTARRLQTMPGVGPLTALAVEAFSPDMAQFKRGRDFAAWLGLVPRQHSSGGKERLGRISKAGQTDIRRLLITGAMTRLLGRARRKILAESWIERMLARKPKMLVVIALANKMARQIWAILTKNEVYKDPALA

SEQ ID NO: 158134 - protein, 439 aa, unidentified
MPTPCLPVIDPTAAAIDVGSEQLHVSVAGGAPKVFGTTTGQLHELRDWLKAQGVKTVAMEATGVYWLCPYEVLEKAGLQVVVVNGKYVKNLPGRKTDMKDCQWQATLHAHGLLKPGFVPPEHIRRLQDYLRVRTDHITMAASHEQHMQKALDRMNLKIHDVLSDLTGMSGLKMVEAIIKGERNPVALLALCDPQVQKNKAGQVRAALEGTWKEEHLFALRQAYELWQFYQSKIAECDGAIETVLKEIAGPEDPAKPAPPALKRGGVNAPHIAGLHSLLWRLCGNKDLTVLPGVADYVLLQLLAEVGTELQQNWRSEKHFTAWMGLAPGSRQSGKRRGSQKRGRNRAGRLFCIIARSVGRAVDKALGGFYRRLKGRRGGLVANLALARKLAELFWRLMVHGRAYVEQGLKKYEEKVAQTEQYLLQKLARKYNMVLQPKAA

SEQ ID NO: 158135 - protein, 375 aa, unidentified
MGAEQKNAAGRSLAPWCIRHRFEAGSPVALVFNPNSRLGPRARICKEGSPTMKDSNTADAQSNGLFWGVDVASDKLDLGCHDEAEVVSFENSADGIGQLVEHVQHEPLTLLVVEATGGYETLLVKELAKAGLAVVVINPRQLRAFATAVGELAKTDAIDARLIARFAHDVRPAVRPLPTEKQRFFADLAARRRQLIGLRTAERNRRRQAGRSELLASIDAILLVLDEQITRLENRLAELIASDPQWQQRDEIIQSVAGLAAVTSHTLIADLPELGQLNHKQLTKLVGIAPLCRDSGKMRGRRAIAGGRRTVRTALYMAAVNAKRWNPPIRACYERLRAAGKSYKVAITACMRKMLVLLNALVRNNSLWRNPAMNT

SEQ ID NO: 158136 - protein, 312 aa, unidentified
MKKVFIGIDIAKDTIDISVLPSGESWTVGATPTELPETVDRLAALKPTNIVMEATGGYETRLAASLATAGLPVAVVNPRQVRDLARALGILAKTDAIDAHVLALFTKTITLEHRPIPTDEERALKELLTRRYQLVDMRTAESNRRQHIVSKQVYGSITTLIESINHELDVIEREIDNRIKASPVWRAKDKLLQSVPGIGKTTASMLIVALPELGYLNRRQIASLAGLAPMNRDSGTFRGRRMITGGRALIRAGLYMPILSAVRYNPKIKPFYDRLIAAGKLEKVAITACMRKLLTMLNAIVRENEPWRPIPA

SEQ ID NO: 158137 - protein, 392 aa, unidentified
MFYCGIDIAKYKHEAAVIDEAGMALLDSISFANSKEGCEKLLALFQRLDIAKDALIVGMEATGHYWLSVYGYLLERGFEVKVINPIQSEAFRKMYIRQTKTDRKDSFIIAQIMRFGQFSATNLSEEVIVAMRQLSRYQLALVDACGDCKRRVIALLDQVFPEYDTLFSDTFGVTSKEVLSQYPTPEDLLSVSTRKLANLLEKASRGRFGKEKAEQLKAAAASSFGVSFAKDAFAFQIRQLIEQLEFLEGQIAELEEQISSLLKQTGSYITTIPGIGDILGAIILSEIGDIHRFDAPNKLVAFAGLDVRVTQSGEFTGTRQKISKRGSPYLRRAIWLAASRAAFCDPILSEYYQSLRAVSRKLCNTIYTILKEDRPWQPIPPRDRKVSNHTGQ

SEQ ID NO: 158138 - protein, 368 aa, unidentified
MMGWMAPLRHLGAKVLVDRKPPANREPSMNEITTVGLDLAKHVFQVHGVDAEGTTVLRKQLRRGQVLAFFSRLPRCLVGMEACATAHYWARELRALGHEVRLMPAQYVKAYVKRNKNDAADAEAICEAVGRPTMRFVPVKTAEQQAAVLLHRGRERLVRQRTMLVNALRAHLAEFGVIAPQGLRNVGRLIAIIRDDDDARLPGLARQVLQVLAVQIEQLEAAIAALEKRLMGWHKSNPVSQRLATIPGIGPIIATAIAAMVAEPSGFRSGREFAAWLGLVPRQNSTGGKNRLGGISKRGNQYLRRLLINGASANLLRSKATNADPWVIGLRRRRPSLVVAVALANKTARIAWAVMHRQENYQRMATAA

SEQ ID NO: 158139 - protein, 309 aa, unidentified
MIEPIVKRCAGLDVHKMKVTVTVLIEQDDGSIYEETKEFKTFRKHRRQLARWLKRLMIDLAVMESTGNYWRSIYDSLDAEDIAAWVVNARHLKQVPGRKTDVSDSRWLAMVSRMGLIRPSFIPSKDFRELRLITRQRQKLVDCLSAEKNRLHKVLDDAGIRLGGVVSDINGVSSQQMIAGLIEGKIPSELVSYAKGRLKEKTPELLEALDEPLGERHRMLLSKIQEHINYLNGQIRELDEYLFEQMAPYRKQWEILQTMPGMDKTSAAILLVELGTEMNRFGGSSNLASWAGLCPGNNESAGNEYRSHK

SEQ ID NO: 158140 - protein, 351 aa, unidentified
MNYVGVDYHKKYSYMVVKNEHGRVEGRGTVNNTKEEVQQFLEPYRPGIGVVEATRNWGLIYDWLDEVLDDVTLAHPLKVKAIAEARIKTDKISADILADLLRADLLPKAYAPSKPTRDIKNILRQRMFFVRIQTMVKNRIYDILDRHPEVLAQVPEASDLFGAAGMQWLGQTTLSGEDNMLLSSELRLLKYLKEEITQSNGIVKKLAKKDARAGLLQSIPGIGPFFSVLILYEIDDISRFRDEKKLCAYAGIVPSTHASGGKVFHGRITKTGNKWLRWAAIEAAQTAVRSDSEFRAYYQRIKVRKGTNAAKVATARRLLTIVYRLLRQGRFYERRTTPQEKIIIPAALVIS

SEQ ID NO: 158141 - protein, 355 aa, unidentified
MDKYIGLDIDSKKVVACVIEKGMAERYTTMRSEVSLIRRFLEQEKAGGACVHIVFEISGQAGFLYDSLIDCVDSITVANPSKMTWIYRTAKKNDRIDAKKMAVLLSIGEIPKVHMPRSEIRQWRQMILHRRNVVNKVTNVKNRIRALLKSRGYTKPLHKGSLWKRANRIWIRRLAEGNWLWSVQLVHLVDELEMLESQLERVTGTLDDYLQSQPGGVLLMIIKGVGPRTAEAVLAYTDDVHRFTTGKAFCSYFGLTCRLDESGTSRRLGHISKEGPSVVRWVLIESCWKVVRYCPAMRRFYERVMAGQKGRKKIAIVAVARKLLSIMRAMMVTGELYNERLADGTEGYIAVRQAG

SEQ ID NO: 158142 - protein, 414 aa, unidentified
MTVDSVAQKRSVIKPDTLVIGIDLAKHTHVARARFYDGSYTRPVKVPNTRAGFLALNEQIGAWKARPDSAVIVGVESTGSYGVNLVRWLAEHGCRVVLVPSLHVCREKELLDNGRGTNDGKDALIIADLVARGQYLGFVALSGACIELRPLVSLRARLVREQTGWINALHQTVDVLFPEFETVFADLKPPSARLVLGRFGTVAAAQAHSPTEMRRLLARDGAARVSLAKLKRLQAAAAESIGPRQVSAGQERSLHEMLETLATLAGRIASLEAEIVRLLAPLAEAEYLMSLKGIGAMTAAVIMAETGGLLQYSCARAVQKLAGLNLYQNSSGQYQSGRHISKRGRSQLRRALYMVAVQNAKHGWPLQPYYAALVARGKPKTVALTAVCCRLVRLLYALVRDGRCYSECPPKVAA

SEQ ID NO: 158143 - protein, 371 aa, unidentified
MSNDIKFFVGLDVHKDSTAIAVCEPGRAASRFVGSVGPDLQQVLKVLQRYGDTARVSVVYEAGPTGYGLQRALAERGYRCEIIAPSLIPRRAGERIKTDRRDCARLAELSRAGELKAIWVPDAAHEAIRNLWRAREDAVGARLKARQQLKAFLLRAGRRYEGKTAWTKMHERWIEAQHFDGRADQITLTEYQLAVRAAGERVQRLTAALEQATVDWRFGPAVVALRALRGIDTVSAIGLVCEIGDISRFATARQLMGYLGLVPSEHSSGGTVRRGSITKTGNAHARRLLTEAAWNYRFPARMSTTLRGRSKGLPPAIQMHAWRAQLRLCARFAHLSHRGVQANKICVAVARELAGFVWAIAHQAAPSAGQS

SEQ ID NO: 158144 - protein, 414 aa, unidentified
MEAWPEAIPAFLILLKEVRMTLFVGIDVSKEKCDACGIGEGGEKVFSLTSTMDRKGFEKLLVHLKETDRAFVLVGLESTACYHIALFSYLTAQGYRVVIINPLLIANFVKLQLRKTKTDKKDARTIAQFLMLRKEALSHQVVSADLMELRDLARRRERLTDQVTKLKGNMKRILSVIFPELEHHTGVFAKSILQLLTRFPSADALKKADIDTVAAIVVPRSWGRKSRSWIETLMAAAVSSVGVSSPAKELVLKQEASLLLYVEEQIKEATNVLIGLCNDRMKKDIEILTSIQGIGETTAVHFLVEMGGDIHLYENDKKLIAAAGLDPSTYQSGKYAGKSRLSKRGNRHLRRVIWLMAKTVVFSNNIFRAYFYKRRREGLPYKKAVLATAHKLIRVMYSMLVHQTYFQQEANKDS

SEQ ID NO: 158145 - protein, 342 aa, unidentified
MNNISIVGIDLAKHVFQLHAVDPKGRQVFSKKVSRSGLRLTLAQVPPCRVAMEACGGAHYWAREIEALGHEVHLIPPQYVKPFVLGHKSDARDARAIAEAAARDATPRVATKTLEQQALQAMHRVRSRAIANRTALGNELHGLLAEMGIIVAKGHSVFRQGEVRRLLAEHRTELGDDLFVVLDDVLDQWLALDNRIRAYDQRLARLAKATPVCQRLLSVPGIGPVNATLLVSHIGDPGRFANGRSFSASIGLVPRQHSSGGKERLMSISKRGNGEVRRQLVHGARAALRAFQRQQQPDRLARWACSLAARRGATKATIALANKLGRICWAVMARDTAYAATP

SEQ ID NO: 158146 - protein, 350 aa, unidentified
MKDITTIGIDIAKNNMQLHGIDDTGRVILKKRLTRAKFLPFMANLPNCTIGMEACGGAHYWAGELTQLGFITKLMHPRTVKKFVDNHKNDAKDAAACAEAVNRQSTNFIPIKNKTQISIQAHHRVRSYYVAQRTALMNMTRGLLLEMGIAIPKGKAAFMEQLLLLLQEENEQLSTADKPLFQSLYNSLIALNKEVKKHNETLEKLAEQDENCKRLCTLPGVGPITATGIIAKIGNGSEFKKGRDLSAYLGLVPKQHSSGDKHMLLGISKHGDRYIRQLLIHGGRSSLKAALRKDKITLEYQKQDVHSQWMRKLSERVGINKASVAIANKNARMMIALLKSSTTFQGDLAH

SEQ ID NO: 158147 - protein, 412 aa, unidentified
MEVLHACCCGLDVHKESVTACVLWAEGKGKKRKGKRQFGTVTRDLLALADWLQGCRVTHVAMESTGIYWKPVWNILEGRFEVLLVNAQHIKAVPGRKTDQNDAEWIADLLQHGLVRGSFVPPTPIRELRDLTRYRVSLVHECNRVANRIQKVLEDGNIKLASVATDALGASGRAMLKAMIEGEEDSGKLAEMSCGLLRRKIPELQQALEGRLRAHHRFLLKELMEHLEFVESKIARLEQEIGEHLRPFEEEVERLCTVPGVDVVTASGLIAEIGVKMEQFGDAEHLSSWAGLCPGSYESAGKRKSGRTRKGSAWLRRCLCQGAWAVSTKRGNYLSAQSRRLAARRGKKRAIIAVAHTLLQIAFYILRDRKCYRELGADYFDQLHPNRVKRYLVKRLERLGFEVSLAPAAQPV

SEQ ID NO: 158148 - protein, 342 aa, unidentified
MEKIATIGLDIAKSVFQVHGVDAAGEVVVRKRLSRARVVPFFAKLPRCLVGIEACSTSHHWARELIALGHDVRLMPAQYVKPYVKRGKNDASDAEAICEAVTRPTMRFVAVKTPEQQSVMMLHRVRLMLNRQRTQLSNATRAHMSEFGIVAPVGRIGLERLLAIVADKDDERIPRDARICLEMLGAQLTVVKEQILENDRLIRASARDTEVGRRLMEIPGVGPLLASAFVASVADPQVFKTGRDLAAWIGLVPRQNSSGGKERLGGISRAGNQYLRQMLVVGAMAVIRHAERHGTKRVWLIELMKRRATKVAAVALANKTARMVWALMTSGEHYREPQVAHA

SEQ ID NO: 158149 - protein, 347 aa, unidentified
MRFYTQQHPYYCGVDLHTKMMYLCIISQHGEIVLHRNLNTDAKAFLAAVAPYRDGLVVGVECIFCWYWLADVCAREGIAFVLGHALYMKAIHGGKVKNDKVDSHKIAGLLRGGMFPQAYVYPAEMRATRDLMRRRQYLVQRRAELLAHIQNTNSQYNLEPLDKKLDRKSNRVDVPQHFSDVAVRKSIEVDLALLDEFDVLIKQLEAHIVREVKVHDPRSWYRLRSVPGIGQVLGLVILYEIHAIERFPSAQDFCSYARLVKCVKQSAGKNYGYSAKKIGNAHLKWAFGEAVCLMMRELPQAKAFVDTQAKKHGKGKAMSILAHKLGRAVYYMLKRKEAFDVKYFFAK

SEQ ID NO: 158150 - protein, 348 aa, unidentified
MSCYLGVDLHRNCFTVCTLKEDGQSELRKWSIHALGEFAQTVQATDAVAVEATGNTRYFCQSLKDRGCRLVVVNPQQFQVISRSVKKTDTHDAKTLAQFLARDLLPEVRQKDALLAEIASILQTRDKLVKLRTTLKNKINNLLAGRGILIRRESLSSDKGLEQVLQASVIGLERVELEVLIGQIRHLNGSIQKLEAAIKKQGPKLPGYQNLKSIKGLGDIGSSTLLSTIGDINDFASEGKLAAYFGIVPRVTNSNETARSGRITKRGNKLGRTTLVQCALIAMRYSPYLAHYYARIKAARGTGKAIIALARKFLGIIYRTLKNGWVFEDFPRFVIAPAEGKTSLLKQG

SEQ ID NO: 158151 - protein, 325 aa, unidentified
MVTCVCNKQIVKTATMQADPTALAARLPRWFPGATLYSVYEAGFSAFVLHRVLTTAGITNIIVNPASVAVAAHDKVKTDRRDSKKLAIDLADGRLRGLSVPTEAEELARLLPRTRAQIVKHRATIARQITAKLHQFGLIAPSSRRLISSRYLREIAAWSLPPERSVSLTLLAEQWRCATRQLIEMRRLLRDQAQAQEEIDKVYRSVPGIGEVVARTCATEWGDMTRVAKERALCSSTGLTPSEDASGASVRRGPMSRQGSSRVRPVLVETAWRAMPRDGVRKERFARIAATRGKKRAIGAMARRLTGRIRACFRQGTTYAVGTYA

SEQ ID NO: 158152 - protein, 330 aa, unidentified
MENYVDVVGIDVSKLTLDAHIHKTEVHKVFSNTLKGYRALLKWSSKYLEGSLYFFCFENTGHYSSNLSLFLSEKGVDYVEENPLSIKRSVGIVRGKTDRLDSAMISRYAWLHKEELILSSPKESHIQELGRLLSFREQLVRDRTGKMSSLKEMQTLLNSPSTDICCKTIEKTIHYLSKQIILLEERIKEVMDYDELLKRNFELLNTLKGVGLVLSCQLIYHTSNFKRFDSWRQFSSYCGVAPFEYSSGTSIKRKNRIHYIGDRKMKTLLTLASVSAIQCDSELKLYYKRKLTEGKPKMVALNNVRNKILSRAFSVVKRGTPYVELKQFVA

SEQ ID NO: 158153 - protein, 421 aa, unidentified
MEVVSTRCAGLDVHRSVIVACTLLGEGRGRVRKVSGQFPTTRSGLERLLGWLRERGVSHVGMESTGVYWMPIYAVLEQAGGFKLIVVNAQHAKAIKGRKTDVKDAEWLAELVRHGLVQGSFVPPRPIRQLRDLTRYRRTLVENQASERRRLIKLLEMADIKLAGVISDIFGVSGRAILRALIAGDQTAVAMSQLARGSLRRKRRPRIEALAGELAAHQRQMLALQLARVEADEADIAALDRQIDEHLAPYAAPMARLMTIPGIDWVVAATIVAEIGVDMSVFPSAGHLAAWAGACPANHESAGKRRPAGARTGNPYLKTALCNAAVAAARKRGSFFKAKYHKLKSRRGGGRAALAIAHKLLVCVYHMLSTNSPYRELGEDYLDRRDTQRAARRYVSRLRDLGFSVLIQPLSVPQPAPADGL

SEQ ID NO: 158154 - protein, 313 aa, unidentified
MDKVAPTFVGIDVSKHRLEIHLRPSGESSTIDHDDQNVAVLVERLAALEPALVVLEATGGLQPRVATELAAAGLPVAVVNPRQVRDFARATGRLAKTDRLDAETIARFAEAVRPPARPLDDVASTALKALVARRRELVAMRVAETNRLGATGVERVRRSLLAVIEALEGQIAALDGDIDQQVKDSPAWRAREGLLRTAPGVGPTTARTLIAELPELGELTRRRIAALVGVAPFNRDSGQLRGRRTVWGGRPGVRAALYMAALTAIRCNPLFAAAYWRLRERGKPAKVALTACMRKLVVILNAMLRGRASWRPA

SEQ ID NO: 158155 - protein, 392 aa, unidentified
MFFVGIDIGKNNHVASMMDESGKIIFKAFSFPNTSDGGEALFSKLSSYSSDAACFEIGMEATGHYWLAVYSFLYGKGFIQYVINPIQTDGWRKGTEIRKRKNDIIDSVLIADLIRYGQFVETHLAEEELFSLRNLTRFRSYLTGSIGDLKRKVVCVLDQVFPEYQSVFSDIFGKTSKEILMQFSSPMDFEEISSETLAELLAKLSRQKIGTQKAQQLKNAAGNSFGITFARDSFTFQLKTLISQISFIEGQIKDTDSEIASIMREIDSPVTTITGIGNVTGAAIISEIGDISKFDSPKKLVAYAGLDASVSQSGEFEATHNVMSKRGSPYLRKAIFQAALVASFKDPVLSAFYQKKRAEGKHHLTCVGAVARKMCNIIYSILKSGQPYVPKA

SEQ ID NO: 158156 - protein, 442 aa, unidentified
MAQRNRSVSLKPVKSRAALTITHPNAAGIDIGNAVHYVAVPPDRDDEPVREFPSFTVDLNAIADWLKVCGVDTVAMESTGVYWIPLFELLESRGFTVLLVNARHVKNVSGRKSDVLDCQWLQQLMTYGLLSGAFRPTEQMCVLRSLWRQRVMLLRTQGRHVQHMQKALTQMNVQLANVISDVVGETGQKILRAIIAGERNGQILGAMKNARIRASIDEIAKSLQGNWRDEHLFALKQAVDAFDFIGKQLVECDREIEQQMHRLQAHEGEPAKGKQRGRTRNAPKFDLRSQLFKMCGVDLTRIDGIDVTTALAVISETGTDMSRFPKVGNFTSWLGLCPGTKITGGKVMSSKTKRVANRAAQALRLAAAALRSSQSALGAYFRRMCARMDKAKAVAATAHKLARLVYTMLTKGEEYTDQGQDYYEERYRARVLRQLSNHAAQA

SEQ ID NO: 158157 - protein, 371 aa, unidentified
MEHTRFVGLDIHKERISIAVAESGRSGAVEYLGEVANDPGAVSKLCDRLGRPGRPLAFCYEAGPCGYGVYRQLTSLGHRCDVVAPSLIPMKPGDRVKTDRRDATMLARLHRAGELTPVWVPDADHEAMRDLIRLRSVVRQIVTRTRQHLQGFLLRHGRKHGQGTAWRMAYRRWLSTLAFQHPAQQIAFQDYVDAVMDAERRLQRVEEQISCLLPEWNLRPVVDALQAMRGIALINAVVLVAEVGDFTRFSSPRQLMAYFGLVPGEQSSGETIRHTGITKTGNSHARRALVEGAWAYRMKPRIGRHKVDRIEALPKIIRDIGWKAQVRLCARYRRLSARGKNANVVNIAIAREMVGFIWSIACTIQSAPRTA

SEQ ID NO: 158158 - protein, 408 aa, unidentified
MNTLYVGIDVSSKSNVVYLMLPNGDKHSNFSVANSHEGSTLLVKKIYSALTSHSLDTVLIGLEATSVYGDNLVYFLREDATLAPFNRKIHVLNPKQVKKFHDAYNDLPKNDYVDSFVIADCLRFGRINKEVYMGDYRYKALQNLTRARFFAVQNLVKEKQRFMNVLFKKYSTMTQEKVFSDAFSTTALAVYDEFESAEALANMDLHELTDFIIEKGKNRFPDPDAVAKAIQKAARSSYRLPKTVNDSVNQVLSISITSMKALESQIKEFDKAIKALMELLPNVLISIPGIGPVYSAGIMAEIGDINRFDNQASLAKYAGLAWKQHQSGGFEAEVTRLIPSGNRFLKYYLCEAAFSLVRCDKEYSDFYHLKYKEVNRCQHKRALALTARKFVRLVFRLLKDNRLYCPAK

SEQ ID NO: 158159 - protein, 360 aa, unidentified
MSTATAPGPKTRTGPDVVVGVDTHKHTHMAVALSGTGGLLGSLKIEASRSGYKELLRWAAGFGSSPMFAVEGTGCYGAGLCRTLQAAGLQVVEVNRPDRSTRRRLGKDDTIDAEAAARSYIAGKATVIPKAGDDLVEMIRMLKVVKASATENRTAALNQLHAIVVTAPAALRERLQRLKGKELVECCVGLRSGEINTPLAAAKMALRTLARRIQHLEQELKDTLAQLDQLTMKLCPELRNTYGVGVDISATLVVAVGDNQERMKSEASFAALCGVNPLPASSGKVVRHRLNRSGNRQANCALHRIVICRLQRHLQTKEYVERRTAEGRTMKEIIRCLKRFVAREVFGILRGGPAVRTAAA

SEQ ID NO: 158160 - protein, 343 aa, unidentified
MQTVSTIGLDIAKSVFQVHGIDAEGKVVIRRQLKRRYVLAFFEKLPPCLIGIEACASSHHWSRELQALGHTVRLMPPAYVKPYVKRQKNDATDAEAICEAVTRANMRFVATKTPEQQSGLVLHRTRHLFIRQQTAVINAIRAHLAEFGIVASVGRNGVEELLGVVVDPSDKRLPEVARACLTALGAQLRMLKAQILEFDRMIRAWHRSSETSRRLDHCPGVGPVLATALVATVADPKSFRSGRNFSAWIGLVPKQYSSGGKNRLGSISKQGDRYLRGLFVAGALAVIRYAKIHGTKHRPWLTALLARRPTKVAAIALANKIARMAWVMMAKGERYKEPVALAA

SEQ ID NO: 158161 - protein, 317 aa, unidentified
MNNTEIQTPVNVGVDVGKANLDIALHPSGQFYTIPNTEAHIRRFVRILKNYSIERIVVEASGRYEQALVQACDQAGLPIIIVNPISVRRYAQAIGVLAKTDRIDAQVIAQYAATLKPEFKPIPDKTSQKIKDLLVRRSQLLEMSTMEKNRLQILPKPLHRSIKSMLRMLQSQIETVTRQIEQEVAKVDQWRSKMEIMTSVPGVGKVLAYTFLSELPELGSLNRKEIAALVGVAPINRDSGKLNGKRRIRGGRHRVRTVMFMAMLSSIQCNPVFKRFYERLKAQGKIPKVALIACMRKMIVVLNTMIKNQESWRAEMA

SEQ ID NO: 158162 - protein, 388 aa, unidentified
MNKIIYIGMDVHSSNFTLCSFEPGYSFEADKIFGQTQIKEDIFNSTVKYINKLKSMRPDVDVVCGYEAGCLGYSLHRKLKAKEIESVILAPTTMAISRNSSKKKNDYRDAITIAKCLASSAYKAVYIPDEKDEDVRDFIRMRDDHKTALKQIKQQLNAFCLRHGHHYDKTKWTGLHLNWLRKLELSKLQRETVEEYLATYETLTSKIAALDVRIEDIASEERYAEKVNKLKCIKGIKTHIALSFVCEIGDFNRFKSADKFSGFIGLVPGECSSGNTERMLGITKAGNRHLRRLVVEISNTYRRGAVGRKSVALRERQKDMPKDVVAYADKATNRCQRKYQRMMFKGKNSNQAVAAVARELCCFIWGMMTGHYSRTAQAEASVYRSELD

SEQ ID NO: 158163 - protein, 364 aa, unidentified
MLIIGCDYHPGFQQIACVDTDTGELSERRLAHREEAEQFYRELQQRNLAVRVGMESSGHSRWFERLLDELGFELWIGDPAEIRTKRVRKQKTDRQDAQLILQLLIEDRFPRIWVPDAENRDLRQLLWHRHRLVQMRTRVMNQLHVVPLNEGLRRKKALWRPAGRKELESIALAPWARRRRQDLLDLLDQLTPKIQELTHASEAAVEKRPVTRLLMTHPGVGPLTALAFELVIGTPERFHCGKQLASYVGLVPEEKSSGDRRRLGHISKQGNVLLRFLLVEAAQVTVRSQQEWRNKFFHLAMRRGRKIAKVAMARKLAVHLYWMWRQGCDYGQMQKLGSHAGKPGHPDGVQSITDVMIEHPAPSK

SEQ ID NO: 158164 - protein, 411 aa, unidentified
MVLDPKGIPIGNTFSFTSSYNGFHFKLWQKLKTMPFEVTPENTAFAVEISINFWQKICHYLSEKGYTVLMVRPITTKHERPRLNNFSKTDPKDALCIASSARQGYFNFYQKYADKIMGIHRLGITYDKLKKQIVISKQRLRSEVEMLFPEFPSVLKIDTDTARYLLSKYLTAKDFSEINIFYESIELVAISRNHHGAKTLKCLKDEASKSIGLPLDQVSYMAHRMTVNMWIEQIKMLKVQQYNILKEMSALAQETPWFKLLTSIKGISEITASRFIAEIPQLGNDLHFKQVEAFAGLNLRLSDSGKMTGYRRISHWGNNRLRAVLYKMTEETKNHIPEVRIRFLKRQMKKANYTKNITACTSNLLKIIIAMIRENKCYEYNPEKVKEMESLDKQYLEYKLKRKCKSFIKVA

SEQ ID NO: 158165 - protein, 453 aa, unidentified
MDEQKKAKKQVLEPLQVVYPNAAGLDIGSTEIMVAIPPDREGETVRGFGTYTPDLAALADWLAQNHVTHVAMESTGVYWIPIYELLEERGFEVIVVNARHIKHPPGRKSDVKDCQWIQRLHSYGMLSGSFRPGADMCTLRAYLRHRDNLIEDRAKHIQYMQKALLQMNIQLGQVLSDLTGKTGLDILHAIAVGEHDPVVLVRMRRGRCQHSQEDLIKALTGHFRQEQLFILKQALALYDTFTERLLECDQEIERLLDQIKPSFPDDLPPLPPDPKPNSHCKNAPHYDARSSMYALAGVDLIAIPGMNENLLQKILSEVGTDMSRFETVKHFCSWLGLAPHNAISGGRILYSHTLHNHNRAGQCFRLAAQAVSRGKTVFSEFYRRVRARSGPKEAIVATAHKIARTFYFMLKRHQPFRQLDLESYLAIQRAKDIHRLQVKAAKLGFSLLPAEPA

SEQ ID NO: 158166 - protein, 343 aa, unidentified
MKLSYVGVDLAKNVYQLHGVDRHGKIVWKRRLRRGQWLQALIDKVEPGCEIGMEACTGAHHWARELQSRGYTVRLIAPQFVKPYVKSNKNDANDAEAICEAMSRPHMRFVTVKSIEQQDIQATHRVRTEIKDHRNAKANQIRGLVAEYGLVAPQTLLALRRAIPEWLEDAENGLTDYFRSMLHGLWDDLLTLEDRLKELDKEIEKLARSNEVAKRLQQLRGVGPIVATALVATVGDGAQYNKGRQMAAALGLTPRQNSSGDKHRLFGISKRGDVYLRTQMIHGARAVVSQAKHRDDPLSRWVTGIAKRRHPNVAAVALANKTARMAWAMLRNDTDYDPSLSTC

SEQ ID NO: 158167 - protein, 368 aa, unidentified
MFEHTFIGLDVHAVNVVGHALNPATGEISGHTMASDPALVLEWVRRFEPPVKVVYESGPTGFVLARYLRAAGINCVVAASSKLLRAPGDRIKTDRRDARVLAEMLAVGSVTEVRIPDPDEEALRDLSRLRSGTAKDLAHARQHVNAILLRHGIRYPKDSRWTKEHSLWLHRQRFDEPALQFTYQADVEQAELLAGHLKRVDKQIAATAAACRYGPVIDALMCLRGIQITTGFGLAVEIGDWTRFTGSSIGSYLGLVPSEESSGQSRHQGPITKAGNTYARKLLIEAAWQHRRPYARPGERLLRQLDLVAPATRIRALEGNHRLHNKWEHFDERRKMSVKANTAIARELAGWCWSLAAPRQQGERMNAA

SEQ ID NO: 158168 - protein, 374 aa, unidentified
MAEFIMVGCDLHDKTLLLKLARGREAAEKITLRNTPAGRTRLMEQLRERSRAAGGAQVIFAYEASGQGFGLYDELTAAGFACHVLAPTKMARSTRHRQCKTDEKDAEQILQLLRGHVLAGNPLPSVWIPDAQTRDDRELVRVRLDAAEKGVAIKSQIQGLLKRNRLDRPEHLKCAWTKKASAWLRMVTRDPAVGAGTRATLASLLRQWEFVQEEIERLDEALESLAGLPRYARAIRELIKLQGVGLLTALVFLTEVGDLGRFANRRQIGAYLGLVPRSYESGAADDRKGHITRQGPSRVRRALCQAVWSRIRQQGPDHAVYQRLVQRNPKHKKIAVVAAMRRLGVKMWHRAQAVRGEATPCGASRRSVAPAPAG

SEQ ID NO: 158169 - protein, 337 aa, unidentified
MTAVHILAIDLAKRSFQVCATDRGGAVLFNRVLSRTRLEQLLSEQSPCIVAMEACATSHFWGRFAQSRDHEVRLIPPIYVKPFVKRQKNDAADAAAIAEAALRPNIHYVAVKSAEHQARAVAFRTHQCFVRQRTQLINALRGHLAEFGIVVAQGPANLGAVAGMLDDGAVDLPDGVREIGRLYLDQISLLTEKVDELSLKLREASTSNAEMRRLCTVPGVGPVTAGAILAFAPDLQAFKSGRNFAAWLGLVPRQHSTGGKTRLGGVSKMGQTDIRRLLVVGAMSIIRWIIRKGIFPDNWLGHMLGRKPRMVAAVALANKMARIIWAMMTREQNYRMV

SEQ ID NO: 158170 - protein, 345 aa, unidentified
MITIGIDPHKSSHTAVALDETGAPLGELRVLADKSTLVRLRAWSADWPQRVWAIEGAGGLGRLLAQQLLGAGETVVDVPSALAARTRVLQSGHGRKTDGIDARSVALVAQHRNDLSRVAPDDHSAVLRLLSDRRDELTAERRRAVNRLHRLLRDLHPGGAPRQLSADRASRLLATIRPAGVVDIERKTMGRQLLADVRRVDRALNDNRRRCAEAVATSGSSLTEIFGISEILAAKILAHTGDITRFANADHYASYTGTAPIEVSSGEQRRHRLSRAGNRSLNHALHMAARVQTMHPGPGRTHYQRKQTEHKTPAEALRSLKRQLAKVVYRHLRDDHALQTSPTPH

SEQ ID NO: 158171 - protein, 405 aa, unidentified
MLNAVGIDVSKGKSTIAVLRPAGEIVRNPFDVRHTPKELSILSSYIQHLEGDTRIVMECTGHYHEPILKVLSDSGFFVSAVNPHLIKEYDGDNSLRKVKSDSADAKKIAGYTLDKWHLLRQYSAMDNTRTQLKTLNTQFQFLMRQKTALKNNLISLLDLTYPSVNALFDSPVRKNGSQKWLDYAYSFWHADCVRTIGLKTFTERYKKFCKRHGYIFQTDKPKSLFESSKELIAVAPKDHIYKDMVLSAIVQVNLISAQIESMRLKMDELASTLPEYEVVMNMFGVGHTFGPQLMAEIGDISRFNHRSALTAFAGVDPGVNQSGKMKIDSNRASKRGAPRLRKTLFQIMQTLMQNAPADNRVYLFMMKKKAEGKPYHVYMTAGANKFLRIYYGTVKAHLASQSQTE

SEQ ID NO: 158172 - protein, 417 aa, unidentified
MNPFADFAAIIGIDWADRKHDLCLKTFDSDNLEFSVLEHKPESIEDWANDLRVRFGGKPVAICIESRKVPLIHALLKYDFLVLFPVNPQTLCRYRRALIPSRAKDDPSDARLLLNLVLRHPEEFPSWVPQRPHMRALTQLVEYRRTLVADRVRITNRLTAALKLYFPQVLDWFEDKATLVFCEFVEKWPTLPAAKRAHRATLERFFAKHNSRYPAVIEKRIMAIKSAIPLTNDPGVIEPNQLLVDALVHQLALVMGHIQQFDKDIASRFKAFEDAALFQSLPGAGKQLAPRLLVAFGEDRSRFASPEALCCYAGIAPVTERSGNKSWVHWRYSCPKFLRQSFIEWANETIRFSFWARAFYRTQREKGKTHQMAIRALAFKWIRILWRCWQDRKPYDEATYLMALKAKGSPLVKELAK

SEQ ID NO: 158173 - protein, 343 aa, unidentified
MQRITTIGFDIAKSVFQVHGVDATGEVVIRRQLKRRQVVGFFQKLPACLVGIEACASSHHWSRELQALGHTVRLMPPAYVKPYVKRQKNDATDAEAICEAVTRANMRFVPTKTPEQQSGLVLHRTRHLFIRQQTSVINAIRAHLAEFGIVAPVGRHGVEELLNVVADPNDKRVPEIARACLSAFGAQLRMIKEQVLEFDRLIRAWHRSNEMSMRLDEAPGVGPVLATALVAAVADPKSFRSGRNFSAWIGIVPKQHSSGGKNRLGNISKQGDRYLCGLFVAGALAVIRYAKIHGTKHRPWLTALLARRPTKVAAIALANKIARMVWAMMAKGERYKEPVALAR

SEQ ID NO: 158174 - protein, 352 aa, unidentified
MAATAQSAIAVIGIDIGKNSFHVVGLDGRGAIVLRQKWSRGQVEARFANMSPCLIGMEACVGAHHLSRKLKALGHDARLMPARYVRPYSKGQKNDFRDAEAIAEAVQRPTMKFVVTKTADQLDLQALHRVRERLVSQRTGIINQIRAFLLERGIAVRQGQRFLRVELPRILATPPDVLSPRMVRVIEGLASDWHRLDERIEVLSSEIEELAKRDAGCERLMSIPGIGPIISSAMVAAIGTGDSFSKGRDFAAWLGLVPRQISTGDRTILGKISKRGNRYLRVLFVQAAWVVLVKVKPTRWQGHGLRPWIEAAKKRLHHNVLAIALANKLARIAWSVLVHGRAFETNKRQAAA

SEQ ID NO: 158175 - protein, 579 aa, unidentified
MTQLGLLQHIGVGIATARYGHRVAFLRPDRQPAAKSITVMENHAGYQTLYDALAQLHQLHPQAHFNVRIDAAGQYARNLESFLRGLDLPMTISVGEPKRNKDYQKAHFPKRTTDDTESQAMARFAVVELPPASLPPTPQMLLLHEVASRLQARVKQTTQAINRLHNLMARVFPELATLVNDFSAVWVLQLLDKYPTAQRIAQARLAALEKIAYLPKDKAEPLHHAAQKSVGSLSGAVAETLVRELVAQVRHCEQAERSMRDLLEGAFADLPPSGHAQVITIPCIGTATAAVLVAKIVDIDRFATPADLVSYFGVFPEENSSGVDKQGKPVPPGTMHMSFKGNDLVRHYLWNAARVGIRFNPALRALYHRLRSKGKRGDVALGHCMRKLLHLVYAVWKTDRPFDEHHFAWERMPAGSPPVAVELTAVNDKAVGHKREDPAEKVVTTASVSVESASPSVNRSATPMSAARPRVDLAFLREQVTMEQVLGQLGLLARLRGGGQQRRGVCPLHGHDGGVERTFSVHLGKSVFRCFHAQCAVQGNVLDLWSAVHNLPLYEAALHMAETLHLRRNREEEPVNGTR

SEQ ID NO: 158176 - protein, 384 aa, unidentified
MLARARLPEGIAGITRLHALIGQFAGPDTEPGEVAVGIEIDRGLWVMALRAAGYTVYAINPRQVSRYRERHGTSGAKSDKADAHTLADMVRTDSHQLRPVAGDSAGAEAIKVAARAHQTLIWERTRQVQRLRAALREYFPAALEAFEDLDAPDVLELLARAPDPARAARLTRAQVAAALKRARRRGITGKTDAILAALRGEQLRQPQPVTGVYAATVSSLTVIIAALNGEIAKMERQVTDCFRGHPDAAIYLSQPGVGEILGARELGEFGDDAHRYASAKARKNYAATSPVTRQSGKKKIVMARFVRNDRLADALHRQAQSALIASPGARAYYDEQRARGLDHDATLRALANRLVGILHGCLKTGTLYDEATAWSHRVTVASAA

SEQ ID NO: 158177 - protein, 345 aa, unidentified
MIIGCDFHPSWQQVCWLDTETGESGERMLVQASGDAERFYRQVPAPALIGMEATGNCHWLVDLLAEMGHELWVGDAAQIRASYVRQQKTDKRDAAHILKLLVEGRFPRIWMPSSPVRDLRQLLLHRYKLVIIRARVKNELQHLCLNQGVQRKHKLWSQAGQQMLRELRLKPWAKQRRDDLLRLLAMLDQQIGPLDEAVKAEAQGDKMARLLQTQPGVGPITALAYVLTMGDVSRFRRGKQVASYLGLIPREHSSGGRQKLGAITKQGNRMLRMLLVEAAQIAVRYDPQFRREYLHRCHQKPKAVAKVAAARKLAVRLYWMLRTQTAYPEIVRIESSPRVPLVGAS

SEQ ID NO: 158178 - protein, 356 aa, unidentified
MSYDVKYIGMDVHKEAIVIAVLNEIGKLVMESIVETKASSILQFIHGLRGELHVTWEEGTWAAWLYDLLQPQVQHIVVCNPRRNALLKEGSKSDKVDARKLAELLRTGMLRPVYHGENGLRTLRELGRSYQTISKDLTRVMNRLKALYRGWGIPCAGTQVYAARCREEWLSKIPQAGVRRRAELLYQQLDGLQALRRDVRPEFLAESRKHKAAKLLRQIPCIGPVRAARLIGLMQTPHRFRSKRQLWTYSGLGIETHDSAQYRFVSGQVQRSKKPQQIRGLNRNHNHEMKEIFKSAATRASGGRGPFHDFYAGLLAKGMKPEMARLTLARKIAAITLTLWKKEERFDVEQLKTQAA

SEQ ID NO: 158179 - protein, 340 aa, unidentified
MRELYAGCDLHGNNNLIGIIDGEGKRVFKKNLSNNLPLIRDALKPFQRELVGIVVESTYNWYWLVDGLMEEGYRVHLANPSAIQQYVGLKHADDKHDAFWLAEMLRLGILPEGYIYPKGERPLRDLLRKRGHLVRLRTSLVISLQNILSRNQGVRMVVNDLKRLKEDRISPLLEGNEDLAMAGRVSKEAIDFLTRQIRKIEGVVEKKAALKDAYRYLLTLPGVGKILALTIMLETGPISRFEQVGDYVSYCRKVPSQRMSNGKRKGAGNKKNGNKYLAWAYSEAADYSRRFYPEPRAYYNRKMQKTNSVVAHSALAHKLARAGYYVMRDQVPFRPEKLFG

SEQ ID NO: 158180 - protein, 372 aa, unidentified
MQSATKFIGLDVSKEKISVAIADAGRDLPRYYGAIPHTAAALRKLIKELGPASTLSFCYEAGPTGYETYRWIESMGASCTVIAPSLMPKRPGDHIKNDRRDAEQLARLFRAGELTPVYVPAREDEALRELVRTREAAKEDAHRARQRVLKFLLRHQIHPPVTVKRRWTKKYRIWLTQLTFEHDAMQIAFTEMLHALEEIEQRMGRIEKALLDQATVGAKASIIQVLQSLRGVALITAITIAAEIGSFARFRSPVQLMAYLGLVPREHSSGLSTRRGSMTKAGNSHLRRALVESAWSYRHRPAVKGDLAERLKGLPADVQLLSWKAQERLHKKYRHLVFGKNKHKNVAIGAVARELTGFIWAVARTVEKPNTN

SEQ ID NO: 158181 - protein, 343 aa, unidentified
MQVVTTIGLDIAKSVFQVHGVDAQGEVLIRRQLKRRYVLAFFQKLPPCLVGIEACASSHHWSRELKALGHTVRLMPPAYVKPYVKRQKNDAADAEAICEAVTRANMRFVETKTPEQQSGLVLHRTRHLFIRQQTAVINAIRSHLGEFGIVAPVGRNGVEDLLDVVADPSDKRVPEIARACLAALGAQLLKLKEEILQFDRMIRAWHRSNEMSLRLDDCPGVGPVLATALAATVADPKAFRSARNFSAWIGLVPKQHSSGGKNRLGSISKQGDRYLRSLFVAGALAVIRYAKIHGTKHRPWLTALLARRPTKIVAIALANKIARMAWAMMAKGERYKQPVALAV

SEQ ID NO: 158182 - protein, 343 aa, unidentified
MEVAIGIDTHKGSLAAAAVDALGRVLDVREFTNDPTGHRSLLRWVKEQAQPRTIGIEGSLSYGSAAARMLLGHAEDVREVAPSLTHLERRRRAKGKSDPVDAVAIARVVAADQTLPSARRTTLLSDLKLLVDYRDQLVHARTQVSNRVHADLVIIRPGYEQVVPNLRAKRHVAKARSLLSRDRSVQAELVRRRLGEILRLEAEIAQVDRQLADKLAEADTTLTQIPGVGPFIAAKILGEVGEISRIRSKASFAMLSGTAPIIASSGQTHRHRLNRRGNRQLNWALHYIALVQSRTSSEAKAYLVRQREAGKSHKEAMRCLKRHLSNVVYRHLLLDARRLEQAA

SEQ ID NO: 158183 - protein, 343 aa, unidentified
MQTITTIGLDIAKSVFQVHGVDAGGQVIVRRQLKRRYVLTFFHKLSPCLIGIEACGSSHHWSRELEALGHTVRLIPPAYVKPYVKRQKNDATDAEAICEAVTRANMRFVPTKTPEQQSGLVLHRARHLFIRQQTSVINAIRAHLAEFGIVAPVGRHGVEELLTVVADPNDKRVPEIARACLSALGAQLRRIKEQILEFDRLIGAWHRSNETSMRLEAAPGVGPVLATALVAAVADPKSFRSGRNFSAWIGIVPKQHSSGGKNRLGNISKQGDRYLRGLFVAGALSVIRYAKIHGTKHRPWLTALLARRPTKVAAIALANKIARMVWAMMARGERYKEPVALAR

SEQ ID NO: 158184 - protein, 353 aa, unidentified
MAIVAESFDFVIGVDTHAKTHTLAVVTPAGLVGDTGTFPTSSPGLGRATSWVSKHTGGPEGCSRVLVSMEGTGSYGARLAAVLTDAAYQVVEAITPTSRARGSRGKNDPIDAQLAARTVLPVDTSRLTTPRSGNLRAALRVLVVAREEMNGEATRAKHALLALLRITDLGVDARGHLTGGTLTTVAAWRLRGEDLATATARTEATRLAKRVLALDLELAGNKTTCQAIVAQMAPRILELPGVGPITAAITLLAFSHPGRIHSEAAFAALAGACPIPASSGNTVRHRLNRGGDRRLNRALHTIVLVRTVYDQTTREYVQRRTAQGRTRREIVRCLKRYVARQLYRTLNTPTAMA

SEQ ID NO: 158185 - protein, 312 aa, unidentified
MRQEIFVGIDVSKARLDGCVWPALESFAAPNDTDGIEKLISELLKKKPTLVVLEATGGLETAFASAACAAGLSVAVVNPRQVRDFAKAVGALAKTDALDAAVIARFAATIKPVPRPLRDEDTDALASMVARRRQLVLMRTQEKNRLGAAKGKQREGIKEHIRWLEERIERLDIDLTVTLRQSEAWRVKEDLLKSVPGIGPVTCATLLSQMPELGKLNRAEIAALGGVAPFNRDSGRYRGSRMIWGGRAEVRSVLYMATLTAIRFNETIRAFHTQLIARGKPAKVAIVACMRKLLTILNVMLKTNQPWNPNIT

SEQ ID NO: 158186 - protein, 344 aa, unidentified
MDHFAGLDVSVKDTSVCVVDGTGKIVREVKVASEPDALLAVLRNPAYRFKRIGLEAGPLSQWLFGALAEADLPAVCVETRHMRAVLKAQINKTDRNDARGIAQMMRVGLYRPVHVKTLRSQKLRMLLTHRKLLQSKAIAIENDLRGTLRNFGLKVGIVGTAKFEVRIKELVENLPDLAILVEPLLIVRRVLREQIVVLHRRLLTIVRDDGVCRRLMTTPGVGPVVALTYRATVDVPARFRKSKSVGAVFGLTCSKYQSGEIDRSGRISRCGDEMMRVMLYEAAQSMLRSKKWSWLKAWAMQIARRRGMKKAIVALARRLAVIMHRIWVDGTEFRWTREQAAAAA

SEQ ID NO: 158187 - protein, 342 aa, unidentified
MKRKIYIGVDVSKNWLDLAYYDGVEIDWKSGHIRVDNNKSGYRRISLWMKKLQIAKESALFCMEYTGLYCYNFRVWLESEGIIYGMINPRKMHRFEPDLGEGEPALDRIKTDEMDSFRIAMYCEKHSRKIKSSPSRLPGPAFFNLKRLLAERRQYVKHSVLYKQQLHDISAYDTEDSCKRKQAGLKSLSVLRRQTDIEMRKIIKSDEAIYKNYKLLCSVIGVGLVIAVETIVLTENFTAITNPRKYACYVGIAPGRKESGISIRGGDHVSKKGFKQAKANLSLVALQAIRHDSNIRSYWLRRKADGKHTGVVLNAIKFKMILRMFAVIKRQKPYVEMDAYMK

SEQ ID NO: 158188 - protein, 340 aa, unidentified
MRQLYAGCDLHGNSNFLGIIDEQGKRIFKKALPNELPLIRHTLQPFHAELVGIVVESTYNWYWLVDGLMEEGYRVHLANPSAIQQYGGLKHADDKHDAFWLAEMLRLGILPEGYIYPKEERPVRDLLRKRGHLVRLRTSLVISLENILSRNLGKKVSAHDVEGLREDRVTPLLERNEDLALAGRVSKDAIDHLTRQIHKIEGAVQKRMGVKEAYRYLLTLPGVGKILALTIMLETGPISRFETVGDYVSYCRKVPSQWISNGKWKGSGNRKNGNKYLSWAYAEASEFARRLYPEPRSYYHRKLQKTNEAVAHSALSNKLARAAYYVMRDQVPFRPEKLFG

SEQ ID NO: 158189 - protein, 394 aa, unidentified
MLKYCVGIDVSKNDLQCCISAIDQLQKVAVKSSAKFANTSTGFTRLHQWIISRHKHKEVPLVVVMEATGIYYEQVAMYLFKQQYALSVVLPNKAKKYLQSTGLKSKNDKTDAQGLARMGAEQHLELWQPMDSYFYELRELTRQHESLQELKTSVNNQLHASQTGMYQSKLVVEQLQTLLTTVDGQIRELATAIERHTEDKEEVKQKVDNICKIKGVGVLTVAVVLAETNGFLLFENSRQLVSYAGYDVVENQSGDHRGKTKISKKGNSHIRRAMHMPAFCVVSYQQQPFVGLFNRTLERHGQKMKSYVAVQKKLLVIIYALWKTNSAYELNHTQNKEQHTGEKEQVLSSLPGLAQADPPPAAGGQQNSASLQEQTALHKVNILSNDRSLLPLCQ

SEQ ID NO: 158190 - protein, 340 aa, unidentified
MSEISIIGLDIAKHVFQVHGADALGRAVLRKKISRAKLLPFFASQPRCRVVLEACGGAHHWARELARLGHDVQLIAPAYVRPFVKRQKNDAADAEAICEAAQRPSMRFVPIKSETQQAAAMVFRGRDLLVRQRTQISNALRGHMAEYGWIAPKGLAHLDKLATLLADPAAVPEGVRSVCTVLLESLALLDRQIATLDQEIVRRSREDAVARRLMTIPGIGPITATAIAALAPPPGTFAKGRDFAAWVGLTPRQHSTGGKQKLGAISKMGERTLRRLLIIGSSAVVLQASKRGAPRGSWLEQMLARKPRMLVTVALANKTARIVWALLMKNEDYRAPVVAA

SEQ ID NO: 158191 - protein, 342 aa, unidentified
MGQYVGLDVSLDETKVHVLDEQGKRVGACASHPAMIEATIRQHAPEAVRIGLETGPLTTWLWQALTEVGLPMACLDARQAQAALNMRINKTDDNDAEGLAHLVRSGWYREVRVKSRAAMITRSLLGARTQLLGIVTELSNQIRGLMKTFGLVVPKGAGKIFEANVRRLLEGEPAVAAIILPLLESWRAVRVRAAELDRQLLAAAREDRACRRLMTAPGVGAVVAASFVAAIETPEAFRRSRDVGAWIGLTPRRYQSGEVDYDGHISRRGDARLRSLLYEAATSILTHVHADSTLRSWGLALKKRLGFKRAAVALARKLAVILHAMWKTGTNFDARASASAAP

SEQ ID NO: 158192 - protein, 388 aa, unidentified
MIYVGIDIAKLNHFASAISSDGEELIKPFKFTNDNDGFQLLISKLAPLDKDSLIIGLVSTAHYGDNLVRYLVAKNYKVCVLNPIKTSTMRKNNIRKTKTDKVDTYIICKTLMMQESLRFVTFYDLDLMDLKALGRFRQKTIKQRTRLKIQLTSYVDEIFPELQYFFKSGLHQKSVYALLKEAPTPEAIASMHMTHLAHLLKVNSHGRFDKEMAQQLRVLAQKSVGASDSSLSIQVTHTIQQIELLDSQLERVEAEMTEIMKFNDSVIMTIPGIGYINGGMILGEIGDIRRFSSPNKLLAYAGLDPSVYQSGNFQAKKTRMSKRGSKVLRYALVNAAHNVVKNNATFKAYYDAKMAEGRTHYNALGHCAGKLVRIIWKMMTDNLEFNLD

SEQ ID NO: 158193 - protein, 317 aa, unidentified
MAEVSFEQIVQRGCGLDVHKQTVVGTIDGVGLKRETREFGTTTSSLKELKEWLERAGVTHVVMESTGVYWKPVYNVLEPSGMTLWIVNARHVKYVPGHKTDKRDSKWLCKLLLAGLLKPSYIPPREQRELRDLTRYRRKLIEQIASEKNRVIRILEDCNIKLSSVLSDTNGVVGTKLIDKLCESGKISMEDIEEVYHGKLKASKEDIYEACEGVIREHHVFMLQMIKKDILSCEAIISKVTSRIRNMLSPYENVLELLKEVPGLSIKSIEDLIAEIGLDMSVFPTEKHLASWAGVSPGNNESAGKKKVDAQHTVTSR

SEQ ID NO: 158194 - protein, 378 aa, unidentified
MKRILKIGMDVHTTNYTLCAMEPIIGEDDRVFATIKVTPDYKNILLFIENLKTKLGLNDEYDIQCGYEAGCLGYSLYKQLTAAGVKCVILAPTTMLTPQGVRIKTDMRDAYMIAQCLSYGGYHAVYIPTEDDDSVKEYLRMRNDHKLALKKIKQQINAFCIRHGFCYDGTKWTQAHLKWLKKLEITNQLYRETLDEYMASYEEQEDKIERYDKRIEEIAEQTRYHDKVKKLECFLGIKTHTALSLIVETGDFERFAKGNQYASYLGLAPGENSSSDSIHRLGITKAGNSHLRQLLIEASGGICKGAVGHKSKDLRARQNGNTAEVIAYADKANTRLRSRYYKFIRHGKKRNVAVAAIARELACFVWGMMTDNIEMKAV

SEQ ID NO: 158195 - protein, 454 aa, unidentified
MAKSPKSPKSAQPSKSLLVIDPDCAAIDVGSTRQFACVPADRDDQFVREFASFTDAICDMADWFKRCRIKTVVMESTGVYWIPIYEILESRGFKVHLVNARHVKYLPGRKSDVLDCQWLQQLMSFGLLRGAFRPNEQICALRALWRHRDMLLSDQGRHVQRMQKVLTQMNVQLHNVISDIMGHTGQAILRAIVAGERDGATLAKLRDRRIKADHATIERSLQGNWRAEHLFCLKQILSLVDAIAEQVRLCDQQLMSMLIELHAHDLPEQGVPKHKRSSKQKNAPAFDMRASLYQVCGVDLTSIPGVDVNTVAKILSEIGTDLSRFPTVKHFTSWLSLCPGTKISGGKVLSSATKPSANRAAQALRLAAGNLRQSQSSLGAYFRRLCARMDKPKAITAAAHKLARLVYMMLTKGQEYTDAGQQYYEERYRQRVVANLARRAKDLGLQLVPVANPA

SEQ ID NO: 158196 - protein, 372 aa, unidentified
MSKLRFLGLDVHAETIAIAIAEPTGEVHSLGIIPNRQQSIRKMIHKLGPVQHLRACYEAGVTGYALYWQLTQLGVACEVIAPTLIPTQVGDRVKTDRRDAEKLARHYRSGNLTAVWVPDAAHEALRDLVRAREDAKQDQLRAKHRLSKFLLRHGVRPPETVKKAWTLKYMVWMKDHVRFDQPALQATLLDYMHEVDHLQERIQRLEKAIDEAVATAPESIRAVVGALQALRGIAQMTAVSIVSELGSLSRFKNPRQLMSYSGLVSSEYSSGNRIQRGRITKAGNAHLRRVIVEAAWAYRHRPWVGGALLKRQHGLEQAVKDIAWKAQWRLTTRYRKLSARGKNKPQVITALARELLGFIWAIAVRVEQTSTC

SEQ ID NO: 158197 - protein, 414 aa, unidentified
MDIVHDRCCGLDIHKKTVVACLIAPGPDGKPKKEIRSFGTMTGDLLGLADWLQRAGCTHVAMESTGVYWKPIYNVLEDRFNLLLANTKHLKMVPGRKTDVKDCAWIAELLRVGLLQPSFVPERAERELRELTRYRSSLVHERTAEINRLQKTLEGANIKLASVASEVMGKSGRAMLEALVAGIADPTVLADLALGQLRRKIPELQRALVGRFGAHQCFLVVEQLAHIDELEQRIERVSQEIRERMRPFETEIALLDTIPGVNRWTAEVLLAEIGFDLSRFPSAGHLASWAGLCPGNRESAGKRKSGRTRKGSPWLRVAVTESAHASGRGKTYLAAQLHRLIPRIGLKKAAIAVGHSILVIVYHVLTRHQPFQDLGALYFDHRHRASLEQRLIHRLEALGNTVTIERTQAPASAA

SEQ ID NO: 158198 - protein, 309 aa, unidentified
MEITVGIDVSKKRLDVYVHPAGTLFSLDNDAAGLATLIEQLGPIQPDCVGMEATGGYEKLAAASLAEAGLPVVVINPAQVRHYAKAVGMRAKSDSIDARMIALFVAATEPEPRALVARETAALAELMARRRQLVGMLVAEKNRQGRLPPGKARLSVVRIIAALNEELAKLDGDLGGLIEHSPVWRDKQDLLASVPGVGERIARALLADLPELGQLDRRAIAALAGLAPFTRQSGQWRGKSFISGGRAAPRSALFIGAMVAARHNVTLKAFYQRLLDAGKPRRLALIATARKLLTILNAIIRDKKPWQSA

SEQ ID NO: 158199 - protein, 346 aa, unidentified
MANVVSRPEAGQAVFIGVDVSRTKWVINVRWGGAERRRLSTAPELRHLATLVAEYRDATLHLAYEACGFGYEIAWVLRARGVAVTVVPPSTVERAPGATVKTDRLDARALAAQLERGQLKRVHVPTREDHAQRQLSRTYAQALQDKKRAQARIRALLQDHGRLGPLPTAGWNAYAQWLAHQALPAPVQRCLDELLALRTAALASAQRLRRALAAVARDATYASVVTALSAQGGVGTFTAIRLRLELGEMRRFRTADAFVNYLGLTPSEYSSGDRVARGHLTKRGPGHLRGWLIQCAWASLRADPVLRECFQRLRGRVGDKRAIVAVARRLALRVRARWLAQENVAA

SEQ ID NO: 158200 - protein, 331 aa, unidentified
MHYSHYIGVDISKNTLDAVIYAAEMRRSDTKHLPNDKTGLKELVAWAKAAGAKPNDMLICAEHTGVYSNELQLFCEKKGIALCLESPLQIKRSMGLVRGKDDQIDAIRIAQYAYDHKDKLKLFHRPSGNIITLANLLRERRLYVRQKATLMAQQAEIGSYECATSRNRRESLIDKHAAAVKSVEKQMMEIIKGDKALKKTYDLISSVVGIGPITAIDTIVYTNNFQNFDTPRQYASFIGVAPFDHTSGTSVNGRTRVSQFCRKQQKVSITMAARSAIVNDPWMKNYYHRKMKEKGDQRNQHGVVLNAVKFKLVLRMFSVVKSGTPYKVMKY

SEQ ID NO: 158201 - protein, 351 aa, unidentified
MVVVIGADVHKASHTLVAVDEVGKVLGQGVFTARREGHRKALGWARHQFKDAQLVWAVEDCRHLTALLERDLLAAGQSVVRVSPKLMGVARRAGRERGKSDPIDATAVARAAQAHADLPVARHDEASRELKLLVDRREDLVAERTRMINRLRWHLHEIDPDLAPPTGSLDRVVVVARLHDQLAAIDALVARIAVEVLDDIAVRNTQIRALERRITAAVERTAPVLLEVPGCGPLTAAKIVGETAGIDRFTSEAAYAMFTGTAPIPVWSGATAGRVRLNRAGNRQLNAALHRIAITQVRLGGPGRDYYDKKRAAGKTSTETYRCLRRQLARTIYNTLNHSRAAHSGALSAAA

SEQ ID NO: 158202 - protein, 289 aa, unidentified
MPRQSTPSAVATVGIDIGKNTFHLVGLDQRGAIVLQLKSSREQLERRLSNMPRCLIGMEACSGSHHIGRQLEALGHDVRLIPAQYVKPFLKGHKNDYRDAEAIAEAMQRPTMTFVTIKTPAQMDLLALHRVRSRLVSLRTGVINQIRGFLIERGITVRACQRLLTVPGIGPIISSAVVAAIGDGAGFKQGRDFGAWLGLVPRQESTGDRTILGKISKRGNKYLRTLFVQAAHVILARRPSAARRGLWPWIEQASKRLHRNMLAIAPARIAWAVLARGREYRPMIMPHTA

SEQ ID NO: 158203 - protein, 340 aa, unidentified
MTVIIGVDPHKATHTAVAIDGDEQPLARLDVVADRSQTQRLLAWAAPFAERRWAIESADGLGKLLAQQLLGAGEDGLDVPPTLSARVRLLGSTKAAKNDSNDALSTAIAGLRHCGLRAVRVDDHSAVIRMLVDRYDDLTGLRTQAACRLHASLRELVAGGAPRRLSADRAARLLRSVRPVGPAEIERKRLAGELLADLRRLDRDIAAARGRVADAVTKSGTALLELHGVGPIVAGFILGHVGDPARFPTRERFASYNGTAPIEASSGPTRRHRLNSRGNRKLNHALHMAAVTQVRHDTPGRTYFQRKLTEGKSKKEALRALKRRISDAVWRQLQVDLGRR

SEQ ID NO: 158204 - protein, 431 aa, unidentified
MTNHQLTPNEGVLVAIDVAKARNEVLIDIPDRGRRRRLTVLNERADHDRLVELLRNLSEPVLCGFEATGNYHRPLAWRLLEAGFEVRLISSVALARTREALHNSWDKNDPKDAQVILHMLRIGACQRYYDPLAQGISDIQELSKTHEAISRAKTEVQHRLQTHYLPLYFPEIDRFRQGSRSDWFFAFLDRFPIPASITSLGKEAFIEAAWQVVGRKVSKAQLLGDIYETATASIGLPIPEDAIAVRMFRMIIAEARSLIRQRDEIEAIADTILQENRDYKLLRQIPGIGPINALTVIAEAGDVRRFGHHRQFLKFCGLDLATQQSGTFRGQTKLSKYGNARLRRTFWLAAQVAIKQRDNSFRDKFERYIARDRDNKDLRRKALTAITAKMARVVHAVIKSGSDYRPFFEGKVPGGRTPLSSAVRAHPRPCR

SEQ ID NO: 158205 - protein, 413 aa, unidentified
MDVLHPRCCGLDVHKSSISACILLREAGRVQKHQRRFGAMTQDLQELAEWLGRFGVTQVAMESSGVYWKPVWNILEGQFRVVLANAQHIKNVPGRKTDQKDAEWIAQLLQYGLLRPSYVPCEIIRDLRDLTRMRASLSQEAARLSSRIQKVLEDANVKLASVATNVLGKSGRAMLEDIISGEDDPERLASLALGHLRVKIPQLRRALEGKIRSHHRFLLRRLLDQVQFVEQEIALLDQRLEDIGGQRPELAQAVERWDTIPGIDRVAAWALLAEISDNMAQFPTAEHLASWAALCPGNHESAGKRLRGTTRQGSPWLRRMACQCAWAAARTKNTYLSSQFRRLAARRGKKRAIIAVAHTIIVIGYHLQTNQSNYEDLGGNYFDRIHSDGLKRYLVKRLQQLGHKVTLEPMEAA

SEQ ID NO: 158206 - protein, 507 aa, unidentified
METRTNLNEVGKKKLVLGIDVALKNHWAAIGDNKGQEMVKPFQFSNNAEGMSLLEGMIKQTGRAEDKGDVIIGMEPTGIYWKPMGHYLREAGYRVVLINPSHTHKTKELEDNSQTKNDRKDSRVIQTLTREGKYLEPIILRGIYGELRRLGQAYKSALKRGNVISNKVKMIADEYFPEMRGIIKSINGKTAKGLLAEIPFPDDIIRLGKTKFYKKLKKWSNKRFGKKKSLKLWEAAKKSIGVKVGQEAAKIELRQLVEEMELVKRHREELVKEIEEKAKETEEGKSLIKLPGLGYLSIGKLIGETGSIKSYKGARSLEKLAGLNLIESSSGERHSGKKISKRGRKLMRTTLYQMALASIKNNRAIKYEYQYRIKTKKQKKMKALTAVACKMLRVIYALVSANKEYDERKISRHYYESEIKREENICEWVTPIIPPSGPGYNSGDTVMKNTGHPLPMTLNEVMSGAPVQYRDDTGRNDRVRHRKSGGTNPLANIEKSWAEENQEVVCK

SEQ ID NO: 158207 - protein, 426 aa, unidentified
MKYTQNERIMQITEKTLIIGIDVGSETHYARAFNFRGVEYGKLLIFHNNAEGFAMLEDWIRKLAEHHGFKDVTVGMEPTGHYWFNLGEHIKEKGMRIVLVNPHHVKKSKELDDNNPSKTDRKDPKTIAMLVKDGRYMEPYIPEGIYKELRTLMDIRWRIMKELFAIKNRISRWISIYYPEFLEVFGSWEGKAAMLILKECPTPAKIVEKGIDGIIGIWKKHKIRAVGRKRAMMLLETARSSIGSKEGMISAENELQMLLEDYESKMRQYDKTMALIESLANKIPGFEKMLGIKGVGLVTAAGFIAEIGDISRFSHPKQIQKLAGLSLKENSSGKHKGETTICKRGRKRLRYYLTFGMMPLLSKNEEFKALHEYYTSRKENPLKRMQSLVALSNKLIRIFYVILTKKVTYDPQKMMRDIRRPEVKAA

SEQ ID NO: 158208 - protein, 366 aa, unidentified
MQMVTTIGLDIAKSVFQVHGIDAEGKVMIRRQLKRRYVLAFFQKLPPCLVGIEACATSHYWSRELRRLGHTLRLMPPAYVKPYVKRRKNDAADAEAICEAVTRANMRFVETKTPEQQSCLMLHRTRQLFIRQQTSVINAIRAHMAELGIVTPVGRKGVEQLLAVATDASDRRVPEVARACVAALGVQLRMLKAQILEFDRRILAWHRSNETSRRLDAIPGIGPALATALVASVADAKAFRSGRNFSAWIGLVPKQHSSGGKNKLGSISKQGDRYLRSLFTAGALAVIRYAKMHGTKHRPWLTALLARRPTKVAAIALANKIARMAWAMMAKATRSVTLSVTPGKAAPRAGATRNHCAREIACCGGE

SEQ ID NO: 158209 - protein, 441 aa, unidentified
MRARKVPRARKLKLPKHLQHINAHAAGIDVGCRSHFVAVPEGSCEQPVREFSSFTDDLYRMADWLLSCGVSTVAMESTGIYWIPVFEILESRGFEVRLVNARHVKNVPGRKSDVLDCQWLQQLHSYGLLAGAFRPNEQVCALRAYVRQRMNLVRYASSHIQHMQKALLQMNLQLSNVVSDISGVTGMRIIGAIIAGERNPKALARLRDPRCKRNESTIARSLHGNFRPEHLFSLKQAVELYEFYQSQIAECDREILAQLAGFDATDASGNGPPASVDEALQRMSGVDLTGIDGIDTTSAVKIIAEVGTDMSRWKSAKHFASWLGLCPGTKISGGKLLSAKSKPVANRAAATLRMAAFTLLRSKSALGAYLRRQRSRLGAPKAITATAHKMARLVYSMLKHGSAYVDLGQNYYEERYRDRTIKSLKRKAQSFGYLLVKEAKT

SEQ ID NO: 158210 - protein, 356 aa, unidentified
MFYSGIDLHKDNCFITTINEAGKRVHQERLPNVPAIILGYFASLPGPHRAVVECTAGWYWLNDLLEAHGIELVLAHAKYLKAIAYAKVKTDKVDSETLAMLLRLDVIPRAHKIVREKRDLRDVMRARLRIVQKHTSCCVSIHNLGRKFNCDDLIDIEQQSVPDDLPDPFKLQLHCHYQQITLLDEQILALEKFLHPDLIPNDDIQRMLYVPGIGKVTAFTIYLEIDGIERFSSDRQFLSYCRLVPGAKNSNRTLRHKSGSKDGNKYLKIAFSDAAVHAMQYYPEIRAFYQRLRRRANEPIARTVIAKELARIVYYMLKNKTEYRGFKGRPISRQKSVQWPRLHLHHRASPSPACSA

SEQ ID NO: 158211 - protein, 368 aa, unidentified
MKQYTLKAAPAAEAKEIKNQKAPKAKRILVGLDTGLGTNQACRKVDNAAIGPVQNLRSETEVALYIEHQLELADEVVVVYEAGPFGYGLYRKLTARGAKCLVCAPDSTQQKRKRRKNNPIDSRTLASNLFNYLNGNEAALQLVRVPTPEQEQARLVSRQQDQLVEERKRLGAMGNALLLSQGFGSWKNWWRPKAFNSLKRVVPGWLLEMLGSWVDLLKVLDEKIQKAKAAQAKGWSGPRPKGAGANSLVQLQSHVLDWNLYPNRRKIACLAGMVPSEWSTGKSQRLGSITKVGVPAIRRIITEMVWRIILFQPHYRPVQKWQEVLRGTNKTLKKKAVVAIGRQLIVDLWRLQTGRLSAQELNLVLIGG

SEQ ID NO: 158212 - protein, 414 aa, unidentified
MDVIFGTVAGLDVHQATIVACVRTLQPGGDIGEEVEEFSTMTSDLLRLSDWLTAHAVTHVAMESTGVLWKPVWNVLDGHFALLLVNPRELKQVPGRKSDVRDAQWIAQLLQCGLLRSSFVPPRPQRELRDLTRQRAQLVGERTRVANRIHKTLEDANIKLGAVASDILGKSGRAMLEALLAGERDPAKLANLAEARLRRKIPLLVHALQGHWREHHTFMLGRLLEHLRHVEGQIDAFSTRIAGCLRPFVNAEQMERLDRIPGVNRRTVENVVAEIGADMNRFPSADHLSSWAGMCPGNEESAGKRIRNRTTKGNRWLRRALTEAAWAASHAKGSYFQAQFRRLAARRGKKRALIAVGHSMLTVFYHLLRAPVVYQELGHAYFDRLKPERYRRYLVKRLQDLGYEVTLQENQPAA

SEQ ID NO: 158213 - protein, 368 aa, unidentified
MKQQTSAATETKIKGRNIIDFTGKTIYVGIDVHEKDYQVAKVFDGICLGNHRMAANHQMLIDHLNSRYPGATFKCVYESCAWGFTLQRALNSAGIECIVVHAADVSSSDKEKKRKTDKVDALKLARNLASGDLTGIHIPDEDLQKERNLIRFRKKLVGDLNRSKNRLKSLLKYQGIKIPEHLGKKNNWSYNFMNWVEQEANKDVLLKDTLLLMLEEIKLLRQLLLKTERALRKLMKERHNEKATLLMTAPGIGRTIAMQFVLEVGDIKRFHSFDALNDLIGFCPDTDSSGDMQRDRGITSRRHKQLRSALIEAAWTAIRIDPALMDAYQKLTKRMQGKYAIIRIARKLLRRMRTMLLTGQPYQIGVAA

SEQ ID NO: 158214 - protein, 377 aa, unidentified
MKKPIRFVGLDVHAETIAVAVAEPSGEVRSLGTIRNRPEAVRRMVRKLGPAAQLRICYEAGPCGYVLYWQLTELGAVCEVVAPTLVPVRAGDRVKTDRRDAEKLARSYRSGDLTAVWVPDAAHEALRDLVRAREAAKKDQLRARHRLQKFLLRRGLRPPEKIKAWTAQHLVWAKTLRLEQPALAATLLDYITEVEHARERIERLERAIDQAIEAAPAAIRAVIEGLQALRGVARISAATIVAELGQLSRFHRPKQLMGYTGAVPSEHSSGERVRRGTITKTGNAHLRRILVEAAWSYRHRPNVGSELRRRQANASEEVKEIAWKAQHRLHYRYVRLMARGKIKQQVVTAVARELAGFVWAIGVEIEKQPVSRPARAA

SEQ ID NO: 158215 - protein, 358 aa, unidentified
MRIIGVDLHTRQQAVAMLDTETGELIEKTLKHDGDEVREFYSALPGQVLVGIEATGSMHWFLELLEELGIDHQVGHPSEIRKAETRKQKHDRRDAALLLKLQVENRFPAIWMPSTELRDLRTLLMHRHQWVRMRTRVQNALQAIALGHGLRRGKTLWSQLGQHTIESLPLAPHAAHRRTQLLALYGELQAQIDELDEQVMDHAQQRPGAKLLMSHPGVGPVTALATEVFLGDPARFADGKAVVSYVGMIPSESSSGGQQRLGGLSKQGNPFLRFLWCEAAVHAVRRDPELQRFYRRKLAQKGLGKARVAAARKLGIRLWIMLRDQIDYQEFCRRGQMQQKNGGACAGMPEVGHSPARQ

SEQ ID NO: 158216 - protein, 352 aa, unidentified
MRKYYVGLDVHKVSIAIAVLDAHGKLITRTVIETSTEAVRNFFRNLGGEIHLTFEEGNHAAWLYDIVEPLVRRVVACNPKHNRIEGSRSDRVDAVKLAELLRLNALKPVYHGEHGTRTLKHLMRCYECLVKDITRVKNRLKALYNSQAIKQRGRELYHASKRQSWLEKLPNQGQRTRAELFFQQLDELKVIKRAAQKAMVAESKRHPAYRVLSQVAELGPVRIAQIIPTVETPWRFRTKRPFWHYSGLAVVTRSTADHEIEYGRVRKRKKHIIQTRGLNEDYNRRLKSIFKSAATHACHCGAYREYYEGLLKTGMREEMARLAVARKLSATVLAVWKSGESFDAGRILRKAV

SEQ ID NO: 158217 - protein, 407 aa, unidentified
MNQEVLYLGLDVHAENIAVAIAEAGRDGEVRNYGEIPNTFHSVEKLLRKLRHPDKELRVCYEAGPCGFVLARFLKKKGIACDVIAPSLTPKGSGDKIKTDRRDARMLARLHRAGELTAVHVPDERDEAIRDLCRARTDAVHDRRSGRNQLKAFLLRNGYRYGEKTSWSAAHMRYLRELILPHPAMKIVLEEYLQCIDAAAERIDRLEVHMKALLDEWHLKPVVLALMGFRGYQTVAAMITVSEIGDIHRFAHPRQLMAYLGLVPSESSSGGSRAQGTITKCGNGHLRWIFNECAQHYRLPPKISQELTTRQEAIPKAYRRQVIEISWRCQNRLHERGRKLAARGKTRQKAQIAMARELSAFVWEVMRAVMPKADGTQASSTARPPKVKGSTQPAVKKKGREYTLKSK

SEQ ID NO: 158218 - protein, 453 aa, unidentified
MARKAEKERTKDGLKLKIVNPNAAGIDIAYGEMQVCVPEDRDGENNRCFGSFTCDYEEIASWLKACGITTVAMESTGSYWVGLYFFLEEKGFDVLLANAKDVKNVSGKKTDEADAEWIMLMHSYGLLKPSFHPDAAARSIRELARHRDNMLRSAGKEIQHMQKSLVLMNIKVDTVISDILGKSGKAIIEAILAGNHDPKSLAQLADSRCKASKETIEKSLEGTWDSVHLFELKQSYDLYKYIHTQIADCEAEMDRLLTDYTDGNSTDMQGYVPTKKRVAKKNAISFDAEKHAFSLWGVNVMEVPGMSLGALAVLMGELGSGFAEKFTSAKSFCKWCNLVPNNKISGGKLLSSKVPKQKNRVGQVFRLCANSVKSVKTGLGVYFRRQKSKGGHLQAIVATANKIARIFYVMVTTKTPFDESKVGPDEKELLQRKIALAQRTLDRLNLRLSVAEG

SEQ ID NO: 158219 - protein, 360 aa, unidentified
MLAELVDAVVGIDTHRDTHQVEIALPTGAPIATCSITNDTRGYAQLLAFIVDHTPGPRLAVSIEGTRSYGVGVTRALGAAGLPIIEAEQPARKTRRGRGKSDPIDAHLAVQFALRLDADRLPTPRADGDRDALRILLGARHDLTMASTAQTNRLRALLRDGDDTDRELARGALPEDTLTALARRRLPHDATRAQAVRHGEIRRLAIALRAAARALKANRAQLQAIVDELAPGLTDRHGIGPVSAAQAIVSFSHPGRCRNDAAFAALAGASPLEASSGRTVRHRLNRGGDRALNRALHTIALTRMASCPRTRAYVARRTAEGKTPREIRRCLKRYIARELYRTLTATMINTTMISTAEIGA

SEQ ID NO: 158220 - protein, 337 aa, unidentified
MISVGIDISKRKSTAAILNVQGEVICNPFEFRHTKSGFEELLMYVKDYPQDEVKFIMEATGIYHLALLEFLKSKGYFVHVANPLLIKKFFDAEIRKGKTDRKDALKLSLYGTEKWFKLDDHLISEKIYSELMMLSREYNQLIAIRSKSKIQLNHLIERIFPGIEKILTDYYTELLLDFLLKYPHVSCVVKQSEKVFTKQFVKMAEKKEHTKGPQLAKKVYDLALECVPAISSSRSLEIAVESCIHVLRSTQTSTDAIITQMRLLAKELPEYDMVRSMPGIGDTLAPRLIAEIGDIRRFKNAKSLIAYAGIDAPPYQSGQFEGTRRHISKSGSACLRK

SEQ ID NO: 158221 - protein, 357 aa, unidentified
MQIMNEEVRCVIGGVDAHADTHHAAVLDERGALLGSRSFPVSAAGYRKLLAWLGSFGEVERVGVESTGSYAAGLTRHLLGEGVAVVEVNQSHPHTRRRRGKTDAIDAELAARHVLAHHKQVLPKQTTGIVESIRQLRLARESAVKSRSAAILQLGDLILTAPSELREQLAAAKTLKGKAGLCRRLRPDQGRLQDPVNAAKLALRSLARRIALLDGEIAELDSRLTPLVASAAPRTTALLGVSTGHAGQLLLTAGQNIERLRSEAAFAALCGASPVPVASGKTGRYRLNFGGDRQANRALHMIAVCRLRYCPKTRAYVQRRTSEGKTKKEIIRCLKRYIAREVHASLRADLGSLSPTP

SEQ ID NO: 158222 - protein, 408 aa, unidentified
MTVVGIDVSKGKSMVAAMKPGGELVAAPYEVRHSDIELSHLALDVLCMEPDTRVVMEATGRYHEPVAALLHSEGIFVSILNPLLIKQSGAGSLRKVKSDPKDALKIAKYGLDNWSTLREYTPMEAIRQQLKLCARQCDLYNKNIVMLTNNLISLSDKTFPGVNELFSSPEKADGHLKWVDFYRSFWHCDCINRMSPDAFEERYKKWCKRKGYHFSADAADALYAASCGLYTTLPRDNNAKLLVTVATDQLIALRENQSKLETEMLNLCKQLPEYETVMAMYGVGKSTGPHLMAELGDIRRFPHRSSIVAFAGVDPGVVGSGKMQLSSVATSKRGSPQLRKALFQVVSAYVKRKPENEAVYQFYAKKRDEGKPYYVCTTAAANKFLRIYYARVKECLNAAESATQVEEG

SEQ ID NO: 158223 - protein, 376 aa, unidentified
MGTPSAQTLDDVGVREIFQELEEVPLMTMVGGLDVHRAQITFDYVDDDGLVHWGQIRAATRKTLRGWLAEHCPDGDAEFALEGCTGWRYVSEELAGAGVGVHLGDPAEIAVLRGPKKRAKTDRADARLLRTLLLQGRFPESWIAPAHVLEIRTLGRLYCTLMDERRAWQQRIHAQLFHQGCPPVRALLSVTGRAALAGAELSAVGGQYVDTALGRIDELSTEIEPLRAQLVNFARHQTGCQALQRHYGIGWLCAAIIWAEIGDARRFSSSDQLVRFAGLDVTVYSSDGKRSPGHLSRQGSPELRWAAFEAAKCAARRGSPDYGYYRKLAAKRDGHNGKNPTLAVERKILRRCHHTLRELGDAAVALPVAEPQEVAA

SEQ ID NO: 158224 - protein, 342 aa, unidentified
MYYMGIDLHKKYFVSTIMNKEGKVLKRSRVSTDRESIKHYFSLLKNIRPVKAVIEATFNWVYFYDEISPFVDEAILAHPLKTRAIAEARIKTDSIDSNTLAHLLRSDLIPRAYTPSFETRDLRNLLRFRMALVKVRTSLKNRVHAVLDRNYIEDPTFKGLSDKFGKTGMKIMRALNLKGNDTSILNGYLDLIEEITKKINDLEKRIKSFVKDDEITLLLKTIPGIGDIIAFLIRYEIDDIERFSSAKKLCSYAGIVPSTYSSGGKTYHGRITKQGNKWLRWALAEASHRAIVKSPSLRSYYHKIKYKKGSNTATVALSRKLLEIVYKVWKEKRPYYEKEIWF

SEQ ID NO: 158225 - protein, 346 aa, unidentified
MNQIIRIGMDTSKHIFQLHGVDAAEQPVLRKRLRRKQVLAFFAKLPPTVIGMEACGASHYWARELGRLGHEVKLIAPQHVKPYVTRNKNDGRDAEGTCEAMSRPTMRFVPVKTAEQQAALMLAGIREQLIARRTQLSNTIRGYAAEFGLVAAKGLDKIEPLLAQIAQEEDLPALARELFATEGREYARLQAELKAIEARLMAWHRANACSRRLAQIPGVGPIGATTLVMKTPDPRAFASGRHFAAWLGLTPKDHSTAGKTRLGKITRAGDEVLRRLLVAGATAVIQQVRNGRGRPSPWLLAVLKRKPPKLAAVALANKIARIAWKLMTTGESYDGARMPGASAIAA

SEQ ID NO: 158226 - protein, 431 aa, unidentified
MPRTRAPNFLPSIGRLVRYLPRDGIRLFDTGECPFHIAGSSSIHCFYNHNLDFCRIRVDSVGVDGLQRHQACQNEVAVDLRQRRPSVEQISRIGMDTSKYIFQLHGVNTAEQPVLRKKLRRKEMFAFLEKLAPTVIAIEACGASHHCARLLQSFGHSVKLIAPQLVKPYIKRGKNDAADAEALCEAMSRPTMRFVPVKTAEQQAGLMLVGVRDRLIRNRTQLSNAIRGYAGEFGLTAAKGKAHLAPLLERIHADENLPALARELFAAQAEEYARLQAQIDEVDARLMAWHRADECSRRLSKIPGVGPIGAVLLTMKTPEPELFRSGRQFAAWIGLTPKDHSTAGKVRLGGITRAGDEGLRSVLVVGATTVIQHAQRGGRPSPWLTQLLKRKSPKLAAVALANKTARIAWKLMVTGENYAAKAAPAALAAAA

SEQ ID NO: 158227 - protein, 317 aa, unidentified
MTESVKVNVGIDVSKDFLDVHVGDVALRRVPNRSSGLSVLKRILSRYTISLVLLESTGGYENLAVTYLQSLGYDVCVINPRQARDFARSMGRLAKTDRIDAQILCRLADVIDASPERTRFIRPLTDERRQRLVSMVRRRRQLCDLMISERNRRAKTDSYGSESINTVLDFLTAEIARIDRDISAHVGSCFSDISSLLQSFTGIGPVTASTLLGELPELGKLNRRQITALVGVAPFNRDSGYMRGRRRISGGRSGVRNVLFMAVLSAVRFNPVLKAFFARLVAAGKPKKVALVACMRRMVCILNAMLRDGSRFEVAPG

SEQ ID NO: 158228 - protein, 434 aa, unidentified
MAAVKAKRQRNLDLITSSTLIVGVDGHSKSNTAAFNLASGKEALSPKKFENSRKGFLWLLDKVEWITKKHNLDNVIYVLEPNGPYWMLLARFLAERNFVVKVVNAYQVKMNRATEDPSPEKNDWRDARSIADLGRQGKFNDTTLPGPVYEDLRSLARLREGLTESRSAQKHRLRAMLVRNFPELPSIVSDILGKSVRALLRAAPTAESVASLGVEGVEQLVKAASRGRFGVKKAKQIVYAAGESVGYGRATSAVRIAMAVTLNTIEGLTQQIETIEDEMHRLLMETEEGMLVLSIPGIGEVTAATVLGETGGLRQYQNPNQIRKLCGLDLCGSQSGDRQSEKRISKRGRRLLRKSLYQAAVACIRSNDILAKFYRGLIDPARKKTLAKKKALIAVMGKLVEIMFSLVRSGSGFNPNYKWISPGQDKPVVQAMAA

SEQ ID NO: 158229 - protein, 343 aa, unidentified
MQTVTTIGLDIAKSVFQVHGVDAAGQVIIRRQLKRRYVLAFFQKLPRCLIGIEACASSHHWSRELAVLGHTVRLMPPAYVKPYVKRQKNDATDAEAICEAVTRANMRFVPTKTPEQQSGLVLHRTRHLFIRQQTSVINAIRAHLAEFGIVAPVGRQGVEELLNVVADPNDKRVPEIARACLSAFGAQLRRIKEQILEFDRMITAWHRSNEISTRLDEAPGVGPVLATAVVATVADPKVFRSGRNFSAWIGLVPKQHSSGGKDRLGSISKQGDRYLRGLFVAGALAVIRYAKIHGTKHRPWLTALLGRRPTKVAAIALANKIARMVWAMMVKGERYKEPVALAA

SEQ ID NO: 158230 - protein, 355 aa, unidentified
MNQEKYIGMDVHQATISVAVMDSRGKLIMESILETKAATILEFLQGLRGSLSVTFEEGTSAAWLHDLLKPHVAHVLVCDPRKNALLKDGSKSDRIDARKLAELLRGNQLTSVYHGEHGMRTLKELGRSYLTITTDLTRVMSRIKALYRSWAIPCIGTGVYAPRHRAEWLGKIPEPGVRLRAERLYQQLDLLQPVRQQARRDLLTESRKHHAVKLLRQIPSIGPIRAALLVAQLQTPHRFRTKRQLWAYSGFALETHDSGEYRYVRGKLQRNRERMTVRGLSNNHNPEVKNLFKGAAISASTHPGPLYDFYVALLEKGMRPTMARLTLARKIASITLTIWKKGADFDATQLHRQEA

SEQ ID NO: 158231 - protein, 457 aa, unidentified
MSIDTTDLSSDPVADRVVRVQVGIDAAVVANHQVTIRETTRDGQVQLSRFHASPTIAGLTRLSERLAAHPHVMAVAEPTSMTWLGLHVALQEAGCDLAFVGTRHAARLRGAISGKNKSDVIDADVLAMAGDVFTLSPLRPPAPPQLALRRAVVRRGKLVIDGNRSRRRLISLARWAFPDVWQEFAGSWPTAVAVLTRWPDLTALASARRSSVTNVVAAHTRGVPDVDARAERIRAAAARTTAFWDGHLDLEALAWETSEHLRDIALAAEQIERATDQAHHYWAALYGDDPLLLSVPGMGPMTAPTIRAFFADASAFPTAKAAAAYVGLTPSTWSSGTVVQPSRAITKEGPAVLRLACYQAAGGARRVDPQLAEYYRHLMVERGHCHTQATVAVARKLVERTWTVLTRGQPFEYRDLDGTPLTRAAAKDAARALAVPKTVRARARARSAATHRSKLTK

SEQ ID NO: 158232 - protein, 432 aa, unidentified
MDIVHPRVAGIDVHKKVIWVAVRLPGLEPGQRAVTVRRFKAFWRSLQKMAGWLAELGVTDAAMESTGVCWWPVYHALAQAGLEVCVCNAAHMRNVPGRKTDLRDCQWIAELHEYGLLRPSFIPDAQVAALRQRTRYRKKLIEQRTSEGQRLAKVLEDAGIKIDSVASDMLGKSGRAMIEALIAGERDPARLAGLALGVLRRKTDELQMACDGRFTSGHGQMCRLHLDAYDHLTAQIAELDALVAEAAAPFQAIIARLVTIPGIGRRIAEIIIAETGGDMTRFATAARLAAWAGLAPGDNESAGKRKKAPARQGNRQLRTAMVEAAWATWRTTTRPGARFRRLARQFGKGNEKKAAVAVAHTLLNIAWAVMRYDSDYIDAGADYYERRDQRNREHLVRYHQNALARLGLQVIITQPGDGAPPPPSPPNPGQAA

SEQ ID NO: 158233 - protein, 400 aa, unidentified
MISVGIDVSKGKSTVCLLKPYGEIICKPFEVQHTEKDLEELANLLQKLDGEIKIVMEATGIYHLPILTFLLEKGFFISVINPFMMKRFARDNSLRGAKNDRLDSVMIASYGIEKWHKLKKYEVNDGIYPELRFLGRQYHRFMQTHVKHVQELTHLLDHTAPGLKAMFNSWNEHSNRDKLSDFVERFWHFDLITSLSREEFVEQYLLWAKEKKYHQSRSKAEKIYDLASNGIPTLSSRTPSTQMIIQEAINVLRIVNNSLYRILSRMKELAKSLPEYATVRSMGGVGDALAPQLIAEIGDARRLHNGHALVALAGIDPPPYESGKFVGTHRRISKRGSPILRKIGFEVMRVLKSHKEPEDNAVYNYILKKEAEGKNKKLSKIAGLNKFLRIYYARVMEVYR

SEQ ID NO: 158234 - protein, 347 aa, unidentified
MNFYTQQHKHYCGIDLHARAMYVCILDEQGTKLVHKNLPTTPEAFLRLIAPYREDLVVGVECMFTWYWLADLCSQEGIAFVLGHALYMKAIHGGKAKNDKIEAHKIAVLLRGGMFPQAYVYPSEMRATRDLLRRRCHLARKRAELLAHIHNTNSQYNLPEIGKRLANKSNREDVAEHFPDPSVRKAIEVDVALIDQYDQLLGEVELYLTRSAKAHDVQPFARLQSVPGIGQILALVILSEIQDIARFPRVQDFVSYCRLVKCAKESNGKRFGTSGKKIGNVHLRWAFAEAAVLFIRQSQPGKEYFAKLEHKHGKAKALTVLAHKLGRAVYYMLSREQAFDLKRFVTA

SEQ ID NO: 158235 - protein, 355 aa, unidentified
MNDAKYIGLDVHQATISATVLDSTGKLVMESILETKAATILQFIHGLRGSLHVTFEEGTCAAWLHDLLKPHVTQILVCDPRKNALLKVGNKSDRIDSRKLAELLRSNLLRSVYHEQTGVRAVKELARSYMTITKDLTRVMSRLKAIYRSWAIPCAGQQVYAPRYRAEWLAKITEAGVRRRAELYYQQLDALRPLHQEARRDLLAEGKKHNATKLLCQIPSMGPIRAVLLIALIQTPHRFRTKRQLWSYCGLALETRNSGEYCIVRGQLKRSKKVVAIRGLNKNHNHDLKNIFKGAAIRAAAVTGPFQEFYTALVAKGMKPPMARLTLARKIAAITLIVWKKGARFDAEHLKQQAA

SEQ ID NO: 158236 - protein, 391 aa, unidentified
MVCVGIDVAKDKHDCCILDSEGTTLADCFTIPNNLDGFKRLLQTIKDCTQKSDKIKVGLEATGHYSYNILGFLLDNGLPTYVINPLHTNLYRKSLSLRKTKTDRVDAKTIATMLLSDVDLKSYTDTAYHNEELKSLTRYRFDKVQERAKLKQSVSRLVTILFPELEQLVSSIHGTSIYALLSEYPGAKQISEAHLTRLANILVTTSRGHYRKDRATHIRDAARTSIGSVMPAKSLELKHTIKLIQELTSEINEIEDAIRKIMDELKPPILSIPGMGFYSAAMILAEVGDFSNFNSPDKVLAYAGCSPSTYQSGKLTNCYAHMEKRGSRYLRYALYTATKYVCYWNPVFTEYLTKKQAEGKHYNVALSHATKKLVRLIYALQKSGKAYLAIT

SEQ ID NO: 158237 - protein, 361 aa, unidentified
MEYYIGLDVSQRQTAICIVNGKGTRVAEGKALTGPPDIYEWVTKHVDTKLVMKVGLEAGAMSAWLYTELSKLGLPMLCLEAYQAAEFLKAQRNKTDRNDARGLAQMVRMGGDFIKPVIIRSQSSQEARALLTMRQFLVNQRVSLENNITGTLKPFGLLTRRGNISTQVFRERVLATLDRADERGILVRETVMPSLNLYDTLCKQLAVLSKKVEGIAKSDPVCRRLMTAPGVGPIVALSFVTAVDNPKRFADAGDIGAYFGLTPRQYQSGEIDIRGNTSRRGDVMTRYHLVQAATVLLFNTKKWCALKAWGMKIAKRHGFSKARIAVARKLAIILCKMWLREQDFCWTNIPANTDLEGAIPA

SEQ ID NO: 158238 - protein, 441 aa, unidentified
MATNLVNLNAAGIDISSREHVVAVPEDRAKESVRTFQGFTRNLHQLAKWLKKCNIETIAMESTGVYWYDLYTILLDYGFEVYLVNAYHVKNVPGRKSDVSDARWLQELHTFGLLQASFQPDNLTRSLRNYVRQRKNIVRQMTKETQRMQKALEQMNIKLNNVIRDLNGKTGTQIITKILEGERDPKILAQYRDWRIKTSEQTLEKSLEGNWREEQLFNLQLAYNHYCFLQGQLEECDLESEKTIKKMSTLSNSKEVVKIKKSKNNPNFNVSQYLYEALGVEVTKIYGIKEITALTIFSETGVDIKEKFPTEKQFLSWLNVVPNNKITGGKVISSRVRRKKNKAGQAFRDAASALWKAQNPIGDYLRRKKAKSGGKQAVVATARKLAAIYYKVVTEKVEFDPKYLTRDKEDYLKNKLKQIEKIKQKTENLLLDYQNTAKLVI

SEQ ID NO: 158239 - protein, 331 aa, unidentified
MKNKQIVGIDVSKSTLDAFIFKTNHLFQVSNCPFGFVRLLEDSIKLSGASKDSLLFCFENTGCYSRALSVFLQDAGISFYAFDALDLKRSMGLSRGKSDKKDAKVIARYAWQRRDELVCSKLPGPVMDQLSALLSHREMLIKQRTALKNANKGHHNIYSDHEFKFLKDSQMRMIKQLSEEIKITESEIISIIKLNEELKRSYDLLLSIKGVGKILAFYLITLTHNFTKFTDPRKFACYAGIAPFEYSSGTSVRGRTKVHPCANKQIKSLLNMAAMASIQLPGEYQMYYQRRTEDGKNKMSTLNIIRNKLIFRAFAVVKRGSPYVDLHKFAA

SEQ ID NO: 158240 - protein, 373 aa, unidentified
MKMSIGVDLHKTQFTVYFLGEDRKVTEHGLYPTTKKGYEEFLLCCDCYANENYELQVAVESTGNARYFRNQLLVQGIDVLVVNTLKFKVVNESVKKTDKHDAKTLAEFLEKDMLPESQLCSQMNEDMRRVLKSRQTLVRAAVSIKNQLHGMLLGYGIETKRGQFQSQKERQRILKGLVDHELHGGAAVAAEPLFAIIDQLSIDIKKLEGVLASLVAQDEDVELLMSIPGVGLITASTIRAYMDDINRYDSAKKFASYMGLAPWVQNSNERIHHGHITKRGPQELRTAMVQCVLGMVRCKRKTERYRLMVQYRAMKSYKGSGASIIATARKLSTIMYTMLKRREPFDPLRMEYQKKYLDMQAAAFSAAEKQHIG

SEQ ID NO: 158241 - protein, 369 aa, unidentified
MKKHRYIGLDVHKESISIAVAEAGRNGEVRDYGRVGGSLIALERTLRKLNQSGQVQLHCVYEAGPCGFVIYRRLKQLGIDCAVVAPSLVPRKPGERIKTNRRDAIKLARCHRAGELSAVHVPDARDEAIRDLCRARTDAVRDQRRSRQQLKALLLRLGYHYTGKSSWTEAHLRYLRELEMAHPAQKVVLEEYLIAISQAGERIGRLTGQIELHVASWRMKPAVEALMAMRGIQLLAATVLISELGDRRRFDHPRQLMTYLGLVSSEHSTGNVRHQGPITKCGNTHARWFLIECAQHYALPPKISKELSKRQEHQPQRIKELSWKAQIRLHHRFWMLMQRGICRQIAVVAVARELCGFIWALWREVPAVT

SEQ ID NO: 158242 - protein, 389 aa, unidentified
MLLDHPSDGLAAIRTHIGAIFVSLELSRKNWLVTSLSPGKGEKMSRHSVTAGDVAGLLALFAELGRKAEARTGQSYPIITIQEAGLDGFWLHRVLQQNGIESHVVDPASIAVPRRRKRAKTDKIDGETLLRTLLAYKRGEPRVCAMVVAPSPEEEDRRRLCRERQALIAERIRHVNRIKGLLFAQGISDYKPLRRDRRARLEALRTGDGRELPSHLKAQIGRELDLIELLLKQITSVEAERDAQLAAARKPASEAAAPNPVTMLLALKGMGANFAAVLWSEAFYRQFANRRQVAAYAGLAATPWQSGGIRHEQGVSKAGNPRLRTTMVQVAWLWIGHQPNSALTRWFKERSPQGRKRAIVALARKLLVALWKYVTQGVVIEGAVMKTAA

SEQ ID NO: 158243 - protein, 472 aa, unidentified
MALARTSGLNRKQRKELRRRLRSEDPGLEVIHPHAAGIDVGNSTHYVAVRPDRDPESVRRFECFTGDLHRMADWLEQCGVTTIAMQSTGVYWMPVYEILDDRGFDVYLVNARHTKNLPGRKTDVQESQWLLKLHTYGLLSNSFHPSAEIRTLRTYWRQRGDHVQAAGRCIQRMQKVLTQMNVQLANVISDVSGATGQRIIRAILAGERDPQALAKLRDPRVRASDDEIAKSLEGTWQPALLFVLKQEVEMYDTYLQRITECDRELDAHLKRFADRINSSQDVTISPGGTRVPAAKRRKTAHSHAPQFDLGGELRRITGVDLTRIDGIDVVVAQTLISEIGLDMSCWPTEGNFTSWLGLCPDNRITGEKVIRKGTRRVINRAAYALRMAANTLLKSRSYLGAQYRRFRTKLGAPKAITAMAHKLARLVYRMLKYGQEYVDKGAQYYEQRHRQQQIALLKKRAAKLGLLIIEAA

SEQ ID NO: 158244 - protein, 413 aa, unidentified
MKVIYNNCCGIDVHKTFLIATIIKTTGRKIDYLKKRFSTHNKDILRFKQWLTQHECYDLCMESTGKYWIPVFNLLEDNMNVVIANPKWVRAVKGNKDDKKDSKWIGELFRLGLVPGSFIPPKDIRILRELTRYRYKLVSTRSSEKNRFQNSFTVCNIALDSVVSDMFGVSASAISNYILTSDTFDSDHCVSLLKGRLKKKSDEVIESIDGYHMMQPQKDRALIIRQHIDYLNQMIATIDAYLDELIQPYEPLVKLLCSIPGVKRQSAIIIISEIGSDMSVFGDQKKISSWAGLAPSSNESAGKKKSVKISRAGVYLKPALVQVAHAAKKSTTTPYYKIKFDRIAKRRGKKRAIIAISRMILVAIYHMIQTGELWNPIDLITIDTPEHILQRKKDKAIKEATKLLIKEGILKVS

SEQ ID NO: 158245 - protein, 341 aa, unidentified
MEQVSTIGLDIAKHVFQLHGADGAGHVLFRKRIMRAKLLSFLAAQTRCVVAMEACAGAHYWAREIAKLGHHVRLIAPTYVKPFIKRQKNDAADAEAICEAAQRPSMRFVPVKAEEQQANGIVFRARDLLVRQRTQCVNALRGHLSEYGYVFPKGITHVEALVAVVEDLQSSLSDSVRAILKLLVDTFTALEAQIAVLDAEINQRSKSDPTARRLMTIPGVGPITATAITALVPAAEGFPAGRDFAAWLGLTPLQKSTGGKPKLGAVSKRGERTIRRLLIIGASAVVQQASRRGAPKGSWLAQMLARKPKMLVTVALANKIARIIWALLVKGGTYKTPTAAA

SEQ ID NO: 158246 - protein, 347 aa, unidentified
MDQIIRIGMDTSKHVFQLHGVNAAEQPVLRKKMRRKEMVDFFAKCPPTVVAIEACGASHHWARLLRELGHEVKLIAPQLVKPYVKRGKNDAADAEALCEAMSRPTMRFVPVKSAEQQAALMLVGMRERAVAARTQLANTIRGYAAEFGLTAAKGVSHIPLLLERIIVDESVPALARDLFVSLADEFAQLKERLKEIEPKLLAWYRSNECCRRLATIPGVGPIGAILLVMKAPAPEQFVSVRQFAAWMGLTPRDHSTAGKVRHGVITRAGDETLRKTLVVGATSLLRQVRAGKGRNASPWLIELLKRKPPKLVAVALANKIARIAWKMMMAGGTYKNDAAPPAMACAA

SEQ ID NO: 158247 - protein, 321 aa, unidentified
MSRILVGVDVCKDFLDAHARPTAVQKRFDNTPAGIEQLVAWVRSLAPERVIFESTGPYQKAAVGALLAADLPAVVVNARQVRDFAKGTGQLAKTDVIDAGILAHFGEVVATVVRPLPPQEILEFRELCDRRGQLVRMLASEKNHRHAAQGASPKVIKNIDKHIAFLQRQIDHLEERMDRIVADSETFKAKDEILQSIVGIGPQVSRVLLVHLPELGKGTRRSIAALVGLAPFADDSGTSSRIRHIRGGRAKVRIALYQAAVAAIRYCPTMKSFYASLKARGKATKVALIAVARKLLVLANALLRAGIPYQHPTNSVCLKNA

SEQ ID NO: 158248 - protein, 410 aa, unidentified
MKMAGIDVHKKVLMVVVVDTSRPQEKPARRRFVTMPSELHRRLTWLREQEVEEAVMESTAQYWRSVWLELEPHLRLHWAQAFSNRAPRGGKHDFKEAERLVRRVMADELMLSFVPSGEQRIWRSMTRRKLQLTRDRVRLQNQIECLREEMRIKLSIGVSHLLGASGLRLLHALASGETDPKKLAQRGGERLQCTEEQRVDALTGTVQPVHGERLGLQLERLPLIEEPMTGLHSMIAAAMKSHPDAVIRLAEVPGLGVDSAQPIIAEVGAQASTFASAAELTSGVGTCPGKDESAEQNPSSRSAKGNKYLRRVLNQAAHAAVAKKGSHFQALFRRLLPRLGYPSAIWAVAPRLCRLVWKILHPGVRFIQQGTEVGPREKKKRAPMLARALRKLGYEVTITPISQLAPNPAV

SEQ ID NO: 158249 - protein, 347 aa, unidentified
MAIVGGFDIHRRQVTFDYLDTVTGQVRRGRISPACRETLRHWLERFAGREDVTFAVEGCTGWQFVVEELQRAGITALLAEPAETAHLRGPKRHAKTDKTDSRHLRMLVADGRVPLSWIPPWQVCELRALLQLYRDLAEEHTAWTQRIHATLFHQGVPSLAGRLGDPQVRARLADGAGMGLSPAGAQAVAVALRRMDDLEAELGPVHARITAFARRQAGCKTLARELFGVGPLVAAIVWAFLGDARRFSSSAQAVRHTGLDVTVRSSDGKGPPGYLSHQGPPILRWALFEAGHQSSRTASPDHRYYAGVAGRIDANRAALSVARKLARRSHHILRRLGDQAYAPVPDW

SEQ ID NO: 158250 - protein, 342 aa, unidentified
MEHYAGIDVSLELSSVCVVDSSGRIIREAKVPSEPEALVGFFGQLGLPLVRIGLEAGPLSQWLHAGLTAAGFEAVLLETRHVKAALSAMIVKTDRKDARGIAQLLRMGWFRPVHRKSPDAQEVRALLVGRKLLQAKLRDVELSIRGILRGFGLKVGEVSKGRFAARINKLVAGHEMLETVAGAMLQAREGLQSEFMRLHRRMLAIVRGDAVCRRLMTAPGVGALVAVTFKTAVDDPERFRTAKAVGAHFGLTPKRYQSGETDVSGGISKVGDAMVRTALYEAANAMLTRAVRVSTLKRWALEVAKRRGTKRAKVALARKLAGVLHRMRANGTDFRWGKEAAA

SEQ ID NO: 158251 - protein, 323 aa, unidentified
MSSKATKKRRSFIGIDVSKDLLEIAVHQSNYHFQCRNDPKQFPTLISELISLRPARIVLEATGGLERPLLQALQTIGLPVVVINPRQVRNFAKALGLLAKTDRLDARVLAHFAAAVQPPVSPIKTQQETELDALMGRRNQLTEMLTAEKNRRGSAATKTTRHDIEEHIEWLEERLKELDEKLKQQLECSAVWQRKDQILQSVKGIGFVTSMSLLADCPELGQLNRHQMAKLAGVAPLNRDSGKQRGTRHIYGGRAQVRCKLYMATLAAIRSNPVIKSFYKRLVDKGKLKKVAIIACMRKLLTIINVMVRDNKLWNVKAQPVAA

SEQ ID NO: 158252 - protein, 433 aa, unidentified
MSNFFYSPVIGIDVSADFSYTAILAPNGDIYKKSFKIKHDLNGFNHLVNEIKKVEEEFNMKTAIFMESTGVYHLSLFHYLNKYFDNTFVINPLVTKSNKNGDIRKVKNDKKDALSIATIGKFQNIKLSQQLSLDIFLLKNLVREYYKLTDTSSTFKKKLSADLRVIFPGYNTIFSDSTSKSSIELLSQYPTPQSILEAPKENIIKIFLDSSKKGIIWSENTYSKLFKVANEAKIIGLPLDGLAVKIASSITLIKTIQSEIDTLLQKINNFIQSETFSESIRANIELIDSIPGIGQLTAITIIAEIGDIDGFLKPKHLVAFFGIDSSVNQSGNFKGDDNKISKRGTRIGRRALYSVALASIRNNRNGVPINKVLLDYYQINLKGKKPKIALVAIMHKIINYIFAVLRNQTPFEQRDPKIHKQMFLENNSLNKVA

SEQ ID NO: 158253 - protein, 387 aa, unidentified
MPQPNDLSRSLVALDQDSTIIAVVEMSQSSWLVAGMLPGIERQPRKKLEPSAERLLGLLHRWRDEAVKAGRKITRIALAFEAGRDGFWLARWLSARGVEAHVIHPSSVAVSREHRRAKTDRLDTELLKRGFLGWLRGERGHCSMARVPTIAEEDAKRPNRERECLVGERTRIVNRMKGSLARLGIRNFKPTLRKAAERLATLQTPEGSPLPPNVSAELQRDMARLRFVISQIREIEEARQKRLEQEPETGSHAMVRRLARVVGVGIETADMLVHEVLSRPIRDRKAVARYAGLTGSPDESGAKRREQGLARAGNARVRRGMIQLAWRFLLFQKESALARWYRARTADSRVGTRKTMIVALARKLLIALWRFVTTGETLEGVILRPAG

SEQ ID NO: 158254 - protein, 405 aa, unidentified
MKHVIAFDVSMGKSYMVVYNPLKTCELEKEIKHTRLEFLKLKSIIDDITNGYEEEPHIVFEATGVYSRQLERFMQENGYSYCLLNPLESKIQCDSLRIHKTDRSDAHKLALTHFSNERRIHTVENDIYRQLKGLSRHYGELDDELSLIRNRLHKVIQETFPEMEHVFKSKSELFLNVVQLYPHPDLILNHSKTVIKNRILANTEKRMSAAIAEKKALELLEAAMQCYPAVSKEDVRCDQARSYANRYQELLLQKEECIAKMVSLAASLAEFDILLSIPGIGANTAVRLIAEIGDIRRFDNHKQLNAYTGIDIRRFQSGKTFYKDKINKRGNKHLRKLLYIIIQNMIKRRRFGQNHFVDYYDKIKMQPYNKCHKVASIACMNKLLKNIFYLVTHDLNYDYRLATTS

SEQ ID NO: 158255 - protein, 423 aa, unidentified
MKIVYPVCCGLDVHKKEIVATVAITNSQNVTSYKLRKFPTFTSDLNALADWLLSHDCRLVCMESTGKYYIPVYRVLEQRGLKPYVAHPKFLRSIPGKKTDPKDSKWIADLFKHGLVPTSYVPSRDIFELRDLTRYYAKLTNTRTGEKNRIQNSLTVSNIMLSSIVSDTFGKAASAVLRYVLDHPDEKNIDFSQFMTKHLHATPEDFAKAMDGTFSSEQAGKTKIALSHFDFLNTCLEQLDTAITLLSRRYQPQIDLLITHPAVTLHSAVRILAEIGDDMSVFPDSRHFCSWAGLAPQCNESGGRKKSVHISHGGRYLKPVLIQVALAAVKDKSNPYYAYKYQALQKRRGKQRAIIAIARMILTSIYHMLSQNVPYSADLYLSYYRKQTTKSIRLSMPKIFAFLSTRGLSVITADGVVLNSNTG

SEQ ID NO: 158256 - protein, 362 aa, unidentified
MRMKSHPQYFISKPRRSSRVGITIGIDLGDIWSHYCTLNEDGEVVDRGRFRTNRSGVDKRFRNLERVRVAMETGTHSIWVSEQIEELGHEVIVANVRELRAISHSDRKSDKVDAEKIARYARLDPEILRPIAHRTVAQQETLTLIRARDVLVRLRTGAVNSVRGLAKPCGYRLPASSTLTFAKRCLAVLPHGLAQALGPLVHQIADMTVTIKQYDRQIQRLTETAYPETQALIKVYGVGHLTALTFILTLGIKERFRRSRDVGCYLGLRPRRSQSGDSDPQLGITKAGNGYLRQLLVECANHVIGPHGKDSTLRRWGLSLGARGGSHARRRAVVAVARKLAVLLHRIWITQEVYVPFYEVAA

SEQ ID NO: 158257 - protein, 435 aa, unidentified
MNYVDDIRLEQFMQMKKEIRGSGQYLIVGIDAAKEKHRAFFGTAQGKTLVKNLVFDNTVEGFEKLDASVERVKVQHSLPKVVFGIEPTGNYHKPLAEHLVKCGRMAVLVGGTAVKNNRQLLNGRWDKNDDKDSANVADLIAQGKCLFYEYPLMTLREVRILNTLKRRLKKREHGISMCIRNNIIAQYFPELDKHFGSAEILAVVRECLDPSVIAGMEYDDFCRTVSPGKMTLAKERRVGAIWRSAVDSVGCTMGEAASYEARVMVDSLKQVRQAIKAVEDKLEDACLQFPEYTYLLSIPGFGPDISAKVLGAIGDPHRFTSGKQVLKMAGLDLCANRSGKTSDSATPVISKQGKADLRYGLYQAALIASTKSKDFIPYFTNKLVGRAKEKGIGTKMRVKLAAKLLIIAWTLMKKKECFDPKYLKRTDQAEQKAAA

SEQ ID NO: 158258 - protein, 325 aa, unidentified
MSDSVTVGIDVSKLTLDVHVSPAQLRQTLSNSDAGFEELKTLLSMQQVSLVLLESTGGYEDAVVCFLQSLGYDVSVINPRQARDFARSMGRLAKTDRIDAELLAQLASVIDSRSDRARFVKKITDDRRRKLASMVTRRRQVVNLISTEQQRKSAASVYSTESINRVLSFLRSELKSIDADISLHVRSHFADISGLLASFKGIGPATIGVLLGEVPELGRLNRRQISALIGVAPFNRDSGIMRGRRTVWGGRTMVRNALYMPTLSAVRFNPVIREFYTRLISQGKPRKLAQVAAMRKLLCIINAMLSSGTMFNPALHLHSVQEAQQ

SEQ ID NO: 158259 - protein, 389 aa, unidentified
MKIYVGIDIAKLNHFAAAISSDGEIILEPFKFTNDADGFQLLVSKLESFDKNSIIIGLESTAHYGDNLVRYLVAELYQVCVLNPIKTCQMRKNNIRKTKTDKVDTYVIAKTLMMQDDLRFVSFYDLDMMDLKALGRFRQKTIKQRTRLKIQLTTYVDQVFPEIQYFFKSGLHQNAVYALLKEAPSPKEIASMHMTHLANLLKVNSHGHFTKEQAKELRVLTQKSVGANDSAISIQITQTIQQIELLDSQLEKIEAEMTDIIKFNDSVIMTIPGIGYINGGMILGEIGDIHRFSNPNKLLAFAGLDPSVYQSGNFQAKTTRMSKRGSRVLRYALVNAAWNVVRNNATFKAYYDAKRAEGRSHYNALGHCAGKLVRVIWKMLTDKVEFNLE

SEQ ID NO: 158260 - protein, 351 aa, unidentified
MLLIGVDYHPSFQTIAFLIEETGECGDQELNHSDGQAEKFYRDLKQRGISVRVAMEATGYARWFERLLGELGFELWIGDPAEIKAKRVKKQKFDREDARLILRLMRENNFPQIWVPGPENRDLRQLLWHRHRLVQMRTRIMNQLQALAMNEGYRWKKKLFSEQGRAQLEKLALAPWASRRRQELLELLDRMNPTIEELTVAVEREARKRPEAMRLMTHPGVGPLTALAYVLIIGTPTRFQRGKQIGTYVGMIPCEESSARKQRLGHISKQGSSLLRFLLVEAAQAAARIHPDWRRRYIHLAMRRHKSIAKVAMGRRLAVRLYWMWRNGCEYSPSLEFGSYAGQLGTRNGVK

SEQ ID NO: 158261 - protein, 385 aa, unidentified
MKYALVRVLPEVPPGGVCAGIDWASADHAVCVAVLAGRVRDRFTAVHDRAGIAGLIARLRGSGAAEVAIERGDGVLADALLAAGLTVVVIGSRQVKNLRSRYGSSGAKDDRFDAFVLADTLRTDRARLRPLIPDSPATLALRAAVRARRDLVAHRVSACNQLRAHLAVAFPGATGLFSELDSPLSLAFLAAFPAQLAAARLDEQALAAWLATVPRRGNTAPAGVLAARLAAAPRGAAGADAAQAAVTAQLAAATAGLAGRVRALEAEIAAQLAAHPDQHIFTSLPRAGTLRAARLLAETGDCRARYPDPWSLAGLAGVAPVTRRSGTYISHEFRWNVNRQLRDAICDFADGSRHASPWAATACAAARDRGKDHPPPSASPPAPGS

SEQ ID NO: 158262 - protein, 337 aa, unidentified
MRQIKFFIGTDVSKEWLDMCIILEGEVIHRQQIKNKETAIRKWLKQTQKQYGYSMQDSLFTMEFTGIYNHHLLELLHQAGANIWLIPGLEINASRGLQRSKNDKDDARLIAEYAIKNLKKVRLWKKPRTVLKQLAALLMMREKLMTSKHQYQTTLKEYKSFSTKDEYLIIKDYSSAMLKTICQDLKTIEHQIKDIIEGDERLKELNEYITSVDGVGIITSANTLVETNEFLDISEAKKFSNHSGVVPHKDESGKKIKKPKVSHKANKKMKKLLHLAAMSVIRKKGELRDYYERKIAEGKNKMSVLNAIRNKLVLRIFACVNNKRKYEKNYVYSLVNP

SEQ ID NO: 158263 - protein, 344 aa, unidentified
MNYHTALDVSLRSVSICIVDDEGTIQFEAQVPAEVEEIDKCLRRFNPEIQSVGFEAGTLTQYLTYGLQAAGYEVICLEARQVSAALAAMRNKTDKNDARGIAQILRTGWYSRVHVKSMESHLIRALLSSRKTILKKCVDIENEIRGLIRLLGIRLPGTLKHGAYDAVLRQAIEADASMVNSLIPPLDARLMLYQTYLKLDNQVKALVREDPICQRLMTVPGVGVITALTFKAAVDDPARFKRSRTVAAHFGLTPRRFQSGEFDNPGRISKAGDPDVRCALYVAAHSLVVRSDQWCSLKVWGVKLMKTKGHRRATVAVARKLAVILHQMWLNGTDFRYGSTEATT

SEQ ID NO: 158264 - protein, 405 aa, unidentified
MVTVGVDWAEAHHDVAIHDPQGRSLRTGRIDTGPAGFSELLAMIADCGAAPETTAVAVETDKNLLVVALQGAGFEVFAINPRAVARYRERVGQAGAKSDARDAAILADILRTDRHLHRVLPHPSEQARAVKALARQHQEAIWALHQTLSRLRSLLLEFYPAAVTTFPQLKHHTALAVLAAAPTPAQGRRLTRRQVVTILHRVGRRNDAGLAEQITTGLRGPALAQPQPVEDALGVSVAALVTVAQTMTAGIDALEAQLAIVFAAHPWAPVLRSAPGLGPVLAARVLAEIGDDPTRFATTANLRSFAGTAPVTRASGKARWVQARRVRNKRLADACHWWAFAALTRSPGARAHYDRRRAAGDHHNAALRHLANTLLSKIWHCLQHRQAWNEHHAWLTPANPPAVAA

SEQ ID NO: 158265 - protein, 466 aa, unidentified
MTPPRRQQPKRRRTSPSLLKRIKLHVAGVDCGAAEHYVAVPPDRDATPVRAFKTFTSDLHRLADWLAACRVTSVAMESTGVYWIPLYEILEGRGFEVVLVNARHVKNVPGRKSDVTDCEWLRELHSVGLLRGSFRPTAAITVLRAYLRHRETLVESAAAHVQRMQKALGQMNLQLHVVISDITGVTGLRILRDIVAGHTNPQDLAQYRDHRCHASEAEIAAALTGHYRPEHLFALKQNLELFDTYQRQLADCDAATEAHLQTLAAEATVVLTHPLPAPRSTAKPRRNEPRFDIRSPLHQLTGVDLTQVDAIGPYSALRLLAEIGTDMSRWPTEKHFTSWLTLAPKNKISGGRLLSSRTQPSANRAAAILRLAARSLGRTETALGAFYRRLAYRVGKAKAITATARKLAILVYRTLKDGLVYQDPGAAASDAHHRTRVLRRLRQRATALGFTLVNLETGEQLETVVS

SEQ ID NO: 158266 - protein, 270 aa, unidentified
METKVFVGIDICKDSLDVAIGPGKEIITFANDQKGVNALIKELSRIGPELIVLESTGGYERLATSSFVEAGLPVVIVNPRQVRDFAKSVGILAKTDAIDARVITRFAEAVKPDVRQLKDRETSELTALVTRRRQIVEMIVAESNRLKLANKRNKKDIKDHIRWLEKRLDKIESDIGKMIQNSPIWRCKDDILQSVPGIGPTTSAVLICDLPELGLLSPKKIAMLAGLAPLNCDSGKFRGRRRIWGGRASVRSALYMGTLAATRYNPAINA

SEQ ID NO: 158267 - protein, 201 aa, unidentified
MPEVFVGIDVSEANLEVARLPDARVWRYAHDLEAIEALVGRLTEAQPSLIVLEATGGVETNLLVALSTAGLPAVAINPRQARDFARALGKLAKTDKIDALILAEFAQAVRPEPRPLPDAAAAALVGVAPMNRDSGKWRGRRSIAGGRTHVRASLYMGALSASRSNDAIRPFYERLLAAGKPKKVALTACMRKLLTPQRYAP

SEQ ID NO: 158268 - protein, 294 aa, unidentified
MHVRPSGESFAVARDGETLAGLVERLAALAPSLIVIEATGGYETVVASAIGAAQLPLAVVNPRQIRDFARATGKLAKTDRLDAAAIAHFAEAIRPPVRPIADAEAQALGELVARRRQVIEMIVAEGNRRRRATQRRVIRAIERHLAVLQAELSELDGDIDSAIRDTPAWQADADLLKSVPGIGPATLRTLIAELPELGHLTRRQIAALVGVAPINRDSGTLRGRRTIAGGRSAVRTALYMAALVASRANPVIAAHYQKLRAAGKNGKQALIACIRKLLVILNAILRDRKPWQPA

SEQ ID NO: 158269 - protein, 426 aa, unidentified
MAYYTQNQKIEQVSNDAMVVGVDIGSKTQHARAFDYRGREVSKVLKFTNSRSGFELFLAWMRSLVSEKDFKKIIVGMEPTGHYWFNLRDFLAKEGIMLVIVNPLHVKQSKELDDGSQTKNDRKDPKVIARLVCEGRYSVPYTPEGVYADLRIVWQDRERQMSDLICAKNRITEWISTYFPEYAEVFKDVFSKSSLTLLRKACTPSDMLELGADGIKEIWHDEKVRAASDNKVKNLLAAAEQSIGCHRDSDVVRRQLAGFIREYDFHVGELETLEAQLAELLEQIPEAAYLLNTKGVGLVTVAGLLAEAGDLRRFKSPKQLLKLSGLSLRENSSGKHKGETTISKRGRARLRKVIFNGALAAIRFNAEFRQVHEYYTKRLENPLKHKQSVIAVGCKLVRVLYSLFVHGRSYDGQRMLADIHRPLQAA

SEQ ID NO: 158270 - protein, 342 aa, unidentified
MNIPVRIGMDTSKSVFQLHGVDENEVVVVRRQFRRAEMIRYFERLPPVLVAIESCGSSHHWGRLLQSFGHEVKLIPPQYVKAYVKRGKNDAADAEALCEAVTRPSMRFVPVKSKERQAACMLMTVRERLVSVKSQLSNAFRSYAAEFGIVGPAGRQNVAALIKRVLEDDSLPEMARDLFRLQAVEYAAVQARLAKIEAKLMKWHREDDISRRIATIPGIGPIGSSMLSMKAPPPETFRSGRDFAAWLGLTPKDHSTGGRQRLGGITKAGDSILRSTLIVGATALLRHVRKGRHKPTPWLASLLERKPPKLVAVALANKFARIAWRLMMSGGVYNQPVASMPT

SEQ ID NO: 158271 - protein, 345 aa, unidentified
MEIRIIGIGLGKTVFHFVGVNARGEVVVRKKGSRTQLLRFTANLRECLIGMEACGGSHFLGRALREQGHDARLMPAQYVKPYVKTNKNDYIDAEACAEAVTRPTMRFVPIKTDDQLDLQTLHRVRERWVVRRTAVINQIRGLLLERGITIRKGRNHIEQSLPGILEDADNKLSGALRVLLTQLRLEMQYLHGQIGETDKLIGRICGELEQCRRLVAIPGIGPITATATVAAIGNGAAFKKGRGFSAWLGVVPGEHSTGGKQKLTGTSRRGNKYLRKLFVQGAHTVLLQKTKQSSGLSTWLLNLTSRKRKQVATVALANKMARMAWAVLFKGEAYRPPTAAQVIAA

SEQ ID NO: 158272 - protein, 342 aa, unidentified
MSEVTIIGIDLAKRVFHLHGARDDGSVMFRKKLSRARLLAFIAQHPRCIVAMEACATAHGWGREFEKLGHDVRLIPPNYVKPFVKRQKNDVADAEAIVEAALRPTMRFVHVKTEDQQARAMLFRTRQMFVGQRTQMINALRGHLAEHGLVAARGPAHLKRLADALDDSNAVLPDDVRDLGRIYLEQIEGINARVAELDGKMRRAAREADLARRAQTMPGVGPVTALAIETFAPDLASFRRGRDFAAWLGLVPRQHSTGGKARLGKTSKMGQRDIRTLLVSGAMAVLQAVERFDTPNNGWLKRLLTRKPRMVAAIALANKMARGLWAMMTKQEDYRNPVAAMA

SEQ ID NO: 158273 - protein, 396 aa, unidentified
MINVNKMQAPMTKVLYVGLDVHKDSIVAATAVAGDKPAEVYGKIGGTLDALDKLIKKLSKPDLEPRFVYEAGPCGYVIYRHLTKGKYLCQVIAPSLIPTKASDRVKTDRRDAQQLARLFRAGELTAIYVPDAEDEAVRDLVRARDRAMMDQCKARLRLKAFLLRLGHRYLGKGNWSEAHLRYLSSLRFAHAGQQIAFQEYLEAVTVATERLQRLSKAMEAALPSWKREPVVRALMCMRGMALLTGMTLVAEAGDLTRFDSPTQLMSYFGLTPNEYSSGEKRQQGGITKAGNGACRRALVEAAHHYRVAPRVTPAIQKRQEGQSREVRAIALKAQQRLNGPLPAFDRPSQKERRHHRRAGPRTVRLCLGHRLPGQCPGETQSAGRGTKGCRRSNNSR

SEQ ID NO: 158274 - protein, 502 aa, unidentified
MERVKRNRDRAAPRQMEKGSEEEMANEASTEGKPSKRLTRKERKQLGRQIRSASPGLDVVHRDAAGIDIGSREHYVAVGPDRDSQPVRNFGCFTADLRRMAQWLRQCGVKTVVVQSTGVYWIPVYDVLEQYGLDVWLVNARETRNLPGRKSDIQESQWLLKLHTYGLLRKSFRPTAEIRAVRTCWRERAEYVQQAGVCIQRMQKALTEMNVQLATVLSDLSGVTGMKILRAIVGGERDGKRLAEFRDANVKASKETIAKSLEGTWLPEQLAILQRQLADWDHVQKQMGACDKDLADLMHSMPAAEAKPVEPAPPTAGGTGKRKRKRASRNQPNFDIAAELKRVAGVDLTRIDGIQAMTVQTVISEAGLDMSQWRTENHFVSWIGLAPRNDLSGGKVLKTKTRKVVSRLATALRIGASTLRESDSYLGAQFRRLRGRLGNPKAITAMAAKLARLVYRMLKYGQEYVDKGKAQYEEKYRQQKIKLIAKQAAQQGFALVPLANPA

SEQ ID NO: 158275 - protein, 343 aa, unidentified
MQTITAIGLDIAKSVFQVHGIDAEGKVILRRQLKRRYVLAFFEKLPPCLVGIEACASSHHWSRELQALGHTVRLMPPAYVKPYVKRQKNDMADAEAICEAVTRANMRFVPTKTPEQQSVLMLHRTRHLFIRQQTSVINAIRAHLAEFGIVAPVGRRGVEELLNVVANPNDKRVPEIARACLLAFGVQLRRLKEQILEFDRMIIAWHRSSETSRRLDDCPGIGPALATALVATVADPKAFRSGRNFSAWIGIVPKQHSSGGKDRLGRISKQGDRYLRSLFVAGALAVIRYAKIHGTKHRPWLAALLARRPTKVAAIALANKIARMAWAMMAKGERYKEPIALAA

SEQ ID NO: 158276 - protein, 439 aa, unidentified
METIYRRCAGLDVHKESNQVCVRIMNDDGGVDQRTERFGAMTGDLLRLRDWLSELKVTHVAMESTGVLWKPVFNILEGAFTLWVCNAQHIKQVPGRKTDVKDCQWIAQLLQYGLLQPSFVPHRGLRELRDLTRERAQMMGEVTRVKNRIHKVLEDANVKASCVMSDVLGVSGRAILAAIVEGTEDPEALAELARGRLRAKTEELRDALEARITDHHRFMLREHLRHLKALEILVGEIEARIDTVCASDAINPPQARQETPPSGKGETPGPEHFVPPFQDCVELLDSIPGVNICIAQTILAEIGTDMAQFPTGGNLASWGGLCPGNCETAGKRHNGKTRHGNRWLRRVLSQAAWAATHEKPGSYLKSLYRRIARRRGKKRAIVAVGHTILLIAHCLLSTGAYYYDLGQDYFDHLDEERLTRYLVKRLESLGHAVELQPAA

SEQ ID NO: 158277 - protein, 360 aa, unidentified
MKLDAALDTSATTTAICVVNSRDGAIVLETTVPTDPKAIFRALEPFLPRLHLVGHEATGWSAWLQRELEARGVPMVLLETHHTARMLEAQRNKTDKNDARGLAQIVRSGWFKPVHAKSDASNRMKLLLAHRRTLKRKLMDIENEIRQSLKMFGLMVGRRVQRASFETRVTALVADDPLLGSTTACMLRCWATLWTEYKRLHTLLVQVVGRDELCRRFCGIPGVGPVAALTFKAAIDDPARFAKSKIVGAHFGLTPKREQSGTSVDHDGHISRRGDGEVRTALYEAANAMMTRSQKHCAVKAWGLRLAAKRGHKRALVAVARKLAVIMHRMWLDGSEFRFAASDQPAGKERNPAPAAPACA

SEQ ID NO: 158278 - protein, 348 aa, unidentified
MQEHRGGSDSGDVILGVDTHKAFHVAVVINSVGGLLGSTTVPATAAGYAQLLSWACSFGRVERAGVEGTGSYGAGLARHVAELGIAVIEVNRPDKPTRRRRGKTDAIDAESAARAVLSGSAQARAKSGDGPVEMLRMFKLAKDSAMKSRTQAINQLRAVLVNTDPTLRESMAGLGTTRLVQRCARLLPGTSSDALVAGKYTLRLLARRIQNLNAEIEDLQAQIHRVVEAHRPQLLKGYGLGLDTAATLLITAGDNPDRLRSEASFASLCGVCPVEASSGNTSRRRLSRGGDRRANAAIYRIALSRMRWDPSTRAYVQRRIAEGKTKREALRCLKRYIARELYPLLQAA

SEQ ID NO: 158279 - protein, 347 aa, unidentified
MRFYTTTHQYYCGIDLHARVMYLCIINSEGEIVLHRNMKADPESLLKAIEPYRPDILIGVECIFTWYWMSDLCAEEGLPFVLGHALYMKAIHGGKAKNDKIDSRKIAGLLRGGMFPMAYDYQAEMRATRDLLRRRDYMVRRRADLLSHIVNTNSQYNQPAFPFHIEHKCRREETLTHFTDPDVLMSIKTDFNLIDQFSIQIRAMETYILENARLHDSESMYLLRTIHGVGKILSMTILYEIGDINRFPRVQEFASYSRLVKCSRESAGKRYGTAGSKIGNVHLKWAFSQAAVMFLKGNPKGKEYRARIQKKHGKAKSLSILAHKLGRTAYYMLKRKKPFDMNKFLSA

SEQ ID NO: 158280 - protein, 353 aa, unidentified
MKFDKYIGFDLHQATTVVAVLDAEGKVVIETIVATEAAAIIRLLRGLSGPLRVTFEETTQARWIYDVVRGYVKEVIVCDPRRNKLLGEGSKADKPDARKLAELLRAGLLRPVYQGHEATRELKELVRGYETLSADVQRMMVRIKAIYRAHGIRTPGSAVYQQKQREQWLQLLTAPGSRQRVSWLYEELDHLRPIRKQAKMAMVTEGRKHRAFGLLRTIPQLGPVRCAMLVATVDTPYRFRTKHQLWAYSGLAIVTYMSSEYEIKAGRVVRSRKPLTTRGLNRNCNRRLKELFISAAVAGSRSEPYRSYVERLQQRGIRTEMARLTLARKIAAVALRVWKKGETFDPKKLNSTT

SEQ ID NO: 158281 - protein, 363 aa, unidentified
MSTITMGVDLAKQVFSVSELDGGGRVRRRRDLKRDPFAAWLVQLPPGTVVAMEACSGAHHWARRCLEHGLVPKLMAAQFVKPFRKSQGNKNDRNDAEAIATAARQGNMRFVAVKTVDQQARLSWHRVREGYKAEGLAISNRLRGLLAEFGVVVARSDHSLRRALGDEAIRTQLPTMLHGVLDDLQQHWQQVRERMAACDAGIAAHARADVRSQRAQQLIGVGPLTADAVVATIGDGREFTNGRQLSAWLGLTPTQHSSGGKQRLGEISRRGDSYLRTLLIQGARSSLQRANAVALEKASAEQIWIRGLAQRLPFGKVLVAIANKHARQLWAMLARGEDYDAEAWLRHPMVQRPATHKTHAMTA

SEQ ID NO: 158282 - protein, 405 aa, unidentified
MESTKSVSRIGLDCHRTFSLATARDAQCRVLWRQRLGHADRIGLRAKLSKWPAGTPVVLEGTFGWGWMCDELSASRLDPHLANSRKVSGWREARGMAKTNKIDADLLSELWGEQTRWWEVWLAPPEVRDRREWLRYRMGLVMVQTQFKNRIHATLHRHGIINDKSDLFGVAGRRMLSQLVDEKEEGSSPLRASGRQTLKGQLVLLAQVRRLIAQATRQFRGTLCKCEEGRLLTSLPGVSWVLGYTILAEVGDFARFKNADHLVSYSLLAPVADDSGEDDGRPPTGRRLGQAGRHTLQWAWIEAARGAVRKSARFRDVFNRRTDHGKRDRGRGYITVANSLCRVAYSVCTKRVNYTEVPPPRPGSQGRRQGARAEGTSSRPGTGQPDVAMAAAAVADGNVVASPQV

SEQ ID NO: 158283 - protein, 322 aa, unidentified
MDNITHIGLDVHKETIAVATLKPGALACEERVIPNTPEAIRKLMASMGDPTMLRACYEAGPTGYDTHRLLGSFGVECDVIAPALIPKRPGVRVKTDRSDAFTLAHLHRAGELTAIRVPTAQEEALRELIRTREDLKLDRRIARQRLKSFLLRQGRSYPHPRSGWTGSYEAWLSAQRFSEPATQLAFANLLAAHSARNAQLVALDAEITKAASSPELAPAVSLLRCFRGIDTLSAVTIIAEVSDFRRFSSAASFMAFTGLVPSEHSSGLSVRHGSITKTGNAHLRRILVEAAWSYRHRPYVGKALAERLQGQPPEVIAYAWVA

SEQ ID NO: 158284 - protein, 335 aa, unidentified
MKLYGAIDLHSTNNVTVVINEQDQVVYQKRLPNDLSLIAQQLSSYRASLQGIVVESTYNWYWLVDGLMEKGYRLHLANTAAIQQYNGLKYTDDHSDARWLAHLLRLGVLPEGYIYPKQERVVRDLLRKRGQLVHQRTANLLSIQSLISRTTGNSIGAKYIKALDIQHVDGVLPNPDLVLALKANLAVMNSADAQIEILEKTVQDRVKLRPQFRFLKTVPGIGPILALTIMLETGEIERFASVGNYASYCRCVGSRKISNGKRKGSGNTKNGNKYLAWAFVEAANFAIRFSSRIKSFYQKKKSKSKWRTSSAELATTLSKIRLCLISLRRLPNRSI

SEQ ID NO: 158285 - protein, 344 aa, unidentified
MFYIGLDCHGKWTTAAGFNPETGESLSLERVSNEPGEMAKALEGLEGPLYGVMESGTNAWAMYREFLPIFESLTVVDPSGVWDRRSDRQGKTDRLDAMRMAQMLYRGQIKGLYIPDEVTQDLRVLVRAKVRMSRWVTRLTSEIGSVLKSWGYVGNRSLLSKSGKAQMGKVQLPNHSAKVLKLWSELLEKAQEIEDELQAAIEEEAANDPECAILQTIPGVGAFTSLLVRAEVGDIARFPKAKNLVSYIGLSPRVFQSGESCHYGGLGNWGNRWLRYALGLLAQRVAASKRESCLRQTYWRVSFRRHRNEAKIAVARKAARIIHGMLSEGEVWNESKHRRAKAAA

SEQ ID NO: 158286 - protein, 487 aa, unidentified
MHPQTTNKSTQTSDVRRFSFESAGALALDNEYSGFAVLPAHYIAFAERKRARPWTSIYHFGSYDVKPLATHQFTAYVGIDWADTKHDVCLQAPGNESREFDCIAHQVADIDQWAQSLRQRFGSPIAVALELAKGPIVYALQKYDFFVLFPINPSTLAKYREAFKPSRAKDDPTDAELALDLLMRHPERFAPLHPQSEGMRTLLSLTEHRRELVADKTRFTNRLTNTLKQYYPQALDWFDQRDTILFCDFLTRWPTLTQVKRARPASLKAFFYAHNGRRAHLISARLDAIKAAIPLTEDMGVIAPCRLQVLVLVEQLRTTLQAIDRFDREIAELAPRLPDYALFQALPGAGPHLAPRLLAAFGEQRERFQGADELQKYAGIAPVTQRSGKKSWVHWRWQCPTFVRQTFVEWAGQTINKSFWAGAYYRQQRDKGSSYQAAVRALAFKWIRILYRCWQTRTPYDESTYLNALRKRGSPLLKNLELKAQNA

SEQ ID NO: 158287 - protein, 406 aa, unidentified
MQGPVITVDVSKGSCHYQPYVSNGHPMRKPKVLHDTVEGFQSLSDLIDTMKDRYECETIPVIFEATGVYHRCLQKYLGDHQIPYYIISPLMSASYRKTTPNSNKTDDLDCSHIAKAYYGECNLFPYDKPSKSFHNLRELNRYYECELNHLRMRKNTFRKYLDIVYPRLDKCFKGHSSLYDEIPMEVIKQYPHPSLLLKHKEETIVKKIEKKTSHNASFIQNIVHEMYECSMHCYSGADVTDVESMILPELVDDLQSQEERCDEILKQLVSEAQKTPYFTSIVSIVGIGDNLAARIIAELGDMSRFSCRRAITAYAGLNPKIRQSGDMDGIHLAISKKGNKHLRCLMYLAVSCNYRLKKCDVLYEFNQKKRQQSFSPLKPKAATIATAHKLLLIIYALCTNGTVYHS

SEQ ID NO: 158288 - protein, 349 aa, unidentified
MRTFTPPASTKFYCGVDLHASAIFLVVLDVDGQIRLARNLPANPDAFLQAVEPFREGLLVACECMHCWYWLADTCREHNINFVLGHAWAMKAVHGQKTKCDRKDAEAIARLLKGGNFPPAYAYPKERRGLRDLLRSRLRLVRQRAELYGHVHTARRQANLPPVSNDVKYKSKRDGITADVADPFVRRRVETYLTLLEPLDASIRRLETEIEDAAQVIFPTELAVLQSTPGVGPILSLTILLEIDTIARFDTRQQFCSYARLCGAVQSSDNKRCGIGNKKAGNAWLKWAFSEAAVLSAQKDQRIGALLNRLAARLGKAKAYSALAHKLGRAFYQMLHTKEVFDVNRFVRH

SEQ ID NO: 158289 - protein, 362 aa, unidentified
MCEMAAKIIVMISTQTTATPKLFIGMDVHKKRWTVHFKTDLFDNKTVTMPAEPTALINYVGKNFSDHQVSCCYEAGCCRYWIARALKEEGWKVSVVNPADVPRNNKQDWQKTDKIDSRNLCKHLSYGNLKGIYIPGEEQEQLRSLFRRRIHLSRHLRSIKNHIKSQLLYYGIQLPEQCDNPNWSREMKTWIGNIKWKYSSAAESMRSRLKQLEFVWYEELHISNELRAYCRKHYKKDYYLYKSVPGIGGITAAAILSELGDIRRFNRLDELAAIVGLVPGIYQSSENKINLGLTKRSNHQLRSLLVEASWVAVRTDMALQQYYRKHAHKEPNKAIIKVAHKLLSRIRAVINSGIPYQIGLIK

SEQ ID NO: 158290 - protein, 456 aa, unidentified
MKKKAAMEIIHPHAAGIDVGSRSHFVAIGQAKEDVREFGVYNEDLMALAQWLLDNDITHAAMESTGTYWQSLFSTLQEAGIIVTLCNGKFTKNIKGKKTDVIDCQWIQKLHTLGLLSGSFLPDAITEQLRTYCRHRLNLVDAAADRTRKMQKYLRLLNIRLDIVVRDITGLTGLSIIESICKGETDAASLATLRNGNCKKSEAEIAKALQSNKRPDYLFALQQELHLYKQYQQQVTACDIEIEKAILRSINTDENKKQLRASHKPHKRINKNAPKNFDLNQLSYQYFNGIDLMAIEGVSHSTVIALMSEVGYDGVKKFETPKQFSNWLRLSPNTKKTGGKVISSHLPKGSNRLKIALRNAANAIGNLKDTHLSDFFRRISFRRGRAAAVSATARKLAVVIWNMIVKNLPYKPPTDYMFLDQKRKLKLVTRIRKSITKFELKPDDLGFVNASLSATS

SEQ ID NO: 158291 - protein, 427 aa, unidentified
MNESEVIRYEKFCQFKAEIRASGSYLIVGIDVAKDRHHAFFGTAAGRTLLRRLIFDNTQAGFKQLITRASQLQVEHGLGRVVYGLEPTGNYHKPLSSWLLAQDQMLVLVSSKAISDNRQTLDGRWDKNDTKDSANVADLIAQGKCQFFETPDSRLIELRNLLSLRRRLKKDEHSVRMQIRNGLVTKYFPELDRHWGSCLTENLAIVRWCLDPRKITAMGFDKFVGQVTRRDRGIRQQKRLMKIFQAAGVSIGCPMDEAAQFEAKLLVERLEGIRERIDQTEAEIKDLCEGFPAYRRLLTIPGFGPYVSAIVLARIGDPKRFVGRRQVIRLCGLDLNANRSGKRSDLAVPVISKRGNSELRYALYQAAQIATYHNDRFRALFTRYLEGRQQERGIKTKMRVKLAAKMLVIAWTMMKADMDFDPLLIQV

SEQ ID NO: 158292 - protein, 357 aa, unidentified
MKKNYRLQDHVVKGKDIFVGLEDSKKTWKLAVRSEKMLIQQASMEARYPVLIRYLRNKFPECTVHLIYEAGFKGFNLYDQLTEDGIDCVVIPPHVVTEPKVNRVKTDKRDARRLAKVLENHDFKDGCYVPDKERREDRQVSRTLIALQKDVVRTRNRIRKFLDFHGIEVSFTGRWDRQEFRALKKLELNELLRISLDILLTQLEELWAHQVTLRAALKKLCKKERYHKAFTITRSLPGIGWFTAIRLVLELGEDLSRFGSGKKIASFVGLTPSENSSGETEHRGRITGMGPGFIRAILIENSWIAIRKDPVLLAKFTRVWHASGNRKKAIVAVARMLIVRLRACVMSGTPYKVGIAA

SEQ ID NO: 158293 - protein, 378 aa, unidentified
MYRILKIGMDVHTTNYTLCAVEPILGAEENVLAQIQIEPDYRLVIQFIKRLKERLGVSDKDCDILCGYEAGCLGYSLYHQLTDAGIKCVILAPTTIISEKGKRIKTDKRDAHLIAKCLCYGGYHAVHVPTADDNAVKEYIRMRDDHKITLKQKKQQMNALCIRHGCIYEGNNWTQAHLKWMRKLELPELVRETLNEYLATYDELTAKIERFDKRIQELADQTQYQEKVKKLECLLGIKTHTALSLIVETGDFARFSKGNVYAAYLGLAPGEHSSSDDTNRLGITKAGNSHLRRLLIEASGGICKGVIGQKSKALKARQSGNTAEVIAYADKANVRLRRKYYKLIHRGKKRNVAVAAVARELACFVWGMMVDDIHGHAA

SEQ ID NO: 158294 - protein, 490 aa, unidentified
MAEHPLWRSVSLEVSIAAVRRQNMEEIFEDCHDVEVVYQRCCGLDVHKKMIVACVIIVAADGKRRKQIRTFGTTTAALLELLDWLKAAGCTIVGMEATGVYWKPVYNLLEGHFELVVANARHIKAVPGHKTDVKDAQWIASLLQHGLLKASFVPSGEQRELRELTRYRTTLVEERARIVHRLQKTLEDTNLKLGDVVSDITGKSAQAILRGLLAGETDPAVLADLARGRLKAKRAELEAALVGTIKPHHHFLLTEHLDHLRQLDQSIERVGAEIEARMGPFLPPEPERDSSKQPQAVQAPSDEQPQAEPTASDELSEPATKAPLSLAQAVVLLCSIPGISQRAAEGILAEIGTNMDRFASAKHLASWAGMCPGNHESAGKRSSGKTTKGSPWLRKLLVQAALAAGRTKKTYLSAQYGRLAARRGKKRASIAVGHTILVIIFHVLREQKPYQELGGNFFDERERQAVEKRLVQRLEKLGYDVTLEPVAHAA

SEQ ID NO: 158295 - protein, 347 aa, unidentified
MRFYNQTHKFYCGIDLHARKMYVCVIDQKGKTRVHENINTDPALLFDIIFPFLEDVVICVECMFSWYWVADFCAEHKIPFVLGHALYMKAIHGGKTKNDKIDSYKIAKLLKGGTLPIAYAYPAEMRATRDLLRRRSYMVNQCSLLVGHIINTNTQYNLPAFNKKLSRKFNHEGVPERFDDPSVRAAVEADLTMIDAYNRLIKPLEWQIEKTACHHDPNSLYLLRTIPGVGQILALTILYEVHDVKRFGSVQQFSSYARLIRPEKESDGKWAGKSNKKIGNAHLKWAIRTAAMISLRESDQVKKYVDRLTHKYNKGKALGIYTHKLGRAVYFMLKNRRAFDMKHFFSH

SEQ ID NO: 158296 - protein, 385 aa, unidentified
MSKPDDLSKPLVALDHDSTLVCVIEMSGSSWLVAATVPGVSRRPLQKLPVDPARLLAQVERWRQEAARAGRTITRTVVAYESGRDGFWLARLLRGHGIEVYVIHASSVAVSREQRRAKTDRLDTEMLMRALLGWLRGEPGHCRMVAIPTVAQEDARRPGREREGLVAERTRLTNTIKAELALWGIQGFKPGLRKAAEHLEALRTVEGEPLPPNTLARLHRLLKRRTLISDQIKAIELAAAQAIERDPTGPNAMVLMLAQIKGIGLETAQMLVHEVLSRNLRDRRAVARYAGLTGTPDESGSKRREKGISKAGNPRVRRGMIQLAWRLLMFQPDAALVRWYRERTAGGKGAIKKTMIVALARKLLIALWSYATAGVMPEGVVLKAV

SEQ ID NO: 158297 - protein, 312 aa, unidentified
MVNVGIDVSKETLEVAIRPAGQHFRVNNDEKGHAEICKRLAKVRPERVVLEPTGGYEQALVQALVRTKLPVVVVNARQVRDFAKAAGRLAKTDQIDADVLAHFGEALQPEIRPLPDEAHRHLEALVNRRRQLVDMRSAEMKRKQTAPAVVHPSIDILVDVLNRQIDDVDRDLHDLIRRTPAWREADDLLQSVPGVGPVLSSTLTALVPELGKLNGKQIASLVGVAPFNRDSGLGERKRVTWGGRAPVRAVLYMAASVARRFNPAIRRFYDRLIQAGKPAPVALVASMRKLLTILNALARDRRPWNPQLVEQG

SEQ ID NO: 158298 - protein, 347 aa, unidentified
MDQQCHYVGLDVSLETTSICVIDDAGAIIWRGKCRSDPDTITAIVRQHAPGAVRVGLETGQLSNWLTLSLRRRGVPVVCMDARHAKAALSLQINKTDANDAFGLAQVVRTGWYREVAVKSMDAHTLRMLLVARSRLVSQRQATANTIRGLLKTFGLVVARGSKGLFPVRVREQIAGNPALIAIIEPLLAVWHAIRDQVAMLDRQMLARARNDQVARRLMTIPGVGVVIALAYTAVIDDPARFRRSVSVGAYLGLTPRRYQSGEVDTTGHISKCGDSLLRGYLYEAAAVLLCRDGRASILKSWGLGLAKRIGMRRAKVAVARKLAVIMHRIWSDHGEYRWTAISPIAA

SEQ ID NO: 158299 - protein, 486 aa, unidentified
MAKPKKPSPRAVAKQEKPKQTGRRKRSRAAKGKRLEDRPLLEANAAGIDIGAREIFVAVPPDRDRTPVRIFKTHTEDLELMAQWLVVCKITTVAMESTGVYWSPIADVLEGYGLKVCVVDARGMKNVPGRRTDWHECQWIQYLHSVGLLRAAFRPETAVRAVRTLMRHRTEQVLMDNQHIQHMHKALTQMNVQLHHCINDLTGVTGMAIVDAIIGGERDAAVLAKLRMPNVKASEEEIRQSLEANWQEAHLFTLKQSRESLTHYQQQIAACDEEIEKLLVQFQPRVDPEKKPLPANRKRKPKGRKKQQQLKNPKTGFDMRQEAYKLFGVDLTQVPGLMLMVLTLFSEIGRDMSRWPTAGHFVSWLGLCPDNDITGGKVRWRGMRKVKSRAGTLFRLAAHSLHHEESGLGDYLRRMKSKLGPAGATTATAHKIAVIFYTMVKKQVEYDPTIWGQRDTQRVQRMEAKLQRLARKMGYQLVPVEEKPAA

SEQ ID NO: 158300 - protein, 361 aa, unidentified
MKKPSQHLIAEVPRRQAKVEITIGIDLGDVWSHYCTLNQDGEVVDRGRFRTTPKAIEKWFTDVAPARVAMEAGTHSIWISAQLQELGHEVIVANVRELRAISHSDRKSDQVDAEKLARYARLDPNILRPIAHRTVQQQEALTLVRARALLVRLRTAAVNAVRGLTKSCGYRMPASATTCFAQRSLAVMPPGLAQALGPVLQQIAEMTVKIKLYDRQIQQLGQTEYPETQALLTVHGVGHLTALTFVLTLGSKERFGRSRDVGCYLGLRPRRSQSGDHDPQLGITHAGNAYLRSLLIECSNHILRPHGRDSALRQWGLHLAARGGKQAKSKAVVAVARKLAVLLHHLWSTQEPYMPFYEQAA

SEQ ID NO: 158301 - protein, 319 aa, unidentified
MTKHIFIGIDVSENTLDVWLHPLNKYKVFDNDQKGIKELVEYIADYNIAKIVIESTGGLEYKAAKTLQKTGYLVSVVNPYFTSAFRTMRGKFTKTDTIDAQMLALFAEKINPESRKVANEIEKELKELTSRRNQLITMIVSERNRLRRVTNQKIINSINNVIDLLNSQKEEVEKLILHLILNLESYKEIYNLLITIPGIGSIIAITLITELPELGNLNCKQIASLVGVASHCKESGKIRFKAKTKGGRKTVRAALYMAAVTSVRCNSAVKPFYKRLVEKGKAKKLALTAVMRKIIIIINNIVKNKRPWQEQYKQIILTS

SEQ ID NO: 158302 - protein, 370 aa, unidentified
MLDTTAFIGLDVHARSIKAVSLDVMTGEVRAATFGYDAGAVAEWVRSMDPRARCVYESGVTGFDLQKRLSGLGVDCVVGAVSKMIRPSADRRRKNDRNDAEFLARMLSVGNVVEVWVPDDECEAARDLTRALEDARDDLSRSKQRLSKFLLRHGLAFDERTPTGRRKGNWTRAHWSWIESIRFAERADNDVLAYYVDAVRRAAEEKARLEGLVEAEARKPRWRKRVDSLRCLKGVDTASAADLVFEAGEFSRFRNARSFAAWVGLTPSEHSSGESDRRGAITKAGNKHLRKTLVEAAWHYLTCSGRPKDLAKGQAPDRGARRHAAKGVRRLVERREALLARGVHGNKANVATARELACWVWAVGLMAEEA

SEQ ID NO: 158303 - protein, 425 aa, unidentified
MSYKIAGIDIHKRMVAVVVADVAGEGEYQFERRKFGSGGEQLRLLAEWLVANQIEEVVMESTAQYWKPVWGALERDWQPVSRARGAGAKSGSLLLAQAKSNRAPRGRKNDFADAERLLKRLVANELVLSFVPDTEQRLWRTVSRQKLQLTRARVRLQNQLEALLEQGHLKLSSLVSDLLGVSARRMLQALADGEIDAGRLAALAHCRLRATSEQLCDALGAATKLSPVYRRLLQMLLDELKLQERHMEQLDQELSVLLTAHHSAIQRLAEVPGLGVDSAQQILAEVGANAAAFPSAKNLASWVGVCPGEEQSAEVSKSARSPKGNRNLRRLLNQAAHAAVKTKGSVFEWVFGRLRTRLAYQEAIWAIAHRLCRLIWKILHQGVHYEEHGPAVSIKSKRNRTTRMIRELRKLGYRVEPVGAFATNM

SEQ ID NO: 158304 - protein, 443 aa, unidentified
MLRIINEKAAAGDIGSEWIYVSIAGGPAERFGTVTRELLRLRDWLLAHGVDSFAMEFTGVYWIALYEVLEKTSIRVCLVNGAHVRTLPGRKTDVADCMWLAELHSHGLLRPGFVPPPEIRRLRDYMRLRENHVAQASTHLLQAQKALELMNIKVHDVISDLAGVSGQRMIRAILAGERQTEVLVGLCDARILEKTRQRLKDALEGTWAEQHLFALRQAWRGWEFSRELMLECDREIERLLPTLPKSPELPGGPLDGGPSRAKPRSKNSPQIEGLHRKLLDLVPGRDPTLILGIGDQSLIQLISEVGTDLGAFANKYRFTSWLGLAPGKQNSGKRQRNRSRKGGRAGQIFRVLAQTVGRAKDSALTAFYRRIRAQRGGLVANKALARKLAELYYDSITKGMRYVEAGMEKGEQRYREQATRRLMALSRKLGFSLVKDPDPIPAT

SEQ ID NO: 158305 - protein, 356 aa, unidentified
MNKSCCIPINKEVICNMKNKKYFIGLDVHKERTSYCVRDKQGNILTEAEAATLYSELEPRLKPYLTASIIGLEASTSYYTLYQNFLRNNYHIKVANTIQLRQLIAKNDKLDAQRLSEMLRLGTFPESYIPEEKIQHLRSLVQLRHSLMEEKVRCNNRIQAFLDKNGVVMPSQEAFGKKWRHALVQYMGSGDVSLEMRYEYDHFEFLEKKNTQLDLEMQGYTYKHWPMEYKIIQSITGFGPVLSCYIIAHVHPINRFISNRKLRRYAGVVPTYKESGGTKSKGHIPKTSSRKLLRWALIQAANAAGRTNTKLGRYYRMKKKQKNNASIAHVAVASSMIDIIFKVLTTKKPYTSSCVN

SEQ ID NO: 158306 - protein, 422 aa, unidentified
MLEETQETEEIIQRVAALDVGKAELTCCVRVPGQGSSGRRAQEVRTYKTMTRSLLVMVDRLAELGVTRVVMEATSDYWRGAFYLLEAHGFETWLVNARDVKHLPGRPKTDTLDAVWLCKLAERQMLRPSFVPPRPTRQLRQVTRYRADLVAARTAEKQRVEKLLEDAQIKLSVVASDIFGVSGRAMLTALIAGERDPKRLAQLARARLRAKLSLLEEAFSGFFTDQHAFLLAKMLARVDQLDADLAELDAKLAELIAPFVAAVERLDEIPGVGQLAAHLLIAEIGTDMTRFPTAGHLVSWAKFAPGVKESAGKRKGSGSTGHGNPYLARVLGEAAVAASKTDTFLGERYRRIARRRGAKKAIVAVGRSILVIAWHLLSDPEAHFHDLGAGFYDTRIGPERAKRNHIRQLEALGYKVTLQPAA

SEQ ID NO: 158307 - protein, 367 aa, unidentified
MEQITRGIARGEAIRVGVDLAKRVIQVHAVDAAGHVLTSRALARDKFLAWCAQLPAGCIVAMETSSSSHHWARKLMALGFDARIIAAQLVSPYRRQGASGKNDANDAAAVCEAAGRPQMHFVPVKSIEQQSMLCVHRLREGFKAERTACVNRIRGLLAEFGLVYAKSPSALAAVLADVLEDASNEMNALARLVLQRAHGQWRELDAHVAWCDQRIAAHAKDNDAVKRAATLMGVGPVTASASVATVGDFKQFRCAAQFGAWIGLVPRQHSSGGKNNLGGITKRGDTYLRSLLIQGAKSAVMSAHKRSDPISQWVAALRERAGWQKATVALANKNARILWAVMTKGEAFDARHVSVKPGAPAPAAAIA

SEQ ID NO: 158308 - protein, 397 aa, unidentified
MIAVGIDISKSKSTVAILNSDGSVRIKPYEMQHTKLDLDALIKYITQTDTSPVILMEATGHYHYPVLQALLDAGLSPCLINPYLMKKFGDTELRKAKTDKKDALRIARYALERSYLLTPYSPVEQKYDDLKFLSAQYRQRISMVTKSKNQLINLLDEAMPGITHILTLKSRNPEKCMLLQFIKRFHSFDYINEIGKTRFMNSYATLVKKTNDKFAAAKALSIYELSRNSITTHRHSEYMYSALDQCVDLLSEAQNAADETILQMQNIASTIPEYKVLLSMSGVGERLGPIILAEIGDIRRFHSARALNAYAGNDAPPYQSGQFESQNRHISKRGNPALRKACFEVMQALKLTKPQDDPVYLFVLKKEQEGKPYNVAKMAGVNKFLRIYYARAMELYK

SEQ ID NO: 158309 - protein, 403 aa, unidentified
MSNYFAGLDWASKTHALCVIDERGGVVERFDIDHDAGGLTELRRRLRRFGSPPVAIERPSGLLVDTLVDADFTVVPIHPNAVKASRPRYRSHGGKSDASDAYVLADLLRTDGHRFKALTPQSDEIRALRALVRGRDDLVATRVHLANQLRTLLESFWPGAAAVFADIDSPIALAFIERYPTPESASRLGPKRMAAFCAQHAYCGRRSPDDLLARLQEAPSAVSAETEMEAKGELARCVARTLTRLVEQLRLLSSRIEHLVASLDDGRILMSFPRAGRICAAQILAELGSVRERFATDAQLAAEAGVAPVTYESGKSKAVTFRWACNHRLRAAITCLADNSRHVNAWAAHVYANARARGCDHPHSIRILARAWLRVIWRAWTDRKTYDPMQHRAAQLLLKTAGG

SEQ ID NO: 158310 - protein, 325 aa, unidentified
MNVIALDISKNTADCHLKTPTKTDNLRITNNLSGCLKIDEWIRKHRIRKLIISMEATGIYYETIANYLSQKYDVVVINPLKIKEYGKSLFNRTKTDKADAKLIAEYTYRHHDKLDFYTAPQNHQYHLNKLISLYSQLNLQITQQKSRKHASQDEFSHLVHDVIIKTLTEQLELTHNEIEKVIGKHDELHKQYKNLLTIPSIGDKTAAIILHYLNSRDFKNVNKFMAFAGLAPKIEQSGESVNKKCRLSRYGHKRLKATFFYPALVAYNYGYFPNLVRNLEAAKKPKMVIITAIMRKLAKICYCIHKSGRPFDKNRYQKLKPKQET

SEQ ID NO: 158311 - protein, 351 aa, unidentified
MIIIGVDYHPSDQYIAFVDTETGEYGERQLSHSEGEAEKFYRELAAGGVSVRVGMEATGYSRWFERLLAELGIEVWIGDAAEIKTKRVRKQKTDREDARLLLRLLRENNFPRIWVPSPENRDLRQLLWHRHRMVQMRTRIMNQLQALAMNEGQRRKKKLWSEAGRAQLEKLPLAPWASRRRKDLLELLDRMNPTIEGLTTTIEQEARKRAEVLRLMTHPGVGPITALAFVLIIGTPERFKCGKQIGSYVGLIPCEDSSAGHQRLGHITKQGSSLLRFLLGEAAQAAVRWDADWRRRYMHLALRRQRNIAKVAMARRLAVRMYWMWRNSWEYSEWVKFGSHAGQLGLRHGVN

SEQ ID NO: 158312 - protein, 331 aa, unidentified
MFPVGVDVSKSTLDLCMLYDGIKGRIKTRNIRNDRSATDNIIRWLRLQHCGPQDVHLVMEATGVYHERLATDLYDAGFCVSLANPHRSREFARGMGIMTKTDKVDAYMLACYALLKKPHRWKPPAPEIRHLSALLRRRDVLLGDAVREENRLEKYLSTYTPADVISSCMRMAHLLREEVDSIERQIKAHIQACPDLKRDFSLLTSIKSVGPQLGMHMLVVLRSYNIESAEQAAAFLGVVPVEKRSGTSVRNRSRMSKIGPPQLRAKLYMSALCGKIHNKRMRNMYNELCLRGKPKMVAIGALMRKLVHWCYGVLKTGTAFCDEISNSLVHT

SEQ ID NO: 158313 - protein, 466 aa, unidentified
MHAHCARLRSPYAAQDKPFASGSTNPDRKGCDILLKINYMSTLFVGIDVSSKTNAVYAMDFEENKYISSSFGNNQPGADQLVTMIAQCMHKHKNLDTVLIVLESTSVYSVHISNFLSTSEVLMPYKPYVFCVNPKATSNYRKSYIGMEKTDPIDAFLIADFARVGRTKKLEPWRGGQFIALKRLTRHRMHLSECITREKTYMVSNLYLKFSELQLLEGDNKPFSNIYGATSSAILTEFLSPQEIIDLSEEELLSFLAEKSRNRISDISRTSELLRKAARDSYRLDQCMYEPLNVSLASSFNCIQAYQKEIKLIEQAIEKCINGMNANAFLILKSIPGIGAVWASGMLSEIGDISAFHSSDALAKYAGLYWLKNDSGDFISEDNQVSKVGNPYLRYYLGEAANSVRKHVPEYTEYYAKKYAEVTKHQHKRALALTSRKLVRLVFGLLVKNQLYTGEKLDTQSNINKN

SEQ ID NO: 158314 - protein, 378 aa, unidentified
MSEITRGTMSAIVRVGVDLAKQVIQVHGVDRAGRRVVGRTLKRDQFCAWAAQLPPGCVLAMEACSSGHHWARRLRAMGLDARLIAAHLVSPYRMEGKSGKNDATDAAAICEAASRPSMRFVPVKNCEQQGVMSLHRTREGFKEERTACINRIRGVLAEFGLVFGKSPKVLRARLADVIEDASNELSTTARLVVQRAFEHWRELDEHMRWCDSQVGQHVRGSAQAKRAAKITGIGELGASAMVAGVGEFKQFRSGAQFGAWLGIVPSQNSSGGRAGLGRITKRGDDYLRTLLIQGAKSAVMSAGKRDDPTSRWLVQLTARVGWQKACVAMANKNARILWAVMTREQGFEPQHVSVKPQAKVPLKERTVAPAQSAVTCPA

SEQ ID NO: 158315 - protein, 417 aa, unidentified
MSLNVVGALFFVGIDWASAVHAVCVQDAAGRRVAAFTVEHSAVGLADLMRRLARLGEPDAMPVGIERPDGRLVDALLEAGHPVVPVKPNAIKTWRDGEVLSGAKSDAGDAEVIAEYLRLRQHRLQLATPYSPETKALRTVARTRGDLVDMRVAATNQLTALLDTHWPGAKAVFADVESPIALEFLTRYPTARHAQHLGAKRLTAFCAKHGYSGRRTGEQLLARLRAAPAGTLDDTLCEAVRDAVSALVTVLRAVGAALKDLSRSVVAHLGEHPDGEVFTSLPRSGQINAAQILAEWGDCRQAYDGPDSIAALAGVTPVTKESGKHRAVHFRWACNKRFRVAITTFADNSRHDSDWAAKVYTDARGRGLDHPHAIRVLARAWIRIIWRCWIDRTPYDSGRHGNAVRLTQPRQTELLAA

SEQ ID NO: 158316 - protein, 354 aa, unidentified
MDYYGLDVHKRYTVYTRLDERGEVLGQGRITNEPASLAALVAPSAGRAKVVLEAGGVWPVVADALEGLTEELVLAHPLETRAIASARIKTDRIDSATIAHLLRTDLEPRSYLAPRPVRELREFLRYRSRLVKVQTSIKNRVHAVLTIHGIGGRPSTDLFGRAGREWLKEVQLPAIARQSVDGLLTVLDVIHARIMEANRVVRQRATRSSEARRLQTNPGVGWFGALLILAEAGDVRRFPDEHHFVSYAGLVPSVRSSGGHTRYGRITKQGSPWLRWIFVEAAAVASRRPGVLRDRFLKLARRKDAKTARVALARHLAAVAYLLLSRATFYEERSCRQGSWSAHLPGHPVEPVVA

SEQ ID NO: 158317 - protein, 451 aa, unidentified
MAIDPCLDDLRGVAPERAWYHRDRVIGTCPQGASNVDASGVPRRPEHTLLQTGVVMESPVYLGVDIGKSGHYAVAVDAAGKPIHQTSVSNDELALRRLVDWAKAHQATVVVDQPGGAAGLLLKLCWQVDVRIGYLHGLAMARAREFYAGKSKTDPKDAFVLADVARAHPNRVVWLEPNSEALAHLELLCGYDADLRSDANRLSNRPRELLVSHWPALERAFGERLDSRGVLAVLQQYPSGPALKQAGVAGLTAALKAQRVHRAEAFANQLHEAAMAQTVTITGSATAARLISELAMQLAAVLVCRAELEKEIEADFFALPEAAILRSLPGIGARLGARIAVEIGSISRFRTPGHLAAYAGLGPTPWKSGTSINANRPSRFGNHRLKNALFLAAFASLRHAPSRTYYDRKRAEGKRHNQAVLCLARRRVDVLHAMLSQGALYRPPTPLAAAA

SEQ ID NO: 158318 - protein, 364 aa, unidentified
MIIIGCDYHPSGQQVFGIDTESGEVVADRWIAHVGKELDEFYSALPAGTVVGAESSGNMQWFERRLQQYGHRLRLGDAAKIRAQETRKQKHDRRDAELMARLLVEGRFPDLRWVPTLAERDQRQLLLHRHKLVRMRAQVKNQLQHIALNQGEQKKRQLWTKAGRELLEKLALDPWTARRRDDLLRWLDQLNCDSEGLERAVEQAAKARADARLLMTHPGIGPVISLGFVLSIGPIERFERSRQLVSYLGLNPSEDSSGARRRLGGISKQGNSFMRMLLIQGAQTAVRGDEMLNRQYRRLASKKHRAVAKVMVARKLAVRMFWMLKTNKTHAELVRMRGSSSHPGVSKTEALSERPASPRIQPQG

SEQ ID NO: 158319 - protein, 411 aa, unidentified
MLFVGDDWAGDHHDVEIQDEAGRKLAARRLPEGAVGIARLHELIAAHLGGEGDPGQVVVAIETDRGLWVQALAAAGYQVSGLNPKAVARFKERYCLSGKKDDAADAQALADMVRAERHQLRAMAADTAGAQAVKVAARAHQTLIWERTRHTLRLRSALREFFPAALEAYADLGLTAAGTLELLARAPAPAAAAKLATAQISAALKRAHRRDVPARAQAIRDALRVPQLAQPAAVTAAYAATVQAAVAVLITLNEQIRRLEAQVEAHFLQHPDAEIYLSQPGPGPVNGARVLAEFGDAPGRYASAKARKNYAGSSPITRAPGRSKAVLARFVRNDRLADALQSQAFSALTASPGARACYDRQRARGLGHNPALRQLSNRLVGILHGCLKTGTRYDEATAWPGTVTNTEPLAA

SEQ ID NO: 158320 - protein, 344 aa, unidentified
MEYYVGLDISLRSCALCIVDSKGEVYLERELPCEIEDIANFLAAFEHPVERIGFEAGALSQHLYFGLQSKGFDVVCMEARQVSAALSAMRNKTDKTDAKGIAQILRTGWFSPVHMKSREAHGVRALLSTRKALLKKTMDLANEVRGLLKIFGVRLPRTVKHGSFDALVRPMIEMDDVLAHAIIPLLDARVVLFQHYLELDRRVKRAASQDEVCMRMMTVPGVGPIAALTFKAAIDDPTRFKRSRTVAAHFGLTPRRFQSGEHDNPGRISKAGDRNVRATLYAAANALLMRTMAGSQIKSWGMRLMRTKGRRRAVVAVARKLAVLLHRMWIDGSEFRQDQVGGTA

SEQ ID NO: 158321 - protein, 370 aa, unidentified
MCYIGLDVHKKTISYCVKDASGRVQQEGKIGSTRRELDAWIGTLPQPWTVAMEATIFSGWIYDHLLPHAVAIKVAHPLMLRAIAAAKKKNDTIDAAKIADCLRCDFLPECHMMPREIRDRRRTLRYRHLLVRQMVQMKNRVSGLLMETGVEHNKQRLHKVGYFHEMLSKNAEIDASIRPLLNLSRETIERCQKTEYALVSSLQRDQLLADRIRRLRSVPGVGPITALTWALEMGDVARFRTIKQAISYCGLCGDERSSADKVMRMPLSKQRNKHIQRVLVEAAKLAPRQSPELAMVHEKEKQKGNSNRATLAVARKMVAYLLAVDRHNESLFLQNSAGDWQPENCPIKQNRIIDAQTARSCRLPTERRSS

SEQ ID NO: 158322 - protein, 464 aa, unidentified
MQDSGDKTSNADSEVEVDGLPVVRPNVAGIDLGSEKHWVCAPRVDGAGREVEQFGATTPELERMVAWLKERKVESVAMESTGVYWIAPHEVLDRYALEVVLVNTRELGRVPGRKKTDRVDCKWIQRLHSCGLLRGSFRPKEQVCILRTLVRDKGNLVAEAADWLRRMQKSLDQMNVRVHRAVADIEGVTGMAIVRAIVAGERDPRQLAKLRHPGCHKSAEEIAEQLSGHWRADHLFSLQQALRMYDAIQERIADYEQEILRKLAEMEREECRGQEAPKLKNPRKAKTIRNRGQEPMRQALYRISGVDLTGIDAIGVETVQAVLSEYGPDLSRFPTEKQFISHITLAPHQPMSGGKPVKKKKKRGSASSRVAAALRMAAVSLRHSNTALGAYYRKIARRTGADVAVFATARKLATLIYRLLRWGQPYLDEGAEAFEKRHQQVRIQRLTDMAKDIGYQLAPQIAQA

SEQ ID NO: 158323 - protein, 376 aa, unidentified
MPSENTVHVAIELAVSSWLVAARLPGAEKVRLHRIEGGDTAALLALIAELRSSASRKLGGGAEVACCFEAGRDGFWLQRLLAAHGIAAHVLEPASVLVNRRARRAKTDRLDAEGMLRVLAAWLGGDRQVCSMVRVPTPEEEDAKRPHREREHLVQEKLRLVNRIEALLFTQGIRARPSLRSWERDLAELRTGDGRALPPLLRAELDRLRRRLVLILELIRETETERAEALAAAADDAMARKITALQRIRGVGANFAAVLGREVFYRSFANRRQLASYVGIAPTPHQSGGTDRDRSISRAGNARARTTLIQLAWLWLRYQPGSALATWFRERVGALQGRTRRIAIVAMARRLLVALWRYVETGVMPDGAAIRAEATA

SEQ ID NO: 158324 - protein, 367 aa, unidentified
MDDSITYVGLDVHKETIAVALADGGGRGDVRAFGQIVNTPAALARMLSKLLQPGRTLKFCYEAGPCGYGIQRQLSAAGHDCVVVAPSLIPRKPGDRIKTDRRDANNLARLHRAGELSAVWIPDPAHEAMRDLVRARLAAVRSLRQARQQLSGFLLRHGCHYGRPAWTQMHRRWLAGLRFEQPIHHIVLEDHIATIEAATDRRDRLTKQIEMMLTDWSLAPVVHALQSLRGMALVTAATMIAELGDLSRFTNPRQLMAYLGLVPSEHSSGGTRRQGGITKAGNTTARRMLIEAAWSYRFPARISREQLLRQEQLPKTIRDTAWKAQERLCRRYRKLTKAGKPATTVTTAIARELSGFVWAIACQVAPR

SEQ ID NO: 158325 - protein, 368 aa, unidentified
MKQDNIFVAIDDSKRTLVIGVLRPGSQEPDVHSIPNEPRHLRRHLQRLQREGDVRVCYEAGPSGYDLYRQCTALGVPCEVMAPSLTPRKPGDRIKTDRRDVRKLVRLFRSGDLTPIAIPDEASEAARDLLRCREDVQEDLLRWRHRLGKFLARHGRLYREGRNWTQRHWAWIRAQRFTLPVLARTLEEYIFTVEQLLARVAALDREIAALAETAAYRTHVGWLRCFRGIDTLAAMVLLTELGDLSRFPHPRQLMAFLGLVPSEASSGERERRGSITKAGNVHVRRILVEACWHYRHPPRLGGRLAQRSAGQPPAILRQAWAAQQRLHRRYRHLVGHGKRPPVAVVALARELSAFLWAALTQGPAVQAA

SEQ ID NO: 158326 - protein, 448 aa, unidentified
MKKQTTTRESAINMQLANPNAAGIDVGDTIHAVAVPEGRDTLPVRSFGTMTCDLEAIAAWLLECGVDTVAMESTGVYWRPLFNLLTQHGLEVYLVNAKQVKNVSGRKNDEDDARWIQKLHSCGLLRSSYLPDDQQEALRTLVRHRRTLTQDRGRCVLRMQKALELMNVKVHTLLRDITGKSGLAIIEAILSGERTAENFLTCVHFKVKADRATILKSLQGNWRAEQLYLLEDCYMSYKYLTERIALCDVAIERQLEHYYREIRPEAAPECEAVSAKRANRNKPSFNTCSYLKKVLGVDVMAIYGISDIAALEILSETGTDMSKWETAKHFASWLNLCPNNKISGGKLISSTLMKKKPNPASQAFRNAANAVQRSDNWLGDYFRRMKAKGGNKYATVATANKIATIYYKMVSCQQEFSPVELTAYQKKYKQAKIIYLERRLFELKMEAA

SEQ ID NO: 158327 - protein, 346 aa, unidentified
MMIIGCDFHPSWQQVSWLDTETGETGEQKLVHASGDAKEFYQQLAAPVLIGMEATGNSQWFIELVEDVGHEIWIGDAAQIRASYVRKQKTDKRDAAHILKLVVEGRFPRLWAPDREQRDLRQLVLHRHKLVLIRSRVKNELQHLSLNKGMQKKRALWSQAGQKLLRELPLKPWAACRREDLLGLLVMLNQQIGKLDAAVQHAAEENPQAKLLMTQPGVGPNTALAYVLTIGDVSRFRRGKQVASYLGLIPREESSGGRQKLGAITKQGNRMLRSLRVEAAQVAVQHDPGLRRQYLHRCHQKPKAVAKVAVARKLAVRLYWMLRSQVGYPEIVRIESSSGLALVGAS

SEQ ID NO: 158328 - protein, 422 aa, unidentified
MKKRIYRATELTKLNIEQLAEKVKGKRVVFGVDIAKQDNYGAVMLWAEKEPVMTIKWRHPERSSQMVQVLKDLGASTVEVAMEPSGTYGDPVRKLFWEEDIAVYRVSAKRSHDAAEVYDGVPSWHDAKSGAVIGKLHMDGASTLWEMESFCRRDLTAVVNTMDMIQQQYQQNTHRIEALMARYWPEAGEIVDLGRATFLELLGGFGSPQAIVSSQDKARQLLRRIGGCFLGQEKIDRLIASARTTIGVAMTEIEAEEAGFLARRTRQLQQELRQAKKRVEVQGAQRKSIVAMSKVTGKATAAVLVAGGGDPTEYPTPTQWVKGLGLNLKERSSGRHKGRLKITKRGSGRARRWLYFVVLRFIQHDAVVKAWYERKIARDGGVKMKALIAIMRKMAAGLWHVARGSEFNAHKLFDVRRLGGIC

SEQ ID NO: 158329 - protein, 412 aa, unidentified
MMNPVIGLDVAKGESQVQAFLDKKQPYKKSFKVAHTLEGLTILLEFMREIEVASGERPPIVLESTGHYHTPVVQFFEDRGYLIIMVNPLVSYRAKSSSLRKVKTDIIDARHLCEMFYKEDLEPYKQRGIQLLNLRHLTRQHENITGMYVQTKLQFQSVLDQVFPEYCGVFGDLYSDVSLLTLQAFPTSEEVMATREETVAKKIKEFCKSRSQKWANSQSEKLKAAADRNPFQKTLYNSLILSINMYIKMLLEYKKHLSDLEREIDALAKSMEEYKILQSIPGIGEKIAATIISEIGEIDRFNHPKKLVAFAGIDPSVFESGTFKGTLNRITKRGSSRLRHALYMAVKSAIRDSRKKKTTDELIPRNKRLREFYDKKREEGKPFKVAVIACANKLLHWIYALLKNNSFFQYLT

SEQ ID NO: 158330 - protein, 388 aa, unidentified
MMIYYIGIDISKYKHDFCIISNTGEVIVENLFFENNKKGFQELLEKLKPYNKSDVHIAFEATGHYSKNLELFLIDQGYSFMKMNPLVIHQFLKARSLRRTKTDKADSLAIANYLMSVPYKPNSDLLYNIFTLKSLCRAREQLIKERSKYQVLLTNQLDLTFPELKQFLNNRISATLLFILEKYTNTNHISLMRDYDSIKNISRGKFSYAKFAKLKELAKNSIGHHDENNDLLISTYVSIIKTLNDKIDPIEKQISTIIKELNPRMLTIPGLGEISAATILAEYGDINNFSSPNKMLAFAGLEPSIIQSGTIENNGKMVKHGSGHLRYSIMNAAMIILRYSPTFYDYYLKKRSEGKCHRVALSHVCKKLLRVIYTLEKNNIDFDSSLLK

SEQ ID NO: 158331 - protein, 367 aa, unidentified
MEKSSKVFVGMDVHKESIEVTLAEQGGEVRRLGQIGGDRGSLLKMARKLQSKGGERVFVYEAGPCGFWIYRELAALGERCMVVSPALVPKRAGDHVKTDRRDSERLASLARAGELEAIHVPDIRDEAIRDLVRGRDDAVIAQRRVRQQLKALLLRNDIRYVGRTSWTGAHRRWLSELKLPEPAQRIVFEEYVDAIAVATGRLERLTRAIDTEVLTWRFAPVVAALQAMRGIQFVHAVTLIAELGDLTRFGSARQLMGYLGLVPREDSSGEHRRQGSITKAGNGYARRALIEAAWAYRHPARVTRIIATRQTGLPKTACDIAWKAQLRLSAKYRRLNARHLHHNKIVVALARELSGFVWAIGQCVKPQ

SEQ ID NO: 158332 - protein, 370 aa, unidentified
MPTAKLQNSTEFKDQKFFIGMDVHKKSWAITIRSLGLQIDRFTMPPSVETLLAHMRKNYPGGKYYSAYEAGFCGTSIHELLCKTGIENIIVNAADIPTTDKQRKNKTDLHDSRAIAEKLEKNEIYGIYVLTREQQELRSLFRLRQQMVIDVTRSNNRLKGYLAFMGIEIPAALTATEYLSKKALDWLSNLEMAIDAGTISLKTYVDELRHQRTQLSQITKLLRQHITLHHAKSYQCLITVPGIGPVTAMALLAEIADFNRFKSPDEYCSYLGLMPWEESSGEVIKTKGMQPRCNRFLRPLLMEASWAAIRSNRDLFAYYSKHAKKDSKKAIVKVSRKVALTARGVVLKKKPYDPEYLKKKENLKQPIQVV

SEQ ID NO: 158333 - protein, 352 aa, unidentified
MKINERISYRDKKVFIGVDVHRRHYTVSCICDDELVKKCQIVAIPEQLLCLIKKYFSEAKVKVVYEEGFSGFALYRHLEQHKIDCIVVNPSSIEISSRDRVKTDKRDSLRMATQLANGRLRGITVPSKKRENQRLITRSREQLLKERTRIKNQIRFKFHQFGLFPLEFQTRLTRNQVILLLKKDLSEELRASVNLYIEIWDILDTEIKKLDKELQKQADDDPLEMVYRSACGVGAVTSRTLANELGDMSQFANEKALFSYTGLTPAEYSSGEHRRLGHISRQGNARLRRVLIECAWSAIKKDKKLNEDFVRISSKAGKKRAIVAIARKLIGRVRAAVRKGEMYEQGHNSAIL

SEQ ID NO: 158334 - protein, 412 aa, unidentified
MRVLYPTCAGMDVHKKDIKVCLVTRDNQEQRQEDVRSFRTMTRDILAMRAWLQAHGCTVIAMESTGVYWKPIFNLLEGDFTVLLVNPAHIKQVPGRKTDVKDCRWIAELLEHGLLRGSFIPPIEIRDLRDLTRYRRQLVNTHSAEVNRLQKVLEDANIKLASVATDVMGVSGRAILRALLAGVVSPEALAELAKGRLRKKKPDLQAALQGRFRPHHTQLLTHILAHIEFLEESIAACEAQIEARCRPFAEVITLLDTIPGVSQRTAQDLIAEIGVEMAWFPSAKHLCSWAKVSPGNNESAGKRKSGRTGKGNKWLRALLVECAHAAGHTKETYLGTKFRRFASRKGKKRAAIMVAHRILEAAYFILRDKVPYRELGDQYLDTHHREHIIRHHVRRLESLGLHIDIRELPLTA

SEQ ID NO: 158335 - protein, 313 aa, unidentified
MAKHVSKITLGVDVAKDECVVYDWSTDEILTLSNQPDPIKAWLQSLCGPVQIAIEPTSHYHMIVVEAALALGYEVYLINPRQLAHYREAVNVRNKTDPQDAWLLARYLVHEGGELRAYQPQCRQAQHLWALLKRRAVVVAARKQLQQSFADIRLSVQALFTQFQHLLARIDLRMSKLIQALGWSNDYRHCLSIPGIGPLNAAALVAAYHRGAFANSDTFIAFIGMDVRVRESGRYKGKRKLTKRGEAEVRRLLYCAAQPARCYQPFEDFYQRQLEKGLPKIAAKVILARKLARIAFTLMSRQQMFIKQAIPVA

SEQ ID NO: 158336 - protein, 406 aa, unidentified
MNAVGIDVSKGKSTVAVLRPVGEIVVSPFDVSHSPKELSELVTLLKTLDGDTKVVMEYTGNYYLPIALFLRNNGLFVSVVNPILVKDYSTKSLTVRKVKTDKKDSVKLASFALDRWNELSPFSAQSEARLLLKSYNRQYNQYIKLKVSLKNNLISILDQTFPGANNLFSTPARKTDGHEKWIDFVLKYPHSECISKKSFASFSKSYSAWCRKFGYHFSESKAKTIYEFACNCSPSLSFTESTALLVSNAISQLNCINETLASLASEMNKLAVTLPEYDTVMSMFGVGSVLGSQLIAEIGDVSRFSNKKALVGFAGLDASPFQSGNFNPQSRSISKRGSAALRKTLFQVMSVILQRAPLDNSVFQFMNKKRTEGKHFYVYMTAAANKFLRIYYARVTELLNSLNPAA

SEQ ID NO: 158337 - protein, 394 aa, unidentified
MKLVGIDVGKNSHHFCVMDKETGEFNVSPSSFPNNKEGFVFLINSLKLYSKKSILLGMEDTGHYHVALLKFLLSNGYTVALINPKTTDLTRKMEGGITKNDKLDTITICDVLDTPERKKQYRITKVDRFDLYEQRQFTRHHHNLKEELNIYCNRLQKSIDLVFPEFNTLFGSKYGVVYMNLLKTFGSAEAIASTDIRTLRKCFEIKGRGNRISLTPEQLKECAKNSIGISSEVETLQIKHLVSQITLIKEQIAEIDKKIEEFSIKNNSPILSIPGISHFSGTSILAELGDIGNYSKPSQIIKFAGVAPYHYESSQYNAQHTAITKKGSKYLRKTLYQIILPVINYNPVFNKYYQSKISQGKGHRCAQGHCIRKLLRIIYHLLETGQSFDPALLR

SEQ ID NO: 158338 - protein, 391 aa, unidentified
MPTAADRAKAPTAIQTNLAAIFVSLELSRSIWLVTSLSPGGGEKMSKHSLQAGDVASLLVRFGELKQKALTRTGKSFPIVAIQEAGLDGFWLHRVLQSEGIESHVVDPASIATSRRRRRAKTDKIDGEALLRALLANKRGEPRVCAMVKVPTPEEEDRRRLCRERKVLIAERVEHVNRIKGLLFSQGIFGYEPLRRDRRQRLDELTTGDSRPLPTHLKTQISRELDRLELLLDHIKAVETERDALLAEQQAVAAAPAPAGKMLLDLKGIGAEFAAVLWVEGLFRHFDNRRQLASYAGLAPTPWQSGTVDREQGVSKAGNHRLRTTLIQLAWLWLRHQPQSALALWFKERVNRDGGRRKKTTIVALARKLLVALWKYVTAGVVIEGAMMKTA

SEQ ID NO: 158339 - protein, 453 aa, unidentified
MAKRIKNRDRRMPIMRAHAGGMDIGAEEIFVAVPDDHDQEPVRRFSTFTSDLYALADWLQHCGITTVAMESTGVYWIPVFQILEGRGFEVFLVNAHYLKSVPGRKSDVSDCQWIQYLHSVGLLQGSFRPPDEICAVRTLWRHRQSLLQMAAEHILHIQKALNQMNVQVHHVLSDITGFSGLAILDAILAGERDSLKLAHLCHPSVKSSREKVAQALEGDYRPEHVFTLRQSLAGYRYYQKQITELDEEIRRLMKSLPSSPDVQTQIPDRTKRTRYQRQGNDPSFDLRAELYRIAGVDLTDIPGVSAMTAQVILTEIGPDVSRFRNASAFASWLGLCPEKRVSGGKLLSCKTRKVKSRAATALRLGAHSLSRAKDYFGEFFRRMRAKLGAAQAITATAHKIARVLYHVMRTKEPYTETIFHACDEQARERAEIRLRKQAARLGFQILPTATQAS

SEQ ID NO: 158340 - protein, 411 aa, unidentified
MAVYCGIDWAEGHHDVAVVDDSGGLLAKRRITDDPAGLALLLRVLADCGDTREDPIPVAIETGRGLLVAALRASGRCVYAINPFSASRYRDRHTASGKKSDHHDAFVLANVLRTDRAAHRPLAADSELAQAITVLARAQQDAVWSRQQLANQLRSLLKDYFPAALAAFQGRGGGLCEAQARAVLTAAPTPTAAARLTSTQLRRLLATAGRKRYLDTETERLQEAFRADGLRHPPRVETAMGVHARALLTQLDAACSAVEQLTAATDEQFQCHPDAEIITSFPGLHNVSGARLLAEIGDDRDRFNAPASLKAYAGSAPITRASGKSRAVLHRRVKNQRLASVGYLWAFATLIPSPGARAHYDRRRAHGDRHNAALRNLNNRLLGCLHHCLLERQPYTEARAFPSTQAVAAAA

SEQ ID NO: 158341 - protein, 342 aa, unidentified
MSEITTVGLDLAKNVFQVHGADAVGQAVLRRKLRRAQVLEFFAKLPPCLVAMEACAGAHFWGRELTRLGHDVRLIPPIYVKPFVKRQKNDAADAEAICEAIQRPSMRTVPIKSEETQAAASVFRVRELLIRQRTQSINALRGHLGEYGHVVPQGATNARRLVALVEDEDMELPVAARASLLALTTMLAQLEQQIAALDAEIARRARENPVARRLMTIPGIGPLIATAFATLAPPPELFAKGRDFAAWLGLTPRQHSTGGKQRLGSTTKMGERSLRRLLIIGANSVIIKRHCHASARPGTWLAGMLERKPAMLVRVALANKMARIVWALMKNEEAYRAPAVAV

SEQ ID NO: 158342 - protein, 315 aa, unidentified
MTKQRPSVNVGVDVGKAQLDVYLLERDRMFSVPNEESAIATLVSRLSRYRLERIVLEATGRLEQPFVRAALAKGLPVVIVSPLKIRRFAGAVGQLAKTDAIDARLIAQFAATLKPIAHPTPDPKAQLIKDLVVRRRQLTSLRTMEKNRRQVMPEALKPSIDRIIETLDRELESLEQLIQDTVEQHAAWRHKRDLLTSMPGIGRSVASTLIGDLPELGSLSRRQIAALTGVAPFNRDSGTFRGKRRIRGGRAHSRTALFLSAMVATRYNPDIKRFYERLLQAGKHKKVALIACIRKIVTALNAMLRANQPWQSSIA

SEQ ID NO: 158343 - protein, 369 aa, unidentified
MPLVRGERVARYACGTSSPWVSIWRALATVLWEPEQLIDSRSHLQGWETENMPEPIHVGIDVAKDSLEVAFGAEAATRSFANEDDGHEALIIALNAHSVELIVMEATGGYETPCACALQAGGFAVAVVNPRQARDFAKAMGHLAKTDRIDAQVLAAFAAVLAKRPDREKVARALPSEEQQRLHAMVLRRRQLVQMLVAERNHLASSHRAARRSIEALIKAIRKQIVEIEGDLASHVARHHAEVAKLLQSAKGVGPNTCMVLIADLPELGKLSSREITALVGLAPFNRDSGTMRGKRTIFGGRAQVRCALYMATIVAMRHNRVIRTFYERLLVAGKPKKVAIVACMRKLLTILNAMVRTGKKWNETYHFA

SEQ ID NO: 158344 - protein, 317 aa, unidentified
MTEISTAVAGIDTAKGKLDFAVHGRAEHWQVENTLRGWRRLRAELTKVGVSRVGIEASGGYERGVVKHLRGHGFTVLVLQPIQVRAYARLHLRRAKNDALDAVLIAACTAAIEDPRIVPDARLAALADHLTFVEQIEEDIARLKTRLEHVDDPRIRKIVIADIARLKARRIAELLRIVGKLRDHGDLARRLDLVLSVPGIGERTALALIIRMPELGRISREQAAALAGLAPFDDDSGKYKGQRHIAGGRGRLRRSLYAAALPAAFRWNNALIDLYARLTAKGKAHNAALVACARKLLIYANTVVARGTPWVKKPAAI

SEQ ID NO: 158345 - protein, 348 aa, unidentified
MKYIGMDCHKQYDHATMIDTETGEIKAKRLSHIKEEFKEFIGDRTGTRMVIESCRDWSKTYELSEDLVEEVILAHPLKVKAIASAKVKTDAIDSRTLAQLLMADLIPQAHLRKAENRLKQRVIRHRAFMVVMRTRVKSRIHGLVDSQLLPVEVLKAKPKNLFSKKGMEWLLSLEWAKEEDRKLIESHLRVMDAINQEISTTNEMVREIYEQDADAQLLATIPGIGVTLAMLISTEIDGVERFRSPSKLCSYAGLVPSTHSSGGKTYHGRITSEGNRWLRWALVEAAVPASYTDAEVKERLNGFRERKGANVAKTAMARWLLKVVFHVLKERRSYITGYGQLAKAGAAF

SEQ ID NO: 158346 - protein, 339 aa, unidentified
MKLYGAIDLHSTNSVVTVIDEQDRVVYQKRLDNDLTVILQQLAPYRSSLEGIAVESTYNWYWLVDGLMEAEYRAHLVNTAAVQQYEGLKYTDDHSDARWLAHLLRLGILPQGYIYPKQERAVRDLLRKRSQLVRQRTANLLSIQNLVTRNTGSSISSNRIKVLRVEDVGSLLGNADCALAAQSNLWVLHCLEEQIGKLEQVIKERVKLRPQFRYLKTVDGIGEILALTIMLETGEIKRFAGVGNFASYCRCVGSEKLSNGKRKGSGNTKNGNKYLAWAFVEAANFAVRFNPQIRRFYQRKKAKTNGIVAIKAVAHKLARACYYIMRHEVPFDVAKAFAG

SEQ ID NO: 158347 - protein, 417 aa, unidentified
MLNKVTRAKRPVDFSINIFSGGAIMICIGIDVAKDKHDCFILSSEGEILSDVFTIRNNREGFKSLLQRIQSCTQKSDKIMVGLEATGHYSYNILGFLLDHGLPTCVINPLRTNLYRKSLSLRKTKTDRIDAKTIAMMLMSDVDLKSYTDTAYHNEELKSLTRYRFNKVQERAKLKQSVARLVNILFPELEKIVPTLHMASVYTLLKEFPGAQQVAMAHLSRLKNVLVEASKGRYNKDKALEIRNAARCSIGSKMPAKSLELRHTIQLICELDTEIDEIESQIKEMMQSIQSPITTIPGIGLRMGAMILAEVGDFSNFDSPDKILAYAGLSPSTYESGKLSLAGRYSHMEKRGSRYLRYAIFNATKYVCLWDNTFASYLAKKLAEGKHYYVALSHAAKKLVRVIYALQKTGKPYIPAI

SEQ ID NO: 158348 - protein, 370 aa, unidentified
MGSVSTIDLQEGGTLMNCEKYIGLDVHQATISVAVMDPMGKVIMESILETKASTILEFLGGLRGTLSVTFEEGTWAAWLYDLLKPHVAHVLACNPRKNAALNQGNRSDKIDARELANRLRLNDLKPVYHGENGIRMLRELARSYLTIVKDLSRVMNRLKALYRSWAIPCAGRDVYYTRHRSQWLEKIREAGPRRRAEQLYQQLDMLQHLRQQARRELLAESRKHSVTAKLRQIPSLGPIRSALAVALIQTPNRFRSKRQLWKYCGLALETRITGEYVYVQGERRRSKKKISIRGLNKDHNHDLKGLFKGAATRASVIPGPFREFYQRSLAKGIKPTMVRLTLARKIAAITLTLWKKGENFDVEKLKSQAA

SEQ ID NO: 158349 - protein, 389 aa, unidentified
MLLDHPSDGPTAIRTQFGAIFVSLELSRSNWLITSLSPGKGEKMSKHGVTAGDVAGLMQLFADLRRKAAAGTGESYPIITIQEAGLDGFWLHRVLQQNGIESHVVDPASIATPRRRRRAKTDRLDGETLLRALLAYKRGEPRVCAMVVAPSPEEEDRRRLCRERATLIAERITHVNRIKGLLFSQGISDYAPLRRNRRSRLETLRTGDGRELPSHLRTQIGRELDRIELLLEQIKAVEAERDALLAAARKPASEEAAPDAVTMLLALKGMGANFAAVLWSEAFYRQFANRRQVAAYAGLAATPWQSGGIRHEQGVSKAGNPRLRTTMIQFAWLWIRHQPQSALTRWFKERSQQGRKRAIVALARKLLVALWKHVTQGVVIEGAVMKPTA

SEQ ID NO: 158350 - protein, 347 aa, unidentified
MDKELYIGVDVSKQTLDLAYYDGESIDWKKAHIKVSNNNAGFKKIGSWVAKVSKGFDIVLFCMEYTGLYTQNFRLWLEEKHYIYRMVEPRKMHRFEPDLDDGLRSLDRIKTDELDSFRIAIYCEQNHRKILRNPSKLPSPVYFKLKRLLAERKQTVKQSVLYKQQLHDICAYDTDLSVERKNGQLKTLNDALKGIDNEIDMYIKEDADINKNFSLLTSIPGIGRVVALETIVLTENFMAIDNPRKYACYIGVAPFKKESGTSVRKGSSVSKKGFKQAKADLSIACLVCMQHIPNIRDYWERKRKEKCSGIVFNAIKFKMILRMFAVIKRGTPYVETDNYRNGKNKQP

SEQ ID NO: 158351 - protein, 465 aa, unidentified
MQGGDKRKRSPGRPKPIEGLPIVRHKVAGIDLGSERHWVCAPTVDGSGREVADFGATTPELVRMAEWLQARQVESVAMESTGVYWIAPHEVLEATGLEVVLVDTHQLARVPGRNKKSDPLDCEWIQRLHSCGLLKGSFRPKEAVCMLRTLVRDKGNLVAESGDWLRRMQKSLDQMNVRVHRAVSDIDGVTGMAILRAIVNGERDAGKLAKLRDRRCHKSEEEIAEQLSGHWREDHLFSLGQGLKMYDVIQERIGDYEREILRKLAEMEPQECRGQAVPPLNNPQKAKLIQKRGEEPMRQALYRMSGVDLTGIDAIGVETVQLVLSEYGPDLSRFPTEHEFVSHTTLAPHKPTSGGKPVKKQKKRGGASSRVAAGLRMAALSLRHSETALGAYYRHIAYRKGGDVAVFATARKLATLIYRLVRWGQPYVDEGAAAYEKRYQEARIKSLTAAAKNLGYQLTPNASQA

SEQ ID NO: 158352 - protein, 351 aa, unidentified
MKTTITALPKLFIGIDIHKRSWKIHCSTDLFAGKSFSMPPDPFKLQEYVQKHFPDHEVSTAYEAGCCGYSAHRSFESFGWKSLVVNPADIHRKGKERYTKTDRIDAQLISRELKDGRLESIVVPDKEREELRSLFRRRNELVKDLRRVKSMIKMQLLYFGIKVPAEFDNDHWSHAFRHWIDSQEFNYPTARETMASKMRNFRFIDKELRDVSTQLRAYCRKHFKKDYYLLRSVPGIGGIVAVGILSELGDLRRFNSLKHLAGYVGLAPGIYESGANSKSTGMNPRCHRLIRSYFVEASWQAIRTDPVLQAYYRKHLGKDVKKIIVKVAHKLLSRTLAVIKTETPYEIGVVA

SEQ ID NO: 158353 - protein, 407 aa, unidentified
MSLAVGIDVGAYKCAAAVCRQGEREAERKVLNITTQRGGFAALDAWMVQQGAPIDVVVMESSGHYWFNLASHLRRQGYPVAVVNPLQAKYFAKSRLQRSKSDPADARTLAALGTHDQPRISEPLVGAELKEAARFAMRLVREQAQVCQRIQRLVDIGFPELRDVWDDPTCVSALAVLRHAPTAAAVARMHQDRLARLKRPGSGGRAIGPLKAGQLKQLAQTSVAAPELEQQVGFEMRLLIAQHDLLDQQIASADTRIASLLDGEVSQRLLSIPGVGPSTAATLMAEIGDIWRFTDVDQLLAYAGVHPKEQSSGKKGANPETSWTMAKTGNAYLRAAAYRMAVVGVQHNPILRAHYARKRAAGKSAMNALGHYMSKALAIVWGVWRGGKDFDPAHGSGRISLTRTYGI

SEQ ID NO: 158354 - protein, 324 aa, unidentified
MLQSADKVEMAAMPVTAVIGIDIAKHTMVLHDSISQHSWTIDNTYADALQALGPFAGHDLAVCEATGGYERALLEAARTLNLPVHRADPAKAKAFIASHGGHAKTDKADARWLARLGLERGASLTRWTPPDPEREALTALVRYRQDLLKQRTAAKNRRSAPTSGPVRDLLEAEIDFLDGQISRLDTRIDALQTAPALVPIHRVLTQMTGIGAVGASSLIALMPELGQINRRQIASLAGLAPHPRESGRFAGKRRTGGGRHELRPVLFMIALSAARFCPKLNPFYVRLVSLGKPKRVALTAVARKLLVIANAKVRDANLALPQLT

SEQ ID NO: 158355 - protein, 341 aa, unidentified
MDISVLGIDLGKNSCSVVGLDAIGKVVVRRRMRRETIITYAATLPACVVAMEACCGAHHMGRALARQGHAVRLMSPEYVRPYVKAQKNDDRDAEAIAEAATRPTMRFVELKTEEQLDMQTLHRIRDQLVGDRTSLMNQIRSLLLERGYIVPQGRAKLALRLGEMLDGDEPVLGSRIHRLMSDMRLRWRALDERIADLDAEFTDAARADERTRRLLTIPGIGALNATALVAAVGDARTFGRGRDLAAWLGLVPRQATTGGKPRLLGITKRGSRYLRKNLIQGARASLPVMSKSDTRLGAWLRGLLSRSHHNTVVVALAAKMARIVWALLRHQRTYDPVAQAA

SEQ ID NO: 158356 - protein, 360 aa, unidentified
MITSSGGQGQVTVGLDVGDKNIHACFLNQDGAIVEESKLGATTAALRRRFSSEEPYRIILEAGLHSPWMSHLLLGLGHEVYVANPRRLRAIYENESKSDRVDAQYLARIGRLDPTLLYPLRHRSPETRADLAVLRSRAALVRTRGTLVNHVRGVVKSAGGRLPRCETQYLARRAGLNLPAELVPALSPILSTIAELTVRITAYDKQIEEMAKERYPETELLRQVGGVGAITATTFVLTVEDPARFPRARAVGSYLGLRPRQADSGTLKPQLHITKAGDKNLRSLLVECAHHILGRLGPDTDLKRWGLKLAERGGKNAKKRAAIAVARKLSVLLLRLWVTGEIYEPLRNARLHGDLLSPAP

SEQ ID NO: 158357 - protein, 350 aa, unidentified
METLISRCAGLDVHKETVEADVRRIEPDGRLQHQTRQWGTMTRDLAAMADWMAAQGVTHVAMESTGVFWKPIFNILESRFTIMLVNARHLKQVPGRKSDVRDCQWIAQLLQHGLLKGSFIPPRAQRDLRDLTRYRTQLLEEKTRTANRIHKVLEDANLKLGSVASDILGVSGRAMLKALIEGEKDPVKLAALAQRKLRGKIPELEKALLGHLTEHHQFMLRLLWKQLTQEEEWIAELDARIEKGTRPFAAEMERLDAVPGVDRRVAEVALAEVGADMKPFPSHEHLASWAGMCPGNEESAGKRRRRRILPGNRWLKQTLVRRRATPRTPISPPSIGVWQGAGGRSEPSWP

SEQ ID NO: 158358 - protein, 361 aa, unidentified
MKKPMQHLIAEVPHRSSRGGMTIGIDLGDVWSHYCTLNEDGEVVGRGRFRTSPSGVEKWFTDLPRVRIAMEAGTHSIWISEQLQELGHEVIVANVRELRAISHSDRKSDQVDAEKLARYARLDPKILRPIAHRTVAQQEALTLIRARNLIVRLRTAAVNAVRGLAKPCGYRLPASSTLCFAKRSLAVLPRGLVQALGPVLEQIAEMTKKIKHYDRLIRRLTETEYPETQALIQVYGVGQLTALTYVLTLGSKERFQRSRDVGCYLGLRPKRSQSGDRDPQLGITKAGNIYLRTLLVECANHVLGPHGRDSTLRQWGLHLASRGGKQSRNRAIVAVARKLAVLLHRIWITQEPYIPFYGVAA

SEQ ID NO: 158359 - protein, 381 aa, unidentified
MKSKNTSQQFETYLGVDLGDKKHHICATDKHGVILKEFTITNDRAALRKLCEDYPKGAVALEVGTHSPWISRFLIAEGMHVTVANARKLRAIYQNDRKCDRFDAQMLAKLLRADPDLLSPIQHGSEQAQKDLVAIKIRDSLVRQRTHIVATVRGVIKSMGLRIPASSTESFHLNAGKFLTEHPALEPAITPALKSLESLTGQIKVYENEIQKSAREHHPQALKFQQIPSIGPITSMAFVLSIEDPNRFKDPRDVGAYLGLVPRRDQSGGSDKQLSISKAGNRYLRQLLVQCAQYLLGHFGPDCALREQGLKLAGKGGRAAKKKAVIAIARKLAVMMIAMWQKGGDYQAFPERTKDKSAPASKPSSKTTSKTPSKPSSKRAA

SEQ ID NO: 158360 - protein, 445 aa, unidentified
MRRCIGLDVHREFAQVAIWEDGVVRQAGRIQTTPEALREFAESLCASDEVVLEATGNTYAIARLLERQVGRVVISNPQKTRAIAEAKVKTDKVDAAVLAQLLAAGFLPSVWLPDEATFALRRQVTRRAHIVRQRTRLKNQVQSILHRNLVPRCPAADLFGRKGRAWLATQDLPRDEQQAVGALLRQLDFHGQELRIVDAELGRVALEREEVRRLLTIPGVDATVALAIVAAVGDFGRFSSPQRLVGYLGLNPRVRQSGGHPAQHGRITKQGRAHARGMLVEAAWAAAKTPGPLRAFYERVRGRRGMQVAVVATARKLATLCWHLVTTGQDYAFARPSLTDKKLRALELRAGMPPRRGQKGNAAAYSLKEVRRRERTLAEQAELAYRQLVAGWQPKPPAKQPPGRGVAAATGARRSSPQGGKAARQGFQPQDPALRSGVDHAPHRA

SEQ ID NO: 158361 - protein, 359 aa, unidentified
MIRLEILKQSLGIDVSKDSLSFCLCSLTNDLEKVFHAGEDVSNDKFGYKQLTKWLAGGIATAELPIIVMESTGVYHEGIAYYLHELGYAICIMQSGRVKRYAQSLDQRSKTDALDSKMLSMLGCERQLPIWDPPGKTLQELKFLSRERSALVKERSKGRNRAHAMNAATYPHKAAIKRYNKRMKLLEAQISAIELEMQQLVKSDSELSEKLQFLESIPGVSFKSAATVVGETLGFSTISSAKQLVSYCGYDVVLRESGNYRGKPRISKKGNSHIRAVLHMPSMTAIRLNPTLKPFYDRLKPKKVKPIIALVAVQRKLLILMYILWKNNTYYDAKYEIKKAARKQVLTVQDNNKPEFVIS

SEQ ID NO: 158362 - protein, 438 aa, unidentified
MSNKVIFNLDELFISVGIDVGADFSWMSIALPNQQFVGKPYKILHNSIDSLTTAVSKIKEAEELYSLESRIFLESTGIYHYPLFCYLRDKGFNCSVINPIITKNSTNINIRKVHNDRFDSKKAALVGLKPDLKVSLMPSDLALNCRNLCREYYDLMDNRSAYVNKLQGELRIAFPQYLGIFSKVTINTSLTLLETYTSPSAFLKADKQEIIDIIKSTARFGLTYAQNKYNAIIQAATDANQFGYIIESNIKRIRLYISFIRKYDEEINSILESLHELVDANEDSDFVKQIHLIETFKGAGFLSAVSIMGEIGDFSAFSKPKQLFAYFGLDPAVKQSGKFEGTKVQMSKRGSAIARRVIHTLTLQSISISRNREAKNPVLREYYLKKCDSKPKLVAMGAVSHKVCNMIFAILRDNKPFKIIAPQEHIKQYNSAKCDIAA

SEQ ID NO: 158363 - protein, 314 aa, unidentified
MSTEWFVGLDIAQGAVDVAVRPTGETWHQSTDAAGLVSLTERLSTLRPALVVLERTGGYEHGVVAALVAARLPVVVVNPRQVRDFARATGRLAKTDALDALVLATFAEAVRPPVRALPDATTQEVQALLSRRRQLLEMHVAEHNRLEHAPPRVAHQIQAHLDWLRRQITDLEHELADCLQASPVWQARDALQRSAKGVGPVLSLTLLLDLPELGILSGKQIAALVGVAPFNRDSGTRRGGRTIWGGRAAVRAALYMGTLVATRFNPVIRAFYHRLLAMGKPKKVALVACMRKFVTILNAMLRKNRRWGDHVDNS

SEQ ID NO: 158364 - protein, 329 aa, unidentified
MDVETTADRFVGIDVSKARVDVHVRPDGTAFGSTTDPEGLGALVARLRPLSPCLVVLEASGGYEGVVAAALTEAGLPVAIVNPRQVRKFAGAIGRLAKTDAIGTCPRAGQRPDPWAAVIAPFAQAVRPTARPLPDDLSVRLAELMARRRQLVVMINAEKQRLAKAQDRIAQRSFKALLKSLEAERARIDRAIDKLIEASPLWCAQQDLLKSVPGIGNLVARTLIAELPELGRVDRHQIAALAGVAPMNRDSGRYRGKRKIQGGRVEVRAPLYMACLVAIRHNPVLKPFYRRLRDAGKPARLALVAAMRKRLTILNAMLRDGKSWAQGQT

SEQ ID NO: 158365 - protein, 461 aa, unidentified
MNRKKPGGGRKGSAQKKVDWKALEIVHPDAAGIDVGGSEHWVAISPDRDSEPVRRFGAFTADLHELARWLVEKGVRSVAMQSTGVYWMPVLEILEQHGLEVYLVNAQHTKNVPGRKSDVEECQWLLKLHAFGLLNNSYQPTDEIRIARTLWRQRGNLVAEAASAIQRMQKVLIEMNIQLSNVLSDLSGVSGMTIVGAILQGERDPWILASLVQPEVKATPLEVAKSLEGNWREELLFVLSQQVELYRIYQSKIVECDLQLRKHLETFGSKVDLQTQPIGPKPKGKKGSRNAPQFDLRTELYRITGIDWAQINGMDVLTAQTVIAEAGADLSAFPTEKQFTSWLGLCPTNEQSGGKILKRRTRKVVNRASGAFRNAASSLIRSQSYLGAQYRRLRTRLGAPKAITAMARKLACLFYRLIKHGQQYVDKGTEYYEARYREQQIRSLATRAQKLGLQLVIPETA

SEQ ID NO: 158366 - protein, 344 aa, unidentified
MNIATMGIDLAKNVFQLHGVDSHGKVALRRQIHRGQMRGLFVNLPPCLIGMEACASAHYWARTLQGYGHTVRLIAPHFVKPYLKTHKTDATDAEAICEAVGRPNMRFVPIKSLEQQSALSLHRVRQGFVRARTGQACQIRGLLAEFGLVMPRGIAHIKQVPRLLQVAAKELPAPFCQLIERLLAHLKELDRQARELEEQIVDWHERSEPSRRLAKIPGIGPITASALVASISDVRSFKNGRELAAWLGLVPRQHSSGGKPVLLGISKRGDRYLRTLLVHGARSVILRARKRDDKNGVWLKKILERRHVNIATVALAHRTVRTVWAMLAHDREYCPNYKSLPVAA

SEQ ID NO: 158367 - protein, 341 aa, unidentified
MQHELRTVAIDLAKKVFHLVGTDTLGKILWRKRLTRHALMPFIAQLPPVLIGIEACGGAHYWARRFREHGHEVKLMAPQFVKPFVKSNKNDMRDTEAIAEAVMRPTMHFVPTKEIDQQDMQALHRVRERLIGARTALINEVHGLMHEYGIVLPKGVSKFRQAVVDTLESEQEKLTALSQEMFRKLVEEFGELEKRLAYYQDKLEALATTHPECQRLMTIPGIGPITATALAAAVGDMGVFKNGRQFAAWLGLVPRQHSTGGQTRLLGISKRGNSYLRKLLIHGARATLRWVKLKTDDRSRWMRGLLARCGWNRTAVAVANKNARIVWALLSRGGVYGDNAS

SEQ ID NO: 158368 - protein, 405 aa, unidentified
MKTTAYCGFDWASETHYYVLKNARKEVLSEGTVPHTTEGFEAFLESLGQCRQGGRVALIVEANRGVPMNALLDVSWLDLYPVNPMKTRKLNELQGSVRQKSDASDCHLLCDYLIANESELSGSYVERDSLIRQMQEWIGMETDLVSNCRQLKQRIMSHLDTFMPDLKRMLPNLDKKVYVRYLFEFDPLTPVDCSEVESFLRRHGCRNAETIEAFAAGHVALRALGEDAEVHRAQADVLRAWAELLWQLQCSLEDCRKRINALFVQLPQAAIYSSLPGLGETLAPRMACLFGSRPSERFACKEQAVAYFGQSPVTEQSGKGLKVGRRRNCHRYARNTCFLWAMAVNKMPNCHWQRTFLDKRRRKGDARPTRYRKLGRKMLGILYRCVIDNVPYDEVKFIQNLHQKA

SEQ ID NO: 158369 - protein, 347 aa, unidentified
MQFYTKQHPFYCGIDLHARTMYLCILDQAGETLLHRNMTATPEALLKAIAPYRDQIVLAAECMFTWYWLADLCAEHGIPFVLGHALSMKAIHGGKAKNDKIDAHKIAVLLRGGMLPQAYVYPAEMRATRDLLRRRLHLARKRGELLAHVHNTNSQYNLPAIGKKIAYKANRDGVAERFADPAVQKSIEVDLALITYYDALLRDIELSIVKTAKHHDANTLYLLQTVPGIGKILSLVLLYEIHDIARFPRVQDFASYCRLVKCAKESAGKRSGTSGTKIGNAHLKWAFSEAAVLFLRENPAGQKLLTRLEKKHSKGKALTILAHKLARAIYSMLKRQTAFDLETFLHA

SEQ ID NO: 158370 - protein, 403 aa, unidentified
MNAVGIDVSKGKSMVAALQPGGKLLARPFEVLHTKSGIKELISFAHTLGGDTRIVMEHTGRYYEPLLQRLAASDLFVTAVNPKLIKDFGNNTLRKVKTDKADAKKIARYALDNWCDLRQHTGMDTTRTQLKTLNRQFAFCMKQKTACKNNLIALIDQVYPGANTYFESPARADGSQKWVDYVRAFWHVDYVCSMSLSTFTERYRKWCHRHGYNFQPDKPRLLMEKAKDLIAMLPMDKTTKMLVQTSIAQLNVLSKTVEALRTQMVALAEQLPEYPVVIDMNGVGPTLASQLIAEIGDITRFPRRGSLTAFAGVDPGAKQSGTMQLKSNKTSKAGSPHLRRALFQIVSGLLMRSPDDAVYNFMDKKRSEGKPYYVYMTAGANKFLRIYYGRVNEYLANLSKEQE

SEQ ID NO: 158371 - protein, 466 aa, unidentified
MTTGKLWRNRKETKDWARRLRSEDRGLEVVHPHAAGIDVGNSAHYVAVRPDRDPEPVRRFECFTADLYRLADWLESCGVKTVAMQSTGVYWIPLYEILEDHGFEVYLVNARHTKNLPGRKSDVQESQWLLKLHTYGLLNNSFQPTAEIRVLRTYWRQRAEHVSGAATCIQRMQKALTQMNLQLANVISDLSGVTGQAIVRAIVAGERNPQKLAELSHPRIEASREEVAKSLEGNWRTELVFVLRQEVEMYDTYQWRITECDQQLQKHLASFANTVSLQSPEAEPRGKKKAKPTKNAPRFNLGSELQRITGVDLTRIDGIDVMVAQTLLSEVGLDMSRWNTEAHFSSWLGLCPDNRISGDKLLGKGTRHVVNRAATALRLAARNLIRSRSYLGAQYRRLRTKLGAPKAITAMAHRLARLVYRMLKYGQRYVDKGTEYYENRYRQQQIHLLQKKAAKLGLQITVARQS

SEQ ID NO: 158372 - protein, 420 aa, unidentified
MCLRWLSIATKLKELIVLNAVGIDVAKGKSVVSILRPFGEVISSPFELCHTSSAIDDFIHSLSNLEGEVRIVLEYTGRYHEPIARWLSDADFYVSVVNPKLIKDFGNNSLRKVKSDKKDALKIARYALDNWNDLRQYCFMDKTRDQLKTMNRQFDFYMKHKTALKNNLIALLDQTFPGANTFFTSPVRKDGSQKWVDFVASFWHVDCVRKVSLSVFTERYRKFCVRKGYDFHPDKPAQIFEASKELIALLPKDKMTKNLIMQAIEQLNTLSRTIEQLRLQMDQTAAQLPEYPVVMAMKGVGPSLGPQIMAEIGDVRRFSRRGALTAFAGVDPGVNQSSTYNQKSVRTSKRGSSQLRKSLFQVMDVLVKTSPENDPVYAFLSKKRAEGKPYYVYMTAGANKFLRIYYGRVKEYLASLSEEE

SEQ ID NO: 158373 - protein, 347 aa, unidentified
MRFYMHQHKHYCGIDLHARSMYVCILDQTGTILVHKNLPTTPAAFLRVIAPYRDDLVVAVECIFTWYWLADLCAQEGIAFVLGHALYMKAIHGGKAKNDKIDAHKIAVLLRGGMVPQAYVYPAEMRATRDLLRRRCHLVRKRAELLAHIQNTNSQYNLPEIGKKLAYRSNREGVEEPFPDPSVRKTIEVDVSLIDHYDQLLGEVELYITRTAKAHDVQTFARLQSVPGIGQILALVILYEIQDIARFPRVQDFVSYCRLVKCAKESAGKRLGTSGKKIGNVHLRWAFAEAAALFLRHNQPGKEYFTKLEHKHGKAKALTVLAHKLARAVYYMLSREHTFDLHRFVTA

SEQ ID NO: 158374 - protein, 351 aa, unidentified
MSEHSLGIDVAGKDFRVCLKNRRPDGQIKIKGSRKFSNTAKGFSSLVKWVDSKQTNDQPMRAVMEATGVYYESLAYFLHEQGWQVFVLLPNRIKGYFKFLNQKSKTDKIEAKGLADLGINQELPVWEPASPQMYSLKRLCRERNTLIDEKTVISNRLHAEQSCKAPDRGTMRRLKQLIRLLDKQVKEVEQDLQQGIEQDPALKQRIEQICQVKGLGWITVLCIIAETNGFKLVTHKSQLVSYAGYDVVERQSGSTINGKTRISKKGNRHIRRVLHFPALSVVKYHDEFTNLYNRVYDKTKIKMKGYVAVQRKLLVLIYTLYKKNEAYDPKYTQKQGTDQGSRQGTMPAYTG

SEQ ID NO: 158375 - protein, 379 aa, unidentified
MDHAITGTPAETILHGALELSKNSWLLALQFPDRAQPSLYPIRGGDTEGLMAKLTAAGDRWAKMSGKAPSIVLCYEAGYDAFWLARFLKARGIECLVVDPASMQVNRRARRAKTDRIDVGMLLRALIAWGQGDRHVWSVVRVPSVDEEDLRRSHRERDRLVRERTAHINRIKGLLFGQGIRGINVKSKYKTLQIDKLVTGDGCPLPPRLASEITREIARLALIQEQIATLERERDQAPTPCKATEKKRVQLMCLTGIGPAIAAVLTREVYYRQFDNRRQVAGFLGLATSPHDSGDVERSQGISRAGRGQVRGTMIQAAWLWLKHQPKSAITRWFVQRTAGQSGRIRRIMIVAVARKLAIALWRFLEQGLVPQGAMLANR

SEQ ID NO: 158376 - protein, 338 aa, unidentified
MNLSRIGLDLAKQVFQVHGVDRHEHVVCRRQLKRAQVRDFFRQLPPCLVAMEACGSAHYWARELRELGHTVRLIAPQFVKPYVKGDKHDAHDAEAICEAASRPSMRYVPVQSAEQQAVQSMHRVRSRLVRARTALCNEVRGLLGEFGLIATRRGRAATMALLETVMATEPAPLPAPMGELLRELKDELQTLEARIARLERQIQAHVRGDARIQRLLAVEGIGPISASAVAASAGDARQFRTGRQFAAWLGLVPRQHSTGGQQRLGNISKRGDTYLRTLLIHGARAVVRCCANKTDARSRWLQGLLQRRPANVVAVALANKNARILWALLSRETCYRPG

SEQ ID NO: 158377 - protein, 378 aa, unidentified
MKAARFTADEIERVSYLTSKGYLPVAVDVASRVFQVCYYDLGAKHIKNYQLSRVKFFEFIDDTQTPRKLIGIEACGSCNYLCRYIEEHNHKCHILLAQKVKAFLHLDKTDRIDALGILKALITPSMQHIPARTQENQYLLNLITVREQLNKQFVQTVNAAHAILYESGVVAGTVSVASATKVTEALKALCNAETKKEHSENDCSYSHLNCISESLLSNIESLQTKIKEINTHLLSYASNNEICSNLQTVPGIGKLSAVALYAAMGEPERFSSSRAFSAFIGVAPVTTGTGGKTTVLGIRKSGIQSIKKMLYMCAMVYLRQAMKNGTESSWLKLRLNQNRSKKIIICAIMNRLARIAYAIAKSGQPFDETKCNMIKKLR

SEQ ID NO: 158378 - protein, 344 aa, unidentified
MGEVITIGLDIAKSVFQVHGVDGLGAVVIRKRVSRARMLEFFAGLPRCLIGIEACPAAHHWARELQAIGHTVRLMPPSYVKAYLKRSKNDANDAAAICEAVTRPSMRFVAVKTKEQQAALMLHRARQLLVRQRTMLSNAIRGHLSELGIVSAKGRNGTDELLEIIGKDADSRIPLAARSVLKVLAAQYRAIGAEIASISKSILVWHRSCEPSRRLEEIPGIGPIVATALVAEISDWKAFRSGRGLAAWIGLVPKQHTTGGKDKLGSITKQGNRYLRWLLVNGAMAVIRYAQKHGTKKHPWLGRLIARRPTKVAAVALANKIARMAWAIMVRGERYKEPALLLAA

SEQ ID NO: 158379 - protein, 371 aa, unidentified
MKQFSKFVGLDVHKATIAVSVADAGRGEVRYIGEIANTPEAIEKLVRQLRKGDAHLSFCYEAGPCGYGIHRQPSDLGWDCQVVAPSLIPRKAGERVKTDRRDSLMLARLHRAGELTAVWVPDDAQEGLRDLTRAREDMKHLQRQAKQRLCAFLLRYGKCYSGKSNWTQAHYRWLEEQQFGQSVQQIVFQEYVDTVKALSKRVDGLDTQLESAASESVFWPVIEGLMALRGVNLLTATTVVAEIGDLKRFASAPQLMAYLGLVPSEHSSGATKSRGAITKTGNAHVRRVLVEASWTYRHPARKTAHLQRRAERTSEAVQDIAWKAQKRLCARYRLMEGRGKLKVQACTAVARELTGFIWAIGQELPQPAPNR

SEQ ID NO: 158380 - protein, 379 aa, unidentified
MTLDRFFRQCVGIDISKDKFTACLYMYDRASDAGCCTQSIDFANTKSGFNQLVRWSRKEAVKSHPLTYLMEPTGVYYERLVYHLHKIGQTVYVVLPNKARKFCEAEGIKTKTDAMDARCLALMGCVSRKLKPWSPPAPIYRELRQMTRFHADLCRIRTSVSNRMEALDHMESAEKSVRRNCEKLLDEIDRLMKNNGKTIMQKVAEDKELEQKVKRIATAKGLGETTVVCIIAETQGFHLIENRKQLVGYSGLDVKAEQSGKEDPRHHISKKGNAHIRAALYMPALVAVRHNRQIKQAYGRICQKHPNEKMIGVTAAMRRLLLLIYTLWKNGEEYDENRDKTHMARKEKTEQEYGSEDSIRNEQEPVSWNETDEDGKPPF

SEQ ID NO: 158381 - protein, 389 aa, unidentified
MFYLGIDIGKNTHVASLVDDKKKVIFKAFSFSNSIDGAESLILKLEAFKNELEVGMEATGHYWLSLYSYLAQKNFTVRVINPIQTDGWRQGFEIRKRKTDIIDSLLIADLLRYGDFVETSLSNEDYLSLRNLSRFRSYLISSIGDLKRKTIALLDQVFPEYASSFSNIFGKTSKEILSNFSTPSDFEDINSDDLNTFLESVTRKNYASKKIDELSKKASSSFGINFCLDSFSLQIKMLIEQISFIQNQVSDVENEIEVLLEKLNSPITTIPGIGSVNAATILGEIGDIKRFSNPSKLVAYAGLDASVSQSGEYESTYNHMSKRGSPYLRRALFQSALRAEFCDPVFSAYYQKKISEGKHHLVATNAVARKLCHTIFAVLTKNEPYQVQS

SEQ ID NO: 158382 - protein, 358 aa, unidentified
MVQSKGINFNGQNIYIGIDVHLKSWSVTIITESGYKRTHSQKPSAKELFEHLKKHYPNGKYQAVYESGFSGYSTYYALKEYGIKCMIIHAADVPTSQYENVMKTDAIDSEKLAKSLKGGLLRGIYVRDKEELDDRSLIRLPKTLQKQLGGYKSRVKHLLYNNGISYPDCFENSRSHWSNRFIYWLENEVRLLSSTRLSLDLLIDQVKLFRKNLLKATRMVRDLSKKPQYSRQYENLISIPGIGLVTAMCLLTEIGDVSRFHNQREFASFLGLIPSCHSSGENIYNMEKTFRGNKHLGPLVIESAWVSIRHDRAMSMAYGAYCKRMKGQEAIIRIARKMSNRILSVLKSGKKYQYDKVR

SEQ ID NO: 158383 - protein, 414 aa, unidentified
MRVLLFIGDDWAEDHHDIELEDETGRRLAKVRLPEGLEGIARLHALVAQHAPAGWADLPSEEVAARVVVGIETDRGPWATALRAAGYLVFAINPLSSARYRERYSTSGAESDAGDAHVLAEIVRLDRDHHRQIAGDTDLVDAVKVVARAHQTAVWERTRQVLRMRSTLLEYFPAAVEAFEDLSAKDSLLLLARAPSPARVGKLTRSQVVSALRAARRHHIEAKADALLTVLRAPGLRQPTTTEAAYAAVVVGQVGIITALVQITQLEEVVDEHFGRHPAADIHLSQPGLGVVLAARVLGEFGDDKNRFHDVRARKNYSGQSPITRASGKKTIVMARYATNRRLGDALHQQAFSALTASPGARAYYDALKARKIGHHAALRQLANRLVGILHGCLKTGTKYDETIAWQHQNIAAA

SEQ ID NO: 158384 - protein, 377 aa, unidentified
MKKELYLGLDVDKEWMVIAVAEWGRNGPVHDLGAISNDLHALEKLLGRLRKQYGSQVIIRACYEAGPCGFGIARRLRQLGVECEVVAPSMTPTRSGDRLKTDKRDARKLARLLRAGELTAIYIPEPTDEAIRDLCRARSDAVDDRRRSRHRLKAFLLRHGYRYQGKSSWNAAHERYLRELVLPHPAMKVILEEYLMAVQLASERIERCEAAMRELLGKWRLEPAVRALMAMKGFQTVAAMIVVSELGAVDRFTHPRQVMAYLGLVPSEKSSSDRRRQGAITKCGNTHARWLLVECAQHYAAPPKVSKELSRRQQNQSRAVRTLSWKAQNRLHQRYRKLMARRLLRNKVMVAIARELCGFIWELLRTLECYHAPSPST

SEQ ID NO: 158385 - protein, 472 aa, unidentified
MEKEKKTIYIGCDVSKGYADFCILNENKELLVKDFQLDDTDRGHSKLKSIIKDVFNKTPDIEICSAVESTGGYENNWYNTLKKLSESYNLKITRLNPWGVNLNQKAGLKRNVTDAISAFNIAEYIIDHSDNVQYKQDDSFASLRCYWNLITMNKKHRKELINQLEIALYNANPTLMQYRKSKFPNWLSELLISYPTATDLANANIEELIKIPNIKINKAEKLITEAKQSVASRTDAFTKRYIIETVTQIKALDMTIKNDIDTVEQELKNTKQYEEELTVLKSFKGINTISAIGILLEIGSIERFKNAKAICCYFGVQPKFKQSGDKTSGVHMSKQGSKIIRGILFNITKGAIVYNPVIKTTYEKKLSEGMSKMSAIGVCMHKTLRIIYGMLKHMQNFDPNIDKLNTERSNKKCQDKYNQSLVYTIKARRFQTFDPSAPISKIQNKKRKELNSSQCATNTHTTGSKNSFPVSS

SEQ ID NO: 158386 - protein, 334 aa, unidentified
MLYAAIDIHKHAFQAAVLDAESGEVVEERFAADRESLTRWTERWRGRVVAVAIEATTGWRWVWRELEREGFDVHLAEPVQTRALLGRRHSAKTDRLDARWLARLLAKEMLPESWIPPAQIQELRDRTRLRKALAEDRRRWGQRLHAHLLHEGWPCSRSNLLRPPGLRWAAALKLPEHARLQVDSLLAVMAALEEQLDRVDGELRRFARADQRCQALQSIYGIGPILACHLLAEIGEACRFQRAERITRLAGLDPVVDESGESRRRGHLAKAGSPHLRWALVEAAVHAHRTTAPDLELYRATRQRRDTTVARLTVARKIGRRAFHALRELELAAA

SEQ ID NO: 158387 - protein, 353 aa, unidentified
MTKKLWAGLDVGVETTSICVIDDFGSAVHQATCATNVKSIHREIVFLKRRKAARVGLESGSAMCLARGLRTLGYAVDIYETRQLSAFLRIQRVKTDANDAFGIAQAGRLGAPLVSKVHLKSFECQALTARLRIRKHLVRARFRAVSLLCRQLEQFGGRVCRSTRSAGLRPLVEAEIKTLFGRTSTPLVCELRRLLDHCLHLMEEVKRTDKEMRQLANAIDPCRRFLEIPGVGPICALSFYAAVGEPNRFRRCTDVGSYLGLTPKTHQSGLVSRAGRISKMGNREARSLLVTASTQFMKLSDTETAIHTWARAVELRRGRLKARIALARKLATVMLAMWKTGDHYHPVPASTQI

SEQ ID NO: 158388 - protein, 353 aa, unidentified
MMIIGCDFHPSFQQIAYVDQEAGEYGERRLIHRGEAATFYRSLAGKSVRIGLEATGNDRWFHKLMSELGHELLVGDASAIHASAPREQRTDKRDARHILRLLMENRFPAIWQPSVANQEQRQLLLHRCRLVRMRTRIKNQLDSMAKNEGLTGSRSWSAKRRQQIEALPLTGWYAERRKDLLALLEEMDKRISPLDKAVEAAAEQNAEAQLLMTHPGVGPVVSLAYVLIMGDWRRFPRGKQVGSYLGLIPAEASSGKHQQRMGHITKQGNTLLRWLLVEAATKAQSKDPSWHRQYVRLSMNKHHGVAKVAIAHKLAVRLYWMLRSGQNYRQIVERGSHAGQSDLAGGCGLRPIN

SEQ ID NO: 158389 - protein, 443 aa, unidentified
MHRPLGPLRDLLRPLIGIRDEQRSPSKGWDGWRTRGAAAERRRERRRSEMRLWVGFDVGKAFHWVCVLDDEGEVLLSRRVEAEERDIETCCEEIAALGRSDERLVATDLLGGPATLLEAVLLGRGERLFHLPGIAVNRARDGYRGESKSDARDARVIADQIRMRWRSLQEVRPREDAAAELRTLVAHRRGLVEDQARVITRLRALLLEVFPGLEAALDLSTDRALLATTRVATPSAARRLGASRLARWLKDRGIRRSEELAGKVLEAAKVQRRELPAAETKAALVSEMAAEVLRTRGRVATVDTRLEELMAAKPEAAVVRSMPGMGPLFTAEFLSEVGDSSRFASADALAAAAGLVPATRQSGDGSFQRRARRGNRRLKNLLYRSAFSCTVHHAPSRIYYLRKRAEGKAHHRAVIALARRRVNVLWAMLRDGELYRDPVAEAA

SEQ ID NO: 158390 - protein, 353 aa, unidentified
MEQLKQIWNKQILFAGIDLHKNKWVTTVRTSDVILKTFTTEPDKQVLLKTFQNHWSGAQINAAYEAGCFGYHLAEFLNSNDIRCQIIAAHTIPTAPGNFTKTDIIDSRKIAFELAKGTIKGIYQRSEEELFDRHILRKRRQLLKRKKQLQVQIRSDLMFFGFEPPVTLKDYWSKKIVRSLKEIEVPNQIFNSLKLMYLEEYERIKDQLKIINNLLVVLIDSDKYRDSVKLLRTVPGVGALTAITLLLELGNMDRFASAEKFASYLGLTPSEFSSGDKNRKGSLTGMGHSDLRALLVEISWQAIKKDPVLLEKYERIAKGKSKCQAIVAIAKTLANRIRKVILTNEPYVIGVIK

SEQ ID NO: 158391 - protein, 411 aa, unidentified
MILNYFGDVIETPFAFMVSQTGMSLLIQKIEEARQSCRAEKVFVGIEATGHYYEDIVRILTEEGYSVHIVNPATTHEERKQHLTYTKTDDIDLYLIAEALVGNKATNSKLACGVYKQLQNLTRARRSEINKRSRIKMELRGIHDQIWREYQGVSVLVDHKVKTTKIFSDFWGKASLHLLKNYPHASQVLELGEDGLRALSKQHNLKIRKKTIDKLLFAAKESVSKPIEQLSSELFLLKQKIKAYEWHTTNIELYDKEIERTFVQTDGLFLLTVPGIGLITAAEIYCEIGDISHYNSASQLIKKAGTNPVIKQSGPDGGYYGCISKQGNSNLRRAVYTAGRCLSAHNEALKPFYTRLKEKGKKARKIYIAMGNKFIKIAFAMLKNQQPFEWNHSDFNYEKEILKKLSQPLAA

SEQ ID NO: 158392 - protein, 361 aa, unidentified
MHSENIAAYVGLDVHKETLAVAIAAPERLGEVRYYGTINNEAQAVRRLFQKLQGLYGNILSCYEAGPCGFGLYHQLTAMNIKCQVIAPSRIPKSPTDRIKNDHRDAISLARLLRAGELTPVWIPDLTHEAMRDLIRARAAAKRDSRVARQRILSMLLRTDKHYAGKHWTGKHRTWLANQSFSQPSQQIAFQHYCQSLEQIEDRILQLDQEISRLLPEWSLCNLVCQLQALKGVGQLIAITLVAELGDFSRFSNPKQLMAFLGLVPGEYSSGNSIRPRGITKVGNSELRRLLYEAAWSYRTPAKVGAWLIYYRPDSVTQYSKDIAWKAQQRLCSRYRSLTAKGKKSQVAITAVVNRPGNPGD

SEQ ID NO: 158393 - protein, 401 aa, unidentified
MNAVGIDVSKGKSTIAVMRPFGEIVASPYDVVHTISELKKLADFLLKLNGETRVVIEYTGKYHEPVALSLYEAGLFVSIVNPILIKNFGNNTIRRAKTDKKDAVKLANYALSHWLDLPQFVPEDEARRTLKTYNRQYSHYIKTKVAMKNNLISLLDQTFPGVNTLFSSPPRKNGHEKWIDFVEEFWHCGCVASLTQNLFSERYAEWCAKLKYHFSYSKAEDIYFASAGHFNTLPMCDSTKCLILQAVKQLNVINETLASLKHEMNNIASSLPEYTTVMAMHGVGETLGPQLIAEIGDIRRFQRKQSLVSFAGVEPPENQSGMYEARSRSISKQGPSALRKTLFQVMSCILKNGNVDDSVFQFLDRKRAEGKPYRVYMIAAANKFLRVYYGRVKELFNKLEA

SEQ ID NO: 158394 - protein, 387 aa, unidentified
MQKPHDNSKASPAAFMQDNTLIAVIELGLSNWLVAGLIPGVSREPLKKLEPNPEDLLKLLHGWRDEAIKAGRPITRIAVAYETGRDSFWLARWLRERGIDAHVIHATSVAVSREHRRAKTDRLDTAMLKRGFLGWLRGERGHCTVAIVPTMEEEDAKRPHREREGLVHEQTRVVNRMKSALIQFGVRNFNPKLRKATVKLETVRTPEGKSLPPNTIAAVRRDMERLKIIKEQIKAIEQARLQQFEQKPEALANRMVYLLVRIYGLGWETADLLVHELLSRTLRDRKAVARYAGLTGSPDESGSKRREKGLSRSGNARVRKIMIQLAWRMVKFQPDSALVQWFKQRTEHAKGSRKPMIVALARKLIIALWRYANDGVIPEGFRLHSAA

SEQ ID NO: 158395 - protein, 350 aa, unidentified
MSLELQSLLPYPNSCLGASPHQQERDTKMAMRSFCGIDVSKDRLDVMVLPEQQCSSARNDAAGWFQLIEWLRGFSISAIGLEASGGYERGIMRALLAAGMSVRQINPFKLRQFAKASGVLAKNDRLDARMIASFVAVMPTNPVQRQGPAAERLAEMVTVRRQLSDAKIAAENASRMLENAMLQRLSRRRIARLAADIAEIDERLVEIVMSDAALARRYRLLTSMPGVGAVLACTLIALLPELGQLSRTKIAALVGVAPYDFDSGKLKGMRCIWGGRMPIRNVLYMAALSASNWNPRFKAFHDRLAATGKKPKVVIVAVMRKMITMLNAMVRDDMLWAERHSGRHNMPTAR

SEQ ID NO: 158396 - protein, 313 aa, unidentified
MSQEEQRIVVGIDVSKARLDIAAGDEEWPVTNDLEGIGRLISRLQTLNAGLTVVESTGGLERLVVAEMWAAGLPVALVNPRRVREFGKSIGLLAKTDRIDARLLVRFGEAVKPDPVCLPSEEEQKLSALMTRRRQVIEMLTMEKNHLCSSHPAAKESITKIKTVLQQELDELDHQIDDFIDQFPIFKKKDEILRSTPGVGKVTAAILLSDLPELGTLDRKKIAALVGVAPFNNDSGRFRGKRRIKGGRPSVRTVLYMATISATKFNPIIRTFYEHLVLQGKAKKVAIVACMRKMLIYLNAMIRDMQLWRSSIA

SEQ ID NO: 158397 - protein, 404 aa, unidentified
MIEALKKCVAGLDVHKKTVMCTILTEKKGGVLKKITQEFLTFRDDLNRLAELLYASEVELAVMESTGIYWKCVYEEIEEMGTPCYVVNARHIKNVPGRKTDVSDSAWLAELARCGLLRPSFVPPKDFREIRMLTRYRKKVIGMLGSEKNRLHKILESAGIKLGAVVSDIDGVSAREMIAAIIKESHTPEQIAQMARGRLKSKESDLVRSLKGRLSDRHRFLLKKIQNHMQWLENHINEIDRQVDKAMIPYKEQWQLLQTIPGVDKTSAAMLLSEIGVNMDCFGNKDRLSSWAGMCPGNNQSASKKKSGRTRHGDKFIKSVLCEIANSARKTNGQYKAMYQGLVIRRGHKRTIVAIGHKVLEVVFVLLKRKVPYKDSTINYEEIVVKRNAPRWIRALAKYGYLNV

SEQ ID NO: 158398 - protein, 395 aa, unidentified
MFIVGIDVAKRSHEVCMITSDGQTVQRPFSIRNNCTGYNLMLEKIRKHTNIKSQIVFAMESTAHYWLALFTRLRKDGYHVILLNPIQTSAMRDMFIRKIKTDAKDSFIIAELIRFGRYAESNVAQDRLLALKELCRNRFYLVDMAGDLNRKLIALIDRVFPEYEAQFDTIFCKSSVAVLKKYPTPQKLSNAHLDKLTELLWNSSNGHFGEWKARELKELARNSFGVEDCDGAYSTLILLMLDQIQSLSGKADALEKEISRLFQSFDTTVTTIPGVGPIIGAVILSEVGDISRFSSADKLAAYIGVDPSVNQSGEFQAAHAHMSKRGSPYLRRCIWMASQVAVQRDPMFRAYYEKKAAEGLKYMTIIGHVTRKMTTVIFAILRDHKVYEPVLPTAA

SEQ ID NO: 158399 - protein, 381 aa, unidentified
MTTAAILNTNGNPTEATLFVAFELSDKTWKLGFTTGHGQKPRERNVTARDQERILNEIAQAKRRLGLPETAPVVSCYEAGREGFWLHRFLLAHEITNHVVDSSAIEVSRRQRRAKSDGLDVRKLLSMLIRYEQGERRVWQVVNVPSVEAEDQRHLHRDLETLKRERASTTTRIKGLLSSQGIQVSTLTKLPDQLDALRLWDGSPIPPGLRRRVLRVYAHHTFLSEQIAAIEAERRAQLQTSSDASTDKIRQLMMLKGIGVNGSWLLVMEFFGWRDFKNRREVGGLAGFTPTPYQSGDSNREQGITKSGNRHVRWMTTELAWSWLRFQPESALSVWFRERFGGGGKRLRRIGIVAVSRKLLIALWRFLETGVLPKGAVLKEG

SEQ ID NO: 158400 - protein, 339 aa, unidentified
MERPKYFIGVDVSSGTFNASVGTYPWRLVGSQESFENSAGGFGNFLAWLQKHSYTPDNSVVCMEATGVYGGLLAYSLVAHNYNVAVEPPLKVKRAFPTHGHKNDIADSRNLAEYAYRFYDELHFWQPPDEVLKQVKTLLTTREQLTKNRTAYRNTLKTLKREVVRTPMAEDMYEGLIGELKSLIVKIDEEIGSLMGKHPFFNPMFTHLLSIPGVGLQLSSHMMVITQGGRREPKAREIAAYIGICPYEHSSGESVYRRPHSRGNGSGDIRKLLYLSALSLRTHEDYFKEYFLRKVKEGKPKRLVLNNIANKLLRIICAVMRSGRPYIPGYQSIHPGALV

SEQ ID NO: 158401 - protein, 343 aa, unidentified
MENVMLAVGIDISKDDFHACLKEKTEGGTVKIKGTHSFSNDLQGFEKLTAWVLKREKQGTQVSYIMEATGTYYENLAYYLHDNGKRVFVVLPNKIKHFAKSMNIKTKTDKVDSGIIAQIGIERKLAIWKPMSANFKQLRDLSRERLSLKKEKSRAMCQLHAMEYSHQKTPRVLQIKNNLIEFYATSISQIETELAEIINADTELKTRIERIMKVKGLGMNTIVAVLCETNGFELFNNIRQVVSFAGLDVQMNESGTFKGKTRISKKGNARIRQCLFMPALSATVHNDKIKDLYERIVERNPDIKRKGVVAAMRKLLIIIFVLWKNGEEYNPQHVWGINANDIG

SEQ ID NO: 158402 - protein, 363 aa, unidentified
MKQLIKKQPRTANRKPERVAGLDLGDRYSHYCVLTGDGELVEECRLQNTEASLRKQFANEPRMRIALEAGTHSPWVCRLLESFGHEVLVANPRKIRAITSSESKNDRNDAEKLARFAACDPKLLSPIRHRSPERQQDLNLIHARSSLVRARTGLGNALRGLVKSAGGRLAACSPKSFPDKMRTAIPAELRPAAAPLVEQIAQLNLAIAGMDRQVEALGDKHPEIKLLRTVPGVGPIVAGCYVLTLDRPDIIQDNRQAGAFLGLRPRQSQSGDKNPQHGISKTGNTCLRSLLVQAAHYILGRFGPDSALRRWGLGLAASGGKRGKKRAVVAVARKLAVLLHSMWRNRTPFVPFPQRSTQATVAT

SEQ ID NO: 158403 - protein, 344 aa, unidentified
MDATTVGIDLAKNVFEIALADERGHIVERLRLSRARFDRFFVNRAACRIVMEACGSAHHHARRLSSQGHEVLLLPAQYARAYVRRNKTDAADAAALIEAARCPDIRPVPIKSVDQQALQQLHRLRSQWMAARTARINFLRGCLREFGVCIPVGAQRAIQSVRDALSNQHSPVPALLHHSLLELLAEIDSLEQRCKHIERELARLNEHDPIVERLLQIPGVGPLTATALRASVVDVQRFPSARHFASWLGLTSREHSSGERRRLGRISKQGDPYLRTLLIHGARAVLLAARSAQRRGSSLDRLRTWALDIQERRGHNKAAVALANKLARIVWATWRFERDFSSKP

SEQ ID NO: 158404 - protein, 415 aa, unidentified
MSAVSAGLPPAQFFAGLDWAAEVHAVCVMDHAGKIVDRFTIAHTADGITMLIRRLGKLAGPGDVQVGIERPNGRLVDLLLEAGHPVVPVSPNAIKAWRDGEVLSGAKSDAADAAVIAEYLRLRQHRLRVATPYSDDTRALRTVSRTRTDLVDMRVAATNQLSALLDDHWPGAKAVFADVESPISLEFLTRYPTPNSAKHLGEKRMQAFLTKHGYSGRRPATQLLERLRSAPAGASGEALTEALHDTVLALADVLKALNTAVKNLDRSATAHLGEHPDGEIFTSLPRSGQINAAQILAEWGDCRQAYEHPDSVAALAGCTPVTKESGKHRAVHFRWACNKRFRVALTTFADNSRHASPWAANIYNQARASGKDHPHAVRVLARAWIRIIWRCWHDGVPYDPAKHGAAAALNKPVAA

SEQ ID NO: 158405 - protein, 316 aa, unidentified
MLYVGIDIAKNKHDVTALNVQGKTVLKPLTFSNNKAGFELLDLSLRQLNQDCLIALEDTGHYAFNLLNFLHEQGYKVYTYNPLLIKEFAKSLSLRKTKTDKKDAHGIALKLLSDPNREQFQHDNRQVELKILARHIHRLKKKQSDWKVQYTRCLDIIFPELDKIVGKHSEYTYQLLTCYPNPQKRLEAGFDKLIEIKRLTASKIQDILSVAPRSIGTTSPAREFEIIENIKHYKRLIDKAEKCVNDLMAEFNSVITTVTGIGNRLGAVILAEIQNIHAFDNPAQLQAFAGLDSSIYQSGQIDLAGRMIKRGSPHLR

SEQ ID NO: 158406 - protein, 338 aa, unidentified
MKLYAAIDLHSNNSVLVILNEADRMVLQRRLPNNLERIREALCPYGEQIEGIAVESTYNWYWLVDGLMDAGYRVHLVNTAAVKQYEGLKYKEDVDDARWLAHLLRLGILPVGYICPKEARGVRDLMRKRNQWVGQRSRQILSIENMLSRDTGGRASANEIKRWQETDVDQLALAESSRLAVKSNLAVMHCLNEQIEKLEAEILKKAKLRPDYQGLLTVSGVGKVLALTIALETGEVSRFATVGDFSSYCRCVGSEHRSNGKKKGNGNVKNGNQYLAWAFVEAANFAVRYEPAVKRFYQRKCARTMPVVAIKAVAHKLARACYHVMRDRVPFDVQRAFA

SEQ ID NO: 158407 - protein, 339 aa, unidentified
MKAYAGIDLHSSNNFTAIIGDQDQRLYGKRLLNRLDNVLAALEPFKETLDGVVVESTFNWYWLVDGLKEHGYKLHLANPSAIKQYEGLKHTDDKWDSFWLAHMLRLNILPEGYIYPKEERPVRDLLRRRLLFVKHRTAHILSLQSMINRNRGTGMSVRAIKRLDEGDAEILFDQPHLVLAAKSNIAVIHFLKEKIKTIEKAVKTHIKLRDEFKYLLTISGIGDILALTIMLEVGDINRFPKVGDYSSYCRCVKSERLSNGKKKDENNRKNGNRYLSWAYVEAANFAIRFCPYSQAFYQRKMAKTKRIVAIKALSNKLARASYYIIRDQVPYDPEKLFSQ

SEQ ID NO: 158408 - protein, 322 aa, unidentified
MAMLSFGGIDVSKDRLDVVVLPEEECSSVPNDAAGWAELVERLRGFSITAIGIEPSGGYERGAMRALLAAGMPVRQVNPFKLRQFARASGVLAKNDPLDARMIASFVTIMPTRPAQRQTPAAERLAEMLAIRRQLSTEKVAAENGSRLLEDAMLQRLSRRRIVRLAADIDLLDKRIVEIVATDDALVHRYRLLTSMPGVGAVLACTLIALLPELGRMSRKQVAALVGVAPYAFESGTLKGRRCIWGGRAHVRQVLYMAAMSASNWNPVLKAFHDRLTAAGKLPKVVIVAVMRKMITMLNAMVRDDVVWADRLSGRHVLPTAR

SEQ ID NO: 158409 - protein, 347 aa, unidentified
MAAVMIGIDPHKGSHTAVAIGADEGPLGELRVRASAGQARRLLAWAVAWPERTWAIEGAAGLGHLLAQQLLAAGERVLDVQPKLGARVRLLAAGAVNKNDPNDAPSLAVAALRASSRREVTADDHAAVLKVRAKRHRDLGRARTQVACRLHAVLCELIPGGVSKRISAALAGQLLEGITHSGAVEAARCELAAAFLDDLRRTGAQMRDAKNKLTAAVQASGTTVTEVFGAGPIVAATVIGEVRDVSRFASRDHFAAYNGTAPIEVSSGRRKIYRLSRRGNRRPSHAIHMAAVTQVSHRHSPGRAYYDRKLAEGQTPKEALRSLKRRLSDVIFARLQTDAGRTPASPR

SEQ ID NO: 158410 - protein, 346 aa, unidentified
MKKIFIGIDFSKEKFDATVIKAEGVEERAERQHEVFDNKVSGFRRLLRWVKSVADEQDTGLWLFCGENTGGYSKALCNYLYGSGYDIWLENALSIKRSSALQRTKSDKADAGIIAEYAMRNYDQMRLYKPLSKNLERLREVFLYRHNLVKLKASMMVRKGEKKLTQDKSDISRFMSMSSKHLISEFNKKIAECDKRIEDIICEDEELLRNFEIITSVPGMGRQNAVCLMVYTDNFGRFDFDSRKIACYYGVAPFGRQSGTSVNTPPHVSPFANKLIKALLTQAALASINFCAQMAVYYHRLVEAGKKKPVAINNVKNKLLHVITAMVRKGEKYDPDYDYHAAINAA

SEQ ID NO: 158411 - protein, 411 aa, unidentified
MAIWCGIDWAEHHHDIALVDDGGKLIIKLHIDDDAAGFARLLTLLAEHGAGPETPVPIAIETAHGLLAAALVAAGYPLFPINPLAVARYRDRYSVSRAKSDAGDAFVLANVLRTDLDAHRPLPADSELAQAVRVLARAQQDAVWERQQTSNKLRSLLREYYPAALIAFPDLAQPVAIEVLQLAPTPTGAAKLTRARIHAALRRAGRQRNLDATVETVRSALRGEHLQQLPRVEAAMGEHALALLRAMAAAVHNIDRLTEALAQAFDQHPDAAVIISMPGLGPVLGARLLGEIGDDRARFADARGLKAFAGTAPVTRASGTKRAVTARVVRNKRLGQVGFLWAFSLLTASPGARAHYDRRREHGDKHAAACRNLANRYLGILHHCLQTGTTYDESTAFPSTDNQHAASSTAA

SEQ ID NO: 158412 - protein, 344 aa, unidentified
MVVIGIDAHKRTHTAVIIDGNGRQLATKTCGSSSKDRLALLRWAAKHGDDRVWAVEDCRNMTRRLEHDLLAAGERIVRVPPKLMAHARDAARTYGKSDPIDALAVARAALREDGPPVAHLDGPDRDVRLLVDHREDLLAERTRALNRLRWHLHELDPGRDPPARSLDRASALNRVSQRLADMPGTVARLAAAITDRCRQLTEDINALEAEISTLTEQLAPTLIAIPGCASLTAAKILGETAGVLRFRSAAAYARHNGTAPLPVWSSNRARHRLSRAGNRQLNAALHRIAMTQARCHPEARELIARRKADGDGGPEALRVLKRRLSDVIYQALRTDLTIRRPTAD

SEQ ID NO: 158413 - protein, 362 aa, unidentified
MNKGSKKSAVTTKPSKTVGLDIGDRYSYYCVLNADAELMEEGRIRTTEEALRRHFADSQRRRIALETGTHSPWISRLLQDLGHEVIVANARKLESISASRTKNDRHDAEQLARLAHSDPKLLSPVRHRSPERQRDLNLIRARSVLVRARTMIINAARGLVKSSGGRLPSCSSQSFEEKGKASLSAELADLVMPLLTQASSLSQQIKKMDQRIDQLRERYAEIGILRSAPGVGPLVAATYVLTLDHHQLLRQSRSAGALLGLRPGQSQSGDYDPQCCITKTGNSYLRSLLIQSAQYILSRFGPDSALRKWGLKLAGSGGKCGKKRAVVAVARKLSVILHRMWRSGQRFLAFPQSAIALAAVEA

SEQ ID NO: 158414 - protein, 345 aa, unidentified
MAKRIGASIAPAFSGVDVGSQELVLALRLDGSAVDGGSFPNNPAGIRSLVKRLKALKRPVFACMEATGVYFLRVAHAFAQAEGIRVMVANPRAIKNFAGAMNRRSKTDRVDARLIALYAEKADFVDWEPASETHQHLRLISRRIDERTRQKAADKNRLHSLRAGGSCPRCVEQDVRANIKSHEQSIKRLRKEAVALIMADEALRRRYQLLLSIPGVGKTTAVRLLAELSVMPGCLSARQWAAYAGLDPVHRESGTSVRTPSRISRAGNARLRNALFFAAMVAMRTDSHARAFTEKLTRKGKKKIQALVALMRKLLHAIWGMFKSSSTFNGSLLFPQLTPQPLTSQ

SEQ ID NO: 158415 - protein, 403 aa, unidentified
MVFIEYFGIDVGKGKSFIAHYSNNEFVKEFEITHDNNCFDSLKKYIKNFSGVYFLFEATGIYSKVLEKFCTDNKISFCVINPLEAKLLTNSLRNWKTDKSDAHKLAVLAKNINKKPSRNLLEEKYIKIRELTRYYEEINNQQNYLKNQLIQLLDMTFPELQNLFKDRYSKLALQVASKFSHPEFVDSNDIEELKKTINTGTEKNLSEKKKAQYANKLVEFSMASYPSVSKDSFLTDKLVYVIEDLLNLMKRNASIKQRLLVLAEEFEEFKIIKSIPGIGDLTAIMIIGELGDIKSFDSHKQLNAYVGIDIKRYQSGKTHFKDKINKRGNKHARSLFYLIIKNFLLGQRLFKNHIIDYYYKLKKQPNGKGHKTASVACINKLLKTIHYLVINNKEYDYHLSPHG

SEQ ID NO: 158416 - protein, 390 aa, unidentified
MQVIADQAEAPSAIRSNLGAIFVSLELSRSTWLITSLLPGGSEKMSKHSVPAGDICALLARFSELRQKAFTRTGKSFPIIVIQEAGLDGFWIHRVLQNEGIESHVVDPASIATSRRHRRAKTDRIDGETLLRTLLAYKRGEPRVCAMVKAPTPEEEDRRRLCRERKVLIAERVQHVNRIKGLLLCQGVSGYEALRRDRRQRLDESKTGDGRALPDHLKAQISRELARLELLLEQIKAMEAERDALFAAAKATMPASGPVAMLLEIKGIGPEFAAILWMEAFFRSFANRKQVAAYAGLAPTPWQSGSVDREQGVSKAGNPRLRTMLIQLAWLWLRHQPQSALALWFKERVSRNGGRFKKTTIVALARKLLVALWKYVTAGVIIEGAVMKPA

SEQ ID NO: 158417 - protein, 473 aa, unidentified
MARKKGKDPAGIGGPGLTGEPVEVSDEPAEVIARAAAIDVAKGSGMVCTRVPHESGPRRRVQRIWQVSARYSEIAALMAELAKLGIQRLVLESTSDYWRIWYYLAEAAGLEVWLVNARDAKHLPGRPKTDKLDCVWLCKLNERGMLRRSFVPPEAVRDLRALTRLRSRLAQDQARHQSRIEKILEDALLKISSVISDLMGASGRRFLVALVAGERAPDKLAALGDRRLKASPAQLEEALAGRFRDIHALEIGMLLELIDDITAKMARLDAEITARLARIPGIAPACAGCGEIGGGHAPSCPQAGAPVLSVIERLDELTGIGIDAAQVIVAELGTDKTTFPTPGHAAAWAKLASRTIQSGSTSKDGRTGKGNPYLRAVLGRAAMTAAKTDTYLGERYRRIARRRGKQKAIVAVSRTICEIAWMIITDPSVRFSELGPDYYARLDAGRQTRNKIRELERLNPGMKVTLTPAATAA

SEQ ID NO: 158418 - protein, 355 aa, unidentified
MHATTVAVDLAKEIFELAFADADHQIVQRKRLSRRTFGRVLENHAPVRVVMEACSSAHYWARRFVRQGHVVRLLPARDVRPYVRRNKTDRTDAAGLLEADRCAHIDAVPIKSPEQQGIQALHRLREQLKAQRTATINLIRGVLREFGIVIALGAAQVRPAVLAALEDGDSDLPMSLRHTLAEMLEHLANLTHNMSAIEQRLKQIAQHDPVCQRYCQVPGIGVLTATTVRASVGSLDRFRSGRHLAAWVGITPREHSSGTQRRLGRITRRGDGYLRMLLIHGARATLRAARVREQRHQPLTRLQTWALTTQHRIGHNKAAVALANKLVRRLWAMEHHGTGFDPDHVSVRRDRQPAN

SEQ ID NO: 158419 - protein, 348 aa, unidentified
MNTLARSVTGGVDTHLEFHVAAALDERGGLLGIERFDTTTRGYKKLLAWLEAFGPVVLVGVEGTSSYGAGLTRHLHAEGIAVVEVDRPNRQRRRRQGKSDPKDAVSAARAALSGDADGAAKTQDGNVEAIRVLRVARTSARSARSQALNQMRSLVSTAPEPIRGELRGLSVHRLLARASTYRPGTKRDVISLTKLTLRGLARRAIELEEEIRAYDAILEPLVTETAPELVSALGVGPDSAGALLVAAGDNPERLRSEAAFAHLCGAAPLDASSGKQQRHRFDPGGDPQANSALWHIVITRMVYDPRTTAYIERRMKSDQLTKKEAVRCLKRYVAREVFNLLPMDRLVA

SEQ ID NO: 158420 - protein, 367 aa, unidentified
MKKVSTAAVRQSRNISHPKLTIGLDLGDRNSCYCVLNEAGQIQLEQRVRTNAKALREVFGSMRRSRIALETGTHSPWISRLLGELGHEVIVAHARKVRLIGESRKKDDRLDAQTLARLARIDPELLCPVKHRSAQAQADLTVIRARAGLVRARTALVNTARSLAKSYGGRLRGCNVRNMNPEKAEGLSPELQAALEPLLNAIESLSERIVEYNDRIEALAQHSYPQVALLKQIKGVGTLIALTFLLTLEDPHRFRKSRDVGCYLGLQPGRRNSGQSEPQMHISKEGDPYLRTLLVQGAQHILGPFGVDCDLRRWGLKLAERGGKSGKKRAIIATARKLAVLLHHLWVSGEVYEPLHNGSRTTVAAVA

SEQ ID NO: 158421 - protein, 403 aa, unidentified
MSMNAVGIDVSKGKSMVAILRPFGEIVSTPFEVKHTVSGIRSLIEHIKAIDGESRIVMEHTGRYYEPLVRELSQADLFVSAVNPKLIKDFGDNSLRKVKSDKADAVKIARYTLDSWTELRQYSLMDEIRNQLKTMNRQFDFYMKHKTAMKNNLIGVLDQTYPGANTYFDSPAREDGSQKWVDFATTYWHVDCVRKLSLNAFINHYQKWCKRRKYNFSQSKAVEIYEASKEIVSVLPKDDLTKLIIKQAVEQLNMASRTVEQLRTMMNDAASKLPEYPVVMAMKGVGKSLGPQLMAEIGDVSRFTHKGAITAFAGVDPGVNESGSYEQKSVPASKRGSGTLRKTLFQVMDALIKTKPQDDPVYLFMDKKRSQGKPYYVYMTAGANKFLRIYYGRVKEYLSSLPK

SEQ ID NO: 158422 - protein, 341 aa, unidentified
MIGLDLAKNVFQVHGIDATGKVVVRRQLRRRQLEKFLAALPPGVVVGMEACSGAHHWGRVIEQLGHEARMMPAAYVKPYVKRNKNDGRDAEGICEAMTRPTMRFVAVKSLDSQAVAVLHRTRRLLVRQRTMSGNAFRSALAEFGLVAAAGLKGLRSLMELLADKASAIPDKARMPLRVLAGQWERLNADICKLEAEIVSAAKSDAVARRLMAIPGLGPIGATAILAAVVDARVFETARDFAAWLGLTPRQFGTGGKQRSGGISKQGDRTLRTLLTVGAASYLRARGTKDPWVRDLLARRPFKVVAVAYAAKMARMIWAMLVTGECYRAPDKSRSVAAQAPA

SEQ ID NO: 158423 - protein, 410 aa, unidentified
MQVKYARCAALDLGKDTLVAAIRLQEGSDVKQDCRTYGMTTTRLLELRDWLISCGVTHVLMEATGSYWKSVWRSLEGSFHLTLANPAQIRSLPGGKSDVKDARRMVELHAHGLIRGSFVPPADIDGLRELTRTRKQFVREISRHTQRIQKILDIANIKITGVITDVLGVSGRAMIKALIAGETDPHKLVSLAHPRLAASRAKLLEALDGRLTDNQRSLLGMHLRQVESLEKDIAQLDGEIGKAVEPFRQVVDRLKQIPGMSDVSVPAVLGEIGVDMSKFPTDGHLVSWARLCPRNDGSAGKIHSTRILKGAAWIKTLMTQAAWAASRKKDSYFRAQFLRLSRTTEKKKAIVAVAASMLTVIYHMIRDGTSYRDLGFNHFDTYDRAKSTKRLVTRLEKLGYNVQLTEVPAA

SEQ ID NO: 158424 - protein, 405 aa, unidentified
MSELEKDLVFAGVDTHKDTHTLCLLDHMGRAIGTFRFAADAKGYDALAGKIGGPATCVGVGIEGTGSYGAGLTRRLLELGYCVYEVMVPGRARRKPGRPKSDPADAEVAARQVLARVNLSKPKDQSGWTEELRQLMIARDRLVQATSAMINAAKSLIVTAPEDLRRSLEGLSRKNLRSALSTLDPAAGGIILALGSLGKAWDLQDREADAIEERMKRVLEANAPALLAIYGCGTVSAAALAVAGGGNPERLKSEAEFASLCGVAPLLASSGKTERHRLNRGGDRRANRALYQIAVTRMSYDQRTKDYVGKRKRDGKSKKEAIRCLKRYIAREVFRALRNPLEIKGPSWKDLRPARQALGITLVEAGKALNVGFQRVSYAETGRLMNVRFLEEYDAWLKSQAKRES

SEQ ID NO: 158425 - protein, 407 aa, unidentified
MELVALYKRVIGLDIHQAQITACALIEEPDGSTHVEQRQFGGFKRDRRELANWVASLRPDEVVMESTGIYWKSPYAALEAAGIRAKVVNARHVKNVPGRKTDVGDAHWLATLARAGLLRGSFVPPAKLRELRLIARQRQKLVGQLASEKNRLHKVLTDSGIRLGVVVSDLHGRSARAMVKAIIAGQPPHKVLDLASRRLKASREEIFDALQGELTASHRFVLDELMRHIEEIEARIARFDTRLLNELESERNALALLQTIPGVDLIGAAMLLVEIGTDMDAFGSPDRLASWVGICPGNNESAGKRKSGHVRKGNLYVRRLLCEFAHAASRTTSVFKSKFQSLVVRRGYKRAIIAIGHKILRTIFFMLKRREHYRDSAADYEALSVQRNAPRWIKALTKFGFMPPASA

SEQ ID NO: 158426 - protein, 351 aa, unidentified
MNISHYIGFDVHKKHINFCIKTADGTVVEEGKLLAQRAALRNWAAQQVAAWHGAMEATLFSAWIYDTLKPYAACLEMAHPLMLKAIAASKKKNDAIDARKIADLVRCHLLPACYVATPQIRELRRLLRYRNLVVRESVRMQNKIAGLLMESGAPFHKQKLHGKKYFAQLLDTLEEVPDSVKDLLNLSRSAMEMFQATQKRLLGELLAHPQLRQRVERLASIRGVGPVTALTWALEVGDPFRFSCSAQAMSYCGLTSALQSSADKQQRGPISKQRNPWLQTALIEAAKLAPRWNPQLAALHARELERGHRNRATLAVARKLVAYLLAVDKSGQPFQLRPLTAVIVPAAQQAS

SEQ ID NO: 158427 - protein, 356 aa, unidentified
MRKTDPAEIIIGIDTHKEAHAAVAINGLGARLGAMTLLASSRGYHEMESWAQSLGPVRAFGIEGTGSYGAGLARFLQERGHNVIEVNRPNRQIRHQHGKNDPLDAENAARAVLSGQARAAPKSGTSSVEMIRHLKVARDTAVKSRTQAMVTLKTIIVNAPAALRESLDGLTGKMTLIRHLAALRPGAMTSPTASAKATLRALARRWLMLDAEIKSHDADLDALTTACAPTLKEAHGMSTGTAAEMLILVGDNPERIRSEAAFAKLCGACPIPASSGKTSRHRLNRGGHRQANAALYRVVIIRMRSHPPTLDYVRRRTAEGKGKMEIIRCLKRFVAREIFGYLCRARRDPTTVHSTS

SEQ ID NO: 158428 - protein, 404 aa, unidentified
MTAAVASDSVDGNVFGGVDSHADTIHVAVISDNGGHLADAEFATTAPGYAAALAFLAAHGQVVAIGVEGTASYGAGFTRAARAHGFRVVEVNRPDRAERRRTGKSDPIDAYAAARAALSGRASSAPKDDTVAGIRALHNAARSAVKARTAALNQIGNILITAPDAIRAKYGHLKDTARTQAPARSRPAGDACHTGVLTALKSLARRVIDLTAEHDALTRALNTEVTTANPGLRAAYGVGPDTAAQLLITAGGNPERMRTEASFAALCGAAPVPASSGRTNRHRLSRGGDRTANAALYLIAPTRMAGDPRTREHVSRHTTAGRTKKEIIRLLKRAITREIFRCLSTTVTTPGIADLLPLRRAKNITLTAAAQHFGTWPTTISRLEKGTSRNDDLIHAYRQWLQAA

SEQ ID NO: 158429 - protein, 417 aa, unidentified
MGGESKMSRRCIGLDIHRDFCEVAVWEQGQVRSAGRIEARPEALAEYATALRPTDEVALEATSGARQVAQILEPHVGRVVIANTHRLAAISDSKHKTDRQDARTLAQLLAAGVLESCWLPDEGTRALRRRVSRRHNLVVARTRAKNEAMAVLHRNLSQRPPMSDPFGAKGRRWLGALELPSDEVETLSAALRQIDFLSGEVEVIERELARFAAGSAEARRLMTVPGVAMVTAVTFLAQVGEIERFASPKQLVGYLGLDPRVRQSGNGAAFTGRISKEGASLVRHVMVEAAHAGIRSPGPLRAFYERVRSRRGHAIAVVASARKMVSLFWHLLKRKEDYRHSIELVTQKKLRKVELLAGAPRRRGGGRCEGPNRDERREIDRDRARAAAEEYQRFVAERQQGTGTGNGGAAMQAAPRT

SEQ ID NO: 158430 - protein, 372 aa, unidentified
MASIIYVGMDVHTTNFTFCCYTADSDHGFAVAQTEPDYRQVIKYMERVQKQRGEECKFVCGYEAGCLGYSLYHQLTRCGVDCVILAPSTMHQEKGKRIKTDRRDAENIARCLAFSLYSPVYVPTTEDDAVKEYIRMRDDIKADLKRVKQQIIAFTTRHGFDFDGKSYWTQKHLKWLETLVFEHPLYKETLQEYLILYYMLDEKVAVYDTRIEEMSHLEHYEENVQKLCCFRGVAAHTALSLLVEVGDFQRFRSAKHFAAYLGLVPGEHSSSDKQIRTSITKAGNTHLRRLLVEAAQSYNRGAIGKKSAALKARQGGNPAEVIAYADKANERMQRKYYRIAFKSRHNIAKTAIARELACFVWGMMTGNISNAA

SEQ ID NO: 158431 - protein, 353 aa, unidentified
MEYIAFDAHKHYTLASVARPDGQLVREQRLPHERGALQQFLARCEPGSPVAVETIGNWYWIVDEIEAAGCVPKLVHARKAKLMMGAINKTDKLDVRGLNQLQRNGTLPTVWIPPGELRDQRDLPRTRMVLVRQRTQLKNRIHATLAKYALHDLEVSDLFGARGRALLRQRLELLPPCTAYTTQHLLEQVERLDHQVREFEQRLRAMFKPTPAIQRLLTLPGVGLTLAVVIALEVGDVARFPTAEKLAAYAGTTPRVHASGGKTRFGPSRPDVNRYLKWAFVEAANAICLNRGRAPHRHVTRLYERVARRKGHQKAIGAVARHLAEATYWVLTKQEFYREPQPTTVSSTGDKRG

SEQ ID NO: 158432 - protein, 438 aa, unidentified
MNESIAAAALEGVAAYIGIDWADQKHDVVLRSASEPHKVEHRVIEHKVEALQEWIGQLQQRFGGRGKILVCLEQSRGALIYHLMGYEFFELYPVNPKQLARYRETFSPGGAKDDGPDAELLCELLYCHRDRLRAWKPDSVLTRKLAFFNEDRREAVDERTRLSNTIKSQLKVYFPLALELLDQDTSTALAADLLLRWPSLEALQKQIPHQLRKFFYAHHCRGESTMLRRLQLIQQAQALTQDSAVIEPAAFHIQVLARQLKSLLADIGRYDQKIAQLFAAHPDRFLFDNLPGAGRVLAPRLLSALGSNPKRWASALEIATLYGIAPVRRASGQKSGQKGKKAKKGQKKASVLFRQACPKFLRQSFHEFAACSIRYCGWAKALYEAQRAQGNGHHAAVRVVAFKWIRILFACCKHRTPYDPERYLQALQQRGSPYANAC

SEQ ID NO: 158433 - protein, 415 aa, unidentified
MALKIVYKICCGIDVHKTFVVACIASTNDKGVTSYESHRFSTYTSGLKTLLQWLLDRNCKDVCMESTGKYWIPVYNILESDCSIVLAHPKYVKAIRGKKTDKKDAKWIADLFKHDLVAGSFMPPADIRQLRDLMRYRFKLTCFKSSEKNRLQNCLTVSNIQLGNVVSDTFGKSAQAILDKILENPADTSFDLEPLVYKSLKKKLPELRDAIDGYITPEQAGKLKVIKAHYENLESRKAELEELILALAAPYQQELAILQTAPGISSDFTAIGIISEIGTNMEAFPSAKHLCSWAGLTPTNNESAGKKKSVRVSKTGCYIKPLLVQCANAVVKSTKHPEMRNRYLRLKKRRGHKKAIIAIARMLLTALYHMLKNGENYNAELYQKSDLLPVDREITVEQALMIARNQGYKIKSATA

SEQ ID NO: 158434 - protein, 283 aa, unidentified
MCTVDGVGKVVWQGKCASTPEAMAATVQRRAPHVARIALETGPMSAWHYRSLIALGLPMVCVDARHAKAALAMQLNKTAANDAVGLAQIVRTGWYREVAVKSEHSHRTRGLLAARAKLVGMRKEVANQLRGLLKVFGHVIGAVGGEKFDARARELAAGDTTLTITTEALLTARAALAAQVARLDKLLLAQASQNSACQRLMTVPGVGAITATAFVSTIDDPTRFKHSTSVGAYLGLTPRRYQSGTMDVSGYISKTGDALLRCYLFEAATTLLSRVQKTSALKE

SEQ ID NO: 158435 - protein, 362 aa, unidentified
MRIIGCDLHARQQTLAMLDTETGEIVKMTLTHEGNNVREFYSTLPRPVRVGIEATGSMVWFVNLMEELGIECQVGNPAKIRAAEPRKQKHDRRDADLILTLLVENRFPAIWLPSKELQDLRALLRHRHQWVRMRTRIQNALQAIALANGLRRGPSLWSRDGQNTIASLPLAPHTAHRRSELQAMYVKFESDIEKLNQRVEEQAGQRSGARLLMTHPGVGPITALATDVFLGDPRRFTDGKALASYVGIIPREYSSGGRQKFGGLSKQGNPLLRFLWGEAGAHAVRRDPELQRFYRRKLVQKGLGKARMAVARKLGIRLWIMLRNKINYNEFCRRGQMQQKSGDACAGMPGTRYGATSHRPVD

SEQ ID NO: 158436 - protein, 408 aa, unidentified
MSPLPEHPFTAYVGIDWADTKHDICLQAAGDTRRESCCIRHQVAAIDEWANTLYLRFGGPVAVALELSKGPIVAALQKYEFLVLFPINPATLAKYREAFQPSGAKDDPGDAELALDLLLHHPERFGPLRPQSAAMRTMVSLVERRRQLVGDQTRLTNRLCDTLKQYYPQALEWFDDRGTVLFCDFLDRWPTLRSAKQARTATLEAFFHAHHCRSARRISARIGSIRGAAALTEDSAIIGPCRLHVLAAIAQFEHEIATVARTLPDYALFKSLPGAGAQLAPRLLAAFGEQRERFSSADELQKYAGIAPVTERSGKKSWVHWRLRCPKFLRQTFVEWAAQTIPRSFWAGAYYRQQRAKGSSHHIAVRALAFKWIRVLYRCWQTRTPYNETVYLNVLRKRGSLLLGKPGA

SEQ ID NO: 158437 - protein, 320 aa, unidentified
MDKKNQIEFEQVIERGCGIDVHKSIIVATIKGTGIRETTRNFDGFTQSIEQLRDWLYEYKVSHVAMESTGVYWKPIYNILEEGFEILLVNARHIKNVPGRKTDKKDSKWIAKLLLSGLLKGSFIPPKPIRELRDLTRYKRKVIQQVSSEKNRIQKLLEDANIKLSSVVSSMSGATATKIIDAMIDGEQDIEELLKFRHGKMQSSIEDLALSLQGKMTDHHRFMLRVIKESIAEKKQTIAKLDQQIQLQLKENELTLDAKLLETIPGVGKEGASYIIAEVGNNMDQFPNEQHLASWAGMSPGCNESAGKKKVVELPMGINI

SEQ ID NO: 158438 - protein, 411 aa, unidentified
MKEKACGLDLHKKFILAAIIDLGGATVEHRFSRTQTDLFALRGWVLFHDCEVVACESTSDYWIQVYDLFVGKIPVLIGNARDIKVISHKKTDTIDAVWIAKLALHDLIPASRIPDPETRDLRSLVRLRKFLVEKRTDLKNQVHHILDSCLFRLSTVFSDIFGKSGMLILTGVTEGKAVEEILATLPVRTRKRSEEIRSTLETTLPELALIRMQCCLNLIMELDTQIETLMQRVHQCVARQTRLLQILMSVPGIGYIAAVTLIAEIGNFTNFSSGDKLASWVGLVPTVNQSADHLRMGAITKRGSRTARWILVEIAQAAVRTRSSRFHAFFTRKVGVIGFSKAIVAVARKIVTILWHLVVNDEEYEETEGNRKQEIRIPKAKQPKLLTLNEMLRILAEANIFLKQSDPHGGG

SEQ ID NO: 158439 - protein, 351 aa, unidentified
MRYVGIDWAYRRAAWCALGEGGATVGEGVVAADEDGLARLVLGLGTDVRACVEMMSGAVWVRDRLAAAGWEVQVAHARKVRDVAPLACKTDKVDARVLAELRRRDLVPALWLPPLAERALREQLRRRMHLVRLRASAMNRIFGLLTQWGLRISLERLRAADGMELLAQRGVDETWRRSVAEALAVIDLLDERVAPLERDLRHAARDDERVVLLKTIPGVGDLLGLTLASEIGDVARFPTPRKLIGYAGLAPRVHQSGDRSHTGALSKAGSRTLRWAAVEAAHAAWRPTNPWHELYSDIAKRHGKNPAKSAVARKILIACWHILNRQQPFKPARSRASGTDVSASSSCFLAA

SEQ ID NO: 158440 - protein, 340 aa, unidentified
MQITTIGIDLAKSVFQVHGVDGSGAVVIQKKLRRSQVLSFLKMLPPCIVGMEACATSHYWAREIGALGHEVRLMAPSYVKAYVRRQKNDAADAEAICEAVTRPTMRFVPVKSADRQAVLVLHRARELLVRQRTMLINAIRGHCAEFGLIAPQGARRISELIEPMRQVVAQNLPDLARTTILMLANQLDVLASQINALERRLLAWHRQDQDSQRLATIPGVGIITATALSATITDPSLFRSGREFAAFLGLFPRQNSSGGKQRLGRISKKGDGYLRKLLVVGATSVIRRSRTSTAASASWINGLLERRPARVVTVAMANKTARIVWAVLRRGEIYRVQARA

SEQ ID NO: 158441 - protein, 405 aa, unidentified
MEVIYERCCGLDIHKASITACVNINGKKEIVRFGTMTDDLLCLTAFLKERRVQMTAMESTGSFWKPIFNILEVEGIEAILVNAAHIKAVPGRKTDVKDAEWISELLRLGLLKASFVKPRDQRELCELLRYRVSLIEERAREYNRLGKVLEGANIKLTSVASKMDTVSGMNMVRALSKGETDPELLASMAKGTMRSKMNELKRALNGLVQPHQQMILKSMLSHIDQLSELITTLDAEIDARMSKDAELIEALDEITGVGKASAQVIVGEIGTDMSRFPSADHLSSWAGMSPGNNESAGKKKSGKTKKANSTLKKTLVQCGRAAANSKGTYLNSQYHRIAARRGKNRAVVAVGHSILVICYHMIKNRTRYQDLGADFFHRRNEEALVVQSIRRLENLGYTVTVEKTA

SEQ ID NO: 158442 - protein, 483 aa, unidentified
MKSTPQEQNKGATNHPTQHHWDEMNRKQRREMMRKMQSEDLRLEVMHPDAAGIDIGNESHYASVPPSRDSQPVREFGCTTAELKAMADWLKQCRIRTVAMQSTGVYWVAVYDILEQAGLEVYLVNARDTKNLPGRKSDVQESQWLMKLHTYGLLRNSFRPTQQIRTMRTYWRQRNDLVQSASRHILRMQKALTQMNVQLANVLTDISGATGQAIIKAILAGERDPHKVAAFRDPRVKASEEQIAQSLEGNWQEDLLFVLKQEHEGYEFCQKQMAECDRQLQQYLQQREDRSHDAPLPEEKRKGRLKKKRANKPQFDLRGGLFRMTGTDLTRIDGIDVMTATTVISEAGYDMSKWKTENHFVSWLRLCPDNRISGNKVIGKGRLPTNNPISIALKMAASTLRESKTYLGAQFRRLRTRLGAPIAIKAMAAKLARLVYRMLRYGMKYVDQGAAVYELRHRELQIKRLKAKAEKLGYRVTPIPVAA

SEQ ID NO: 158443 - protein, 372 aa, unidentified
MTSIIYVGMDVHTTNYTLCCYSMEDDRFFAEVQVEPDVKNILKYLARIEKQQSRDCRIVCGYEAGCLGYSLYHQLHAHGIDCVILAPTTMMTKPGKRIKTDRRDARLISKCLAFHTYSPVYIPTEVDDAVKEYIRMRDDANSALARVKQQIIAFCIRHGKIHDGKSYWTNKHLEWLSSLDLGNKILSEVLQEYLIRYYQLREQVDMYDMRINELAQAEPYRQKVEKLGCFRGIAAHTALSFCVEVGDFRRFATAQQFASYLGLVPGECSSGDKQQYTSITKAGNSHLRKLLVETAQVFGRSATKSGKSVALKERQAKCDSLTVAYADKANARLKKKYFKIAMRSKVNIAKTAVAREMACFIWGMMTDNISCA

SEQ ID NO: 158444 - protein, 482 aa, unidentified
MKKRNIYLNRSQELLGLFEQAGNNAKVMCVPIDYAKKDHVVMFCNGYGDIVRKPFSVQNSPEGVEYLTQQVVRSCRHRAINRKHVFFGGEDPNSYAENFVNTLRSQRWLVASVNARDAKKQRANLQASTDRLDLMGIAVMLLNRRANCSPAQSGIYRNLRTLVRHRRKLVVMRTEVSNRIHTVVDRLFPGFLNERNTGICPFRRSSLWLMGNRFSARQIRRRNRAKLIEALRRYGTSEPGKAASKLQQYAAQVLSTPPEYIGTLQLSLTQHVKHYRCLQDNIEQAVKEIALWLAQTQGAFLTTVRGIGIVLAAGVTAEIGDPNEQKPVNNLVSYSGIIPRVKQSGGSEGKIYVGHVAKRCNRILKNYVVSSAVHLGFHGPPDLMADYKRRDAAGQHADFGIARRYLRMAMCLMRTSQVYMPLRLRSGRVKREERASYYLTMWPALCEKWKKLGALEAALAQDRPLGQWRDMVQQLYEIKLTL

SEQ ID NO: 158445 - protein, 362 aa, unidentified
MSQNQPEIQYATFLAIDWADQKHVWSLQQANCSTRERGEISHMPEAIEAWVAQMSQRFAGRPIAVAVEQSRGALVFMLSKYEQLHIFPVPPAMTANLRKAFYSSGAKNDPADADLLLDLVQMHRDKLRRLSPDTEATRRVQNLVEERRKLVDEKTAQGNRLEAHLKIYFPQIPHWFGDVDSPLVCALLKCWPTLEALQKAGPDTLRSFFRKHHCRKEELIDSRIKSIGEAMPALKDRAVVEAKVVVVKVLVQLIQVLHEGIEGLNRQIQEAAEAHPDFFIFDSLPGAGAVMAPRLLAAFGSQRERYQNAAEVQTLSGIAPVSESSGKSQWVHFRFACSKFLRQSFHEFAAHSIPQSQWARAS

SEQ ID NO: 158446 - protein, 363 aa, unidentified
MEEEKRRYVGIDLGKRDYTMAIIWRSGKMSIHKGKTSIQGRQWLYRQLVVGDKVALEAGNLAFLMAREIMERTGSEVRVLNASKLPFIWDAPTKTDKEDAMKLAHLIQERRDEKLPLVALPSEKEMERRKILASYGREMNHRTRYINTLHALFVHQGHTAVVKKDLATAERRLEAIDVLTGQEREEAEWILKYLELHEQRIGELKKKIRKEARTDEDMQLLQSVAGVGPLVSYAYVAHIGDGSRFSKGSQVGNYLGFVPRLDYSGTIERHGHITKRGNKYLRALLIQAAWSLVRSRNGGALRERYLYITRFQSKGKKKTIVSIGRRLAVIMFSILKNKNKYELRPWTGTQSKMDIMVEPAMSA

SEQ ID NO: 158447 - protein, 339 aa, unidentified
MGGQYVGIDLHRRRSVIYTMDADGERLDCVRIANDPWVLLEEVARAGSDAEVVIEATYGWYWAVDLLKDAGFSVHLSHPSGNDWGNRRVKNDERDARDLADLLRLGRLAEAWIAPSAVRELRELVRYRAKLVQLRSGLKAQVHAVMAKEGVLPQLGDMFGPRGQRLLDEMELADAYTVRVESLRDLIAVYDREVVMLERTIHQQLRGDRGYRAIQALNGVGPTMAAIFVAEIGDVNRFRSAEALCSWAGLTPRHRESDTKVVRGGISKMGSRLVRWAALEAIARYKGGSQLQGDFDRIAQRRGTNKARVAVARKLLTLVYYGLRDGEIRCLRDNTAVAA

SEQ ID NO: 158448 - protein, 328 aa, unidentified
MNSYKIVIGVDVSKNSFTATVLYDNKKETFEVKSDPVEFEMKVKPYLKKFKKSDMLIIMEHTGVYHLKLANYLYENGYKVAVVNPFSIKKFMEAKMTRVKTDKADSFFIAEYGRTFFDGELYKPKSDVEKEIEVKLKILEDLQQQLTMLRNKRESLTYVPMKKLKENLEYYDELIRKIEKNIKELEKEIKELSKKNYQEEYKLLKSIPGISDRTIGMIISVYGNFERFKSVKDASSFIGINPSPYESAACVKKSVRIKKMGNPYARKILYMAALSAIRFNKYCRELYERLVSKGKAKKLALVAVAHKLLRQAYGVLKSRRPFDENFCT

SEQ ID NO: 158449 - protein, 344 aa, unidentified
MDKSITVIGLDLAKSVFQVHGINAEGEVVVRRKLSRSRVLAYFNQLEPCLVGMEACATAHYWGRELKALGHDVKLMPPQFVKPYLKSQKNDMRDAEAICEAVTRPTMRFVPIKAPDQQALLALYGVRDHWVRLSTRLINTLRGYLAEFGIVAARGRMGVEAILDTLADDQDDRIPDLARECLMPLANELRHVKRQILEMDRKILKAHRANPICHRLETIPGVGPVIATRVVAEVPDPKIFKSGRAFSAWVGLVPKQNSSGGRERMGQITKKGNPELRRLLVAGAISMIIRAKRSDFTRHPWLSRLLERKPMMVVAIAMANKIGRMIWALMVKGEKFNPAKLMPA

SEQ ID NO: 158450 - protein, 341 aa, unidentified
MSTFYYVGLDIHKKSIAYCVKRIDGKLVQQGTVSAERKALQQWYSKLPGPWYGAMEATIFTGWVYDFLKPHAIELKVAHPAMLKAITAAKKKNDRADAEKIADLLRVNLLPECHMMPEELRELRRVLRYRNMVVRTAVKMKNKMSGLLMEVGAQYNKKRLHGKKYFSELLERVADVPHSVKELLKLSRGSFELFNATQKKLIGALRENKIIKERVQRLTSIPGVGEITALTWVLEIGEASRFSSSRQAISYCGLCSAQHESAGNEQRGPISKQRNKHLQTILIEAAKLAPHWNEQLALLYEKELMRGHKNRATISVARKLVEFMLAVDRRETEFKLSNKIA

SEQ ID NO: 158451 - protein, 349 aa, unidentified
MKYYVGLDVAMEETAICIVDDERRIVREGKAASEPEAIAAFLSATGLTFERVGIEAGPLAPWLCDGLAVAGLPVICIDARHMKAAVSAMPVKTDRIDARNIAFAMQVGWYRTVHLKRPEARKLRLLLSSRQMLLRARIDLDNHIRGVLKAFGLKVGKVATGQFEARVWELIDEGDAQIRWIVGTLLTTRAAVVSQLALLHRAVLAVVKQDQVCRRLMTVPGVGALTALAFRTAVDEPERFASSAAVGAYFGLTPSKYASGETDYTGHITKCGDKAVRVLLCEAANALLTRVSRWSWLKRWGLEVLKRRGKMRAQVAVARRLAVIMHRMWLDGTDFRWQREPDAQVGAAA

SEQ ID NO: 158452 - protein, 333 aa, unidentified
MSNILNPNAAGIDIASKEHFVAVPQDCCQESVRCFESFTKDLHQIASWLKQCRIETIAMESTGIYWYHLYTVLQDYGFEVFLVNAYHVKNVPGRKSDVSDARWLQQLHCFGLLNGCFQPDNLTRTLRNYVRQRKHIIKQMGRETQRMQKSLEQMNIKLNNVLRDINGKTGKTIIEKILQGERNAEELVKYRESGIKASRETFIKSLEGNWREEQLFNLQQAYDHYHFLQSQLEQCDKKSEKIVIQMADSSIPKKKIPKVRRQKNQPFFEVEQHLYNALGVDVTAIFGVKVITALTVFSETGSNLKEKFPTPKQFLSWLNVVPDNKISGGKINI

SEQ ID NO: 158453 - protein, 347 aa, unidentified
MRFYTGQHQHYCGIDLHAATMYVCILDAAGEIRVHRNVKSNPEALLEIIASYRDGLVVAAECTFTWYWLADLCARENIPFVLGHALAMKAIHGGKAKNDKIDSHKIAVLLRGGMLPQAYVYPAAMRATRDLLRRRLHFVRKRGQLLAHIQNTIHQYNLDPFGKRIAYPANREGLLEHFPDPAVRKSVEVDLALLERYDTLIADLELTIVAHAKRHDADAFHRLRSVPGIGKILALTILYEIHDVSRFDRVQQFASYARLVKCVHESAGKKLGTGGSKQGNVHLKWAFSEAAVLYLRHGVDGKKLLARLERKHGKGKALSILAHKIGRAVYYILARGTVFSHEKFANA

SEQ ID NO: 158454 - protein, 339 aa, unidentified
MNYYIGIDLHSTNTYVGVIDQENRKVFSKKFPNQLDTIIQALEPFRSAVAGVVVESTYNWYWLVDGLKEKGYRVHLANPSAIKQYEGLKHADDVTDAFHLANVLRLGILPEGYIYPQAERPVRDLLRKRLHLVQQRTAQILSVQNLLTRNLALRMTAADVKKLNVWDAGQLFTERHLILSAAASIGTIGFLGARIKELEKAVRTAGNLKRDYHLLQTVPGIGVILALTIMYETGEISRFARVGNYVSYCRCVKSTRLSNGKSKGAGNRKNGNRHLSWAFVEAANIAVWNYGYVKSYYQRKAARTNTVVAIKAVAHKLARACYHIISQQQAFDPKRAFAY

SEQ ID NO: 158455 - protein, 294 aa, unidentified
MSQPNLQCMGIDVAKLSLDIATTDTIEPFTVGNDEDGFAVITDKLKHTKINLILMEATGGLEAAIACKLQSEGYDVVVINPRQARDFARSMGYLAKTDKLDAAMLAQLALVIDRHPDRSRYIRHLPDEARAVLAAMVVRRRQLNHMLVAERNRLYPSHPQSRKSIDNIIDALQNELDRINEQMKQHMTAFFQEQARLIGSVKGVGDITVASLIAELPEQGKLNRREISALTGVAPLNRDSGKMRGKRTTFGGRAGVRATLNAYSALFDHGLASKSDQRFASIRSTGNLTFSTAF

SEQ ID NO: 158456 - protein, 477 aa, unidentified
MPLLGRNHNHTNMKSKTPKSKKEKKKISVEQGWEAINPQAAGIDIGAKEHFACVPAKATPKNVRSFGTCTADLNALADWFKECGVTSVAMEATGVYWIPVFQILEERGLAVILVNARQTKNVAGRKSDVQDCQWIQRLHTYGLLQGSFRPEDAYCVLRTYLRYRDELVSARSTQCQHMQKALQQMNVQLVQVLSDVMGVSGRAIIQAILEGERDPVKLANLVDRRVRATPIQIQKALEGDYRAEHLFVLRQAFSLYGTYEEKINACDEQIVRETATLSDKVDPQHKPLPPRKEGRPASKDKMQGQDMREVLYRKFGADLTAIEGIGVTTALVVLTEVGPDVSGFKTEKHFCSWLGLCPDNRISGGKVLSSHTRRVINRASDALRMAAVTLERSQSALGGFYRRMKGRLGAAEAITATAHKLARIIYRLIKHGEAYVRQGMEDYERKFQELKLHALKKTALSMGFNLIARQEVTSPVS

SEQ ID NO: 158457 - protein, 412 aa, unidentified
MLKIVYPICCGIDVHKKFLIACIAFTNDKGITTYKSHRFSTFTNDLRKLSEWLTSNSCTDVCMESTGKYWIPVYNILEATCKITLAHPKYVKAIRGKKTDKKDAKWIADLFKHDLVAGSFMPPLPIRQLRDLMRYRFKLTNFKSSEKNRIQNCLTVSNIQLANVVSDTFGKSSMRIIDYLLENPDDKDFDFVPLLHASMLGKVDKIRLALDGMITLEQQRKINIILQHYNGLEKCKSNLESLILSLSEPYAKERDLVSTVPGIKNPFSAIAIISEIGVDMSVFPTAKHLCSWAGVTPQNNESAGKKHSVRISRAGVYIKPLLVQCANAVVKSDKHPEIKGRYLSIKKRRGHKRAIIAIARMLLTAIYHILKNGEPYNPELYKKTQLIPASREITVELAILIARRHGYSVVKV

SEQ ID NO: 158458 - protein, 340 aa, unidentified
MLAVGVDTHKESLAACAVNEVGRPLAERAFANDSRGHQMFREWLKALPQPRRVGLEGAANFGAVLARVLLDADEDVREVPSILTRRERRRTGRLGKSDPIDALAIARVVARDEHLPPALPTQASEDLKALVDYRDQLISERTRVQNRLHADLQILVPGYRAKVRRLATSPQRARAAALLSAAAGIRAELAGRRLERLEELDADVAILTKRIKTAVRASGTRLVSIVGVGAITAAKLLGETGDPRRFRSMGGFAMACGAAPIPASSGQTNRHRLNRGGNRQLNRALHTIALVQARVDPRARTFVDRKQAEGKTWLESIRCLKRHLADVVYRRMVADLVETP

SEQ ID NO: 158459 - protein, 392 aa, unidentified
MYIVGIDIGKNHHEASIVSPEGKQIGHSLRFATTHKGADSLMSFIFNNIGNSSCIFGMEATGHYWYPIYSFLKARGYTIYVINPIQSDSLRKMYIRQTKNDSIDSFLIAEVIRFGQFTTTSMADENILAMRQLCRYRDSVISSRTEIKLRISTIMEQIFPEYEKQFSSLWLSTSMGILEKYLTPENIENAPIDELFEIIKDKSHNKLTMKKAISIREAAADTFGIKIAQDAFSFQLKQLIDRMNFLDKQIEALDCQILEYYEKFDCYLHTIPGIGMIAAATILAEIGDINRFKSSSALVAFAGIDPTVRQSGEFSNTHNHMSKRGSPYLRHAIFLAATTCSFHNSPLNAYYKKKREQGKHHLTATGAVARKLTTVIYAVLRDGKPYEPKKFC

SEQ ID NO: 158460 - protein, 357 aa, unidentified
MPSSDAKYIGLDVHKEAIAIAVLNRVGKVVMESIVETKASTLLDFLHGLRGELHVTLEEGTWAAWLYEVLKPHVAELVVCNPRRNALLKEGSKSDKIDARKLAELLRSGMLRAVYHGENGLRALRELVRSYEAVSKDVRRVMNRLKALYRGWGIPCKGIQVYGRRHRQQWLEKLRESGVRRRAELFYQQLDALQDLRHTVRGELLVESRKYPAVKILRRIPFIGPLRAAELVALMQTPQRFRSKRQLWTYSGLAVVTHDSAQYRYVHGQLQRAKKPQQVRGLNRNHNHAMKEILKSAAESASRRAGPCRDFYEGLLAKGIKPELARLTLARKIAAIILTLWKKGESFDAKHVKPQAA

SEQ ID NO: 158461 - protein, 340 aa, unidentified
MEYGAIDLHTRRSQIRIVSEEGAVVLDRRIDTRAPAFTRVFGERPPMRILIESGTESEWVAQGLEALGHDVIVADPNFVAMYGERTRRVKTDRRDVAALARACRTGVYRRAHRIGAATRTRRQQLRVREQLVRTRTSTVNALRAILRQQGLRLATGHPETILARLATLDLDDTVQAVLAPLIAVLRALATELRTADRWATTTAEADPTIHRLMTVPGVGPVTALTYAATLDTPERFGGEAARASAYLGLVPREYSSGERQHRGRITKAGPPTVRSLLVQAAWSIWIRPGVAGAALHAWVTRLAARRGRRVAIVALARRVGRILFAVWRDAVPFRVAPRAA

SEQ ID NO: 158462 - protein, 414 aa, unidentified
MSYKIAGIDVHKKVLMVVVVDASTPEEKPERRRFATMPSELRRLSTWLREQGVEEAVMESTAQYWRSVWLELEPYMRLQLAQAFSNRAPRGRKHDFKDAERLVRRLIANELILSFVPDGEQRTWRNMTRMKTQLTRDRVRLQNQMECLLEEMRIKLSIVVSDLLGVSGLRILRALAEGETDPRRLALLGDDRLKCSEEQLVDALTGRPQPMHREMLALQLERLQLIDRQIEKLNGLIAQAMKPHQEAVIRLAEVPGLGVDSAQQVISEVGVQASTFPSAAELTSWVGTCPGKDESAEVNHSSRSAKGNKYLRRTLNQAAHAAVKKKGSHFQAVFRRLLPRLGYKSAIWAIAHRLCRVIWKILHEGVRFIEHGSESDPKVREHRARILARALRKLGYDVALTPIHPAMTAQAMQT

SEQ ID NO: 158463 - protein, 391 aa, unidentified
MERPMPQRNDLSRSLLALDQNSTIIAVIEMSRSNWLVAGVIPGVDRQPLKKLEPDEEGLLHLLRRWQDEAARAGRTISRIAVAFEAGRDGFWLARWLRARGIAAYVIHPASIPVSREHRRAKTDRLDTELLKRAFLGWLRGEPNHCGMAAVPTLEQEDAKRPNREREVLVGERTRIVNRMKGTLARLGIRGFKPALPRAPERLETLRTPEGATLPPNTRAELQRDMARLRFVTDQIRELEAARAERLEHAPETGPNAMIRLLARVVGVGIETADMLVQEVLSRNLRDRRAVARYAGLTGAPDESGAKRREKGLAKAGNARVRRGMIQLAWRFLLFQKDSALSQWYRARTTDARGATRKTLIVALARKLLIALWRFGATGAVPQGVVLRPAA

SEQ ID NO: 158464 - protein, 341 aa, unidentified
MNIKRVGIDLAKQVFQVHGVDYQDKVVLRKQLRRNQLLSYFATLPPCLIGMEACGGAHHWARELQKLGHTVKLIAPQFVKPYVKSNKNDANDAEAICAAVGRPTMRFVSVKTIAQQDLQAIHRIRSELVRQRTAKVNQIRGFLAEYGLVVGRQVATLRRALPELLEDAENGLSFDFRALLEDLRQDLIRLDERVAEMDKKVHTLADSMPAAKLLQSIPGIGPISATAIVCAVGDGKQFKRGRDLAAWLGLTPRQQSSGGKDRLLGISKRGDTYLRTLLIQGAKSVLKVVDKKTDPRSLWLQNLCARKHKNIAAVALANKNARIAWALLSNETSYLPEGKPA

SEQ ID NO: 158465 - protein, 322 aa, unidentified
MAVIGVDIAKRSFDLAVLQSNGKHRTKGRLSNDPSGFAVFADWLQQHAEPGAWIVMEATGTYHEALAEHFHALGYRIAVLNPAQIARYAQSQLQRSKTDKLDAKLIATYGQRHEDSLRAWHPEPVSIRTLRALTRRLEDLQSLRQMELNRLEISPEKVQDSIRAVLQRLDEQIAWTLEQIKRHIDDDPDLRGKRDLLVSIDGIADKTAALILAELGDIDRFADARAVTAFAGLNPRLQESGLARGHTCISRMGSVRLRSALYLPAVVALTYNPAIKAQAERLKARGKKGKQTVCAAMRKLLTIAYGVLKSGKPFDPALAIAH

SEQ ID NO: 158466 - protein, 334 aa, unidentified
MEQITTVGIDLAKRVFALHGVDAAGQVVLRRTVRREQLVELMAGLSPCLVGMEAGSGAHQWARRFQELGHTVRLMAAKFVSPYRRNGKNDGNDAEAICEAVSRPGMRFVPVKSVEQQALLTLHRVRQGFIAERTATINRIRGLLAEFGVALPLRSVTVRRQALQAAESLPGLARRAIEDLCNHLRDLDSRIVDYDRELEQQARQSEPAQRLMKIRGIGPLSALAVVATVGDSRDFRSGRQFAAWLGLTPRQHSSGGKSRLGAITKHGDRYLRTLFILGARSVLHTAARHTDRMSRWVMSLEQRRGYQRTLVAIASKNARIAWALLSKNQELRMT

SEQ ID NO: 158467 - protein, 313 aa, unidentified
MAKPSYVGLDISKSFIDLHQLPQDRAARFENEPEGIAKLVSYLKKRRPALAVLEATGGYEANIAAELAAAKFNVAVVNPRQVRNYARALNILAKTDAIDAKVLARFAQDVRPEPRELPDAQEQLLKACVTRRKQLIEMLVAEKHRLSRASNVAVRDSLKRTISFIQSQLDALDGDIQSTIRNSPFWLEKDQLLQSVPGIGPSTSSTLLAQLPELGKLNRRQIAALVGVAPMNRDSGTLHGKRSITGGRTSVRNALYMAAVATVRHNPVIREFYLKLREAGKLPKVALTACMRKIIVLLNSILKSERPFQNSFA

SEQ ID NO: 158468 - protein, 387 aa, unidentified
MPQPNDLSRSLIALDQNSTIIAVVELSQSSWLVAGMLPGIERQARKKLEPSPERLLGLLHRWRDEAVRAGGTITRIALAFEAGRDGFWLARWLEARGVETHVIHASSLAVSQEHRRAKTDRLDTELLKRGFLGWLRGERGHCSMARVPTIAEEDAKRPNRERDGLVGERTRIVNRIKSTLARLGIRNFKPTLRKAAERLATVHTPEGMPLPPNTLAELQRDMARLGFVVSQIREIEDARQKRLEQQPETGPHAMVRQLARIVGVGVETADMLVHEVLSRPMRDRRAVARYAGLTGSPDESGAQRREQGLARAGNARVRRGMIQLAWRFLQFQRESALALWYRARTADSRIGTRKTMIVALARKLILALWRFVTTGETLEGVVLRPAS

SEQ ID NO: 158469 - protein, 392 aa, unidentified
MYIVGIDIGKNHHEASIVSPEGKQIGRSLRFATTHKGADSLMSFIFKNIGNSPCVFGMEATGHYWYPIYSFLKAKGYTIYVINPIQSDSLRKMYIRQTKNDSIDSFLIAEVIRFGQFGTTSMADENILAMRQLCRYRDSVISSRTEIKLRIGTIMEQIFPEYEKQFSSLWVSTSMGILEKYLTPENIENAPIDELFEIIKDKSHNRLTRAKAISIKEAAADTFGIKIAQDAFSFQLKQLIDRMNFLDKQIEALDCQILEYYEKFDCYLHTIPGIGMIAAATILAEIGDISRFKNSSALVAFAGIDPTVRQSGEFNSTHNHMSKRGSPYLRHAIFLAATTCSFHNSPLNAYYKKKRDQGKHHLTATGAVARKLTTVIYAVLRDSKPYEPKKFC

SEQ ID NO: 158470 - protein, 350 aa, unidentified
MTEAYDGRQVVGMDLHRRRSVLVRMTADGKRLETARITNGAAELRREIAKAGEHPQVVLEATYGWYWAADELAAAGAEVHLAHPLGVRAFTYRRVKNDEKDAADLADLLRMGRLAEAWIAPPEVRELRELTRYRIKLVRLRSSGKAQVHAVLAKLGIPVTCSDLFGTWGSAWLDGLDLPQPYAGKVASLRELTGWLSAEVGLLDAVIADLLGSYQPYHAVRALPGLGPVLAAVTVAEIGDISRFPSPGQLCSWAGLTPRHRESDTKVSRGHLTKQGSPILRWAMVEAIQHQPDGSPPRELKDRIIARRGDQARNIAKAAAARKLLTCVFYAMRDGQVRSLTARRHTAEAG

SEQ ID NO: 158471 - protein, 352 aa, unidentified
MERYVGVDPHGGTCTFGVMSAAGKRLKSLVVETNGRALVEAVRGIGGRVHLCLEEGTQSAWLYELFQPHVTEIAVTVPGKKKGSKDDLRDAFARANELRTGAIETRVFKAPEHLAGLRNAVRAYGFATTDVVRAKNRLKSVFLSRGISTDASVYEPAKRTAWLKQLSSPHRELAEWLGRQLDRLEPLREEAEGLLLSESKKHPIIKKLSTAPGMGPIRTAQVVGIVATPERFRTRRQFWSYSGLGVVTESSSDWVRDRTGKLVRAQNVQTRGLSRKRHPRLKAVFKGAATTVIAQLAEDPLHADYQRMLKSGIRPTMAKLTLARKIAATVLSMWKHQEVYDPKRHRPTPEQK

SEQ ID NO: 158472 - protein, 355 aa, unidentified
MRTLQITEKPDYQGEGVYVGIDVHKKNWGICILTEHLEHKVFSQPPRPGALAKYLFKHFPNADYYSAYEAGFSGFWIDRELRSLGISNLVANPVDIPTTDKERKRKNDTRDARKIAKELRNGNLHGIYVPDPDILQDRLLLRTRQKLLSDIRRCKCRIKSQLNFLGTAIPEELDKPYWCKGFRSWLRTALSESSGNFLINLQLESLEEIERQKKRIEKQIVLLAKEKYKANVDLLRSIPGIGILAAMTLITELVDIGRFKTTDQFHAFLGLIPNVYASGDTEKVGRITQRNNAFLRPILIQSAWKAAKLDPSLSLAYTKLCKTMKPNRAIIRIAKKLSNRVRYVWKNQVKYEIYL

SEQ ID NO: 158473 - protein, 392 aa, unidentified
MVVSVGIDVSKDKHDCFILSSEGEVLVDVFTISNTMDGFNCLLQRIQDCTTPQDKMKVGLEATGHYSYNLLGFLLDNGLATYVLNPLRTNLYRKSLSLRKTKTDRVDARTIASMLLSDAGLKPYTSTAYHNEELKSLTRYRFDKVKERAKLKSSIARLVCILFPELEKLVPSLHIASVYALLEEFPGAKQVANAHLTRLKALLETASNGHYKRDMALEIRDAARNSIGSWMPAKSLELQHTIRLIRELDNEIAEIEEQIQAIMDELNSPITTIPGLGFRMAAMIFAEVGDFNRFDSPDKLLAYAGMSPSTYQSGQLKNCYPHMEKRGSRYLRYALYNVTKYVCHWNPAFAAYLAKKRAEGKHYNVALSHAAKKLLRLIFAMERSRQPYCAAP

SEQ ID NO: 158474 - protein, 337 aa, unidentified
MEKIITIGLDLAKNVFQVHGVDASGAVVLRRRLRRCEMVKAFARIRPCLVGMEACGGAHYWARELTALGHEVKLLPPAYVKPYVKRGKSDAADAEAICEAVARPSMRFVPVKSPESQAVLSLHKVRGMLVGQRTQSANTLRSLLSEFGVIADQGIAAIRKVWAQLPEGALPAAARQALSELAFSLATLEERIAKLDKEILAQRRANPMCARLETIPGIGPIAASALAAHVPDAGVFTSGRHFSAWIGLTPRQNSSGGKERLGRISKQGNQDLRRLLVMGATSILRRAEKEQTPQGEWLRSLLARKPARLVITALANKLARIAWAIMAHGGVFRARTA

SEQ ID NO: 158475 - protein, 337 aa, unidentified
MQVTTIGVDLAKSVFQVHGVDAGGRTVLVKTLRRGQLLTLFSRLSPCLVGLEACGSAHYWAREIAALGHQVRLIPPAYVKAYVRRNKTDAADAAAICEAVGRPSMRFVSVKTPERQAVLSMHKARALLVTQRTRLTNAIRAHLAEYGLVAPAGREGFETPLLRLEAGALAIPRPLVIALQAMAGPLAPLKAAIGAVEKQIRAWHAADRQSRNLATAPGFGPLVASAVAASLTDPAAFRSARAYAASLGLTPRIEASGGKARIGRMSKRGDRYIRRLLVNGAQALLNSKGARADPWIARLLAEKSRKLAAVAVANKLARIAYAMISSGQPYQAPAITA

SEQ ID NO: 158476 - protein, 340 aa, unidentified
MNITTVGIDIAKNVFAVHCIDQNGKAVLVKPKVSRAALSELIAGLPPCVIGMEACSGAHYWARLFRQYGHDVRLMAPKFVSPYRMAGKTGKNDAADAIAICEAVQRPHMRFVPVKDESQQAMQCLHRTRQGFIQERTATYNRLRGLISEFGVIAPQSTDALRHVVSDQKETLPVQVRLCIDDLLTHVTNIEEKIAEYDRVLSRVAKTDHRSQQLMELKGVGPTTASALVASIGNAHDFKNGRQLAAWLGLTPSQYSSGGKSKLGRITKAGDAYLRTLLVQGARSVMVGAENRTDPFSRWVCSLIGRRGYWRAVVAIAAKNARLCWASLYYGDDFRLYSTT

SEQ ID NO: 158477 - protein, 400 aa, unidentified
MRVVFGIDVSKVSSEVAILVNGEKVHNYTMSNDAIGFSRLLGDLKTVHKPEIIFEATGVYSRRLQAFLDEHSYAYTRLNPLEAKKQLDSLRVRKTDQIDAEKLAQSQFVLNRKPTYVQEEVYQDLRDLSRFYQNLTEDIVRAKNRLHKVLQVTFPELETILSTPTGEQYWNLVTAFPCKDFVLELSKDELSKSIRLSTSKRISDKRVAYLAEKLTALANQSYCAVKKTSPIMEEVRYYAKELLRLSEQRQAVLDEMVELAQPLPEYDILLSIPGIAETTATSIIGELGDIRRFQSANQINAFIGIDLRHYESGNFIAKEHITKRGNPYARKILFKCIHNIASASHTNPCHIADFYEKRKRQSQMTSTKPHTIASIHRLIRTMYYLITHNKLYDYISTQNR

SEQ ID NO: 158478 - protein, 328 aa, unidentified
MCTLGIDVSKNKIDLCLLTAGPGGKKKHKVLTNEPAVARKVVDWLNAQKCVPESVTVVLEATGIYHENLAYGLHEAGVSVCMANPCRVREFAHGMDILNKNDAVDAFVLACYGELKSPAVWVPPSPEVRKLRALLRQRDALREEVQRTVNRLEKANSTSTPQEVIRSLERTKSWLNEELARIEKLITDHTDNDPGLKADLDLLKSIKGVKEQVGREMLALLKDGMFKSASQVAAYLGLTPVEKTSGSSVRGRPHMSKTGPSGVRAKLYVAALTASRWNKQAKAIYERLVAKGKAKKAALGAVMRKLVHLCFGVLKTRLPWDENYVATA

SEQ ID NO: 158479 - protein, 369 aa, unidentified
MKNRLLYVGLDVHKNTTDVAIAGGRSNGKVRSYGKIASTLDALNKLIKRLQDGDKELRFVYEAGPCGYQIYRHLDAKGIHCSVVAPSMIPRRSGDRIKTDRRDAINLVRLFRAGELTSIYVPASEDEAIRDLIRCRDDMKRFERKARQRLLSFLLRHGHQYSGKKNWTKGFYSWLATVRFFHSAQQITLQEYIDVTNECSERIKRITQQIQVHVEEWNRAPFVKAYQALRGVSIIVAATVVAEIGDMNRFQSPKQLMAYLGLIPSEHSSGKTVRRGPITKTGNSHVRRVLIEAAWTYKMQARISNILLKRQKGLPKSICDISWKAQTRLCARYRRLYARGKSRQTVVTAIARELSAFIWAIDKEIQLVV

SEQ ID NO: 158480 - protein, 340 aa, unidentified
MSLYGGIDLHSTNSVVVLLNDRDEVIYQKRLPNDLPTILGQLAPHHAEIQGLVVESTYNWYWLVDGLMDADYRVHLANPAAIQQYSGLKDSDDHSDARWLGHLLRLGVLPEGYIYPKADRAVRDLLRKRAHFVRQHTSNVLSVQNIMVRNTGSRCSVKRLHELTKKELNGLLPEAEQALAVTSSLAVLDCLGQQIKTLEKAVTQCLKHTPSYEQLLTVDGIGTILAQTIALETGNIGRFPSVGNYASYCRCVDSTKISNGKRKGKGNVKNGHPYLAWAYMEAAQFAIRFNPRAQRFYQRKLAQSNNNTILARKSVAHKLSRACYYIMRDLVPFEAMKAFG

SEQ ID NO: 158481 - protein, 326 aa, unidentified
MTTNTPSNVTTNTPTVYVGVDIAKATLQVHRQGRQTVLPNTPTAHRKLCKELKLLPAVHVVCEATGGYERDLVQALHKAKTPVSVVNPAQVRAAAQAQGQRAKTDAIDAAMLTDYGQRYQPPPTPPASPVQLQLVALTQWLKQLVEAQATAKTQAEHHHEPFVQKQHQQLLDYYAAQIQTVEDKLEALLDKDPVLEQRVETLDAIQGVGLRTALLVLAHMPELGQLNRQQVAALAGLAPWTRESGTMKGKRCIGGGRPEVRLALYMATLSAVRFNPVLCAFYQRLIGKGKLPKVALTAAMRKLLVFMNHQLKALAAEPQSAAQEKN

SEQ ID NO: 158482 - protein, 343 aa, unidentified
MQTIKTIGLDIAKSVFQVHGVDAAGQVVVRRKLKRRYVLAFFEKLPPCLVGIEACASSHHWSRELQTLGHTVRLMPPAYVKPYVKRQKNDAADAEAICEAVTRANMRFVATKTPEQQSGLVLHRTRHLFIRQQTAVINAIRTHLAEFGIVAPVGRNGVEQLLNVVANPNDKRVPEIARACLLALGAQLQRLKGQILEFDRMIRAWHRSSETSRRLDDCPGVGPALATALVATVADPKSFRSGRNFSAWIGLVPKQHSSGGKNRLGSISKQGDRYLRGLFVAGALAVIRSAKIHGSGHRPWLAALLARRPTKVAAIALANKIARMAWAMMAKGERYREPVALAA

SEQ ID NO: 158483 - protein, 331 aa, unidentified
MKIREIIGIDISKLDFHAFIHTTQVFTRFENSTKGFKALLKWVAKNSPHKQSQTLFVLEHTGRYSHNISYHFSANEIEFALVPGLEIKRSLGITRGKDDKIDAAKIALYGYRLRDEIKPTKLPGKQLDKLKRLLTLRDRMVRQRAGYKASLKEDEHVFCEEEAREIIEHQEDIIKALSSKISRIEKQMEDIIKANKKLNKLFKLLTSIKGVGKVTARYVIVYTAGFTKFATWRKFASYCGVAPFPHRSGTSVKGRNKVSNLANKKIKSLLTMCVISAIQSNPEMKAYYERRLKEGKPKMSTQNIIRNKLLARMFAVVKRGTPYVNTMKYAA

SEQ ID NO: 158484 - protein, 404 aa, unidentified
MDGIARYAGVDWASRSHAVCIVDEVGTALERFEVEHTEPGLRTLGRRLVKAGAMRVAIERPDGPVIDALFSAGLEVVVIASRHVKALRTRYGTAGNKDDRADAFLLADVLRTDGHRLRPLLADAPETVTLRATVRARKDLVQTRTRLTQQLRAQLELAFPGAVGLFADLDSPIALRFLLRFPSAAKAAWLSPKRLAAWLRSEGYCGRTSPEVLYQRLETAPAGVTGSEAEARAAVTVAFVRALLAVRDQVGELEARIREQLELHPDGVIFRSLPRAGQVRAAALLAEIGDVRERFPTPESLACLAGAAPSTRQSGQHLAVTFRFACDKKLRDALIDFAEDSRFGNVWAAEVYRRAIERKKTHPHAGRILARAWVYVLWRCWQDRVPYDPTRHRALQQVVLAKAA

SEQ ID NO: 158485 - protein, 410 aa, unidentified
MRKENIIYVGIDLHKETHTAVMLNCWNQKLGEITIENKPAEFHKLTRKVSRFVTEEKTSIYGLENAYGYGRILAVWLIEKGNIVKGVNTAMSYAQRKSVPMYQKSDSYDAEAVALVLINMLDRLPDAIPDDKYWTLSQLVNRRDNINVHQQKVKNQLHEQLCMAYPSYKKFFEDIGRPTALYFFGEYPSTVHLRGKTAEGLAGELRPVSHNNCSVKKAEKILELVRTDGETLRDCQESRDIITRGLVRDLQHYREQMLEVETAIKELLPYFHCTLMTMPGIDIVTAAEILSEIGNIERFPNASKLAKFAGIAPVNFSSAGKGKDVCPKQGNRRLQAIFYFLAIQMVQVSPSGTPRHPVFREYFQKKQDERKNKQQALICIARRLVNIVYGMLKNHTEYREPERRTEEETV

SEQ ID NO: 158486 - protein, 358 aa, unidentified
MLYVGLDVHSKRSSICILNGDGKIVKQELIKGRWPEVIDRLRGFTEPMSVCYEASCGYGNLHDRMAPLVKQITVAHPGQLRLIFKSKKKHDRVDAQKLAKLLYLDEVPRVQVPDLEVRGWRKLIEFRQKLLARRVACKNQIRALIRAQGLAAPRGLWGKKGIAWLKELPLQSSEKLALEMTLEEMSDYGQKIARVEKELAAIASGHPGVALLMTIPGVGIRTAEAFCAYVDDIKRFASSRQVGSYFGLVPCLDSSAGKDRFGHITCDGPPTVRKLLSEASWMAIRHNPALRSFFKRVMRDDPDRKKIALVATAHYLCRIMAAMLRTGEAWRRSDPSEQKDGGVPPAVQGAPPRKTPDA

SEQ ID NO: 158487 - protein, 353 aa, unidentified
MNSPMDENEVILGVDTHLDTHVGVLINTNGNLLGCLAVTTDTSGYLKLVTWANSFGMLKRAGVEGTGTYGAGLARVLRDHGIEVLEVNRPDRSKRRLQGKSDPTDAESAARSVLSGNATAIAKTQSGVAEAMRVVSVARRSAVRAKTQAINQLRALLVSAPQDIRERLWKTKPGDCAKGCARLRSRSATEFLNILTTSLCLLGKRWLALAEEVEKLDVILENLTRQHARRLREQFGVGPQTAAVLLSTAGDNPERLKSEAALAALCGVSPLPASSGKTVRHRLNRGGNRSANNALWTIAMVRMRGDPKTQSYVARRSSEGLSSKEIQRCLKRYIVRELYPLILADLADSARSC

SEQ ID NO: 158488 - protein, 450 aa, unidentified
MSPLALDVVTKTDKTPVLGRMLSKYVGRKTSSIENDITKVRNHSRQRGNIMRVVFGIDVSKASSEVAILVNGEKVHGYTIPNDAIGFNRLLGDLKTVHQPEIVFEATGVYSRRLQAFFEDNSYTYTRLNPLESKKQLDSLRVRKTDKIDAEKLAMSQFILNRKPSYVQEALYQELRDLSRFYQNLTEDIVCAKNRLHKVLQITFPELENILSAPTGEQYWHLVMTFPCNSFVLELDDDTLTAIIRQSTAKRISEKRVTYLVDKLTKLANQSYCAVKKTSPVIEEVKYYAGELLRLSEHRQGVVEEMVTLAQSLPEYEILLSIPGIAETTATSIIGELGDIRRFHSANQINAFIGIDLRHYESGNFLAKEHITKRGNPYARKILFKCIHNIASASHTNPCHIADFYEKRKRQSQVTSTKPHTIASIHRLIRTMYYLITHNKLYDYTSTQNR

SEQ ID NO: 158489 - protein, 424 aa, unidentified
MDGVADDDVIIDRVAAIDVGKAEVVCCARTPAPPDGRGRRGRVQEVRKSSTMTRSLIELGDWLASLGVTRVVMEATSDYWKPVFYVLEAAGFETWLVNARDVKHLPGRPKTDTLDAVWLCKVAERQMLRASFVAPPPIRRLRDLTRYRVDLVADRRRVKQRVEKLLEDAGIKLSVVASDIFGVSGRSMMQALVAGERDPGVLAQLALRSLRTKIPDLQEAFTGRFDEHHAFLLGGMLRQVDTLDADIAAVEVRIEELVNPFADQIARLTAIPGIGVTAARAIIAEIGVDMSRFPTAAHLASWARFAPGVNSSAGKTKGSGATGHGNKYLAGVLGEAAISASRTKTFLGERYRRIARRRGKQRALVAVGRSILIIIWHLLSESDAVFHDLGPDHYTNHIGSQRAIRNHIRGLNALGYTVTLNPAA

SEQ ID NO: 158490 - protein, 357 aa, unidentified
MKFYNRQHEFYCGIDLHANSMHVCVIDQAGNKHLHRNFNTKKPERFLIALQPFDKRDLVIGCESTFNWYWLADLCQQQNLAFLLGHALYMKAIHGGKTKSDSIDSEKLALLLRGGNFPVSYVYPRDMRGTRDLLRRRGTIVRRRSATLVHVQIVNHQQNLPAFEKKISYKSNREGVAERFEGDSVQRMVGLDIDLIDFYDEQIKKLDLYLEQHAKIDDPDTFFRLMSIPGVGRILAMTLLYEIHDIRRFPTVGDFLSYARLVKGSNSSAGKQYKPTGGKIGNPHLKWAFSEAITLLKRQSPAAKAFAERIEKKHNKARANTLLAIKLGRAVYWMWTRKCAFDPNIFLRSIRVSAERR

SEQ ID NO: 158491 - protein, 463 aa, unidentified
MKHNSTRERKEKSARLSVSLLERIQPDAAGIDCGQNSHFVAVPPERDPQPVHEFRTFTADLHRLADWLMQCGVKTVAMESTGVFWIPLYEILEQRGLQVVLVNARDVHNVPGRKSDVKDCEWLRELHSVGLLRASFRPAAAIVPLRSFMRQRETLVEEAATRIHRMQKALSEMNLKLHTVLTDLTGQTGLRIVRSILAGERNPERLAAHRDYHCHASQAEIVAALTGNYRTEHLFALRHNFATNEFLLKQIAECDGEIEALLTTLAAQQPPPSAPLPTARRRRASKHQPQFDIRGPLHRLTGGADLSQIDSIGPQTALQLIAEIGTDMRRWPSEYHFASWTSLAPNNRISGGRLLSSRTPPSANRVAAILRRCAMSVGKTSTALGAFYRRLAIRIGKAKAITATARKLALLVYRVLSGQLVYNDPGADAYHQLNRTRELKSLRKRARLLGFHLVDQTTGEVTT

SEQ ID NO: 158492 - protein, 431 aa, unidentified
MTNEMLQTNDTNTLATLTIRLLVAMEMSLKAWRLVMSPEGGTRKRVKTIEAGNYLALGQAVTEARERFKLPAQTAVVFCYEAGRDGFYPYRQLTEAGHEVWVIDSASIEVSRRKKQAKSDGIDGEKLAELMQRKARGEHKALRIVRVPSPEAEDERLLPREREIILQDLGRLRNQVESILFAHGYRDIPKTASGLKTWVAERRELAPQLRERLGREIERLTLLETQLHAVEKAMALKVKQEQGTGIAAVAGALMRLCGIGLVGAWVLSSEIFGWRQFRNRREVGAVLGLAPTPYSSGQDEREQGISKGGQPAGAVDAGGAVLALAALPARIGAGAMVQNEVWRGRQADAADRHRRPGAAAGDCLVALCRLWGRARRGHAEAGGQGLKGLYGSSKPQALRTRPRPPARPTGPADDHYRQNEEFDSDRARCAP

SEQ ID NO: 158493 - protein, 335 aa, unidentified
MQIYGIDLAKEKFDVSFFDLTSKKVSNQPSHKVVTNNLKGIGKFFKGLPSDAVLVAEHTGVYGDTLLKCCMDSNVKIAFVGGYVIHRYRATPDRAKTDVLDCALLRDFGERYPDKLKYKTFPEEALYELRQLARHREMLVEQRKQLITADRSEDCRPIRSLAVKRSMDRIKEMLDTEIAETEKEMLKVINGHDSIHHNYEIVKSVNGVGLVTAVELLVKTDNFTKITTARQYAAYAGTAPYEKSSGKMDKGAHISKIGNRRSKTLLYICAESARLHNKEIKLYYERRTLIDKKPRHYVLNAIANKLLRIIFTLVEKGEYYDANFIRQDPRVVKYN

SEQ ID NO: 158494 - protein, 371 aa, unidentified
MNSILYIGMDVHKENYTLCCYSFESDALFYKQTIAPDYKMILKYLDHLRNNFADEVEFVCGYEAGSLGYSLYHQLNDRGVKCVILAPTTMGITNTNHIKTDKRDAGNIARCLAFRTYSEVFVPTPGDNEVKEYIRMRDDQKKALKIIKQQILAFVLRHGHKFTEGRNYWTGKHIKWLKSLNPGGILQESLDEYLITYEYLADKVERMDKRIEELAGGERYQENVKKLSCFMGVKAHTALSAIVEIGDFRRFAKPEQFAAFLGLVPGEDSSGGKKIRGSITKAGNSHVRRLLVESAQSYTRGVVGHKSLDLKRRQTGCEPQIIAYADKANERLRRKFYRMTLKNGTKRNVAATAIARELACFMWGMMTDHVA

SEQ ID NO: 158495 - protein, 337 aa, unidentified
MKVTLIGIDLAKNIFQVCGVNQAGKSVFNRSIKRAQLLTFLRTYPDATIAMEACSGSNYWGRELLSLGHDVKLIPPQHVKPFVKGNKNDRNDAFAICEAAQRPNLIFVQPRTLAQVDIIITHRIRERRIRIRTALTNQIRGLLSEYGIALPKGRNPLNLLLPELLEDASNQLTTIARQYMRELMEELRAINVAIGALEKDIKLQARTHPDAKRLMGIRGVAEIIATAAVSFAGDGSGYHGARHFSANLGLVPKEFSSGGKQKLGGITKRGNSYLRRQLIQGAWSIIRYASKSNDRISVWALKVIERRGKQKAAVAIANKLARIIWAMLFHRSEYRPC

SEQ ID NO: 158496 - protein, 343 aa, unidentified
MDHFAGLDVSVKDTSVCIVDDTGKIVREVKVSSEPDALLMVLRNPIYRFKRIGLEAGPLSQWLFSAMTEADLPVICVETRHMRAVLKARINKTDRNDARGIAQMIRVGLYRPVHVKTLRSQKLRMLLTHRKLLQSKAIAVENDLRATLRNFGLKVGMVGAARFEARVRELVENLSDLAVLIEPLLIVRRVLREQLDILHRRLLAIVRDDEVCQRLMTVPGVGPVVALTYRATVDVPARFRKSKSVGAVFGLTPSRDQSGERDRPGAISRCGDEMMRTTLYEAAQVMLMQSAKWSWLKAWAMKIARHRGRNKAIVALARRLAVIMHRIWVDGTEFRWTREAAAA

SEQ ID NO: 158497 - protein, 422 aa, unidentified
MSASPGSTCTRTMIKVGIRSPGDKPWTRRSEVLQYRTFYGVLQQMAADLRQRGVTHVVMEASGACTEPVYYALAERDFDEVAVINPAHAKALRGHKTDARDCLRVAELFECGLLRGSYIPVAGLKEVRDLTRYRMKTVQARTSEIQRLGKALESAGIKLGSVASELTGKSATAMIEALIDGERRGRVLAGLAIGRMRTAGKLAGLSQALTGRFTGHHALLCRLHLDRIAIFDTAVAGLEDKIALRAARWQREQDLLRTVPGFGDAVACAWLAEIGPAPHAYFASHEKLASWVTLCPGNHISAGKRKHGRTGDAGTYIKPMLVQAAWAAIRVRGRLQARYSRLVRRFGGEKNPAAKKKAITAIAHTLLKIAYQVLRSGKPYEDPGADFCTRRESPQQRQAYLMRQLQKLNPGCTITITPAEAA

SEQ ID NO: 158498 - protein, 400 aa, unidentified
MRAFAGIDWAKDDHAVCVLDEHGRAQARRTVCHDERGLRTLIALLHAQRVERIAIERPDGLLVDRLLQAGLVVLAIHPNQVKAARARYTNAGAKSDRFDAFVLAELARTDSHRFRALAGDCDQTKALRALTRAHQDAVWTRVALANQLRAELERVWPGATRIFAAIDSPIALAFLARYPSPTDARGLTHRQLGALLRRQRYSGQRSPDELLARLRSAPAGAAGPAEHAARRTIVLGLIAALRAIVAQIHTLAHDIDTQLHAHPDGPIFLSFFRTASLTAARLLAEIGDDRARYPTNDALAAHAGASPVARESGKHKSASFRWACNHRLRQAITTLANTSRHRHPWAHAAYTAARARGHDHPRALRTLSRNWIRVLWRCWQDHTPYDPARHGNLNRLLAAT

SEQ ID NO: 158499 - protein, 337 aa, unidentified
MEHIAIDLGGRESQICVRASDGTVLAEERWPTGSLKKYLARRPKSRVVVESCAEAFSVAEAVEECGHEVNVVPATLVRALGVGARGLNTEVRDARNLSEGSCRMARLPAVHIPAKASRERKPLCSLRENLVEVRTKLANGVRGWLRSEGLGSPRVGQPERLWLRVQEHLKQRDRVMPGYVERNLKAINFLTEQIEEADRELGATAKADPTCRGLMTVPGVGPVTAVRFAGAVDQVERFPNSHALESYVGLVPGENSSSERKRITGLTKAGAQKLRWTLIQAAWSARRCRRNDPMVAWALQVEARIPQNALPNPMRSCGNVSSLEHGGLGAPQSPVIQ

SEQ ID NO: 158500 - protein, 342 aa, unidentified
MKITTVGLDLAKNVIQAHGVNAHGKTVLKKALKRDQVLPFFANMTPCLIGMEACGSAHHWARKLQTLGHTVKLMAPQFVKPYVKTNKNDAADAEAICEAVSRPNMRFVPIKNSEQQAVLSLHRARQGFVKARTAQANQIRGLLSEYGIVIPQGISHIAQRLPDILADRANDLPGVFRQLLQRLSDHLKELDRQVGELERHIQTWHRQNEASRKLEKIPGIGPITASAMVASIGDAKNFEDGRQLAAWLGLVPRQHSSGGKQTLLGISKRGDSYLRTLLIHGARSVLRVAERKAHHAGSWLANLTGRRNKNIAAVALANKNARIIWALLAHHREYQADFGLTA

SEQ ID NO: 158501 - protein, 457 aa, unidentified
MARRRKTKHATVGLPVLNPDAAGIDIGATEMYVAVPPDRDTQPVRCFASFTEDLHSIADWLQQCRIRTVAMESTGVYWIPIMQILEKRGLDVYLVNARYAKNVPGRRTDVCDCLWLQYLHAVGLLRASFRPADKVCAVRSLLRHRDGLVELATCHVQHMQKALDQMNLQLHHVISDVTGTTGLAIIEAILAGERDVHKLARMRDPRIRASAETIAKSLVGDYRTEHLFTLRQSVALFRCYEKQIAECATEMQRLMNELEMKADPASRPLPPAKDSVRKCKVMPPARALSLRVELYRVLGVDLTTIPGISVLNAQAVVAEVGPDVSKFRSAAAFSSWMGLCPDNDVSGGKVLWSGTRKVNNRLATALRMAAQSLQRSESALGAFYRRIRSKLGAPKAVTATAHKLARIIYHMLRTGEAYDDSIFAQMEVNHRTRTENRLKAQAQALGFTLVPTSSHAY

SEQ ID NO: 158502 - protein, 362 aa, unidentified
MASFNVSEIKSFVDCYRDHPVYLGVDVHKISYHIAVLRADGQVRTMVVPADPLGVLRLIHRLDIKLGALAYETGPTGFVLARTLETAGLPVIVAAASRIPRTAAPSAKTDQLDCRRLAQFAAKGLLRPIAVPTEEQEAERTLIRRRNQLSKGLRVCKNRIRSLLLEFNMPEPPKLSNWSKRAMDALERMPLPNEALFTLNSHLTELRFLIAQRDAVMTRLEQIGKKNFHEKVMSCLQSVPGVGPQVAAAFRLEVFQPERFRNAEELGGYLGLAPVVRQSGQDKGSRCLQPVGKTALRSLLVEAAWKFKAKDPRARSLYNKLLSKHGVPQKALVAVARKLAVMLWRLSLEQRPYELRLNTETA

SEQ ID NO: 158503 - protein, 400 aa, unidentified
MITPDDIDVWVGLDVGKSAHHAHALDHDGNTLYDKPLKQDEKAIRTMLGKLSKHGRVLLVVDQPNTIGSLPLTVARNMGIAVAYLPGTAMRRTAQLLPGDAKTDRRDAHVIAWAALKLPETLRDAGPDDETLAALKLLAGHDEDLAHESTRHVNRLRSLLLQTHPAFERALKGERITRDATLALLERYGGPMGVKRAGIEDVKDWAKSNGLRAGRIIDDMFKAIGEQTVTVPGTLMAETIIPSIAHDIKTIRDRRREVDRQVEKLLEDHPLLTVLTSMPGIGVRTASNILLGIGGDIANFKSSAHLAAYAGISPVTGQSGTSIKGERPSRRGNKRLKNALWQTAFVASTKHPPSVAYYKRKREQGKHHNAAIICLARRRCDVIYSMLKNGTLYQEPALVA

SEQ ID NO: 158504 - protein, 412 aa, unidentified
MPDDQSLPNLSNLSWEVYVAFKIFRKNCCGLDVHKTWIYACMGITDTNGRTEYKQARFSSFTKGLQKLADWLAKYDCNDVCMESTGKFWIPVFNILEKTCWVTLAYPKYTKPQKGNKTDHKDAKWICDLYMCDMVNPSFIPPPDIRQLRDLMRYRSKLTNIMTSEKNRALNCLTVSNLKLDDVFSDVFGKSSRSVIRYILEHPGETFQVAPFIDRRCKHPVEEIQAVIDGTISHQQAVKLRECLQHLDELEVHKTNVEKEILCLVQQYPYQLELLQTVLGFSGNIMTAIALISEIGADMSVFPSAKHLVSWAGCCPRNDQSSKKVKSTRISRAGVYLKPLLVQVAIQPFTANADKLSAAGALEIRCQICDGRFLSMWAALFIFLGCPLPPCPKNLHVHNGRIVILASVAWIL

SEQ ID NO: 158505 - protein, 418 aa, unidentified
MKIVFPTCCGVDVHKSFLVATIIKTPQDSLQPSYQKKRFSTFNSDLNRFADWLRENDCLEVCMESTGKYWVPVFNILEKRGIRVVIANPKWVKAVKGNKDDTKDSKWIGDLFRIGLVKSSFIPDKDIRVLRELTRYRYKLTSMRSSEKNRFQNAFTVCNVALDSVVSDMFGKSATAITDYLTSDEDFDARHCVSLLQCSLKKKADDVLASIEGYEITLEQKTRIGIVRDHLHYIDSLIGRVDTCIDTMVDRYEGYIVLLCTIPGVDRSSAITILSEIGVDMTQFGSSKRLCCWAGLTPGNNESAGKKKSVRISRAGVYLKPALVQVAHAAVKDKLSPYYALKYERITKRRGKKRAIIAIARMILTAIFVMLSNLEEWNPVDLYRVDMPEHLKEKQLAKAVKQAVHFLETQGLTVLNSA

SEQ ID NO: 158506 - protein, 348 aa, unidentified
MKIVGCDLHARQQSIAMLDRETGELTEKVIRHEGNAVREFYASLGKPVVVGIEATGAMQWFLELLEELGIESRVGDPAKIRAAETRKQKHDRRDARLILDLLERDRFPAIWMPTSEQRDLRSLLRDRHQWVKMRARLQHTLQAIALNHALRKGSSLWSGTGQEALAKLPLPAYTCQRRNELMSLYAQLQRRIQQLDKQVEEQAQHRPQARRLMTHAGVGPVTALATDVFLGDPSRFTTANEVASYIGMIPSEHTSGKRQRLGKMSKQGNSLLRYLWTEAGMHASGKDPELKRFYRRKLIQKGMGKSRIAAARKLGIRLWIMMRDEIDYEEFCRRGKLRQIGESPCRSA

SEQ ID NO: 158507 - protein, 414 aa, unidentified
MQDLLEVCCGLDVHKETVVGCLLTGVPEMKPSSEIRSFSTMAAGLAELGEWLRKAGCRHVAMESTGIYWIPIYERLEDSTEPIELTVVNARHMKNVPGRKTDMRDAEWIATLLRAGLLRSSFIPEKSIRELRHLTRYRKSIVHDVTAQKNRIEKFLQSVGFRLSVFLSDAFGASGRNVMRHLIAHGSIDRNGMDGCLKTQTRRKLNDILTSVNGTMSTHQRQFLSMILGHLEQLETHLRQAESEIERAASQFHGAMSVISSVPGIGHTAAASILAEIGSNMDCFVTSEHLCSWAGMSPGNNESAGKRKSTATTHGNPYVKSMLCEVAWGIAGKRNTYLSNWYWRLKQRKGAKKAVVALGRKLLVIIFTMLKNGTFFDEACFEQRRQQCERRRVSRMLSELERLGYEIVSPTAIT

SEQ ID NO: 158508 - protein, 347 aa, unidentified
MEYVGIDLHKKESQICLLTEAGEVIERRIRTEPQRFAEVLGTRPRARILLEAATESEWVARCLEALGHEVVVADPNFAPMYATRTRKVKTDRRDARALQEACLLGAYRPAHRLSDAQRHVRGRLAVRDALVRTRTGYIALTRALLRRHGWRVATGSAETFSRRVMALSLPGRLLSEVAPLLAVMRTVNQQLAYSDGVIEAVTRPDARVQRLRTVPSVGPVTAAAFVATIDDAQRFHRAHEVEAYLGLVPREFSSGESQRRGRITKAGNTRMRWLLVQAAVSIVRLRDPRTAALRHWATGIAARRGKKIAVVALARRLAGLLYAMLRDSTTYDPRVSTRRAAEAAVPV

SEQ ID NO: 158509 - protein, 342 aa, unidentified
MQITTIGLDIAKNVFQVHGIDANEKVVVRKQLRRSQVIAFFEALAPCLIGMEACATAHYWARELTKLGHQVRLMPAKDVKAYLKRNKNDAADAAAICEAVRRPTMRFVRIKSAEQQGQLMQHRTRDVLIRQRTQIINALRAHLAELGIVAAKGDAGVNELLAIVADEADTRLPIDARASVIVLAAQLEALQTLIGSIEKRIKMQHRSNETSQRVETIPGIGVLGATAIVATAADPTVFRSGRDFAAWIGLVPRQDSTGGKQKLGPISKQGDRYLRRILIVGAIAVLRRAQENPGKYPWLTQLLARRPFKVVAVALANKMARTAWALMVHGGTYRAPELVEAA

SEQ ID NO: 158510 - protein, 375 aa, unidentified
MKEKVRFLGLDVHAETIAVAVAEPDGEVRSLGTIANREESIRKLIKKLGPPEELRACYEAGPTGYVLYWQLTQLGVECAVVAPTLVPTKAGDRVKTDRRDALKLARSHRSDDLTAVWVPDGDSEALRDLVRTREAAKQDQLRARHRLSKFLLRTGRRPAVGMKAWTEPYMAWVRQVQFERPAQQATLQDYLHEVDHMAARVKRLEQAITEAVKLASPQVQEVVKGLQALRGIAEISAVTIVAELGNIARFDTPRQLMGYSGAVPSEDSSGKRKRQGSITKTGNAHLRRIVVEAAWSYRHRPAIGPRLRKRQEGVPEPIKEIAWKAQVRLSKRYARLAAAGKDQRKIVTAVGRELLGFIWAIGVKVETPVKQKIAA

SEQ ID NO: 158511 - protein, 422 aa, unidentified
MLTTTHDNEEIIERVAAMDIGKAELMCCVRVPDDAHPGKRLQEVQPYPTLTRSVLRMSDHLASLGVTRVVMEATSDYWKCAFYLLEAAGFEAWLVNAKDVKHLPGRPKTDKLDAVWLCKVAERQMIRPSFVPPPEFRRLRDVTRYRADLVAVRTAEKQRAEKLLEDAQIKLSVVASDIFGVSGRQMLAAMIAGERDPKVLAQMARAAMRGKITALQEAFTGFFTDHHAFLLQRMLERAGAIDADIAALDARIEEMTAPFTAAAGRLDEIPGINVTIASVILAEIGTDMGRFPTAGHLVSWAKFAPGVKESAGKKKGTNATGHGNSYLARVLGNAAVAAGRSDTFLGERYRRIARRRGRKKAVVAVGRSLLVIIWHLLADPDARYTDLGSDFYATRISPERRKRGHIRQLEALGYKVTLEPAA

SEQ ID NO: 158512 - protein, 355 aa, unidentified
MTSTKYIGMDVHKESISIAVMNAAGKIVMECVVETKASILLQFIHGLRGDLHVTFEEGTWAAWLYDLLKPHVTEVVVCNPRKIALLKDGSKSDRIDARKLTEQLYMNKIKPVYHGEHGLRTLKELARSYLTITKDLTRVMNRLKALYRSWGIPCAGNEVYAPHHRSEWLSKITEAGVRRRSEHYYQQLDALRSLRQEVRRDLLVESKKHKAWKLLRQIPGIGPIRAALLVALIQTPHRFRTKRQLWSYSGLGLETHDSAQYRVVEGQLQRSKKPVTLRGLNENHNHDLKDIFKGAAMRASTAAGPLHDFYEALLTKGRKPTMARLTLARKIAAITLIIWKKEVRFDANYLKPQAA

SEQ ID NO: 158513 - protein, 386 aa, unidentified
MVSRRTRRGPGPSSVLLTSDHAGNVVGVDPHKRSLSATVVDPRGGILASEHFRVSGDGHRALEAWARQFGPIVRWGVEGASSWGRHTAVFLAGRGYDVRDVCANRTPRSDRARQRGKSDTLDSERIARETLAHALLPKAFKRAGQDSGPDELHELLSLWHNQRRSILASRQHLLNEGETMLSALPLELREQLPDSKAVRPRLAALARRNRRRRYDAPTALRLKLLDSHRAQIAKLDAEEKAVCQQLSSLVQASGSTLDELCGLSTRLVAELLVEVGDVHRFTEGGFARFNGTAPLAASTAEGPGEPVRHRYNPGGNRRVNAILYRMAVTQLRCEPRAQAIYAQARANGHSKKEARRILKRHLSDVVYRRMLRDAARLTAELPLLAA

SEQ ID NO: 158514 - protein, 411 aa, unidentified
MSDSIFIGIDVSTKSNKVCILDQQGNRLSKLSVGNNSHGSAKIVERVLEALEKSNCSNVSFGLEATSVYGDGLIFFLKQEPSLKLYNTKVFLLNPKQVHNFKKSYGDLPKTDDVDAWVIADCLRFGRINLREVYFDEQHKALQRLTRARYFVAQNIVREKNRYLTNLFLKFSGMCQEKLFSNNLGATATELAGSEFSLDEIVHIPLDELATFINTTGKGKFADPEALAAEIQKAARSSYRLPKTVEDSVNQVLAVSIISIKSYLQQLKTLDQSISTLMEAIPNTLTSIKGIGPVYSAGILSEIGSINRFKDQASLAKYAGLSWSRYQSGNFDADNTHLINSGNRYLRYYLIEATNLARRHDPELKRFYELKYRETLKSPHKRALALTARKFVRLVYALLRDQRLYSPPRVR

SEQ ID NO: 158515 - protein, 352 aa, unidentified
MRKKCSTVSFKSQVIYCGIDVHKKSWKVCTRHCGMQLDNFSMDPDPQKLAEYLKRNYPEAEYRSVYEAGFSGFEAHRTLCKLGVLNIVINPADVPTSGKERNYKNDSIDSRKLARELENGSLEGIYIPEPENLVLRNLTRRKEQLTGNITRTKNRIRSHLFFLGLKFRSWSGSSLKIMESDAEKRFDHALSSDLRELRFLREERLRVIRCEHACLKHLKREEIQKNLESIPGIGFDTAVVLQAELWDMKRFKGKDQLNSYVGLAPHLVGSGEHEEVKSSGNRKKKQLHYRLIESAWRAVRFNREYGAKYGAMIGKGICPQKAISIIAKKLLLSIRAVWLQNREYQVLLPKTR

SEQ ID NO: 158516 - protein, 369 aa, unidentified
MWYSGIDLHKRTIALHTVDADGTVVRQAQIAAHPEGLAAYFATLPGPHQAVVECTGMWYWVRDLLDAQGIDLRLGHAKYLKAISYAKVKTDAVDAATLAQLLRVGLIPEAHMVPAGTRETRDLLRSRLVLVTRAVRCHRSIGALLEKYNVSAPAALPDLPRLQAALHAEQEALLKTQIRRIEHELRDRVLATPNAQRLVWIPGIGKMVAYTLLLEIDDIQRFPTVRRFHSYCRLVPGANDSGGARRHQRSRDGNRYLKVAFHHAAVRAIQYFEEIRAEHRRLLRRKGKAIARALIAKELATIVYAVLTKEQAFNGTFRGSVLSRTKDRQWPRLANPPASLAPASVRTLDWGARRLVDREHLSLRAPRSV

SEQ ID NO: 158517 - protein, 339 aa, unidentified
MIYVGLDVSLNSVAVCAVDETGKLIREGTTLADAPSIVRYLEPWAGQVERVGLEAGPTSEWLAANLIELGLPAVSLEARQVKAALSAMPVKTDRNDARGIAQVVRTGWFKPVHVKSIGSQRARTLAAARKHIIRYIAATEQIIRGLLRPFGLKVGIVSRTLFATRVRELVGGDALLEAIMNPLLAGREALMREYARLHRLVLKAVRSDPACRLLMTMPGIGPVSALTFRPTVDDPRRFLHSQSVGAYLGLTPRRYQSGEVDRVGRITKVGDGETRTALFEAANVVLRPSTRWSPMKAWAVRVAHRQGSKSAKVALARKMAVVLHRMWVDGTEFRWTAVA

SEQ ID NO: 158518 - protein, 470 aa, unidentified
MFRQVSAMQKNCDKNSKPDKEVGIEGLPVIRPNVAGIDLGSETHWVCAPNVDRTGLEEETFGATTPELERMAEWLKARKIESVAMESTGVYWIAPHEVLERHGLEIVLVNTRELARVPGRKKTDRVDCRWTQRLHSCGLLKGSFRPNEPVCMLRTLVRDKGNLVAEAGDWLRRMQKSLDQMNVRVHRAVSDIDGVTGMRIVRAIVAGERDAHELAKLRDRRCGKSEEEIVEQLSGHWREDHLFSLRQALKMYDAIQERIADYEREILRKLAEMERAECHGQEPPKLKNPQKAKAIQKRGEEPLRQALYRLSGVDLTGIDAIGVETVQVVLSEYGPDLSRFPSEKQFVSHVTLAPRQALSGGKPVKKKKRGSASTRVAAALRMAALSLRHSQTALGAYYRQISRRIGGDVAVFATARKLATLIYRLLRWGQPYVDVGAAAWENRYRQARIQRLAATAKDLGYQLTPNPTKA

SEQ ID NO: 158519 - protein, 318 aa, unidentified
MPKILNLQHHCCCGIDVHKKTVVACILTVSENGEYVDSIKTFSTMTSDLEKLRDWLKEQHCEKIAMESTGIYWIPVFNVLEKDFKIILSNARQIKNVPGRKSDPSDSRWMSKLLALGLVNGSFIPPKDIRELRQLTRYRTKLVSMRTSEKDRVHNILESCNIKLSCVATDIFGASGMAIMEALIAEESDPEELAQFAKGRLRNKIPDLVKSLNGKMSKHDIMVLKMVLDHLAFLNEQLAELDQMIVEKCKPYQQEIELLDTIPGIDITTAQAVVAEIGTDMSVFETPERLASWAGLSPGSNESAGKKKVHELDPETSI

SEQ ID NO: 158520 - protein, 412 aa, unidentified
MEVLYVCCCGIEVHAKMLVACLLKAGRKEGRTFSTMTEDLLRLLDWLSQEGCTHVAIESTGGYWRPVFNILEGAMAVILTNARDAKGDKARKTDVIDAEWLADLLRHGLLKPSFIPPRPIREVRDLTRYRESLVRERSTQANRRQKLIESANLKLGQVASAALGVSGKAMLRALAAGETDTEKMSHLARSALKRTQPQLPQALEGRLTHAQRWILAEVLAQYDHVEAALQRAEERIRQEVENSADPFVPEAGQLLDTIPGIGETGAQSIVAEVGVDMECFPPDPHLASWAGRCPGNNESAGKRRSGKTTKGSRSLRAALVQAAWAASHQKGTYLAAHYKRLVKRMGKKQALVAVGHSILVIAYHVVQTRTKYQDLGGDYFERRNVATQRKRLIRQLEALGVKVTIEEIKEAA

SEQ ID NO: 158521 - protein, 374 aa, unidentified
MQNSITYVAMDTHKKQHKIALHSPCQEEIVEFTINNTVRDINKMVKKIVKDAPGKVEFCYEAGVCGFTLKRRIEQFDCHCSVIAPSLVPRKPGERVKTDRRDAKKLLMLSKAGLLTEVQAPNEHQEAARELTRLRETAKDNLKRIRHQLLKFLTRHGHVYTEGHHWTQKHIAWLRTIEFAEPMLTNVFENYFNEMFYCIGRLENLDKEVELLANSQEYKEIVGLLCCFHGIDTLTAITILTEIFEFGRFQSPRHLMSYLGLTPSEDSSGDKQKKGAITKAGNKRIRRLLNETSWHYRHRYVPSKVLKKRRKGQPHWAIEIADAAGRRLSKRHRHLVNSGKMPCKANIAVARELAGFIWSIVTQYHARKNTKDAA

SEQ ID NO: 158522 - protein, 422 aa, unidentified
MKVVYPICCGVDVHKSFLVATIITTRDIMPEYQKKRFSTFNNAILAFKQWLLDNHCLDVCMESTGKYWIPVFNLLEDAIRVTIANPKWVAAVKGNKDDVKDSKWIGDLFRLGLVPSSFIPSKPIRILREYTRYRYKLVSCKSSEKNRFQNAFTVCNVALDAVVSDMFGKSATSITDYLVNGDSFDPAHCVSLLQRSLKTKADEVLQSIEGFQMTEEQKQRLRFVRQHLDFVERTLGELDQVIDTMVAPLESSIALLRTIPGVDRRSAITILSEIGTNMSQFSSSKRLCCWAGLTPGNNQSAGKKKSVRITRAGVYLKPALVQAAHAAVKSKESAYYRVKYERISKRRGKKRAIIAIARMILTAVYEMLRTGEVFNPCDLFKVDMPQELRQQQKDKAIRQAARLLVSQGVVAQENLSLPALSA

SEQ ID NO: 158523 - protein, 351 aa, unidentified
MMIIGVDYHPSFQTIAFLMEETGECGEQDLNHSDGQAEKFYRDLKQRGISVRVGMEATGYSRWFERLLAELGFELWIGDPAEIKAKRVKKQKTDRHDARLLRRLMLENNFPQIWIPSPENRDLRQLLWHRHRLVQMRTRIMNQLQALAMNEGYRWKKKLFSEQGRAQLEKLALAPWANRRRQELLELLDRLNPTIEELTAAVEREAGKRPEALRLMTHPGVGPLTALAYVLIIGTPARFPRGKHIGTYVGMIPSEDSSAGKQRLGHISKQGNSLLRFLLVEAAQAAARINPEWRRRYMHLAMRRHKSIAKVAMGRKLGVRLYWMWRNACEYSQSLEFGSYVGQLGTGHGVK

SEQ ID NO: 158524 - protein, 428 aa, unidentified
MNEEDRSRLEEFRQFRKEVRGSSEDLLVGIDVAKDKHYAFFGAARGPTLLRRLVFENNIEGFRKLLAQARALRDQNGLKRMVFGMEPTANYHKPLGEHLIRCGHLVVLVSGVAACENRKTLDGRWDTNDTRDAANVADLVSQGKCLFYEFPVGPLQDLRNLLSLKRRFRRVEHGYRVRIRNHLLAKYFPELDRYYEQSESTVLAIVRWCLDPSEIVSLEYKQFAEMVSSTRWRSSQERRLQAIWKLAVDSVGCEAGPVVEFEAKVMVEGLKQIRESIRQIDEKIQELCSPFPEYECLLSIPGFGPDVSSKVLGAIGDPFRFQNGRQVMKLSGFDLSAKRSGKSSESVIPVISRKGKADLRFALYQAALIASVRDPYFIGYYTEKLRGREREPGIKIKMRVKLAAKLLLIAWTLMKKKEPFNPDYLVNE

SEQ ID NO: 158525 - protein, 345 aa, unidentified
MENITVIGLDLAKNVFQAHGANAQGRKIFSKKLKRAEVMIFFATIQPCLVGMEACCGAHEWARRLQELGHKVKLMAPQYVKAFVQGNKTDARDAAAICEAAIRESIPTVPVRSRDSQQIQSIHRVREAWSKQRTATINQLRGLLSEFGFVMPARVKVGRAIWDWKAASGQEFGYLNGLLDELLAQLQQLEERIGRIDKQLQQILRDNAACRLIETVPGIGPITATAIVGCVGNAENFKDSRKFACALGLTPREHSSGGKQVLLGISKRGNGYLRKLLVHGARAVLNAKLKKAKDADDWVVKLAQRRGHNIAVCALAAKNARRVWAMLRTGEVFRSDYASALHANA

SEQ ID NO: 158526 - protein, 517 aa, unidentified
MRPVLLWCRVPVLWEFGPGSRAATSLVTGSVPIPLGRLLQPSPLPRSLPQSIPCHPIVERAVAKHQRKKSPAEQQLPAQLHAVNVHAAGIDVGAEAHWVAVPVEADPQPVRAFPAHTASLHALAAWLTLCGITTVALESTGVYWIPLFEVLETQGFEVILVDPGTMPKNGRPKTDVHDCQWLQRLHTLGLLSAAFRPDDPVVVLRSYLRLRLTLLADAARHIQHMQKALTQMNIKLQHVVSDITGVTGLRIIKAILNGERDPRRLATLRDQRCKEDETTIAQALHGTWREEHLFALHQAVAAYEFCHQQIQEGDAKIAAQLQTFEDRSKGESLPPKPRKRHRNRLSFETRPLLYRMTGVDLTKIEGIDETTALIVLGEIGLDMSRWPSEKQFTSWLGLCPRVRVSGGRVLSSRTRPTANRAAAALRLAAASLHHAKSALGAFFRRMKARLGTPKAITATAHKLARLIYAMLKHGTAYVAGSMAEYEQKYRQRVVHNLSRKARALGYELHPVLGGPPA

SEQ ID NO: 158527 - protein, 402 aa, unidentified
MTYDYVIGMDVGKYFHHACVLDIDGAQVLSKRINQNEKSLRTLFSTFSANDHKVLVVVDQPNNIGRLTVAVAQDIGIDVRYLPGLAMRQLSRIHAGNAKTDIRDAYIIAHAAKNLPESLRSVDRVEEAFLQLKVLNGIDEDLARSYTRLINQIRSALVGCYPQFEQALRGQVIHRKWVLHLLARYGGPTKIKRLGKAKAAAFARRYKARNPEPVIDAIFAAISEQTVAIAGAQYAEMGVAMSAKDALLKLEHRKQIEQEVIELINDIPHTQILLSMPGIGPKTAAQILMTAGDMSDFPTAAHLASYAGLSPRTNQSGTSIMSNSLNRAGNKKLKNALWQSSFASIRFHERSRQFYERKRREGKRHNAAVVALARRRLNVLYAMMSNHEYYRDPDQSQEVKAA

SEQ ID NO: 158528 - protein, 421 aa, unidentified
MLGVGIDWAEEFHLVALGSPGAGVISVVRVEHRPAAVSALMERIAGLEADPAEVRVVIETRHGLLVEALVEAGYTVLPVNPELVSRRRGPARKKDDAEDARICCLLALDRHAGLKQLIPHDQLGGELRSIARDDERACRDERRLLNRLRADLIVTFPAALTIAGEDLGATRILRLLERWPTAQELAAASREEIIEFGRAQRTGYLQRFADRIAAALAEDHFTAPEHLVRAKIDTIRLTARQLLLIDAQRRAWEKRMGELLLGTPGQLPEDQPGQAFPGGEIYLSFPGLGYRLAARIAGEIGEHIEQFTTPNSLQCYAGRAPVTRRSGKRDLVVAHRLACNRYLADAVHKWAFASLRRSEWAREFYDAQRARGKNHHSALRALGNRWLEVLWHCLTKNVPYDETVHVANRNRALGATISTAA

SEQ ID NO: 158529 - protein, 346 aa, unidentified
MEYIALDVHKNYTWARVENGKGDRLYESRLAHVHGSIKNFVNRWTGGSPVAVETVGNWYWVVDEIEAGGGTPQLVNARLAKLMMGNVNKSDKLDCKGMNRLQRTGTLPTVWIPTSSVRDVRELPRTRMVLSRQRTQLKNRVHATLGKYGYTVQGASDAFGKKGRKIVEELLLKLPPHTQQALRLILNELDHVRENLKEIEGQMIEVFSPCPQTHWLKSLPGVGDILAVVIWSEIGTIERFNRAEQLASYSGLVSRESSTGGKIRLGPVRRDVNVYLKWAFVEAANSSLLNAERCGYGHISRLYQRIKPRRGHGKAKVAVARHLSEASFWMLKKGEPYREPVSSTQR

SEQ ID NO: 158530 - protein, 325 aa, unidentified
MGSHEAALSCPSVYLTRMPLWIGIDVAKDTLAVHVLPQDQLLSFPNTAHGHQRLCDHLAGQCVGNALLEATGGYERAVMTALATAGIAVTRINPRRARAFATALGTIAKTDRLDAALLARMAQLVQAPAPVPDPLREQLRMLVQRREQLVQQRDDERRRLHQATLAVVRACLIEQIGDLRRRIQRMNQAIKQVRCQLDDALAHALSTVPGIGVVTTASLMAYLPELGTLDRRQIAALVGLAPYNVDSGQHRGKRRIRGGRASIRRVLYMACWSVVRTQASFKERYQQLRARGKPAKVAITACMRVLLIRLNAMARDRTPWREAIG

SEQ ID NO: 158531 - protein, 350 aa, unidentified
MADVAMDLHKRHSEVATLDRWGELQELRIEHDGDSGAMEKFLSGLEVGSRIAIEATASWWWVVGLAEKRGHEVVLSNPKKTRLIADACLKNDRVDTDQLLHLLRLGYLPRVWIPPAPLRYGKELLRYRALLVGMRTRLKNHLGSLLTKRNLKGPGKRLWSKPGEEYLEKLKLNAEAGEIRHQTLSLCRTLDKLIGHWDQELGRRVRGDERVRQLQTAPGVGPQTAFAYRVFVGDVSRFPSGKKVAKYFGLVPRERSSGEQRHLGHITKEGDGLMRTLLVEAALRATRKPGPLREYYRRMVRNKGKAKARVAVARKLAVILYQMWKKDLSYGEFLQGEAQFAGGLGNGVGH

SEQ ID NO: 158532 - protein, 354 aa, unidentified
MRIVCALDVHRRQITYAIVDVRSGELSRGRITPATRESVREWLARFDSLHDVHFALEGTTGWRFVAEEVARAGHRAHLADPAETAVKRGRKRRAKTDRADCDLLLRLLSARELPESWIPPAQILELRTRVRLRKTLVDERTAWQQRLQAQLFHQGVPAGVRPRTRAGREALASVELSPAGRELVALALRMIDRIERELEPLDRALSLYARRQPGCRELITRLYGVGPVTATAIVAELGDARRFGCSDDAVRHCGLDVTVHQSDRKRAPGHLSHEGPELLRWALFEAAQQACRPASPDYEYYRQVARRIDHNRACLSVAPKLCRRAHHILREPGDAALAPVEPEPQTEQAIQAAA

SEQ ID NO: 158533 - protein, 265 aa, unidentified
MRIAVLGVDLAKNVFQLYGVDGKGRRVLTRRLPRVQLLPFIATMPPCIIGIEACASAFHWARQFQARGHTVRIISPQFVKPFIRGNKNDGNDAEGICEAVQRPNMRFVPLKSVEQQDVQSLHRARQRLVNHRTALISQMRGLLLDRGIVFAQSATQARRQIPLIVHDPTSDLSPVVRDILRTLLELLRELDARVKVFDQAIARVFRASPVCQRLACIEGVGPKTATAIVAAVGDGREFKNGRHMAAWLGLAHISQMTASRDDAGA

SEQ ID NO: 158534 - protein, 415 aa, unidentified
MEIVYPRVAGIDVGKKVVAVAVRTPGDQPGQRHQQLRKYRTFYPTLREMVGWLVDQAVTHVAMEATGVYWKPVFHVLCEVESLDVLLVNARHVKNVPGRKTDAKDAEWLAELCEVGLLRGSFIPPKEIAAIRELTRYRKKLTEARTSELQRLCKVLEDGGIKLDSVASSITTLSARAMVEALIGGERDPRVLADLARGVMRKKIPDLTMALAGRFGAQHALLARMHLGHIDHLSGMIQTLDGEIEQVITPFAEQVRRLRTIPGIGERTAQVLVSEIGVDMTRFPTAEHLASWAGLCPGNNESAGKHRRTTTRKGNREVREALVEAAWAASRTSTYLGARFRRLHRRFGKQGGSKAAVAIAHNLLVIAWFLLHDGTDYQDLGADYFTRHDHPDTKKRRLIRELQALGSTVHPTPAA

SEQ ID NO: 158535 - protein, 337 aa, unidentified
MEFKRIAVDTSKSVFTLYGVDERDRPILRQDLTRARFETFLGKISPTDVVLEACGSSHHWGRVAQELGHTVRLIPPQYVKPFVKRGKNNRNDAEAISEAACRPTMRFVPVKSAETQAEAMDLSARDLLVRQRTQLVNAVRGHAAEFGIVAAKGIAQVDPLLRKIAETDMPQAAKETLAQLGRVIAQLDAQLAEINQRLAAQHKTNPVSQRLAAIPGVGPLTALTVAMKVDAGQFESARHFAAWLGLTPKERSTGSHQSLGGISRAGNERLRQLLVVGAMAVIRHAKSGSKTATPWLLQLLGRRPRKVAAVALANKMARTLWAMMANGTAYRRTPQAA

SEQ ID NO: 158536 - protein, 390 aa, unidentified
MDVLYQSCAGIDVHQANIVVCILHGPLTSTRPKREMATFDTTTKGLRACHDFLSQFHVEAVGMESTGVYWRPDWHALCDDFKLILAQPAHMKAIPGQKTDKKDAHWIAKLTRIGLLPRSFVPDEAIQELRELTRQRKHYVESRNRETNRIHKILQSGGIKLTTYIEDIMGLSGRNLLQLLVDGTPITPRIVHQSVYTSLKKKVPQLLEALDGYFSDHHRFMLKQSLEIYDFYQKQIELLEERMNVYLSQYENHVEILDSIPGIDVITASVIISEVGVDMSQFPTAGHLASWAGLCPGNNESAGKKRSTKIRHGNSYLKKCLCQAAFAIKKQKGSPLADRFYQIQSRRGSQKATIALAHQLLKIAYILLKEQITYPEFLAQKKTTRDELVA

SEQ ID NO: 158537 - protein, 324 aa, unidentified
MDKDTTYFGIDISKDVFDVTDSKGNYNQFENNHKGFKKFLKLIDSSSHCVMEATGYYHNQLAYFLQENNIKVSVENPLSVKRFIQMKLSKIKTDKSDSKMICAYGIYNDLKLWEGYSKQQQERLQITRLLSTYTKQCTMLKNKIHGEGVLGVPSKLVLRSLKRHLKQIQKEILNLESHLLKLVKENYQDLLSRLETIPGIGRKTSLMLIVLTDGFHRFKTASELCSYSGLTPIIRQSGSSVNGRARISKIGNKKLRDLLFMCSFNACKYNKACKAIYDRIVAKGKSKKLALIAVCNKLLKQAFAIANSGLVYDQNYKSALVREA

SEQ ID NO: 158538 - protein, 428 aa, unidentified
MNKIELSRLSAFRQLKKEIQGSGTHLIVGIDVAKERHHAFLGTSAGKTLLKKLVFDNTLAGFSELLARTESVKAQNALSQIVFGLEPTSNYHKPLGRYLISKGCQVVLVSGKALKNNRELLNERWDKHDTKDAANIADLISRGKCFYYDTPSQEIEQIRDLLSLRARLKKEEHSLNLRIRNNLLAKHFPELDSFYKACERQTLAIVQWCVNPRKIAAMPFDRFFKLVAPNATGIAQKLRLQKIHRLAQESIGCPVGSAVEFQAALLVEKIKQVRVQISEVEKRVHQLCAQFPEYEHLLSIPGFGPYVASKVLAAIADPWRFNSAKQVIKTAGYDLCAERSGKRSDQAVPVISKKGNSQLRYALYQAAMVASLRHRLFVSYFAKMLRGREREQGIRTKMRVKLAAKLLVIAWTIMKRREPFNPQYLSLQ

SEQ ID NO: 158539 - protein, 344 aa, unidentified
MDISVLGIDLGKNVCSVVGLDASGAVVMRRKVRRETLIALAEKLPPCVVGMEACCGAHHLGRVFAAHGHDVRLMSPEYVRPYIKAQKNDDRDAEGIAEAATRPTMRFVELKSQDQLDMQTLHRSRDRLVGERTALINQLRAILLERGMVAPQGKRKLEQFLAVLMDEQGGAGLSSRMIVLVADARTQWAELDRRIAAFDAEFLRWVKENEEARRLMTIPGVGAIVASALVAAVGQAESFERGRDLAAWLGLVPRQFTTGGKPKLLGISKRGNKYLRRQLIHGARAALPYVAERDTPLGRWAKGLVSRAHRNVAIVAFANKLARIAWAVLRRGERFAVTGMPVAA

SEQ ID NO: 158540 - protein, 415 aa, unidentified
MKTYSELSHFGGLDWAKHHHDVCVLDPGGQIVERLRFEHSGPGWEKFRQQIQKYPALGIAIETSQGAVVEQLLGSGVTVYPIHPKAAKAYRQRQAPSGSKDDELDSWSLADALRMDGGHWRALSPQDPMIAELRLLCRDEEELIEQRTALVNQLQAALGEYYPAALEAFADWTVPYTWEFIARFPTPQALAGASAHRRRVFLHTHKLWRPGTAEARLEIFARADQFCGGAAVTRAKSRLALSLVKLLQALQKQLDEYRAAIERLFAEHPDHDVFGSLPGVGEKLGPRLLGSLGADRGQYPDVQGLQCVAGSAPVSFKSGQMRRVKIRWHCDRFLRHTVHLWANCSLKTCAWAAAYYKAKREAGMSHACALRCLAQRWLKILWKMWQTHTLYDPEYHARNQQRHGSWVLQLNPKKA

SEQ ID NO: 158541 - protein, 377 aa, unidentified
MGDYSEAFVGIDTSKLRNAVAIADAGRGGEVRFFGEIENTPAATAKLVRKLSTKYKRLTFCYEAGPTGYGLHRQIKDLGFECVVVAPSLIPKRPGDKVKTNRRDALSLAKLLRADELTAVWVPDGRHEAMRDLTRARETAMVDLRTKRQHVSAFLLRWGRPYPEKRKTWTKAHMSWIASQKIEYAEQRLVLEEMMLAIRQAQERLQRLEQAVAAAVPEWSLAPVVTALMAMRGMDLISATTLLAEIGDLSRFQTPLELMAYLGLVPSEQSTGEDVRRGPITKAGNRRARRMLVECSWSYQHPPRVGQAKQPKVDAAPPAVREIAWKAQCRLYRRYRTLLRKGKLKTVAIVAIARELAGFIWAVARAVSTAPIAAAMA

SEQ ID NO: 158542 - protein, 423 aa, unidentified
MSYRIAGIDVHKKMLAVVVSDVEVDDEYQFERVRYSSSPEHLRFLAEWLMAQQVEEVVMESTAQYWKPVWGALERYWKPICHKREGAGPMSGTLHLAQAQSNRGRRGRKKDFPDAERLVKRLVADELVLSFVPDTEQRLWRTVTRRKYQLTRNHVRLQNQLEGLLEECHIKLSSLVSDLLGASARRMLKALAEGETSPVALAAMADKNLRATQAQLCDALGACTELKPIYRRLLKMFLEELQFIDQQISELDQELASLLSRHHDAVVHLAEIPGLGVDSAQQIIAEVGAGAATFPSAKQLSSWVGACPGEEESAEVSKSHRSPKGNRHMRRILNQAANAAAKSKGTIFEIVYRRLVSRLGHNQTIGAIAHRLCRLIWIILHRGVRYEERGPSVNAKTRRHRTNRMIRELRNLGYRVEPLVNTV

SEQ ID NO: 158543 - protein, 309 aa, unidentified
MKKLVTKNYLGIDVSKPWFDVSLLSVKDHVKQPMITDRFDNTVTGIKAFKTWLKTKAVSFDDNSLLVIENTGVYHRLLWSFCSKENLKLHIGNAAHIKWSLGITRGKSDAIDSKRLCLYCHKQHDELKATPVLNPLFMKLKDLMSSRSRLVAQLHSTKNYIKEIQCTNDKALLALLDKAHKAAIEGIKKSIVHLEEMIQKIIVEDSAIYANYLLIKSVPGIGHLTAIYIICCTNNFSNKVSGKQLASYAGVVPFEHSSGISIKGKNRVHKMANKDLKKMLHLCALTAIKYCPEFKQYFDRKKAEGKMEC

SEQ ID NO: 158544 - protein, 373 aa, unidentified
MSDHSEVYVAFDTSKLHNAVAIAEAGRAGEVRYFGEIENSAAATAKLVRKLAGKYARLTFCYEAGPTGYGLYRQIKSLGHDCIVVAPSLIPKKAGDRVKTNRRDALGLAKLLRAGELTAVWVPDERHEAMRDLTRARTTAVADLRAKRQQVAAFLLRQGLHFAGKKSWSKAYMGWLVSVKLASVEQRIVFEEMLLAVRQAQERIERLEQAIRAAVEDWSLGEIVTALMAMRGLDLISVSGFLAEIGDLSRFQTPRQLMAYLGLVPSEDSTGDTIKRGPITKAGNNHARRILVECAWSYQHPPRVGAAKQAKVAAAPPSVRAIAWKAQSRLCGRYRALTKKGKRKTVVITAVARELAGFIWAVSREVTSATAAA

SEQ ID NO: 158545 - protein, 386 aa, unidentified
MRKPNDLSRSLTVFDGDKTLIAVIEMSLTSWLVAGIVPGVERQPLKKLAVDEGALLKLLNRWRIEAEKAGHRIQRIVVAFEAGRDGFWLARWLRARDIDAHVIHASSVAVPREHRRAKTDRLDTELLKRAFLGWLRGERDHCKMVAIPTIKDEDAKRPNRERASLVGEQSRIVNRMKATLVRLGIRGFNPKLKKAAERLSELRTPEGEPIPPNTLAELRRDMERRRVVSNQIKQIENDRLERLERSPGDGPNAMVHLLARVIGVGIETADMLVHEVLSRNLRDRRAIARYAGLTGAPDESGKRRREKGLARSGNARVRRGMIQLAWRFLMFQKESALAQWFRARTAKARGTRKTMIVALARKLLIALWRLAHEGLVPDGVILRPAQ

SEQ ID NO: 158546 - protein, 369 aa, unidentified
MGKHSEVFVAFDVAKKKHAVAIAEGGRQGEVRFLGDVENSPLPIEKTIKRLATRYDQLHVCFEAGPTGYGLYRQVKALGHDCLVVAPALIPKRAGERIKTNRRDAVTLARLHRAGELTGVWAPDPAHEAIRDLVRAREATADDLRRKRQQLLSFLLRHSRIYSGGGHWTLAHRRWLAGQKFDHVAQQIVFQEGIDAIEDALQRLRRLEKQLALIVPDWSMAPVAEAYQAMRGASFLVAVTFAAEIGDVRRFDTPRQLASFLGLVPAESSTGDTIRRKGLTLAGNRRARRALVEAAWTYRHPARVSETLRARLEGLPKPVRDIAWKAQVRLCARYRRLSATGKKLPIVVAAIAREIAAFLWAIGREVAPA

SEQ ID NO: 158547 - protein, 482 aa, unidentified
MKKTSIYPDRSQELLTLFEKAGNPSKLMCVPIDYAKKDHLVMFCNGNGEVLRKPFSVKNSVDGVKYLIDQVNRSCRHRHIQSDHVFFGGEAVSSYAENFANTIQAKGWLVANVNAYDAKKQRENLQASTDRIDLMGIATMLLNRRANCCPAQTGVYRNLRTLVRHRKKLVKMKTEVRNRIHTIVDRLFPGFLNEKKSGLLPFSNSSLYLMQERFSAPQIRRRQRGALIRNLEKRGTKKAEQVASKLQEYASQVLTTPEEYTATLQISLASHVNHYRCLFEGAQQLVNEIAQLLAQTQGAFLTSIKGIGIVLAAGVTAEIGDPFTQRSTDQLASYAGIVPKVKQTGGSDGPSITSHVSKRNNHILKDFVVQSAFHIGRYGPKDLKDDYSRREAAGQHADFGIARRFVRISMCMMRTSQVYLPPEMRSTKIKSDLRADYYLAMWPYLRDKWSKANALNIALAKDRPLGQWRYIIQEVYGIKLKM

SEQ ID NO: 158548 - protein, 340 aa, unidentified
MKNGLKLLGIDIGKNSFHLIGHDAGGHQVLRKCFNRNRLLQFAAQIEPCSIAMESCGGSHWLARKLASLGHRVKLIAPQHVKPYVTGNKNDFIDAEAICEAASRPRTHYVAVKTVEQQVLSVQHRLRESLVCHRTEAINRVHGFLLEFGVALPATKAAIAKVPELIDDSRSDLPLQFKRVMEHLLEDIHRLDTEIKACDAQIKQQLAQDDAGTRLMTIPGIGPITASAFVADLGDASNFRASRDLSAFLGLVPRQFSTGGRPVLLGISKRGDRHLRTLLVQGSRALMIRIERRDDALGQWVRDLLTRKHPNKLVCALANKLARIVWAVLRRGSTYNASMI

SEQ ID NO: 158549 - protein, 372 aa, unidentified
MVKFEKKHKNPKIEQLMEQSNVISFKGQNIYIGIDVHLKSWSVTVLSENCHLKRLTQDPNPDVLYKYLIRMYPEAEYYSVYEAGFCGFWIHERLTELGIHNIVVNPADVPTKAGERLQKTDAVDSAKLARSLRSKELKGIYIPCREALEMRSLIRLRSLITKDMTRAKNRIKAHLRFFGYDIPQEFADRRWPKRFICWLRALDMNTEEGKKALDIMLDALEDLRKRMLDNTRALRRLSNDKRLEGQMDLITSVPGVGQVLGMTLLLEIGEFKRFKNAESLASYIGLVPMCHNSGEHIGSGDITVRKHSSLRTMLVEAAWVAIRQDPAMTLAYENLYKRMKPSKAIIIIARKMVNRIYHVMKYSEKYALNVVS

SEQ ID NO: 158550 - protein, 321 aa, unidentified
METVSFEQVVSRGCGLDVHKETVVATIDGEGLERTTREFGTFTRSLTELKDWLVENKITHVAMESTGVYWKPVYNILEPTGITVWIVNARHVKNVPGHKTDKKDSRWICKLLLAGLLKPSFIPPREQRELRDLTRYRKKLIRDMASNKNRIIRILEDCNVKLSSVLSDTSGITATRLIDKLCDGKKVTLQDIDEVYHGKIRATKEEIWEACNGNITDHHIYLLGKIRSHNRHIESLIEELNQKIRHMLSPYENVLGLLREIPGLSHKTVEDLIAEIGLDMEVFPNEKHLASWVGVSPGNNESAGKKKVVEPPMATNRQKQR

SEQ ID NO: 158551 - protein, 344 aa, unidentified
MLYVGLDLSRKRIDFDALLANGERFQAGAVPADALASLVLRLGAANEPVVAVIESMSGARFVHDQLELAGWDVRIADAVKAKGLAPLACKTDKIDSWVLAELGRLELVPEIWLPDPAVRAEHERARFRLHLVKHRTQLKNRVHATLITNGVPNPWTDLFGVGGRRLLSRLDLAEPWRSTTEASLALIDQLDREITGIERELRALGADHRYIPLLVSCPGIAWILAYTIASELGDISRFPTPVKFVGYTGLCPRVDQSGQRDWRGPLRKNGPNYLRWALVEAAHTALRHPCYEPVLARQTSRHGRKRGRKIATIEVARKLAEAIWHMLVRQQPFAPAGAGKTLTA

SEQ ID NO: 158552 - protein, 362 aa, unidentified
MAQVRSWVGLDVHRASVVASTMDRDTGEMRTRRLPGATEEVVAFCAGLPGPTRVAYEAGPTGFGLARALAGAGVQCVIAAPGKIERPSSDRVKTDERDAQRLLRLLMIDALHAVRVPSIEEEALRDLVRAREDIRGDLMRARHRMSKLLLRHDVRFDGTASAWTTHHRAWLAKVDLGERGAQVTLRDYLGAIDALIIRRDTLEHTIGELVPSSPWADTVARLRCLRGIDTLSAVGLCAEIGDWTRFPRPAHLMSYLGLVPSEHTSGQTRRLGAITKTGSGHGRRLLVEAAWHYRRAPAKGQALKRRQAGQPAHVIAISWQAQQRLHRTWQRLDTQRGKRRTIVAVAVARELAGFCWAAANAD

SEQ ID NO: 158553 - protein, 315 aa, unidentified
MDDTLMVAGIDVSKDKLDVHVLPGNLVFTVGRDRRGLAELTRRLHRAGVGRAALEASGGYERLVLDQLEADGLVVHLLNPARVRHFAEAAGVLAKTDPIDARMIASFCQHFPEKGLTRKPENARKLTEFLAVRAMLLKAIGDARNQLEHLAHPNLRGLVESCLAEARSRLVAIDQGIAAAIAEDEAMACKAKLVRSMIGAGPVLTSNLLARVPELGSADRRHAAHLCAVAPADKRSGKSRRRATIKGGRDQLRPILHMAALAAIRHNPVIAAFAKRLTAAGKPWRLVIAACARKIIVILNAMLRDQTSWQIKQPA

SEQ ID NO: 158554 - protein, 340 aa, unidentified
MTIVMGLDQHRAQITAEWVDTVTGEVCRSRVAPAHRESVRRFSARFEDHELEVALEATTGWRFVVEELQRVGASVHLAEPAETAARRGRKKRAKTDRADARLFRELVMVGRLPESWIAPDHILDLRARVRLRHTLIDERGEWQQRIHAVLYHHGCPHHHGIGLLTGTGREWLQSLELPATAREQVTVALQMIGAVDAQVAPMDKELRAYARRQPGCKALMGLYGIGHLTAVTILAELGDARRFSSSREAVRYSGLDITVYQSDQRRAPGHLSRQGPPALRWALYEAAQSAHRTSSPDRDYYLQAAERLGGNRACLAVARKLLKRSYHTLRELGDGALQPA

SEQ ID NO: 158555 - protein, 478 aa, unidentified
MIYSVGIDLHKGQHRVHCLNEKAQPCDAFSFQTAPEGLAALEQRIFRDGSNPIVVFEPAGLTWLIVAAYLRSCHPECRVVRAKGQKVAALRRYLRGPVKSDRIDALTLAKMPFIDPERLDEVYLAPAQTHALQRLTRQRKRLEDQITTHKKRIGSIVDGYLPGVRQAFSHPWSVQVRAFLHSQINPFAVIRAGEEVLHRFLTQVKPGNKGGRTESHFVYQACQKVLALQELCAAAGSTDEDFFIDLQDEIDRELRLMEAEEAESKALDRRIEELYQELHPSDNLRTIPGVGEHTAPVFVANIGDPTRFPGQSEFANWTGVVPAARQSSNVESKGLRMTKAGPTIVRWALYQAGQISRRWDPQLASVYYRQMVYHGKNHKQAMGAVMSHMAARVFTVLREDRPYELKDTEGKSISKLAARDLIMAKYRVPEDIRQERRKSKGRKANTLGLQKKRGTAAGREHEAAIAPQPATSLPSLVI

SEQ ID NO: 158556 - protein, 341 aa, unidentified
MQAIGVDTHKDSLAACAVDELGAALAETEFANDPAGHAALAAWAQTVAPGATIGVEGSSSYGAAAARYLDERGLAVREVPPHLSGRERSRTRRAGKSDPGDALAIARVTAREADLPPIRRVDPTTELGLLLAARDDLVGEATRVRNRVHADLVILVPGYGGQVANLIADRHLVTVGRSLRGRPGVHAELTRERLADLRRLQARIRSLAIRIRRLVTGHPLLDLPGVGGLTAAALIAETGDVTRFRSADAFAILAGVAPIPASSGQVQRMRLNRGGNRQLNRAFHVIALVQARTYEPAKAYVARKRAEGHSWREAIRALKRRLVRAVFRLLVEGATAQARAT

SEQ ID NO: 158557 - protein, 334 aa, unidentified
MKKDHYIGVDISKKTIDVAIYVKNPTGKFPIPHETFQNGNDGFKEMNRWLRSKGVAISKSFFCMEATGTYTYELCLFLEEHKVSYSVQSPLHLKRSFGLTHGKNDKVDAGRIAYYAYLHREDIKESRLASDSVRKLKSLLAERKSLVVEIARCKAQLKEFGAHTPESGTVKRTQALQAFLEAQVEAIEEEMTQTIECDEKLNKNYRLLLSVDGIGIVNAINTIIATHNFEMFDNARQYASYIGVAPFEHSSGTSVKGRTHVEPGAKMLKADLTGAVRTCINHDKEIKKYYERKMAEGKAYGVVANAIKFKLLLRMFAVIKRQTPFVRKPDFIFN

SEQ ID NO: 158558 - protein, 451 aa, unidentified
MKSKKNKALKVVEVDALSQINANAAGIDIGAEEFYAAVGKDRDVESVRTFPTFTADIYRLADWLRQCQVETVAMESTGVYWIPLYEILEERGFEVYLVNAKHLKNVSGRKTDVLDCQWLQQLHTYGLLKASFRPNEQICAIRSLVRHREMLVHYRAAHIQHMQKALQMMNLLLTNVLSDIVGVTGMQIIRAIIAGEHNPEVLASYRNGHCAKTEEEIKKSLEGNYKREHVFALKQALELYDFYDQQMQTCDEELASLYAEFDPPDEPGTEPPYPRTAKRRKNQPNFDLAQSLFRMTGGIDLTQIDGLDALSVQNILSETGTDMSKWPTVKHFSSWLCLAPNNMITGGKIKNSSTPATKNRASNTFRIAAQSLSRSQCALGAFYRRMRAFHGAPKAITATARKLAQIVYFMLKRRLPYQALDPAYYENQFRDRAIRNLQRKAASLGLRLDPA

SEQ ID NO: 158559 - protein, 344 aa, unidentified
MGEVSTIGLDIGKSVFQVHGVDDAGAVVIRKRVSRARVLEYFGELPPCLIGIEACPSAHHWGRELQLLGHMVRLVPPSYVKAYLKRNKNDANDAAAICEAVTRPSMRFVPIKTKEQQTALMLHRTRQLLVRQRTMLSNALRGHLAELGIVSAKGRNGTAELLRIITNGADSRVSPAVRGILDVLARQYSAIGIEIASIDRSIMALHRGCEASRRLAEIPGIGPIAATALVAEIGDWKTFSSGRSLAAWIGLVPKQYTTGGKDRLGSITKQGNRYLRWLLIVGAMAVIRYARKHGTEKRPWLGRLMERRPTKVAAVALANKIARMAWAIMVRGERYKEPKLLLAA

SEQ ID NO: 158560 - protein, 350 aa, unidentified
MIIIGVDFHPEFQQIALLNTTTGEVEEKRLAHPDEAEKYYRALASAGETVRIGMEASGHARWFERLVAELQFDLWIGDAAEIRAKRGRKQKTDRQDAQHILKLMLKDDFPKIWVPNWENRDLRQLLWHRHRMVQARTRVMNQLQAVALNEGLHCKKKLWRERGRQQLESFALAPWASRRRRDLLDLLDRLNPSIAELTQAIEREVENYPAAQRLRTHPGVGVLTSLAFVLILGDAERFRCGKQVASYLGLVPLEDSSGNRRRLGHITKQGSSIVRFLLVEAAQVTVRSLPEWRSKYFHLALRRGRKIAKVAMARRLAVQLFWMMRKQWDYEQLKKFGSHAGQPGHRDGVQ

SEQ ID NO: 158561 - protein, 320 aa, unidentified
MKHKVGKDNTVARFIGIDVSKQWLDVATLPERETRRFSNDGAGQEQLGAWLIQLAPELIVMEATGGFETRVATALAAEGLALAVVNPRHVRDFARAFGILAKTDRIDASVLAAFAEKVHPPVRPLPDEDRRELIDLVDRRRQLVTMRAEEKTRLSQATASARQDIKEHIEWLDERLRRLDIDLTAKLRSSSLWKAKEELLISVPGVGRVTVFTLLARLPELGALNRRAIAALTGVAPFARDSGQHRGRRMIWRGRADVRSVLYMAAVTAARINPVIKSFYLRLKQAGKPAKVALTACMRKLLTILNTMLRTNQSWHAPTT

SEQ ID NO: 158562 - protein, 370 aa, unidentified
MLDTTTFVGLDVHARSIKAVSLDVMTGEVRCATFGYDAGAVAGWVRSVDPKARCVYESGVTGFDLQKRLSGLGVDCVVGAVSKTIKPSADRRRKNDRNDAEFLARMLSVGNVVEVWVPDDECEAARDLTRALEDARDDLSRSKQRLSKFLLRHGLVFDERTPTGRRKGNWTRAHWSWIESIRFAERADNDVLAYYVDAVRRAAEEKARLEGLVEAEARKPRWRKRVDSLRCLKGVDTATAADLVFEAGEFSRFRNARSFAAWVGLTPSEHSSGESDRRGAITKAGNKHLRKALVEAAWHYLTCSGRPKDLARGQAPDRVARRHAAKGVRRLVERREALLARGVHGNKANVATARELACWVWAVGLMAEEA

SEQ ID NO: 158563 - protein, 505 aa, unidentified
MEILYRRCAGLDIHRDTVSACVRKHVRGQSEAAIEEQVFGTFTQDLERLTCWLKQHRVKQVAMESTGVYWIPVWNVLENRFSLTLVNPATVHALQGNKTDRMDARRLAEYLQYGLLRGSFIPPKPIRELRELTRMRVHVQQDRNRVINRIARLLETVNLKLASVASNIVGVSGRNMLRLLAGGETKPERLAECARGHMRVKIPALTQALDGRPDEHFRWKLNELLRKLDGLDEERCRIDARLDLLALPYADALRRLATLPGVDRTVALAIVAEVGTDMSQFPTAAHLASWAGLCPGNAESAGKRFSGRTRKGDRYLRRMLVQSAWAASRTEDCCLAALFFRTAQGDRYLRRMLVQSAWAASRTEDCCLAALFFRTAQRRGFKKAAVAVAHRILVIVWHILAEAGVEYQERGGSYFDRRNPQRTARKLTQRLEAIGYTVTLTPAAREQPAKPPVARPKGRKPQLDRPIVDASLCQRCAKRKLPRCVCLLKRNPANKNPASSALSTI

SEQ ID NO: 158564 - protein, 354 aa, unidentified
MTSNALAEIAVIGIDIGKNTFHAIGLNRRGAIVLRQKWSRRQLADRLANLPPCLIGMEACVGGHHLARQCVALGHEARLMPAKYVKPYSKGQKNDFRDAEAIAEAVQRPTMRFVAVKSIEQLDLQALHRVRQRLVSQRTCIINQIRAFLLERGIAVRQGAHCLRTELPILLASRQDALSPRMLRMIEDLAADWRGLDARIDAVTEEITTLARQDAGAERLMSVPGIGPIISSAMVAAIGAGEVFTKGRDFAAWLGLVPKQISTGDRTILGSISKRGNRYLRVLFVQAAWVVLVKPQIWERHGLKSWIEAGKKRLHRNVLAIALANKLARIAWAVLAKGRGFAAQRTSHATTQPV

SEQ ID NO: 158565 - protein, 343 aa, unidentified
MDQYIGLDVSMKETAISIRQDGKRIWRGKCASDPQLLAAMIRKHAPEARRVVFETGPLSVWFYHALTAEGMPAICIDARHAKAALDMAANKTDANDADGLAHLAEIGFYREVRVKGFDSMLIRTLVTARRQLLKMRLQMSNQIRGLMKTFGLVVPKGAGSVFERNVRTLLEGEDKLARIVLPMLQAWGHIRLRVAELSKQLVAMAGEDQRCRLLTSVPGVGTVTATAFAAAVEDPANFRNSRAVGAWVGLTTRRFQSGEVDHDGHISRRGDNKLRSLLYEAAAVILNRSTETSTLRTWALGLKERLGFKRAAVALARKLAVIMHAMLKTGELFDPQAGVPAAA

SEQ ID NO: 158566 - protein, 453 aa, unidentified
MARKAEKERTKDGLKLKIVNPNAAGIDIAYGEMQVCVPEDRDGENNRCFGSFTCDYEEIASWLKACGITTVAMESTGSYWVGLYFFLEEKGFDVLLANAKDVKNVSGKKTDEADAEWIMLMHSYGLLKPSFHPDAAARNIRELARHRDNMLRSAGKEVQHMQKSLVLMNIKVDTVISDILGKSGKAIIEAILEGNHDPKSLAQLADRRCKAGRETIEKSLEGTWDAVHLFELKQSYDLYKYIHTQIADCEAEMDRMLSDYTDGCGTDMTGYKATEKRVAKKNAISFDAEKHAFSMWGVNIMEMPGMSLGGLSVLMGELGSGFVEKFPSAKSFCRWCNLVPNNKISGGKLLSSKVPKQKNRVGQVFRLCANSVKGVKTGLGVYFRRQKSKGGHLQAIVATANKMARIFYTMVASKKPFDETKVGLDEKTLLQRKISIAQRSLEKLNLRLSVAQG

SEQ ID NO: 158567 - protein, 396 aa, unidentified
MYYGLDVHKEFLQVCALAEDGKARRDFRVGGSAGAIEAFARRLGPEDQVVLEATFHTWAIVQILERHAGRVVVADPAQLKAIASARIKTDKVDAHILAQLLRLDFLPEVQLPGRGTWALRQLMAHRKQLRAQSVATKNTIHAVLNRSLQRYPGKFLFSKEGFRWLAELELPAAERMVLDHQATLWREVQARLDTVDRELTEQARLHPDAKLLVTIPGVDVVVAMGFLAAIESIDRFPSPQKLAGYFGLVPKIRQSGGHSYHGHITKAGSRNARWLAIEAAHTIARSSSPLAASYHRVRRRKGHQVAVTALARKLVVVVWHILTTQQPYRYAAPERTRIKLRRLQKHERPAHRLPATLEEVYAEAGLELVPPSAGEKRAAKGNRATITRSRNALASP

SEQ ID NO: 158568 - protein, 325 aa, unidentified
MQYHPTKLGIDISKRTFDVCLLNGSKPKFEKFRNDPEGFKKLESWLKKARSTELHIGMEATGNYWKALARFLNASGHQVSVINPLKIKRYGGYRLHSNKTDKTDAMMIANFCLQEDENLLLWQDVDEEIRHLRDLIQYRGSILTMLGQIKNRIESIIEDESVLLCQIEDKVHWEQRLELVNQEIEAAVKESEAMKKKNALLQTIPGIGSVMASYFLAFIPDVSAFKTSRQVVAYFGLDPSIQESGTSVKKQSRISKKGNATFRGKLYLPAIVAVRFNPVIKNLSERMTASGHLKKEIYVAAMRKLVILMYGVLKSGKPFDPNYAN

SEQ ID NO: 158569 - protein, 356 aa, unidentified
MTKSLTVGIDLHSNNLMIGMVDEDGRRVRSQKLACDLQAVVAFLAPYKRRLKMMAVESTFNWYWLVDGLAAQGYPVSLANPAKIEQYSGIKHADDQNDAFFLAELLRLNILPTGYIYDAQLRPVRDLLRRRMSLVQQRTALMLSFKSLYARMTGQTMSLSRLKGMDAAAVRGLYEHPANRLIATVQQEQIAGLNRGIEQIEKMVVAKARTLPWHSKLDTLPGVGRILAMTIALEVGAIERFKSPGEFASYCRAVDSRRTSNEKTKGWNNRKCGNKYLAWAFVEAANFAKRYDDQSRRWFDRKAARTCEVLATKALACKLAKAAWHVMSGNVEYDAERVFGRVAESQAKGLVQALIN

SEQ ID NO: 158570 - protein, 322 aa, unidentified
MNEYKETFGVDISKDVFDVHGSKTGHNQYKNDESGFNKFLKELPSDCLVAMEATGYYHYRLAQFLYKNEVVVSVVNPLIIKRFIQMKLAKVKTDKSDAKMICEFALINEVPLYTALTDVQSECLQLFRVLDNFIKHRTATKNKMHGEEVLGIPSKFTYRSLKRNKKHYDSEIKAIEAKILSLVKEDQQQQLTLLTSVPGIGQKTALFLIIVSDGFSKFETASQLCSYVGITPTTRESGSSVRGRAHISKVGNKKLRNLLFLCSFNACKHNKACRELYERIVNKGKSKKLALIAVANKLLKQCFAIAKSGRPYDESYVSVLPK

SEQ ID NO: 158571 - protein, 422 aa, unidentified
MRSTLTEREFAAFIGIDWADTRHDVCLQAAGSDQREFSVLEHTPEAIAAWVSTLRRRFGGQPVAICVELNKGPLVYALSEYDFLVLFPVNPLTVARLREAFATSRAKDDPSDAELQLEVLLKHRERLKPLIPSSPAIRALAQLVEHRRRLVGDKVRLVSRLRGTLKLYYPQALAWFDSVDTVLFCDFLTRWPTLKQVKRARRSTLERFFYAHRVRSAALIDRRRRGIKAAVPITTDESIIEPNRLQTQALVAQLRAVLAAIEQFDEVIAQRAQAHPDFALFDALPGAGPALAPRLLVAFGDQRERYACAADLQKYAGIAPVIERSGNKCIVHWRWRCPRFLRQTFVEWSAKSIRHSFWAQACYQQQRARGKSHQAAVRVIAFKWIRILFRCWQDRRPYDESAYLSALQKRGSPLLDNLAAQT

SEQ ID NO: 158572 - protein, 369 aa, unidentified
MNKFSKYVGLDVHQETIAVAVADTAGEVRYMGEIVNTPEAITKLVAQLKRSTGRLAFCYEAGPCGYTICRQLRELKQDCQVIASSLIPKKPGERVKTDRRDALSLARLHRAGELSPVWIPDEAQEALRDLTRAREDMKHLQRQAKQRLLSFLSRHGHRYNGRSRWTQAHWRWLEGIKFARPEQQIVLQEYIDTVQACSQRVASLDREVETAAHASPVWPVIEALMALRGISLLAAVTVVAELGDLARFANAPQLMAYLGLVPSEHSSGKRERRGGITKTGNGHVRRVLIEAAWTYRHAARKTAILQRRAERTPPEVQEIAWSAQKRLCQRFRNLMARGKLKNQVCTAIARELVGFIWAIGQYVIPLTRA

SEQ ID NO: 158573 - protein, 419 aa, unidentified
MAFKILRKNCCGLDVHKTWIYACIGITDADGRTEYKQARFSSFSNGLRELADWLAKYSCADVCMESTGKYWIPVFNILEKTCWVTLAHPKYTKPQKGNKTDRKDAKWICDLYMCGMVKPSFIPPADIRQLRDLMRYRTKLTNMLTSEKNRAQNCLTVSNLKLDDVFSDVFGKSSRSIIQYILEHPGEQFDVAPFLDRRCKHSVEEVQAAVDGAVSREQAAKLRECLQHIDQLNEHRKNIEAEILRLAEPYPYQLELLRTVPGFSSAPLTAVALVSEIGVDMSVFPSSKHLVSWAGCCPRNDQSSKTVKSTRISRAGCYLKPLLVQIANAVIKSDKYPECRERYRRIKARRGHKKAIIAVCRMLLTAIWNVLSKLVPYSAEGYLSDKLTEHSVVISKAQGLELLRKRGYIFKDDLPADSA

SEQ ID NO: 158574 - protein, 442 aa, unidentified
MQEEKQMKEKKQMHEELYYERCAGIDVHKDKLTVCLRIGRNTTIREFDTFTSSIRDMVAWLKEKGCQMTAMESSGSYWKPVYNIFEQEELPAMVCNAYHVKNVPGRKTDKNDARWLAKCLSQGMLNPSFIPEREQRELRDMTRFRKSQVEDRARNVNRLQKFLEGANIKLGSWVSSVEGQSATQLLELIIGKPDFTKEDVALRMHKNLKSTSEELFKSLEGYMTDVQREFFAHILSVIKEQSAQIEKTDAMIQRVLSTNYKAAVDAIDVIPGIGRVSAEQIIAEIGTDMNQFKNQGSLCKWAGVAPGNNESAGKRKSGKTPPGNKTLKATLTQCATVAKKNKNSFFGAQYNRLVTHLGKKRATMAVAHSMLIAIYFVLCGKEFIDLGGDYYTNFNREKKINSHVKQLSKLGVDIPEEILKESISAALDDASTHRKPPENKAS

SEQ ID NO: 158575 - protein, 348 aa, unidentified
MTTVGSVLMTEVMIGIDPHKGSHTAVAIGGAEEPLGELRVRACPSQAGRLLAWAAAWPDRSWAVEGAGGLGRLLAQQLVAAGERVLDVPPKLASRVRLLQAGDTNKNDPNDARSVAVAALRSRTSRREVIAEDHAAVLKIWSKRHRDLSRARNQVACRLHAVLCDLVPGGHPKEISAAQAARILEQVTPSEAVTKARAELGAEFLADLRRLDAQLRDTRKKLAAAVRASGTTVTQVFGVGPVIAGTVIGDVRHVSRFPSRDHFAACNGTAPVEVSSGNRKIYRLSLRGNRRLNHAIHMAAITQIRYRRSDGRAYYGKKVRHEAPHDRAEVKDLRRWPVAAGRLKLGAA

SEQ ID NO: 158576 - protein, 422 aa, unidentified
MKNVTDSGQKVKGQKRLMALERASWILGIDVGKEKLSCALLLKDETFRCRFDVEASLHGFQMMLERVKTETKGDGAVMFALEPTGHYWMVLGQFFEDHNQSYVLVHPLVVARSREVKQLNRGKTDAFDARLIAELACRGAVTRTQIPEDDWATIRFYAREYMDREKEIAREKNRMMSYLETTLPGFLDIFPRPLGMNSRACLRVLTNFREVLQGDIVQFESQARKHITGKRLMTSRVRRLFEMLQNGDALGLRAGRKTLFWRIINSLDRLELYEEQQDMASKALISLYEQCEFKPYMDSVWGTSPLTNSLVLGFMGDPTSYDTPASLIKMAGCDPVPNESGKFKGKASISHRGRNLLRKAGDRISFLLEKRNTVFRNFMHHLTARPKNKLTKRQARIACINKYFRIIWVLCNHRVLFNPALA

SEQ ID NO: 158577 - protein, 403 aa, unidentified
MNNVAGIDVSKGKSMVSVLRPFGEVVAKPFSIGHTGSELKELADYLKSLDGETRVVMEHTGRYYEPVARFLHEEGVFVSAVNPKLIKDYGNNTLRKVKTDKADARKIARYGLDNWAELRQHTPMDTIRMQLKTLNRQQSLYAKTKTMMKNNLIALLDQTYPGVNALFDSPVREDGSQKWVDFATAFWHVDCVRNMSLTAFAERYRKWCKRHGYNFSQSKAVEVHTGAQDLIAMLPKDALTKTMVRQAIDALNAVSASLKRLKAEMQALAAQLPEYPVVMAMHGVGDSLGPQLMAELGDVARFTHRNAITAFAGVDPGADQSGTHEAKSTRVSKSGPPELRRALFLVMDCLLKTQPQDDPVYRFMDKKRAEGKPYLVYMTAGANKFLRIYYGRVKEYLASLEEN

SEQ ID NO: 158578 - protein, 358 aa, unidentified
MGNIKSSRLDFSGQPIYIGLDVHKKSWSVSIFSKYGEYKTFNQPPEVDKLLHYLRHHFPGGDYRSVYEAGYCGFWIHDQLREKGIQCLVVNPADIPTKNKERRTKRDPIDCRKLARSLRNGEIEGIYVPCRPKLEDRSLIRTRQSMVRKQTRCKNQIKGMLLFYGVGMPEERQMGHWSRRFIQWIEGIRMERASGDIALKAHLEELSHLRQLIASLNRAILRLARTQEYWPLVRLLKTVPGISTLTAMILLTELGEILRFPSLDELSCYVGLVPDTQESGEKEYVGSLTQRRHSQLRWLLIEASWVAVRKDPTLLMAFEQYCRRMRKTKAIVKVARKLLNRIRYVLKNQAEYVPCVIQ

SEQ ID NO: 158579 - protein, 374 aa, unidentified
MHDHSQAFIAFDTSKLRNAVAVAEAGRTGELRFLGEIENTDAATSKLVSKLADKYRQLTFCYEAGPTGYGLHRLIESLGHDCVVVAPSLIPKKAGDRVKTNRRDALDLARLLRAGELTAVWVPDARHEAMRDLTRAREAAVDDLKSKRQQVLSLLLRLGRHYAGKRTWTKAHMHWLASQKIEHGEQRIAFEEMLLAVRQAQERIARLEQAIRAAIPDWSLAEVVTALMAMRGLDLVSASAFLAEIGDLSRFRTARELMGYLGLVPSEHSTGDKVKRSGITKAGNRRARRILVECSWSYRHPPRVGKDKLAKVAAAPRAVQEIAWKAQARLCARYRALARRGKRPTVVVTAIARELSGFVWAVNRAAMAQAAPAR

SEQ ID NO: 158580 - protein, 345 aa, unidentified
MLYVGLDVHAKRSSICILNHDGKTVKQELIKGPWPAVVDRLRGIDQPFAVCYEASCGYGALHDQIAPLPMARQVSVAHPGQLRLIFKSKKKHDRVDAQRIAKLLYLDEVPAVHVPDVNVRSWRKLIEYRQKLLGRRSAVKNQIRAALRGCGVVAPARLWTKKALLWLKSIELPAGEKLTVELAIEELSDFAARIKRVEQELGRIAKTHAGVQLLMTIPGVGIRTAEAFIAYVDDIRRFARNRQVGSYFGLVPCLDSSAGKDRFGHITRDGPPTVRKMLTEAAWMGVRYNPTLRAFYQRIMHDDPDRKKIAIVAVAHHLCRVMAAMLRSGEVWRGSVRHDDQTCKV

SEQ ID NO: 158581 - protein, 409 aa, unidentified
MDRVIERCAGFDIHRDSVAVCVRVPGPHGERLQHVRTFGTTTAELLALRDWLRAEGVTHVAMESTGVYWKPVYYVLDEECECLLVNAAHLKHVPGRKTDVKDCVWIAQVLEHGLLRGSFVPPPLIRDLRDLTRYRRVLIDERTREANRLHKVLQDAGIKLASVASDVLGVSGRAMLAALVEGTTDPAVLADLARGKLRRKLPALRQALTGRFRPHHAFLAAQILAHLDYLEEALQTLTDRIGDLLAPFAVVIEHLDTIPGISRQTAEEVVAEVGLDMSRFPTARHLSSWAGLCPGQNESAGKRRSSRIRKGNRWLRCSLVLAAQSVRYTKDTALAARYRRLARRRGDKKAIVAVAHMLLVIAYHVIRDDTTYHELGLDYYDHRAADHARRRALATLEQQGYRVTLERAA

SEQ ID NO: 158582 - protein, 364 aa, unidentified
MAQDTMIEAAVTGGLDVSDRYTYVCVLNFSGGVVDEGRVPTTPEALRRRFSGHGPMRLVLETGTHSPWISRLLEACGHEVLVANARQLRLIAQSDSKNDRADAETLARVGRLDPALLKPIRHRGAEAQLDLALIRARDALVQARTQLVNHVRGAVKAVGGRLPACSTASFPMKVGEAIPEGLRPALGPVLDVIAAVGKELGRYERLVEDLATTRYPETAALRQVPGVGALTALSYVLTLEDPARFAKSRAVGSYLGLRPKQRDSGAGAPQLRITKTGDAYLRRLLVGSAHYVLGPFGPDSDLRRWGSALAARGGKNAKKRAVVAVARKLAVLLHRLWVTGAVYEPLRVAEQRPAATPVLTASNC

SEQ ID NO: 158583 - protein, 411 aa, unidentified
MRIIRKRCLGLDLHKKQITGHLRVHRSSEQEPERTDIKFGTMPEELLRLRDWIVEHQVSDVVMESTGVYWMHVYEILEAVTTPAVVNASHVKKVPGRKTDVVDAQWLSELHAHGLLRVSFVPPKEIRELRLMARYRTRLVAMRTSARNRTIKMIELAGVKLSSVVCDSFGRTGRALLDALAKGPVDASTVKQAVKGSLRNKTLELAAALRTPLTDRQRELLAMHLRAYDAIDAQVAQTENRLMDLAKPYAAAIEKLDAVPGINPLAAITLLAETGLDMSVYRDAHHLTSLSGLAPGNSISADKRRRIPRPKGNRYLKRICVQIAWAASRKTDSFLRTRFNRLSFRIGRNKAIVATARQILIIVYHLLAGEQQYKDLGPHFYDKRNKERTIKRHVSRLEQLGYSVVLKPTTA

SEQ ID NO: 158584 - protein, 309 aa, unidentified
MTISQDFIGIDVSKSTLDVFEGARSKRIANAGEPIAALVERWRSKDVFVLFEATGQYDQLLQRALQAGGIGFARVNPARARDFARAAGFLAKTDAVDAKMLAMMAERLRPKADAPVAQEREHLRMLHRRRDQLVHMRQQERTRLSEAREPEEKQSIVQHLAWLSGAIKDLDSRIRHFIASVGPLKQACSKLRKAPGIGPVAATTLLALMPELGTRSPKTIAALAGLAPLNRDSGIERGKRTIAGGRRRVREALYMAALAAVRSSDHFAKLYKAFIAAGKAKKLALIAIARKLLIALNAMIRDDTDFKPV

SEQ ID NO: 158585 - protein, 315 aa, unidentified
MLADLQFVGIDVSKERLDVRLHPSGKPLTVANTPAGFGSLKAKLQRLCIAAIGLEASGGYEKQAADFFATAGFVVYVLNPAQVRTFATSLKIAAKTDALDAAVIARYIATARDVLMAYQPDPARDRLSALAAQRRRLMGEAKEITSLLGTTTEPLLKRMHNRRLAVIARDVAELEAEIKTQINTDGILSQQAVRLLSLPGVGPVLTATLIADLRELGHIGAKQLASLVGIAPHARQSGKTTRSGKCARGRKSVRDVLYMATLSALKAKMPHLYPFYKRLREAGKPFKVALVAAMHKFLTILNAIMRDNSEFRHSH

SEQ ID NO: 158586 - protein, 343 aa, unidentified
MKYMGIDYHKQHFVATTVDERGRIVSKEKVSTDRCSIREYLSRANRGRDVKAVMEACYGWEYFYDEAAPCVEELIMAHPLKTRLIAEARIKTDSIDSESLAQLLRADLIPEAYAPSVDTRDKKALLRYRSTLTGVKVMLKNIVHSVLARNHIEDPAFRRLSDKFGKKGKAYLRSVTLRGNDTEILNHYLDLLEDVEAKMRLVEGRIRAEVRSDEICDLLKTLPGVGDIISMLIRYEVDNIERFVSSAKLCSYAGLVPRTYSSGHRTYQGRITKQGNKWLRWAMVEAAQRAIVNDPGIKAFYTRIAEKKGSKLARVAVARRLLQIAYWVWKERRPYRAAALFCV

SEQ ID NO: 158587 - protein, 429 aa, unidentified
MNYPPVAGIDVGKNFSEMCILSPNNEIYHRIKIYHDSIDSIQKAIGLLQKAEKDFAIRPVVVLESTGHYHKILFHYLSDSGFEVSIINPIQFDSIKNIGIRKVKNDKFDAHKIALLYRFSFIKTTAVPDDVIDCLKSLCRQYYKLGDELTTYKNRLIGIIDQVMLNFTEVFQNVYSKTALAVLDRYPSPNQILKANKKTLISLIEKTSKKGLGWSTEKYELLVLKAKEFKDLSISNPGNLAILKVNISMVRTLQEAQKNILDAINEIILADSLKDDPVLSPIINLLCSIPGIGVLTAATILAEVGDFSAFSSPNKLVAFFGIDPSVNQSGEFTGTRNKMSKRGSRLLRRVIFTTALANVRSKRNGNKTNPVIYEFYQKKCMNKPKKVALGAVMRKLVNIIFAVMRDKKPFELRTPEEHKELLLTRSLVA

SEQ ID NO: 158588 - protein, 375 aa, unidentified
MKEKVRFLGLDVHAETIAVAVAEQDGEVRSLGTIANRAESIHKLVKKLGPVDQLRACYEAGPTGYVLYWQLAELGVKCEVIAPTLVPVKAGDRVKTDRRDAEKLARCHRGGDLTAVWVPDAGSEALRDLVRAREAAKQDQLRARHRLSKFLLRSGQRPAAGLKAWTQLYMAWVRQLRFEQVAQEWTRLDYLHEVEHMAERVVRLEQAIAEAVKLASPEIQEVVKDLQALRGIAQISAVTIAAELGNITRFESARQLMGYSGTVPREDSSGKRAQRGSITKTGNAHLRRIAVEAAWSYRLRPGIGPALRKRQDGVPEDLKEIAWKAQHRLHKRYSRLAAAGKDQRKIVTAVGRELLGFIWAIGVKAETAAKQRMAA

SEQ ID NO: 158589 - protein, 319 aa, unidentified
MNTTINASNRNTERNVGIDVGKDTLDIYIYELEKHWQAANTLEGIKHLIKQLNRYQLTRLLVEATGGYERRLVEACAENDQPVIIVQPIQVRQFAKAQGVFAKTDKIDARLIAKFGVVMQPEPRALPSKKVRLVRDLLARKRQLNETRTQELNRQHKAEKILIPSHRRMIKLIDKDIAWINEKLAKEVSVITEWQRIYEVLSSVPGIGDGVAYTLLGELPELGQLSHRQITALTGLAPFNRDSGYMKGRRRIKGGRAPIRTVLYMAMMCAIQHNPVMKQFYQKLVAQGKHKKVALTACMRKMITILNAMVRDDKEWQMT

SEQ ID NO: 158590 - protein, 381 aa, unidentified
MLLNSNASRQKSQMENHISIGIDQGATLWYATILNHNTDKKSRYSFKGEDKEAECYVKIKKLKESHQGTISVCYEAGRSGFTPARVFEKLGCMVRVLPYNKIQIINTGKQVKTDAVDSLFLAEIDPFDNSIPNVWVPSVRQEELRGIPREQQRIQKDIQMNNNRIIAVLQRWLVKNENKHLSAIDWEEKMLGWQNDKNFSKIIPILEFKKIKLIVEEIKLLEKHKEEWEQIIKETEEEERVQAKIKGEEFFVDVLREYRGIGDVIARTFCFEIADFNRFGNGKKFSSYLGLTPTPFASGKMNKEQGISKQGNPEIRRLAIQLAWLWMHWQPDSFLTLKYKEQLNKKGRQRKTAIVAMGRQLMVALYRRVVKGIDIEGAIKN

SEQ ID NO: 158591 - protein, 477 aa, unidentified
MKDHRIAGRRRQLSQKRHRHPGPALLERIQPDAAGIDCGATSHFVAVPRDRDPQPVREFRTFTADLQRLAEWLVQCRIKTVALESTGVYWLPVYEILEARGLEVVLVNARDMHHVRGRKSDVSDCEWLQELHSVGLLRPSFRPAAAIVALRSYVRHRQTLIETAATCIHRMQKALTQMNLQLHHVLSDLTGVTGMAIVRDILAGVRDPRALAAHRYGGCKASEQEIAAALTGNYRPEYLFVLRQNFAAFEFQQRQIADCDQAIETQLASLADSRPPSSAELPAARPRAKPSKNEPRVELRAPLHRITGGADLSQLDGIGPYGALQLIAEIGTDMSRWRTEKHFTAWLTLAPNNKISGGRLLSSRTQPSASRAAAVLRRAAMSLTRSATALGAYYRRVAYRLGRPKAITATARKLAVLVYRVMRGDLVYRDPGAAAYLQHHQARLIKGLRRRAQELGLGLINLATGEVLDHATAATVS

SEQ ID NO: 158592 - protein, 368 aa, unidentified
MPRIAEQVLPVTGGVDTHADMHVAAAVDQVGRVLGTQAFPATAAGYRAALAWMRAHGELVKVGVEGTGSYGAGLARYLAACGVEVAEVMRPNRQARRQRGKSDAADAVAAALAALSGEASGVPKSRDGLVESVRALRVARAGAVKARTQAGNQLRDLILTAPEQVRQQLAGLPCQRQVDLAARFRPHDLAGPAEGAKAAMASVARRHQELAAEIARLDAALGELLTRAAPPELLAKQGVATVVAATLLTTAGDNPGRVRKEASFAALCGASPVDASSGKQLRHRLNRGGDRQANSALWTIAMTRLAHDPRTKAYAARRTTEGKTRKEIIRCLKRYIAREIYKALCQPKPPATTSAPQVKQDLSAPVLT

SEQ ID NO: 158593 - protein, 347 aa, unidentified
MTGNRRCIGLDVHREFAQVAVWQGGTVTQAATFATTPEGVREFAAGLGPGDEVALEATGNTWAIATVLASRAGRVVVSNPAKTRAIAEAKVKTDKVDAAILAQLLAADFLPPVWMPDAATSALRRQVLRRAHVVRQRTRLKNQVHAILARNLVPRCPAADLFGIKGRHWLAQQDLPPDERDAAGALLRQLDFHADELRLIDADLGRAALERPDVLRLMTIPGVDATVALSIVAAVGDFTRFRTPDKLVAYLGLNPRVRQSGGQPASHGRISRSMNRITLTWSPWPGCCHGSHRGQCGSSGRATVTRSAGCSSGTATTSLARPSISTSATCLPTSSAGPSTRPGTRRY

SEQ ID NO: 158594 - protein, 344 aa, unidentified
MINTTIGLDLAKSVFQVHGVDAAGSVVTRKALRRAQVLPFFTKLPPCLIGIEAYGTSHHWARELTRLGHTVKLMPPAYVKAYVKRGKTDAADAEAICEAVTRPTMRFVPIKSREQQAALSMHRARNLLVKQRTQLINMLRGLLAEFGIAIPEGLERALLVARQVVDGAVLDVPAQAGKIVLMLSQQALSTHAQLREIDCALARLHRIDDMARRLATIPGIGPIGATALAASVTDPGQFRSGRQFAAWLGLTPLQNSSGGKERLGRITKMGDKYLRKLLVVGATSLVRRARHKPQTADHRLVALLARKPVRVATVAMANKMARIVWAVMTRGEVYQAGHAPMLAG

SEQ ID NO: 158595 - protein, 392 aa, unidentified
MNAQALGWDNHRKFSKVSVMEQTPDGEIRAVERARLEHDDKDAMRAWLSHLDPEIPVALEATFGWPWVADLLEELGHPVHLGHPPVIRALAKHEAKTDRCDSDRLGKFQLRGILPESYLAPPDVRQRRERTRYRMALSLLRTGVKNRVQAILHRFGILHDFSDLFGKAGRSFLEGLELPEGSRQALNGYLNVLDVLTHLLDEVEQWMEKNLEEDEIVRLLTSIPGIGLILAHVIRAEIGEIKRFPTFRHLASYAGLAPMSDDTAGREGPRHCSMACNHVLRWAFVEAVHGVQRTKGPHGFRLRQLNSRLSGQGRPKGRKSSAKVAVAHELSKLVHVVWTKRTPYTDTPPPRPGSREDRRQSKESPTVKTPLRSDQPRHPMVRRRATVGQTRL

SEQ ID NO: 158596 - protein, 347 aa, unidentified
MDMIGIDLHKRESQLCILDAEGRATERRIVTSRDRFTAVLGSRPPARILVEASTESEWVACHLEALGHAVVVADPNFAPMYATRSRRVKTDKRDARTLADALRLGAYRPAHRVSAARRHVRAELAVREALVRTRTRCIALAKALVRRDGLRVPNSTAAYFVERLTALPLSPVLAAELAPLIAVLAPLNVQIDAADARIAALGRTDPTVALLQTAPSIGPVTASGIVAIADDIGRFPSAHQFEAFLGLVPGERSSGEKRRLGHITKAGNRRARYLLVEAAWRILRSRSADTAVLRAWAQRILHRRGKKIAAVALARRLAGILYAMWRDQRAYDAGHLRRPQPVPASAA

SEQ ID NO: 158597 - protein, 276 aa, unidentified
MTTAGSFIGIDVAKRQLDVAERARGARWTTANDGAGIAELVERLRAAGPVALIVLEATGGYEIPLVAALTAAQLPVVVVNPRQVRDFARAGGKLAKTDAIDAAVLAHFGEALRPEPRAVPDEFTRELQGWLNRRRQLLEMVVAEEQRLAQAARVIRPQIQAHVEWLRAQLRDVDTALQSGIRNSPVWRENENLLRTTPGVGPVLATTLLADLPELGRLNRRQIAALVGVAPLNWDSGQQRGTRHIWAAARRCGRRSTWRRCRPSGAIPSSGRSSSG

SEQ ID NO: 158598 - protein, 345 aa, unidentified
MKIVGCDLHTRYQQIAMLDKETGELIERRLEHANGEARAFYSELAVPVLVGIEATGHTRWFERMLAELGHELWIGDAAQIRAAMVRKQKTDARDAAHVLPLLVEERFPRIWRPGLEERDLRQLVWHRQKLVWMRNAVGNQLHALAMGEGVCRKKQLFTKKGRVELEALRLGPWASHRRQELLRMLDQLDASLRELDQAVAEQAEQNAAAQRLMTHPGVGPVTSLAFVLTLGPVERFARSKQVVSYLGLNPREHSSGGRQRLGAISKQGNPMMRSLLVEAGHTAARLDQELKQDYQRLKLRRGSGVAKVAIARKLAVRMYWMLRSQASYAQLVRMQGSQWATLVKS

SEQ ID NO: 158599 - protein, 338 aa, unidentified
MKLYAGIDLHSNNSMVVIIDEQDRVMFEKRLPNELERILFALASFKQWLVGVVVESTYNWYWLVDGLMQSGYSVHLAHPAALVQYQGLKYSADEHDARWLAHLLRLGILHEGYIYPREARAVRDLMRRRMQLVQTRSAQVICMQTQFTRSTAKSPSSNALKRMLPDEIEALLEERNVASGVRANLEVVRTLNREIARLEREVSEQVKLAAQYEPLLSIAGIGRILALAIMLETGAIERFAGVGNFSSYARCVASKRLSNDKKKGEGNSKCGNKYLAWAFVEAAHFAVRYNPRIKRFYERKAAKTNKIVATKAVAHKLARAAYHVMRERVPFDEARAFA

SEQ ID NO: 158600 - protein, 346 aa, unidentified
MQYTAFDAHKHYTWARVERPDGTVVREKKILHERGAFRQFLASSEPGSLVAVETVGNWYWIVDEVEAAGCMPQLVHARKAKLMFGSVNKTDRLDARGLVRLQRAGTLPVVWIPPRALRDARELPRTRMVLVAQRTRLKNRIHAALSKYGILLADASDLFGKRGRQELQACLGELPPHTSFVVTRLLEQVDQLDREVEALEQRMGELFEVDAATQLLMTLPGVGFILGVVIRTEIGEVSRFSRGEQLAAYAGTVPRVHESGGRRHYGPVRSDVNQYLKWAFVEAANVICRHRRKHPQRHTSRLYDRVAKRKGHQKAIGAVARHLAEATYWMLAKGEAYRDPGSSTGA

SEQ ID NO: 158601 - protein, 395 aa, unidentified
MMYMGIDIGKKHHEAGIVAADGRRMGKSLRFSNTKEGFERLLSFVEWRLSGEEELVTGMEATGHYWLALYSFLCERGFSVRVINPIQTDGFRNFHIRGTKTDSVDSFLIAEAIRFGNFESTRLAEEDIVSLKNLTRLRESFRDMCSDLKRKAVAVMDQVFPEYESVFPDMFCLSSRTALKECAVPAKIKEMDLNVLTGLVEEASRGRLGEERARRIKEAAASSIGVKISADTLALEMRLLLESMEDFEKRIAVIDGKIAEIMAGLGTEIATVPGVSPVTGAVMLAEIGDIDRFDSPKKLVAYAGLDPQLKQSGAFEGNRTRISKRGSPSLRRAFWMSAVVAAQTDPVFKALYEKKRREGKAYGTAIGAVARKLACVVYSVLKRRRPYEVRLSAAA

SEQ ID NO: 158602 - protein, 350 aa, unidentified
MEDSRGELCRNRRVIGTVERVRVDAQGKIVKEAKAASEPEALVAFFRSLGFAVKRIGLEAGPLSQWLHAGLKRAGFEVVLLETRHVKAALSAMTVKTDRKDARGIAQLIRMGWFRPVHAKSIGSQEVRALLVARKQLLARLIDVELSMRGILRGFGLKVGPVTRKGFEARIRELVTGQATLERIAGAMLSARAALKAEYEKLHKAVLALVRDDAVCRRLMTVPSVGPLVAITYKSAMDDPYRITRSKSAGALFGLTPKKYQSGEKDVTGGITRAGDEMVRTALYEAANVLLSRITRFSKLKRWGMDVAKRRGSKRAKVALARKIAVILHRMWIDGTTYRWAAAEPTAAKA

SEQ ID NO: 158603 - protein, 406 aa, unidentified
MSSRHIRRGPGPSHVLITPDHAGNVVGVDPHKRTVTATVVDPRGGIVASEHFRVSGDGHRALEAWARQFGVIARWGIEGASAWGRHTAIFLVGRGYDVRDVCPARTGRQDRARQRGKSDTLDSERIARETLAHPLLPRAFKRAGQDAGPDEQTELLTIWWHARCSLLKRRQHLLSEAEALLRGLPLELIEQLPASKAVRPRLSALTRVTRRRRLDPPTALRVRLLVDYRAQIAELDAEDKQVTRELRTLVQASGTTLEQLCGLSTVSVAELLVEVGDPRRFTEGGFARFNASAPLVASTAEGPGEPVRHRYNPGGNRRVNAILHRMAVTQLRCDPRAQALYANARTHGHTKKEARRILKRHLSDVIYRRMIRDIAAHPAQPLLAAEPRAGAAQSRVVRQGRAKRAA

SEQ ID NO: 158604 - protein, 344 aa, unidentified
MHIASIGIDLGKTTFHLVALGERSKVLVRKRFSRTQLLAYTANLPSSLIGLEACAGAHFLGAALRQQGHEVRLIPGQFIKPYRKSNKNDFLDAEAIAEAVSKENMRFVPIKTQEQLDVQALHRVRDRLVQRRTALINQIRGFLLERGITFAAKPIHLRKQLPAVMEDAEQNLTPRLRWLLQRLWQEWQQLESDIQAITEEIERISQENALCQRLRQIPGFGPLVSTATVAAIGNGAGFRRGRDFAAWVGLVPRQYSTGGKPKLFGISKRGNVYLRRMLIHGARAVLLRVKYDSGGFGQWVHRLAARAPRNKVIVAIANKLARIAWAVLFKGKDYRHQPLQPAAA

SEQ ID NO: 158605 - protein, 339 aa, unidentified
MKFYSGMDLHSTNTYTAIMDENRKRVIDRRLANQPNLILAFLEPYKANLEGIVVESTYNWYWLVDLLQENGYRVHLANPSAIQQYRGLKHVDDRHDAFWLAELLGLGLLREGYIYPKEVRPIRDLLRKRAHLGRLRTSLLLSAQNIVLRNQAIKIGSEDMKKLTTDLLTPHLRESEELFLTGKISKELIDAFTRQIKAIEAWVMKQLQPNKVFSNLLTIPGVGEILAMTILLETGSISRFPKVGNYVSYCRLVASQWTSNDKVKGKGNERNGNKYLAWAFSEAAEHARRHYSMCRTFYNRKLQQKNGKVAHCALARKLSRAAYYIQKDQVVFNETLLFS

SEQ ID NO: 158606 - protein, 341 aa, unidentified
MKKNLFFIGLDIAKADFAASIYQIPGQPIITKEAIPNDRKGFEMLLLWLNDYHIDKKNCRICMEATGVYSQAISYYLLFQDFPVSVEPPLKVKRAFDPVGHKTDPVDSKQIAEYAYRFQDELTSWKPRDEILEKIRQLLSVREQFTKQKVALDNSIQAYSKQRVQVALIKKAQKETLNQLKKQIARIDKELANLIKQDPQIFQRANNLDSIPGCGMLLAAHLLVITENFTKIQNSKRLAAFVGIVPYQHQSGTSVYKRAKIRHFGPGPSRKLLRLAAQSVATHNATFRHYYLRKLDQGKAKPLVLNNIANKLLKIACTIIRNNTRYIKDYRSINPMYLKSA

SEQ ID NO: 158607 - protein, 342 aa, unidentified
MHITTIGLDLAKNVFQVHGVDANGKAVLRKQLKRSQVLSFFANLPPCLIGMEACAGAHYWGRELTKLGHDARLMGAQFVKPFVKGNKNDANDAEAICDAVSRPNMRFVPVKSTEQQDIQMLHRVRSGLVAERTAQANRLRGFLGEYGIVIGPGLTQLRKHLPEILADDAHGLSALARELLSDCHLRILELDRQVSDCMEKMLQLHRSSPASQSLGAVPGIGPITATALVASLGNGKAFDKARQVPAWLGIVPKQDSSGGKPKLLGISKRGDTYLRTLLIHGARAVVKAAAQKDDAQSRWINALVQRRNANIAAVAVANKNARIAWALLRYGEVYRAPAAGNA

SEQ ID NO: 158608 - protein, 381 aa, unidentified
MTTTVTHHEQRNTTEATLFVAFELREKTWKLGFTTGHGQKPRERTVAARQHEHVLHEIAQAKRRFGLPETAPVVSCYEAGREGFWLHRFLQAQGITNHVVDSSAIEVNRRRRRAKSDGLDVRKLLSMLLRYTQGERQVWQVVKVPSVEAEDHRHLHRDLATLKQERASTTTRIKGLLSRQGLRVTSLTKLPEQLEALRLWDGAPVPPGLRCRVLRVYAHHTFLSAQIAAVEAERRAQLHASTDAKIDKVRQLMLLKGIGINGAWLLVMAFFGWRAFKNRREVGGLAGFTPTPYQSGESAREQGITKSGNRHVRWMTTELAWSWRRFQPESALSVWFRERFGSGGKRLRRIGIVAVARKLLMALWRFLETGVVPEGAGLKEG

SEQ ID NO: 158609 - protein, 337 aa, unidentified
MEQQTQYVGIDLHRRRSVIVRRTGAGETLDTVRIDNDPVALAKELAKAGEHPEVILEACYGWYWAADVIQECGGNLHLAHPLGNNWGNRRVKTDERDATDLVDLLRLGRLAESWVAPPPQRELRELVRYRAKLVHLRTSLKAQVHAVLAKEGVPVPMSDLFGVGGRRLLDEVHLGDAYQLRVNSLRDLIGHVDREITVVENQVAPIFAGDLGFHAVQAIPGVGPVLAAVFVAEIGDVSRFTSARHLCSWAGLTPKHKESDIVVRRGHITKQGSRLVRWAAVEAVARQSTDSPIRRHHRHVGERRGTKIGRVAAARKLLIYVYYGLRDGEIRCLAQGE

SEQ ID NO: 158610 - protein, 323 aa, unidentified
MTSPTHELDPAAGHAGIDVSKERLDVHLLPKGEAFAVNNDPEGIDELVERLLQERPELVVLEATGRYERPAATAIASAGIAVAVVNPRQARDFAKATGRLAKTDKIDAQILARFAAAIEPSPSVLPNHEAQALQAILTRRRQLLLMLVSEKNRLLMAPEAVAKRIRAHIRWLEKELTRTDRELDEAVQESEVWRRNEELLRSVPGVGPVLARTLLAELPELGTITHKRLSALVGVAPFNRDSGKMRGKREVWGGRAPVRATLYMGALVATRHNPTLKEFYERLLAAGKPKKVALVACMRKLLSILNAVMRDRAIWRCPHILTP

SEQ ID NO: 158611 - protein, 346 aa, unidentified
MLHAGLDLSRKRLDVRVLDDAGDTALETWTAPDRDGLHSLVGRVGRLGESVAAVIEAMNGARFVHDHLELLGWDVEIADAAKVKGLAPLACKTDRIDAWVLAELSRRDLVPAIWLPDPAVRAERERARWRLHLVKRRTALKNRVHSILIAFGYPRLASDLFGIAGREQLAALEFPEPWHSNLLGALRLIDELDTDITSCERDLRTLGAQHPYTSLLMTAPGIGWVLGYTIAAEIGDITRFATPKKLTGYTGLCPRVEQSGESDWRGPLAKNGPRYLRWALIEAAVHAAHHPAYRAHYERTKRRCGKQRGAKIARVEIARKLATALWHMLTRGEPFAPTSPNHSLAA

SEQ ID NO: 158612 - protein, 340 aa, unidentified
MNVTTYGLDIAKRVFQMYWVEAQSGEIVNRRFGREELIEFLAKRCAGRVAMEACGSAHWWARKMRSLGHEVVLLHAKFIRPFVQNNKTDAADAKAIWTAVQQPGMRTVAVKSEDQQAMLGLHRMRAELVKFRTMQVNQLRGLLYEYGLSFRAGRQAGVAQMGRRMEELEQWVPGLLLEAVKEQLQRVEHMDEEIEALERRIGSWQKQQAACQAVAGIAGIGKLTATALVATMGDAKAFKSGREFAAYIGLVPRQSGTGGKVRLLGISKRGDSYLRTLLIHGARCVLFKAKHKGAWSEQLLKRRPTNVVITALANKMARTAWAIVAHGRTYQRDYVSVKPA

SEQ ID NO: 158613 - protein, 400 aa, unidentified
MNPVIGLDVSKGESHAQAFLDRGVPHGKIFRFSHDLEGLASFLNYLKGVESAAGMRPSIVMEATGHYHSPVVLYLDEHQYLNIVINPLISHNAKKTNLRRLKTDAADAFLLGSLFYKEEFEPHKKRGHHLMNLRYLTRQHESLTGMYVQAKLQFQAILDQVFPEYHGVFGDLYSKVSLRLLDLYPTSREVLELYEKEIATTIGRLIGRGKSALWCLERAQILVAAAKRNPFKETTFTSHLISLQLLIQLLLQYQDHLATLDKSIEALAEELLEYDLIQSIPGIGTKIAATILAEIGEIDRFNHAKKLVAFAGVDPSVFSSGKFTATINKITKHGSRRLRTALYQAVRCGIRSNRNTKLRAYYDKKRAEGKLFKVAIIACVNKLIHWIFAILTTKEAFRLE

SEQ ID NO: 158614 - protein, 366 aa, unidentified
MKQVTTYVGIDAHKKDLFVAMVIGAATTPVTWQLANEPGAVRRLVRKLERDTPGPVQVFYEAGPCGYALQRQMITDRITCDVIAPALMPRKPGERVKTNRRDARKLAELGRAGLLTVVQPPTPADEAVRDLARARDDAREDLQRCRHRLSKLLLRRGLHYPGRNWSQAHRRWVDSLTWTHAAERAVVGDYQLAIDHTEARLVELDARLAELAEQAPYREPVGWLRCFRGIDTLTAMLILAELHDFRRFGSARALMAFLGLVPGEDSSGEKHRRGRITKMGNALVRRILVEASWHYQHRPSVGRGLKARRTGQPARVIAIADKAQQRLCRRFRRMLAEHKPAPKVAVAVARELAGFLWAALQRPEVA

SEQ ID NO: 158615 - protein, 343 aa, unidentified
MSEITVIGLDLAKHVFQVHGADPDGRPVLRKRLRRGQVLEFFASLSPCLIGMEACAGSHYWGRELQALGHEVRLIPPQYVKPYVKTNKNDATDAEAISEALTRPTMRFTAVKSAEQQSVLMLHRTRELLVRQRTMLVNALRGHCGEFGIVAAKGLSCAGDLIKRIEDPADTALPDLPRQALQCLTSQIRAIQEQIALIEKKLLAWHSSCGASRRLAEIPGVGLITATAVVASVGNATQFRSARQFAAWLGLVPQQHSSGGKERLGHISKRGDGYIRRLLVHGARAHLSWSRRKKQIRSAWLTRLLVRRPTNVVLLAMANKTARIAWAMLSRGERYQEMIAAAA

SEQ ID NO: 158616 - protein, 483 aa, unidentified
MKPKPQEKNKTASNHPTPHRWHEMNRKQRRETMRTIQSEELSLEVVHPDAAGIDIGNESHYVAVPPSRDSQPVRRFGCTTAELKAMAAWLKQCRIRTVAMQSTGVYWISVYDILEQVGLEAYLVNARDTKNLPGRKSDVQESQWLMKLHTYGLLRNSFRPAQKIRTMRTYWRQRNDLVQSAGRHIQRIQKALTQMNLQLANVLSDLSGMTGQAIIKAILRGERDPHKLAEFRDPRVKASEEQIARSLEGNWQEDQLFVLQQEQHGYEFCQKQMAECDRQLDQHLQHSEDRSHGAPVPEEKRKERLKKRKNTNKPQFDLREGLFRMTGTDLTRIDGIDVMTATTVISEAGWDMSKWETEDHFVSWLRLCPDNRISGEKIIGKGRLRTNNRATIALKMAATTLRLSNTYLGAQFRRLRTKLGAPIAIKAMAAKLARLVYRMLRYGMEYVDRGAAFYEVEHRQLQVKHLKWKAAKLGYQIVQAPLA

SEQ ID NO: 158617 - protein, 344 aa, unidentified
MTYYAGLDVSLRTVNICVIDDEGERVAESKLASDVQDIVAYLDELNINIESVGLEAGTLTQYLTYGLQSAGFEVICMEARQVKAALSAMRNKTDKHDARGIAQLLRSGWYSRVHVKSMQSHHIRMLLASRKAVLSKCIDLENEVRGLFKIFGIKLPPKLGHGAFDNAVRDIIEIDETLSHALLPMLDARLTLYQTFRILDNRTRKMAHRDPVCERLMSAPGVGFITALTFKAGVDDPTRFKRSRTVAAHFGLTPRRFQSGEMDIDGHISKCGDADVRCALYTAANAMLTRSSRWSSLKAWGMQLAKTRGHRKAVVAVARKLAVILHRLWIDESQFCWGNEGARS

SEQ ID NO: 158618 - protein, 322 aa, unidentified
MQQFVGIDWATRRARWCAVTPAGAVIDEGWAPADEDGLAGLVMRVGPEASACLEMMSGAAWVRERLQAAGWTVQIADARKAKAVGSLAAKTDKLDARVLAELARRDLVPQVHVPTFADRELKERLGRRMHMVRLRTAAINRAHGVLSQFGVRLAFDRLRAPDADQLLLERGVPAVWRRSIAEAVAIVRVLDERLIPIEQELRPLARADERVRLLVTIPGIGDLLGLTIASEIGDISRFASARKLVGYSGLTPRVYQSGQKSRTGKLSRTGSTMLRWAAIEAAHQAWRPNNPWHQLYLDVKQRCGGKGNPAKAAVARKILIAS

SEQ ID NO: 158619 - protein, 371 aa, unidentified
MQETSRVFVGLDTSKLKISVALAEEGRQGEVRFLGDIDNTPDAMKRLVRKLRGKYLQLLFCYEAGPTGYGLHRQITALGHDCSVIAPSLIPKRSGEHVKTNRRDALTLARLHRAGELTTIWVPDLGHEAIRDLVRAREAAMEDLREKRQQLQSFLLRHGRLYPGLRSWTLVHARWLSSLIFEHPAQYLVLREYRQAIEDAEARLKRLTQQVADVVSTWSMAPVVEAYQAMRGVAFLTAVTFVAEIGDVRRFETPRQLMAYLGLVPSERSTGEQVRRGSITKAGNPRARRVLIEGAWTYRYPARLSRPLQVRQESLPEVVRAIAWKAQVRLCARYRRLMAAGKRQTLITTAIAREMAAFLWAIGHEVQPCSA

SEQ ID NO: 158620 - protein, 347 aa, unidentified
MLADQLDYIVGVDPHRDSHALVVLHVISGAVVIEAAVSANSEGYAQALELVDQHAAGLRAFAVEGTGSFGAGLTRFLTGQGERVLEVSRLRRERRSGGKTDALDAIRAARSVLAQERPATPRAGGERQALQALVAAREGAVNAKRAGLCQLRDLLITTPEPLRSELRPLTRARLLQRLAATRPDARRDPELRGSMLALRSIARRVLQLTAEERELAREIETLTRKLAPQLLEQPGIGPHAAAQLVLSWSHQGRITSEAAFARLAGAAPIPASSGQTIRYRLDRSGDRKLNRALHMILVTRKRSHPATIAYIARRVEEGKTRREANRCLKRYLARNLYRLLEHPPMTT

SEQ ID NO: 158621 - protein, 358 aa, unidentified
MVDKVTEAAVVGGVDTHKDLHVAAVVDQNNKVLGTQYFSTTRQGYRQMLAWMTSFGTLKRIGVECTGTYGSGLLRYFQNAGLEVLEVTAPDRMERRKRGKSDTIDAECAAHAAFSGIRTVTPKTRDGMIESLRVLKTCRKTAISARRVALQIIHSNIISAPDELREQLRNMTRMQLIRTLGSWRPDASEYRNVTNVYRISLKSLARRYLELHNEIADLDVMIAAIVDELAPELIKRNAIGYESASQLLITAGDNPQRLRSESGFAALCGVSPVPVSSGKTNRYRLNRGGDRAANSALHIIAIGRLRTDAKTKEYVARRVAEGHTKMEAIRCLKRYISREVYTLLRNQNRRINSIPITA

SEQ ID NO: 158622 - protein, 316 aa, unidentified
METPQPFVGIDVSSQRLDVDSLPASHHFSEPNTEDGIASLVLRLRKLNPQIVLLEATGGYEIPVAYGLYEAGLPVVIMNPKALRHFAKAIGKLAKTDKLDAQVLALYAQSIRPPVRPLKDQEQLELANLMTRRRQLQGMIVMEENRRRTCTPRVRGNIELSLAHLRQLLKDLDREIHDSIRRTPLWHENSEILQSFTGIGPKVSASLIAVIPELGTLPGTKVSALAGLAPMNRDSGQYRGKRKIQGGRPAVRQALYMAALVAAHHNPVIMEFYQRLRLAGKPAKVALTACMRKILVILNAMLKNRTYWNPQLPLAA

SEQ ID NO: 158623 - protein, 381 aa, unidentified
MNAVGIDVSKGKSMVAIMRPFGEIVSTPFEIKHTSSDINSLVKLIKSIEGESRIVMEHTGRYYEVLAHQLSEANLFVSAINPKLIKDFDNDSLRKVKTDKADSVKIARYALDKWQNLKQYSVMDELRNQLKTMNRQFGFYMKHKTAMKNNLIGILDQTYPGVNTYFDSPARSDGSQKWVDFASTYWHVDCVRKMSINAFIDHYENWCKRKKYNFSKSKAEEIYGKAKELVPVLPKDDITKLIIKQAVDQLNSASITVESLRTLMNETASKLPEYPVVMAMKGVGTSLGPQLMAEIGDVSRFTHKGAITAFAGVDPGVNESGSYEQKSVPTSKRGSSDLRKTLFQVMDVLIKTHPQDDPVYQFLDKKTGSKETVLCLYDCRC

SEQ ID NO: 158624 - protein, 424 aa, unidentified
MPEEGLIMAEEVEWFVGIDWASENHQVCLVDAHGKVCGERTVAHGGAGIEELCDWLIARTGAKPEAVAVAIEMPHGPVVEALLERGFRVYAINPKQLDRFRDRFTVAGAKDDSRDARVLGDSLRTDRHAFRPVAVDDPVIVELREWSRMAEDLQQERSRLASRMREQLWRYYPQMLTLGADDVAAEWLLALWSQAPTPAKAARLRASTIEQLLKAHRIRRWQAAEVLQELKQKPLPVADGVAEAASAHIRTLSARIRLVNQQLKAAHRKLDELCDRLVPPAEGEPGQRCEQHDVVILRSMPGLARIVLAVLLSEAWQPLRRRDYHVLRCLSGVAPVTRRSGKSCVVVRRYACNKRLANALYHWARVAAQRDEISRQRYAALRARGHSHGRALRTVADRLLALACTLLEQQALFDPAYKARQAAA

SEQ ID NO: 158625 - protein, 343 aa, unidentified
MERVYYIGLDIHKRIIFYCIKTIDGGLWARGKVEADRKSLGEWLKGLPGLWIGAMEATIFTGWVYDFLKPYAVDLKVAHPEMLKAITAAKKKNDRADAERIVDLLRIDLLPECYMLPEEIRELRRILRYRNHIVRTAVKMQNKMTGLLMEVGVTYSKKRIHGKKYFREFLERVEEIPPSVKELLKLSRSSYEIFSSCQKRLVGALRQNDLIRDRVEGLMGIRGVGELTALTWVLKIGEPGRFASIRQAVSYCGLCSAQRESAGKEQRGPISKKRNKHLQTVLIEAAKLAPRWNRQLAVLHERELQKGNRNRATLAVSRKLVAYMLAVDKQQTSIKLLGEKQAA

SEQ ID NO: 158626 - protein, 349 aa, unidentified
MIHVGVDLHQRFCYMTALDSRGRQLNAQAVANDAAALQAYFRQFRKPVRAAVEACSFWPAFRAAVGEQVELRMVHPMRVKAIAAAKLKNDRIDSATLAHLLRCDLLPEAWMADETTRELRQQVRLRATLVRQRTRLKNQVHAILHQHGLKAGGGTDLFGKAGRVWLRQARVGQKAQDALSIYLKLIDEFTVHVEQQDRGVKHFVNGDQRAQWLMTIPGIGQYSAMLLLAEIGDIQRFAHPRALSNYAGLVPWLRESADKRRSGGITRVGSPWLRWIMVEAAQVAVRTSPAVRCYFERLCRRKHRNVAVVAVARKLLVAAWALLQHGECFDESTFVRDCGKDGAARLGKR

SEQ ID NO: 158627 - protein, 347 aa, unidentified
MLIIGCDFHPGFQQVAIFDNTTGEIQERRLGHRAEAEQFYRAVTGPQVRVGMEACGHYPWFERLLAELGFELWLGDASRIRAQAVRQQKTDRRDAAHLLEMLLEHRFPRIWVPSLEERDVRQLLVHRHKPVQTRTQVKNQWHALALSQGVQRKRKLWTQAGRAELEQLEWLPYAAQRRKHLLQSLDRLEQEIAVLNQRVEAEVAQRPAAVKLRTHPGVGPVTALAMVLTLGPAERFASAKQVGSYFGLIPSEHSSGGRQKLGRISKQGSSFLRFLLVEAGQSAVRKDAELCRFYRRLAARKHRALAKVAVARKLATRWYLMLREDWTYAQLCRAMVSVSPSHSVVER

SEQ ID NO: 158628 - protein, 363 aa, unidentified
MKKVSKQMWEKEVSSPPKPAMTVGLDLGDRFSHYCLLNADAEVIEEGRIRSTEAALRLHFEGEPRQRIALECGTHSPWVSRLLKQLGHQVLVANPRKIPTITGSESKNDRNDAEALARLAASDPKLLAPVQHRSQQRQLDLNLIQARAVLVRARTMLVNALRGLIKSGGGRLPACSTEALPSRAPAAVPPFLAEVATPLIDQIALLTTQIAGMDKQIDKLGAKYPEIAVLRTAPGVGPVVAATYALTLDRVDAAPSNRSAGAFLGLRPGQGQSGDSNPQRRISKCGNTYLRSLLVQSAQYILGRFGPDTALRRWGLKLAQSGGKRGKKRAIVAVARKLAVILHSMWRSGQPFQDFPQPVRAAA

SEQ ID NO: 158629 - protein, 314 aa, unidentified
MNSNKVPQRIKKVNSNGICDIDHYLALDWSLKVMAIAHMNQKSGAPKIHERPSNIKELKEYLVSLKGRKILALEETTTSQWLYLELVDIVDRIIICDPFRNRLLSDGPKTDKIDAGKLCMLLRAGLLKEVFHSSDTLYDLRVLVSAYEDVLGSGVRIINQQNALERGHFTTSDNAPFILEHMKKNIEIYRASKKEYKRKFEEIVKKHTIAKYQDEIPGIGVIGAVKVVATVVDAHRFPYIGKYWCYCGLAQNEKFSGGRSYGHRRPRFNRRLKSVYKTAASSCISGKNNPMKQYYNFLVEKGIAEHNARNAVAR

SEQ ID NO: 158630 - protein, 433 aa, unidentified
MTIDSAAVRATEGKKMKPWLEITHYAGFDWARDHHDVVIVDRQGQIVADFRIEHSLAGWQEFRDKVKPYPALAVAIETNQGTAVDQLLSLDGAIYPVNPLSAKSYRERKAPSGHKTDRLDAWSLAEALRQDGQQWKALQPLDPLTQQLQMLCRDEIGLIKQRTALINQLQQALVEYYPAALEAFEDWTQPFCWDFIIQFPTPEKLADAGRRRWEKFLHTQKLWRPETASKRMEIFQNARQFCGSATVTSAKSLLALSLAKLLNALQLQLDQYRQQIEALFKQHPDHDLFGSLPGAAQTLGPRLLGEIGGNPRRFEDTEALQCVAGTAPVSFQSGQIYRVHVRYQCNKVLRHTVHLWAQCSLRVCPWADVYYRQKRAEGKSHACALRCLGQRLLKILWRMIQTRQPYDADLHARNQKQHGSWVLALMKPDPKAG

SEQ ID NO: 158631 - protein, 341 aa, unidentified
MEQATTIGLDIAKHVFQLHGADAAGHVLFRKRITRVRLLSFLAAQTRCVVAMEACAGAHYWAREIAKLGHHVRLIAPAYVKPFIKRQKNDAADAEAICEAAQRPSMRFVPVKTEEQQANGIVFRARDLLVRQRTQCVNALRGHLMEYGYVFPKGITHVEALVALVDDLQSSLPDSVRVILKLLVDTFTALEAQIAVLDAEINRRSKSDPTARRLMTIPGVGPIASTAITALVPAAEGFPAGRDFAAWLGLTPLQKSTGGKQKLGAVSKRGERTIRRLLIIGASAVVQQASRRGAPKGSWLAQMLARKPKMLVTVALANKMARIIWALLVKGGTYRTPAVAA

SEQ ID NO: 158632 - protein, 337 aa, unidentified
MTIIRIGLDTAKHVFQVHGVDENEQTVVRRQLRRGEMEKFFGKLAPTRIGLEACGASHYWARLLRGLGHEVVLLPPQYIKPYVKRGKNDANDAEAICEAMSRPGMRFVPIKSAESQAELMLLGVRNLLIKQRTTVINAIRGHAAEFGVIAAKGPVKVAELLQQAHTAEASVPELALDMLRLLAAQLDALDVKLKLIETRLMASHRENPLSQCLASQPGIGPIGAVSFALRVTDPKSFRSGRHFAAWLGLTPKDHSSGGRHRQGRISRQGNEALRKLVVLGATAVIRFARPGHASPWLLNLLARKPKKLAASALASKMARTLWAMMVSGEVYRRPLPA

SEQ ID NO: 158633 - protein, 368 aa, unidentified
MNSVKFIGMDVHKKSISIAIADAGRDGDVRYYGKIPNDFTTLDKFCRKMVSTGSQLHFVYEAGPCGYGIYRYLNRKGFDCKVVAPSMIPRKSGDRIKNDRRDARMLARLHRASELTAVYVPDEQDEAMRDLSRAREDAVISTRKAKQHLKAFLLRNGVVYSGRSRWSKAYFNWLSDLAMPRRAQQIALQEYIDAVHENCARVERLTDQIRQLVPDWRLAPVVSALQSARGVSLVVAVTLLAEIGDLSRFDKPVQLMAYLGLVPSEHSSGDSVKRGGITKTGNRHARKVLVEAAWAYRMQPRVSRILRKRQQEVPDRVCRISWKAQLRLCARFRRLAAKGKPRQVVVTAIARELSAFLWAMAKQVQPVV

SEQ ID NO: 158634 - protein, 411 aa, unidentified
MRRCIGLDVHREFAQVAIWQDGKVRQAGQITMTPEALRLFADSLAPSDEVALEATCNTHAIARLLEDHVARVVVSNPQKTKAIAEAKVKTDKVDAAVLAQLLAADYLPGVWLPDEETHALRRQVARRAHIVRQRTRLKNRVQSILHRNLVPRCPAADLFGRKGRDWLSGQDLPVDERQAVEALLRQLDFHGEELKLVEAELARVALASEDVKRLMTIPGVDATVALAIVAAVGDFRRFSSPQKLVTYLGLNPRVRQSGGQPASHGRITKQGRAHARGMLVESAWVAAKIPGPLRAFYERVRSRRGMQIAVVATARKLAVLCWHLIVKGEDYAYQRPSLTAQKLRALELRAGVPSRRGQRGSTHAYNLKEVRARERALSEQAELAYRQLVADWQAKAPATRVGTGAATGVRL

SEQ ID NO: 158635 - protein, 342 aa, unidentified
MGEVTTIGLDIAKSVFQVHGIDAVGEVIVRRRLSRARMLPFFAKLPRCVVGIEACNTSHHWARELIALGHDVRLMPAQYVKPYVKRGKNDAADAEAICEAVTRPTMRFVAVKTPEQQSVMMLHRVRLMLSRQRTQLSNAMRAHMSEFGVVAPVGRMGVERLLAVIADQDDQRIPADARACLEMLGAQLVVVKEQLLENDRRIRASARETEVGRRLMEIPGVGPLLASAFVASVADPTMFKCGRDLAAWIGLVPKQNSSGGKERLGGISRAGNRYLRQMLVVGAMAVIRHAERHGTKRAWLLQLLARRATKVAAVALANKTARMVWALMTSGERYREPAVTLT

SEQ ID NO: 158636 - protein, 430 aa, unidentified
MGLIMATAIPPEHDEQPISYEWFVGIDWGSQKHQVCMLDRNRQVVGERVVDHDGASLAQLVTWLLTLSQGQPQRVSVGIEVPRGPIVEGLIERGFHVFALNPKQLDRFRDRHSVAGAKDDRRDAFVLADSLRTDRPSFRRLRLDAPQLFMLRELSRAEETLLEEFRRTTNRLREQLHRFYPQMLQLSAAADEAWLWDLIALVPTPAHATTVTADQVHQVLKAHRIRRIKADEVLVCLQAQALPAAPGVLEAAQVHCAFLLPCLRVLAEQLRSCAQQVEALLHTLAEERDEAGGPSDVAIVQSLPGVGRKITAWLFAEAAQPLTERAYQVLRTQGGVAPVTKQSGKRRQVVMRRGCNPRLRHALYHMARVAAQHDLHFSGVYEALRAKGQRHGQAIRNIGDRLLRLLMAMLRHRTCYDASRIRCEPVVQMG

SEQ ID NO: 158637 - protein, 392 aa, unidentified
MTCFIGLDLSKFKHDCFIMNEHGEVVRNSFSFTNDREGFNTLLNVLNDLDPSQEKRIGFESTGHYGSNLKLFLEANGYSFMEFNPLLVNRFFKSESLRKTKTDKVDAQKIALYLYSRDYKPNPNSSYHLQCLKSLTRLRESLVDERSLQLVRITNIMDKMFPEFKPLFGKQGLKAATAMYLLENYGSPSRMANLTLASYHKMASKLKRTISYAKFCKIKELAKSTVGNENEILSFELEVCLELFKELDLKVLQLDNKITFELSLLNTHIPSVKGIGNVLAAGILAEFENIDKFDNPAQLAAFAGIEPSENQSGTHEGGGRMVKHGSPHLRRYLIQAANNMLAHNPVLYEYYLKKRSEGKSHNVAISHVARRLTRIIFYLEKNNIDFDINKMR

SEQ ID NO: 158638 - protein, 370 aa, unidentified
MKKRITFIGLDTHKNSIEVALADEGANSEVRLYGSIGGDLDSLDKVIRKLHTPGVELRFVYEAGPCGYEIYRHLRAQGLHCDVVAPSMVPRRSGDRIKTDRRDACNLARLYRAGELTAIYVPQEDDEAMRDLVRGRQDAINAQRKARQQLGGFLLRHGVRYPGKCLWSQAHGRWLAGVKMPHPAQQIMMQEYIHTVEECTQRVIRLNEQIQQLLPDWRMHPLVAALQALRGVAPVVAATVVAEIGPMGRFKNPRQLMAYLGLVPSERSSGGSVRRGAITKTGNGHARRALIEAAHSYRHPARISRTILKRQETLAEPVRQIAWKAQLRLCARFRRLIARGKSRNRVVAAVARELSGFMWAIAKQVPVPQG

SEQ ID NO: 158639 - protein, 399 aa, unidentified
MHDGYGVYLGLDVGKGDHHAVGLAPDGKRLHDAALPNTEARLRQLFDKLARYGRVLVVVDQPASIGALPVAVARACGHQVAYLPGLAMRRIADLHPGAAKTDARDAYVIADAARALPHTLRRVDVGDDALAELEVLVGFDDDLAGEATRVSNRIRGLLTQVHPALERVLGPKVHHKAVLELLSRCGGPAGLRKAGRRKLLSIAAVHAPRMGERLVEQIMTALDEQTVTVPGTQAAETILPRLADNLRDTLRQRDQVAKEVERMLDAHPLVPVLTSMPGIGVRTAARILLEVGDGTAFPTPGHLAAYAGLAPVTRRSGSSIRGEHPPRGGNKNLKRAFFLAAFAALADPVSRAYYDRKRAEGKRHNAALICLARRRCDVLHAMLRDKIPYQPRPTRPVPA

SEQ ID NO: 158640 - protein, 316 aa, unidentified
MTDNSMICAGIDVGKSHLDIALHPGKARLRVTYDTAGLKALDAFLREHDVSRIGFEASGGYEWRLLAHLRAGKRPAARLQPAQLRFFAKSRLKRAKNDRLDAVLIALFTASLEQLPALPDARFDKLAAELTYLEQIEQQIALVKTFAETALSEAIKRRHLREVARLETCRKAHLLRLEKTVRDDCDLAQRLDLLISIKGIGLRSALCLIIRLPELGHASRAEIAALAGVAPYDDDSGKYHGRRRIQGGRERLRKSLFMCAFTATRHNPDLAAFYTRLRQNGKEHLCAVIAVARKLIVLANTILFRKTEWTPQYRKN

SEQ ID NO: 158641 - protein, 316 aa, unidentified
MAEVTIQANVGIDVSKEWLDVVVLPSGETWRTENKEEAIRELVKKLEQLTPERIVLEATGGYEQMLAVQLYLAGLPLCRVNPKRTRYFARSLGQLAKTDKLDGKVLALFGERVKPPLTRLPTEKEQVLSAFITRREQISNFLVAERNRLHTAPKKLHASLNEHITWLKHELKQLECAIDDFVNDDPDFKEKSDLLVEVQGVGKKTAAKLIADVPELGDCDRKQIAALVGVAPYNRDSGRKTGQRYISGGRPDVRSILYMATLTATRYNPVIRAMYQRLLKVGKKKKVAIVACMRKLLTILNAIIRDRSHWNLTFPA

SEQ ID NO: 158642 - protein, 469 aa, unidentified
MEWTVAIGVDTHKDVHVAVALDRFGAQLGSREVETTETGYRSLRSWALELGVPAFAVEGCGSYGAGLVRFLELAGAAVWECERPRRQERRRGKSDLIDAALAARRLLTGDGLYLPRGGGRREELRLLLLERRSAIQARTAAFNQLSALVVTAPDQLRRRLGTLSGERLARAAARLRPGADVRNAVLQRLGRRVERLSREVREVDRRLLDILTEIAPALLAECGVGPVCAAQLLVSSGDPKRMASEASFAALAGTSPLDASSGHQRRHRLNRGGDRQLNWALHVIALARIHHHAETAAYYQRLLATGKTAREARRCVKRALAGRPRRWRATTRNGRRSPARHPSPPMRDEPARPPHAPSPSSRPGEEDDTACAMPRLSRDVCVFALAVLLEWRTDADSRAHPRDPRCRRPVGFLGGGARAAGARVRRRCDRRLVAGVDHPFRAVLACNRSALSLRDQRPARVDPRGCGMD

SEQ ID NO: 158643 - protein, 337 aa, unidentified
MKYCGIDLHSNNSVVIVSDEEDRIVFSKRLPNDLGQIRAALEPHREDLAGVVIESTYNWYWLVDGLMDTGYQVHLAHPSAIKKYEGLKHSGDFADATYLAHLLRLGLLAEGYVYPREERGARDLARKRLQLVRYRTAQILAIEGILMRQTGARLKGEAVKRLTAEQVDAFAFAPDVSLAVEANRAVSQTLSQQIEALEKRLQQRVILRPEYRLLKTVPGIGEVLATTIMLETGTISRFARVGNFSSYCRCVDSLKESNGKRKGEGNTRNGNKYLAWAFVEAANFALRCCPQARSFYDRKKSRSNRILALKALAHKLARACYHMLQDHKPFDVHLCFG

SEQ ID NO: 158644 - protein, 342 aa, unidentified
MTITTVGIDLAKAKNVFAVHCVDQNGKTVLVKPKVSRAALPELIASLPPCVIGMEACSGAHYWARVFRQYGHEPRLMAAKFVSPYRMAGKSGKNDAADAQAICEAVRRPHMRLVPVKDESQQAMQCLHRTRQGFIEEKTATYNRLRGLISEFGVIAPQSTDALRHIVSEQKNSLPLQVQQCVDDLLEHINRIEDNIAEYDRILPRMAKTDHRSQRLMELKGIGPTTACALVASIGNAHDFKNGRQLAAWLGLTPSQYSSGGKSKLGRITKAGDSYLRTLLVQGARSVLIGAEKRTDSFSRWVCTLVERRGYWRAVVAIAAKNARLCWASLHYGDDFRLYSAS

SEQ ID NO: 158645 - protein, 364 aa, unidentified
MAQDTTIEAAVTGGLDVSDRYTYVCVLNVSGEVVDEGRVPTTPEALRRRFSGHGPMRLVLETGTHSPWISRLLEACGHEVLVANARQLRLIAQSDSKNDRADAETLARVGRLDPALLKPIRHRGAEAQLDLALIRARDALVQARTQLVNHVRGAVKAVGGRLPACSTTSFPMKVGEAIPAGLRPALGPVLDVIAAVGQELGRYERLVEALATTRYPETAALRQVPGVGALTALSYVLTLEDPARFPKSRAVGSYLGLRPKQRDSGAGAPQLRITKTGDAYLRRLLVGSAHYVLGPFGPDSDLRRWGSALAARGGKNAKKRAVVAVARKLAVLLHRLWVTGAVYEPLRVAEQRPAATPVLTASNC

SEQ ID NO: 158646 - protein, 351 aa, unidentified
MSRKTEAGLACTIGIDTGKNTLHLVGLDAKGAVVLREKLARGRIAARLANVPPCLIGIEAGMATHYVARELLVLGHDVRQVPPSYAKPFRQGHKNDFRDAHAIAEAVQRPSTRCVPVKTDAQLELQALHRVRSRLIGGRTAAINQIRSFLLERGITVRQGLRFLRQQLPQVLATRTDVLSPRMIRIIEDLSSDWRRLDERIEHVTEEIELLASDSEACRQLMTVPGIGPIIASAMVAAIGNGAAFAKGRDFAAWLGLVPKQMSTGDRTILGRITKRGNRYLRTLFMQGARVVLLRPTNWAKHSFGPWLAAAAKRLHHNVLATALANKLARIAWTVLAQGRSYERRAVPGII

SEQ ID NO: 158647 - protein, 353 aa, unidentified
MTVYVGVDFHARQQTIRYCNTADGEIHQCELQHKDDQVREFYAQFQGEVIVGLEASGYSGWFEELLESMQYEVWLGNPAEIRRKAPRRQKNDRRDADLILDLMLKGDFPRLHRFSAESRMVLRQLRYRHKLVKVRTIAKNSLQAISLGAGLTEKRGLLSQRGQERLRGLALPPVLGQQREEWLQMVTQLDKRIATLEATLEKTAASDEQIKLLRTHPGIGLLTGLVVRHTIMPVPRFSTTRKAVAYAGLDPVEDSSGSRTRVGSISKEGSRLLRFLLNEAGQTACRRDPDLKRFYQRLVHRRNRQKAKVAVARKLLVRSFIMLRDQIDYAEFVRRGIAARSARKTHRPSMPDL

SEQ ID NO: 158648 - protein, 430 aa, unidentified
MKSNTQNAKIEAITEKTLVLGIDVGSETHYARAFDYRGIEYSKKPFKFSNTEVGFATFKEWILDLKERHEKDKVVPGMEPTGHYWFNLGKFLQDNEMKPVLVNPHHVKKSKELDDNNPTKNDRKDPKVIAGLVREGRYMIPYLPDGVYADLRTASNIRFQLQAELTRIQNRISRWFNIYFPEYKTVYGKPDAKSGMLILKAAPLPEDILTLGIDGVNQIWRDAKLRAVGKARAKTLIEAAEHSIGSKEGTVSARMEIRMLLEDYESRNTRLQEVMVLIEELVRKIPMAEKLLEIKGVGIRTVSGFLAEVGDISRFNNPKELQKLAGLALVENSSGKHKGETTISRRGRKRLRYLLFEVAMSLVAKNPEFRELHNYYTTRRLNPLKKMQSLMAIAAKLIRVFYAMLTKGVDYDPKKMVSDIKRPAVYLQAA

SEQ ID NO: 158649 - protein, 431 aa, unidentified
MTKQLMAGMDLHSNNLFCGIVDGQGKRVFEKKLPCALPQVLQGLAPFKEQLDTIAVESTYNWYWLVDGLQEAGYRVVLANPAGMEQYSGLKHTDDKSDAFWLAEMLRLKILPTGYICQRPLRSVRDLLRRRMMLVHKRTALILSLQSLHARTLGCALSLGEAKFVSVEAVRKSFAHPADKLISGLDVQLIDHLNKAIKQIEKTVLAMTKPLPCYRVLHSLPGVGRILALTITLETAEVKRFATAGDYASYCRCVDTRRMSNGKKKGENNGKCGNKYLAWAYIEAANFAKRYDLQCRQFHDRKSARANKIVATKALACKLSKAAWHMMSEQRAYEPTRMFPTAQHATATATVALDLSHQSRSRRQAGQDGEQLPVPACGLRAEGGARVASQQSPILRFGKIKSSRSKDSEKDQFKDSDREPCERVGAKPPDP

SEQ ID NO: 158650 - protein, 394 aa, unidentified
MKLVGIDVGKNSHHFCVMDKETGEFNVTPSSFSNNKEGFDFLINSLKPYSKKSILLGMEDTGHYHVALLKFLLSNGYTVALINPKTTDLTRKMEGGITKNDKLDTLTICDVLDTPERKKQYRITKVDRFDLYEQRQLTRHHHNLKEELNVYCNRLQKSIDLVFPEFNTLFGSKYGIVYMNLLKTFGSAETIASTDIRTIRKCFEIKGRGCRISLTPEKLKECAKNSIGISSEVETIQIKHLVSQITLINEQIAEIDKKIEEFSITNNSPILSIPGISHFSGTSILAELGDIGNYSKPSQIIKFAGVAPYHYESSQYNAQHTSITKKGSKYLRKTLYQIILPVINNNPVFKKYYRLKISQGKGHRCAQGHCIRKLLRIIYHLLETGQSFDPALLR

SEQ ID NO: 158651 - protein, 428 aa, unidentified
MKYNTQNAKIASITEETLVLGIDVGSATHYVRAFDWRNYEFSDKPLAFSNDEAGFLTFMAWVEDIKEKAGKTAVIPGMEPTGHYWFNLGKFLQDSGMRPVHVNPHHVKKSKEMDDNNPDKNDRKDPKTIASLVNEGRFSYPYIPTGVYAEIRSLSNMRFQAQEELTRAKNRIARWFSIYFPEYKDVYRDLKAVSGRMVLETAPLPEDICKLGVEGVNRIWRGAKLRGAGMKRAKTLVSAAEHSIGSKEAPEAARIELKNLLKDMDVYASRVEELLGVIEEKLKEIPYIDKLMAIKGVGLVTVSGFIAEVGDIRRFDDPKQLQKLAGYAIVSNESGKHKGESRISYRGRKRLRYVLYEAALSLIGRNPEFKAIHEYYRTRKENPLKKMQSVVAVACKVIRIFYVILTKGVDYNPEKMMGDIRRPQIQAA

SEQ ID NO: 158652 - protein, 421 aa, unidentified
MARTVNIVYPVCCGMDVHKNFLVACIAVTDEHSHTEHHIKRFSTFAGDLRRLCEWLASYGCRDVCMESAGKYWIPVFNALEKAGINVCLTHPKYVKAIKGKKTDKKDAKWISELFKCDLVRSSFIPPPDIRQLRDLCRYYVKLTGFATGEKNRAQNCLTMCNFKLDDVFTDVFGKSATRVLYALLEHGRGEFSLDGLIDNRCKSSPEKIRAALDGELDPTQAEKLNLIRHHMDNINDLKASLENLIYNLADKYLPQIDLLMTVPGISTKLTAIRILAEIGADMSVFETAKQLVSWAGLIPQNQESAGKKKTTRIGRAGAYLKPLLVQIALAVGKSDKNPELKNKYLALKKRRGGKKAVIAIARKILTAIWHILSKNEEYNAELYRKADKPPAPRELTKAQAITLLRSKGFLIVDDVTGEVV

SEQ ID NO: 158653 - protein, 335 aa, unidentified
MNPVRIHIGVDVGKDSLDICYPDGTKEKARNIKSCRTKLIKKALKLGAIISFEATGPYEEPLAEECLARGVRAVRLDAWGTRKYAESQGRIEKTDAIDCEMIRDYAMSLKDDKLHFIKPRSQAHKALKRAVSTRKNLMKARAIIYNQYENLPDAGMRKCLDQTLARLDREIARIEGECDAAIASDDRMRELASRFQTVKGVGPCLTRIVLAYCPDIGEFTDGGIAKMCGDAPIDYESCTIKKKAKPKRGRTDLRKAMYMAAVSASRSNHILRPIYQRLVAKGKPRKVALTAIARRIAILLNNIAKHPDFIPAQDPKDVARAALPRRGRGRPRKAE

SEQ ID NO: 158654 - protein, 345 aa, unidentified
MNYFAGLDVSLKRTAICIVDRDGNIVREGVTDTEPEALISWLRNTRFALQRVGLEAGQCSSWLYKGLSEGGLPVICVETRHAKSVMQAQTVKTDRNDARALAQMMRTGWFKAVHIKSEDSQKLRALMGSRRCLLDKQRDLNNHIRAALRTFGFKVGLIGQSRFEERVRELIVADGELQALVVPLLEARRMLGEQAHVLTRLIGRLVRSDAICRRFMTVPGVGPLTALAFKTTIDNPGRFRKSRHVGVHLGLTPGKYASGEVDYNGRITRCGDAFAREHLFEAAHSLMVNTRRWCSLKAWGIRIAKRSSMKNALVAVARKISVILHRMWCDGSDFRWERSEAAAAA

SEQ ID NO: 158655 - protein, 402 aa, unidentified
MPMLSIGIDVSKGKSTVCGMKPGGEIVYAPFEVQHTREGMSELVSLLRSSGEEVRVVLESTGSYHCPVVAALLENGIFVSVVNSLRMKRFCSQSIRKVKTDRIDAMQIALYGLAYWQELQPTRLPEDTYRELQLLARQYYQMTSMLIKAKVDFNALCDQVLPGMQELMNDHAGRHKLSDFVLRYHHTTHILEMGETRFRKDYCKWAEKKGYRNCERMAALIFATAQNGIPVLPNAPSTQIVITEAIRVLHTVEASRDAILTQMQALAKTLPEYSLVREMPCIGDTLAPRLIAEIGDVRRFHSKRALIAYAGIDAPPYQSGKFCANNRHISKRGNRYLRKTGYEVMQSYVMHKPANDPIFTFIEKKRGEGKSGKLAMVAGLNKFLRVYYGKVTELYRSLPAIE

SEQ ID NO: 158656 - protein, 316 aa, unidentified
MQSILDLGADVDSRYVMVACAADSFKPHRIANECKAIRAWLHTVPRGSRLAMESTGSYHEALAELAHRAGLQVFIVNARDLRRYSQGIGRRGKTDRVDAEVIARYIAREHQELHAHVPPTREQRTLSRLISRRAKLVQTKDSIRQSLRGLPALKTEARQLVERIERVIGRLDLLIQRTLQQMPNACEAAAHIATIPGFGVLTSTALGDRFTRVPYATSDAVVAAAGLDPRPADSGQKHGRRRLSKRGPAEVRRLLFNCARSVAHTPVWKPYYEAQLAKGLSSTAARLVLARKMLRVAFAVYRQRQPFNPLLMGGGA

SEQ ID NO: 158657 - protein, 395 aa, unidentified
MTNLLFTKQCVGIDIAKATFVACVAKMLSDHRIIFTEKGTFDNNKTGYNQLLKWVRKHTDKNVSILYNMEATGVYYESLAYHLNTLNKDISVVLPNTASHYTKSLNVKSKTDEIDAQVLAQMGCERNLRKWTAPIELFRELKALGRLHNTLGHDKTMAINRLKQIKSGYKPLDEAIKIHQANIKRIKKQQGLVIAKMKTLAKTDEKIWSKMCNLTTIYGIAIKSVLVVVSELNGFTMINNVRQLVSFCGLDVVQTQSGTSVNGKSRISKKGNSFVRGALFMPAMSATRGDNEIGRNYHRLVANGKNKKVALIATERKLLILMYTLWNSEQPYNPNYQRLKTSGFHEEEVPSSSSTRRVEKMYCTPKVVAAVRLTTTQNEPLYDHSSDVLLRQLQI

SEQ ID NO: 158658 - protein, 365 aa, unidentified
MHNQGKKLFAGQTIYVGIDVHKKSWTVTILGENQTHKTFSQDPDPQLLARYLKKHFPGAQFIAVYEAGFSGFGACRQLRELGIECEVIHPVDVPTTRKERLQKSDKIDSRKLARTLRNKEFEFIHIPDEQLEADRSLVRQRAKLSKDLARIKNRVKSLLMQFGISIPDDISASQSRHWSKAYINWLEEVIIQEPSLRQTMDNYIRLGKLMRQELATVTRQVRKLAQEQRYEKNFLLLRGVPGVGLVVGITFLVELGDIRRFKSMDELCNFIGLVPSMHGSGETMKTGKMIKRGRKQLKILLVEAAWKAIGADPALMAKYNEFVSGLNGREAMKGNKAIIRIARKLLARIRYVLIHQQEYEIGVVQ

SEQ ID NO: 158659 - protein, 285 aa, unidentified
MSQNLNSAVAVIGIDIGKNSFHVVGLDDRGAIALRQKWSRGQVEARLANMPPCLIGMEACVGAHHLSRKLKGLGHDARLMPAKYVRPYSKGQKNDFRDAEAIAEAVQRPTMKFVATKTADQLDLQALHRVRERLVSQRTGIINQIRAFLLERGVAVRQGLRFLRAELPRMLATPPDMLSVRMVRVIGDLAEDWRRLDKRIDQLSGEITVLARQDAGCERLMSVPGVGPIISSAMVAAIGAGEVFSKGRDFAAWLGLVPKQISTGDRTILGKISKRGNRYLRVLFV

SEQ ID NO: 158660 - protein, 471 aa, unidentified
MAAVMIGVDPRKASHTAVAISAAEEPLGELRVRACVAQAERLLAWAQAWPQRTWAVEGAGGTGHLLAQQLLSAGERVLDVQPKLGARVRLLAAGDVNKNDPNDARSVAVAALRSPGIREVQPDDHAAVLEIWSKRYRDLGRTRTQVVCRLHAVLGGLIPGGVPKVITTARAGRVLKAIRAEGAVEQARCELAAAFLDDLRRIDARLRETKKQLAAVVAATGTSLTGLFGVGPVIAAAVIGDVRDVSRFPDRDHFAAYNGTAPIEVSSGPRKVCRLSRRGNRRLNHAIHMAAITQIRQRHSEGRAYYEKKLAEGKTGKEALRSLKRRVSNAIFACLQADARRAAARAKGPGGQQGNDSVASAAGSHPRHRLFGQATPGPGHHPTTAAASPSPGPARAPGRAGHSPVAATLPPATPQVQVERPQRSEDERPGGAARRLPYSAARKAPESRTAGRTTAPEGHLIGPLSTTDGTS

SEQ ID NO: 158661 - protein, 357 aa, unidentified
MNIKGKKIDFSNQELFIGIDVHKKSWTVTIRIPSTVLKTYSMRPSSKELKKHMEKYYPHGNYHSVYEAGFSGFWLHRELTELGFDNIIVSPSDIPTSSKERLTKTDKVDSRKLARELSNDSLKGIYIPNIMEENLRGLSRQRYQQAIKLARVKNQIKSYLNFCGCELPENSELQHWSKRFISHLQNIKFENEIGKEKLEFYLDELEIIKKRKLQLLNSLKKHLKEKSKYNLVELLLTVPGIGFITATTFLTEIIDIYRFPNSDKLASYLGLVPAIQSSGETEKVLGLSFQYNKYLRQLLVEASWIAVRNDPALTLVFNKYLVRMSKQKAIIRIARKLLNRIFYVLKNKHNYVHSVVA

SEQ ID NO: 158662 - protein, 394 aa, unidentified
MKLVGIDVGKNSHHFCVMDKETGEFNVAPSSFSNNKEGFDFLINSLKPYSKKSILIGMEDTGHYHVALLKFLLSNGYTVALINPKTTDLARKMEGGITKNDKLDTITICDVLDTPERKKQYRITKVDRFDLYEQRQLTRHHHNLKEELNVYCNRLQKSIDLVFPEFNTLFSSKYGIVYMNLLKTFGSAEAIASTDIRTIRKCFEVKGRGGRISLTPEKLKECAKNSIGISSEVETIQIKHLVSQITLIKEQIAEIDKKIEEFSITNNSPILSIPGISHFSGTSILAELGDIGNYSKPSQIIKFAGVAPYHYESSQYNAQHTGITKKGSKYLRKTLYQIILTVINNNPVFKKYYLLKISQGKGHRCAQGHCIRKLLRIIYHLLETGQSFDPALLR

SEQ ID NO: 158663 - protein, 316 aa, unidentified
MNPQVFIGLDVSKHHLDVAVRPQGRHFVTPNDDRGIKQLVKRLAALKPQLIVLEASGGYEFLATAALAEAQLPVALINPQSVRKFAGATGKLAKTDKIDAQVLAHFAEALRPEPRPLPDQAQQILKAALQRRLQVVKMIGQEKNRLEKTFIPAVRQDIQAHLTWLSQRLEQLDRDLSDQIRQSPLWRDRDRLLQTIPGIGPIVSRAVIAQLPEAGRLPGKKTVALVGVAPYNRDSGRFRGKRMIRGGRSYLRRMLYMAAVVASRWNPVIRTFYQRLLAAGKPKKLALTACMRKLVLILNAMLKHNQPWNQFINQVP

SEQ ID NO: 158664 - protein, 368 aa, unidentified
MRKNLRFVGLDVHKDSISIAVADSGREPAKLLQTVAADELLLWKVLDRLGPRARLRVCYEAGPTGYRLARRLNDLGICCVVVAPSLVPTQRNRRIKTDRRDAVKLAHFLRSGDLVEVTVPEAQTEAMRDLERAREDAIQVERVARQQLDKFLLRHGRRWSQGCKWTLKHWRWIKVQEFSEEPSRRVLGDYINSVEQALARVERLTADISELVERWTLGPLVRALQALRGVDLVTAVVLAAEIGDFKRFRTPKQLMSYLGLVPSEHSSGGARRQGGITRTGNRHARWVLVEAAWNYRFGPCASKRINARRQLVAAGVRTIAERAEQRLSRRFRRLIDRGKSSQKAVTAVARELVGFVWAIAREEKLLVA

SEQ ID NO: 158665 - protein, 393 aa, unidentified
MIYIGIDVAKDKHDCHFVTHPDGEVLCDNLQISNSLEGFSQLFNTILEYSNNDLSQVKVGLESTGHYSTNIISYLKRQRVNVVELNPLSVNRFRKSLTLRNTKTDKCDARYIARILFSLEETTNPTYDLSYHIAELKSLTRCRYRLNYELQPIKNRYRRSLQLVFPEFEKHFNISIPTALKLFSKYPSPKDILSIRKSTLEKYLKEISHGHWGKYLDTLVSIAKDSIGSTNVGDVFELKHIAKEILFLEEELESINEQISLVMAQINSPITTIPGIGDVLGATILAELRDIQNFDTPEQIQAFAGCDPSIYQSGKYNASITPMAKKGSAYLRNAIYLATSAAFIQKGQMYTYIKKKCSQGKHFYTAMSHGMKKMIRIIFSVLKNNKPYIEPVV

SEQ ID NO: 158666 - protein, 402 aa, unidentified
MISVGIDVSKEKSTVCIMKPLGEIIAGPFEIDHMDSELRGLAKMLHAMNEEVKVVMEATGIYHLPVQTYLAEKGFFVSVINPYQMKQYRTEGQGLRKVKTDKADSMIIAKYGIDHWSSLKESVSQNEKYDELKILSRQYRHYMRIHVESLLGLTHLLDYTMPGIKGEFKSWNPDNGKDKLSDFVDHYWHYENIAKRSERQFVESYVKWAKRKGYRQSQEKASKIYSMAKEGIPTLPANQTTKMLVNQAVEVLKRVDETLNTILSRMKELAKALPEYPVVRSMGGVGDTLAPRLIADIGDVRRFHSAKALIAYAGIDPPPYESGKFHGTNRKILKRGAASIRKTGYEVMRSLKSHPPAEDNEVYLYIMKKESEGKAKKSAKIAGLNKFLRIYYARVKEVYTKE

SEQ ID NO: 158667 - protein, 343 aa, unidentified
MELYVGMDVSLKETSICVVDGSGEIVSEGTVISEPATIAAFLEAKAVGALRIGLETGPTTTWLWHELRALGLPVICIDARHAKAALSMQINKSDRNDAVGLARIMQCGWYKEVQVKSVSCHELRAVLNSRAQLVKIKRDLENQIRGLLKNLGLIIGKAGGTVFTRRVEELLGRHGLLWEAVRPLLAVREIVRRELAALYRKLLDLARGDEDSRRSMTVPGIGPITALAFYAAVDDPTRFPRSRSVGAYFGLTPRRFASGEVDWSGRISKCGDAMVRSYLFEAAGVLLTRVAHWCKLKAWGHRLWKRIGFKKAKIAVARKLAVILHRMWRDGADFIWSSKEVAA

SEQ ID NO: 158668 - protein, 327 aa, unidentified
MKLLDIIGADISKSTIDLFCYGLNSYVQISNDVTGFKKLQLWLKKLQLDTGHVAIVMEHTGFYSYHFENFLHLQAIRFSKVPALVIKRSLGLVRGKTDKVDAERIAAYGYEKRDKLHFEKPADPQLHRLQILLGTRARLIKERASCLCAIKAYAIFLSKNDSIILGQMRVVKTLTREIKAIEQEMKKLVSESTFKENFQLLISIKGVGIMVATTTLVKTKNFTVFKNGRKFSCYCGSAPFDHSSGSSIRKKTRISHLADKTMKTLLTQSARTAIQFDKELKEYYQRRTQMGKSKRSTINIVRNKLIHRMFAVIKRQSPFVDKYLKTA

SEQ ID NO: 158669 - protein, 358 aa, unidentified
MISYYVGLDVHKASICIAVLNVEGKLVMESVVETSAATILDFLKGLRGQVEVTFEEGTHAAWLYDVLKKTKVTVIVCDPRKNRLLQDGNKSDRVDARKLAQLLRAGLLSPVYHGEHGTRDLKELVRSYEYLVEDSTRAMNRIKALYRSRAIGCAGVDVYKLRQREVWLAKLPEASVRARAGRLFSELDHLTDLRREARQALVVECRRHAASKLLLKVPTLGIIRIAQLISSVVTPHRFRSKRQFWSYCGLAVVTKSSADYRVAGAEVRRTRKAATRGLTQSHNRTLKYVFKSAALTASRCGPFKAWYAELVERGLRPELARVTIARRIAAITLAVWKSSEVFKAEKLIEADGVSRLER

SEQ ID NO: 158670 - protein, 335 aa, unidentified
MREITTLAIDLAKSVFQLHGVDARGVCVLRKQLRRAQLLSFLAQRPACLVAMEACAGAHDWGRRIEALGHQVKLIPPQYVKPFVRGDKTDRNDAQGICEAALRPGMPEVALKSEEQQAMLAVHRIRELIDKQRKQLANQLRSLLAEFGEVMACGIPSLRCELPQRIERVPALMREALWMGYERLIELQRQSEVHTGGIERLAQADPLCKRLMRERGIGPICASAYVASIGNPARYRNGRQVSASLGIVPRKCGTGGKAVLMGISKRGDRYLRTLLIHGARAVIRYVPGKSDPLSVWIQQLIARRGVNCAAVALANKTARRLWAIWRAEQPQRVPA

SEQ ID NO: 158671 - protein, 406 aa, unidentified
MVEQPDTNRGLNKSTLRSRQEPRLLNQTQPLVWTKLNGINVRETSSMEPARSTALVYGNLAREAAMNRPTYYLGIDIAADSFTAAILTSPGQPTVVGPQFANTLEGLEEFHGWLAQQRATPENALLCLEATGVYAETLCYYLCSKRFRVAVEPPLKVKRAFQQYAHKNDTVDAQQIAEYAHRFYDELRFWSPPSEILEQLRVLLAAREQFVQQRTGVKNTLAAVRRKPVQTPIVNQAYQETIKQLTETINTLEREMKRLIDHDQNFRNQLLILTGIPGIGFLLASNLLVMTRGFTQSVHAKRLASYLGIAPLQHKSGKSVFRPAQSRHFGPGTPRKLLYLAACSVVTHNPEFRKYFLRKTAEGKSPRLVLNNVANKLLKLVCALITSQQPYIPNYRSLNPMLLKTT

SEQ ID NO: 158672 - protein, 415 aa, unidentified
MPNPLFVGIDVSSRDNVVCCLSNDDEKRPLSRFIVLNNRPGILELKQRISQLVQKHSFDQILFGLEHTGCYSTHAAMYLQHHLDFGCEDVNVYLFNPSLIKEFKKAHFLDAPKNDRVDAWYIASKLMAGHLPHPFTWSEPLMALQRLTRARYHLMQALVRESNFLMTNLYLKCSDYTLVFDNKLSATSLAVMEEFESAEALAEASLDKLTWFLVQHGKNRFDDPQAVAKELQKAARSSYRLPKAMADSVNLAMASSIRVIRTLQEQLKSLKKAIEDHLDTIPQTLDSVPGIGPIFASGILAEIGDINQFDSHKQLAKFAGLAWTQHQSGNFTANNTRLIRSGNRFLRYYLIEAADSVRMHDPVFAQYYALKKAEPKQYAHKRALALTARKLVRLVFYLLKTNQLYQPGGRNRHDS

SEQ ID NO: 158673 - protein, 281 aa, unidentified
MKYLPVGVDIAKSLIQVHFIDEHTGEVVDKQLRSKDFLSFFSNREPCLIGMEACGGSQHWARELEKMVHSVRLMQGRFVKAFVMGNKNDVMDARAIWVAVQQPGKAIAVKTEEQQSILVLHRSRRQLVKFRTAQISALHGTLLEFGEIIHKGRAAMDKELPLALERMKAKLPPYLITVLEDQYNRLNELDMLIDGIEKQLNSVARQNETCKRLMEIPGVGPLIATAAVATMGEASAFKSGREFAAYVGLVPKQTGSGGKVRLLGISKRGDTCLCMVPGLRH

SEQ ID NO: 158674 - protein, 393 aa, unidentified
MVCVGIDVAKDKHDCFIISSEGEILADVFTISNNAEGFDTLLQTIHRCARPEDKIKVGLEATGHYSYNILGFLLDKGLHTFVINPLHTNLYRKSLSLRKTKTDRVDARTIAAMLMSDVDLKSYTDTAYHNEELKSLTRYRFDKVKERAKLKQSVSRLVTILFPELEKLVPTLHMASVYALLSEFPGAKQIARAHLTHLKALLNDASKGRYGRDMATELRDAARCSVGSVMPAKSLELQHTIRLIRELNTEIEDIESAIQTIMEEMQSPITTIPGIGFRMGAMILAEIGDFSRFDSPDKILAYAGMSPSTYQSGQLSLSGTYSHMEKRGSKYLRYALYNATKYVCLWDSTFEAYLAKKRAEGKHYNVALSHAAKKLVRLIYAMEKSRQPYNSVA

SEQ ID NO: 158675 - protein, 327 aa, unidentified
MLYAGLDMHKNFCQTIVCTEDGVVIKQGKLPATTEEIGNFFSGLSDVKIAVEATTCYEYVFDFLEGKGYTVVLSHPLKTRMIAESRIKTDKIDARVLADLLRANLLPTSYVPPKNIRELRHLVRRRVFLGRLRGRLKNRIHAELIRRGLRYDDGDLFVKDGVQWLHSLNIPAVESYLVAMGPINVEIRALEKEIRSEGLKYKEVRHLVTVYGIGFYSAVIIFSEIGDVNRFRSEEKLFSYAGLIPSVRQSGEHKYHGSITKVGSKHLRWILVEAVRVHLRHNPDSKLTLYYKRLRRKKPDNVAVIATARKLLQIIYHMLKNDKDYRG

SEQ ID NO: 158676 - protein, 414 aa, unidentified
MIDERRWYAGVDWASESHHVFLTDENGRRIGEKIFRHSGEGLAEMAVWLSSTSGGVPAQIHIAIEVPHGPVVETLIERGFKVHAINPKQMDRFRDRFMLAGAKDDSRDAEVMASALRTDLRCFRPLAVADPVVIELREWSRIADDLGAERNRLTNRMREQLWRYFPAMLDLESDLGAEWLLDLWEIAPTPHKAIRVREATVAKVLKRNRIRRFDAAHVLDVLRKPPVQVAAGTTEAAAAHIKTLTARIRLVNHQLGEAHRQLDALTARLIPSEETGPGQRKQHDVEILASLPGVGRIVLATLLAEAFDALQRRDYAALRSLTGVAPVTKRSGKSCIVVRRQACHDRLANAMYHWARVAVQRDPRSRSKYAALRSRGHSHGRALRSIADRLLNVACAMLKTGTTFNPSLAAEKTP

SEQ ID NO: 158677 - protein, 424 aa, unidentified
MKSTQNEKILQIKNETLVIGIDIGKDTHYARAFDSRGIELAKLLRFSNSAEGYNALRTWMQSTMQQKGKTDAIVGFEPTGHYWFSLGDYLRNQGYKLGIVNPYHVKCARELDDNRQTKTDLKDPKTIAMLVKDGRYRDVYIPSNCYQELREAVLERERLVEQMTALSNQVIRWLDIRFPEFTKVFKSWKGKTAFATLKQFPTPVKVAQAGQEGLIALWQQHVKRNYALKAQQLFQAAKTSIGRVSGSNAAEVVLQNLLVQYELAASQLEQIEALLSDLVLTVPHSDTLLDVKGIGKLSTAVIISEIGEIQRFSSPRQIISLAGLSLRENSSGKHKGQTTISKRGRKRLREALFRVMIPLLANNAEFRAMHQRNITRDQNPLTKMQSVIALCGKLIRVIYALLSKGCRYDASKLVHDMNRSMMAA

SEQ ID NO: 158678 - protein, 356 aa, unidentified
MSREVKYIGMDVHKEAIVIAVLNARGHVVMESIVETKASSILQFIHGLQGELHVTWEEGTWAAWLYDLLKPQVHQVLVCNPRRNALLKEGSKNDKVDARKLADLLRTGMLRPVYHGEHGLRTLRELARTYQTLSQDLNRVMNRLKALYRSWSIPCAGTQVYAPRYRKEWLGKIEHLGVRRRAELLYEQLDGLQDLRRRLRPELLAESRKHKAAKLLRQIPAIGPIRAARLIALMQTPHRFRSKRQLWTYSGLGIETRDSAQYRYVRGQLQRAKKPQQIRGLNRNHNHEMKDIFKGAATRASCGVGPLRDFYVALLDKGMKPEMARLTLARKIAAIALTLWKKEERFDAEQLKMQAA

SEQ ID NO: 158679 - protein, 295 aa, unidentified
MTTHTKKLKEKAPSDALWVGIDVSKHELQIHFLKPSPGLPEKLPYDKPSLAKLAAHLKRDGRYHVIFEATGGYEKPLLKCLQANGIRCSRTNPWKVRNFARAKGRIAKTDKIDAAVLAEFGECIQPMLTRRADPAWEELTALINYRRHLSDELLREEMQLEQPKPAIITTVIKARIRTLKAQMEKFKTRIAQHIAAHAVLKEAVEALSAVEGVGILSAASLLSAMPELGTLNRNEAASLAGLAPMNCDSGTMKGKQTTYGGRVAIRQAIYMPALSASRYNKILKKAYQEMVGRGK

SEQ ID NO: 158680 - protein, 353 aa, unidentified
MDNRKYIGMDVHQASISIAVSDAAGKVLMECIIETKAATVLEFIQGLRGSLWVTFEEGTSAAWLYDLLKPHVTKVVVCDPRKNALLKAGNKNDRVDARKLGELLRAELLTPVYHGESGVRTLRELSRGYLAVSKDLTRVMNRLKAIYRSWAIPCAGQQVYSPRHRAAWLEKLREAGVRRRAEQTYQQLDFLMEIRKETRKELLAESRKHPARKLLEQIPRLGPIRVALLIALIQTPHRFRTKRQLWNYCGLGLRTRSSGEYRYTGGQLQHARKPPVLRGLNVNHNHDLKHLFKSAATQAGNDPLGAFYQNLLAGGMEPPMARLTLARKIAAIALKIWKKGERFDPAKLKQQAA

SEQ ID NO: 158681 - protein, 349 aa, unidentified
MSQNLNSAVAVIGIDIGKNSFHVVGLDDRGAIALRQKWSRGQVEARLANMPPCLIGMEACVGAHHLSRKLKGLGHDARLMPAKYVRPYSKGQKNDFRDAEAIAEAVQRPTMKFVATKTADQLDLQALHRVRERLVSQRTGIINQIRAFLLERGVAVRQGLRFLRAELPRMLATPPDMLSVRMVRVIGDLAEDWRRLDKRIDQLSGEITVLARQDAGCERLMSVPGVGPIISSAMVAAIGAGEVFSKGRDFAAWLGLVPKQISTGDRTILGKISKRGNRYLRVLFVQAAWVVLIKPQSWDRHGLKAWLDAAKKRLHRNVLAVALANKLARIAWSVLARGRAFEASKLQAA

SEQ ID NO: 158682 - protein, 439 aa, unidentified
MQVVYRRCCGLDVHKDSITACVLVLDGKGQREVRTKEFQTYWKDLQRLKLWLYGCRVERVAMESTGVYWKPVWNVLEGHFPLLLANPYHMHNIPGRKTDQKDSEWIADLLAHGLLRASFVPPRPVQELRDLTRYRVKLMGEYNRVHNRIAKVLEDANLKLGSVASDILGGTGRAIIRAIIAGEDRPDWLADKALSTLRHKREQLRLVLRGQVSDHHRYLLQELMQDVERIEDKIRRIEAEIVRRTKPQQEMLERLTTIPGVDWITAWTLVAELGTDMSVFPDADHAASWAGLVPGNFESAGKRKSNRTRHGNCWLRRALCQSAWAVSHKKDCYLTAHFYRRAARAGVKKAIVATAHQILIVAFHILRDGTTYQEHGGDYFDRLNPHRTQRRLTDRLQRLGFEVILKPLHATHPPTAMPHNRRGRPCLCAKRGIDCKHSH

SEQ ID NO: 158683 - protein, 419 aa, unidentified
MSFKILKNNCCGLDVHKTWIYACIGITDSHSRTEYKQARFSSFTKGLQELCDWLAKYNCTDVCMESTGKYWIPVFNILEKNNVWVTLSHPKYTKPQKGNKTDRKDAKWICDLYMCGMVKPSFIPPADIRQLRDLVRYRFKLTCMITSEKNRAHNCLTVSNFKLDEVFSDIFGKSSRSITEQILQHPGETFDVAPFVDGRCKTPIEEIQAAIDGAISTEQAVKLRQCLDHIDELEKHQSEIEREIFRLSDKYEEVLNLIRTVPGFDKNPMTAIQVLSEIGGDMSVFPTAKNLVSWAGCCPRNDQSNHKIKSTRISRAGSYFKPVLVQVANALIKSKKNPEFTTRYRRIKARRGHKKAIIAICRMLLTAIWHILADLKPYTPEGFLESHPVNEAKVLTTSQALNLLKQRGYVIKDDTVPVT

SEQ ID NO: 158684 - protein, 342 aa, unidentified
MNEVSIIGLDLAKNVFQAHGAGADGSVAFRRKLSRAQLLKFLSDQPPCAVAMEACASAHHWGRAIGDLGHEVRLIPPAYVKPFVKRQKNDMADAEAIAEAASRPTMRFVAVKSEAQQAAAMAYRTRDLLVRQRTQTINALRAHLAEQGIVAPVGPAHIGRLAAIVDGDDGTLPAAVRELARLLLDQIENLSEKISGLDTELRRRAGTDDTARRLMTIPGVGPITAAAITTFAPPMETFAKGRDFAAWVGLTPRQHSSGGKERLGRTSKMGQKDIRRLLIIGAVAVVRWAARKGAPEGSWLARMLERKPKMLVAVALANRMARTAWALMRKGEDYRDPVAMAA

SEQ ID NO: 158685 - protein, 365 aa, unidentified
MTVIGIDAHKRSHTCVAVNDAGAKLAEKTVASTSAGHAQALRWALTRFGTDLSWGVEDLRSMTGLLERELLAAGQKVVRVPPHVMARNRGSARAWGKSDSLDALAVARAVLREPNLAAAFHDPISWELRLLVDRREDLVGQRVAVTNRLIARLHQLSPDRPKPAHLERTKSQLALAEYLREQHGLLAELARQELADIGHFGRGISALTEDIAGRVRELDSTLLQLQGCAELTAAKLISETANMDRFRNEAAFARYVGVAPVPQSSGTAVGRVRASRSGNRQCNTAIHRIAIVQLRLKGPGRDYYLRRRDEGDTAHTVWGSDLGQVFNPPVEDGLALMADQHLAAGFSEEEIRVMAVENTRRLAGA

SEQ ID NO: 158686 - protein, 418 aa, unidentified
MKSIKTKKVTKINDKTVIATLDIGKNIQYGYFRAPNGNDVKPFAFYNSNKSYNEFWEKLCQFKNKERLEKIVIGFESTGPYAEPLFHFLRKKPVTLVQVNPVHTKRVKELTGNSPNKTDNKDPRVIADVISLGHALTLVVPEGPAAELRRLTQARERAITDRTAIINQLQHLVFVIFPEFLKVLKISTKTARYFIKHFTTPEKIFALGLDSVAQIVKKVSRGKLGQDRAKQLHEAAGNSIGISEGKQSIVFEIEHLIGRIEAEDQFIDSLEKQMRVYLQQVPYSQNILSIKGLGEVTVAGLIGEVADFNKFDTISEVMKLAGLDLYEISSGNHRGQRRISKRGRPLMRKLLFFAAINAVKSKGIMHAKYQQMLARGMLKMKALVAISRKLLGLIFAIVRDNTKYVENYSDNYHYKLAA

SEQ ID NO: 158687 - protein, 414 aa, unidentified
MDVLHERCAALDIGKKDLKACVRTPNPSGRRSRRQEIRTFATVTNSLLELRDWLLAEKVTLVVLEATGDYWRGAFYLLEDCLNVILVNAAHAKGLPGRKTDVADAAWLCQLGECGLLKASFVPPEPVRHLRDLTRYRASLTAERSREVQRLEKELEDAGIKLSSVATDIMGVSGRAMLDALIEGERDVHALAGMAKARMRPKIPALVEALTGNFGEHHAFLCRLHLERIDHLTEAIGELSARIEAEMFPFSQQIELLQTIPGVGRAVAEVIIAETGGDMARYRTAGHLASWAGVCPGHHESAGKHKSGRRRHGNRWLGATLGTAAMAASHTRKSTYPGARYHRLVPRLGKKKALVALEHTLLTAVWHILTDNVAFHDLGGDYYARHNPERAMRRITRQANALGFTVRFDPIEAA

SEQ ID NO: 158688 - protein, 343 aa, unidentified
MEAKRYIGIDLHRDCFTACVRLENGREYLKKWKLEDMPKFAGKLRPADQVAVEMTGNTRLFHDQVRPLVDRIVAVNPTQFKVITHSVKKTDPNDARLLALYLAKDLLPEVRMKDKTQAQIASLTQTRDTMVKLRTALKNKVNNICSANGVNLNRESLASEKGLRAVGEMPFDPLVNLELKIIVDQIRSLNKSIAELEELIGQEGQKLDGHRNLTSIKGIGKLSGGILLSIIGDIGDFADEGKLASYFGIVPRVSNSNETEHSGRITKRGTKLGRTTLIQCALIAQRYSPYLKTYYEKIKNRRGAGKAIVALARKFLGIIYRTLKNNWVFEDFPNFVLAEDPTA

SEQ ID NO: 158689 - protein, 387 aa, unidentified
MKQSTTPSAACATKVAAMPMTSKKEASTQEPSAATSATSITVGLDLGDRHSHFCVLDACGRPLEQGRVAMSPAELTAFFLRFGSARLILEVGGQSPWVSRLAQAAGMEVIVANPRRVQLITRNERKNDRTDAELLARLGRVDPQLLSPVTHRSVEHQADLAVKRARDAAVASRTALINHVRGAIKSFGHRLPTCSPDSFHTRVMARLPVELAPALQPIVRLISQFTGEIKNFDAQIEELADERYPVTKVLRQVSAVGPVTALSFVLTLDNPARVSDSRQVGPYLGLVPRTHDSGASSPQLRITKAGDPGLRRLLVIAANRILGPFGPDCDLKRFGLRLAAQGGKNGRKRAKVAVARKLAVLLHHLWKTGEVYDPFHLAKKRGEAVPA

SEQ ID NO: 158690 - protein, 344 aa, unidentified
MHKQIAKSVYQVAESVRAGQVSQRKRLNREAFRRYIQEQAEPVEWLMEACGTAHYWGRFAQSLGHKVTLLHARYVRPYRRRNKTDRNDCDAILEAARCTGIHPVPVKTHEQQQLQQLHGLRETWKKSRTQRINLLRGIFREMGIEAPVATAAFLRAAHERVERPEVAALRGQLQIVLAEINLYEQCMAECEQQLQNWHADDAIVRKLDEVSGIGVLTASALKTAVGQPERFASGRQLSAWLGMTPREFSSGDRRKLGHISRQGNTYVRTLLIHGARAALLAAQRCQANAPERLTRLQRWAVETAARIGHNKAAVALANKLVRICWAVWCHERRFSGDWQSSQPT

SEQ ID NO: 158691 - protein, 475 aa, unidentified
MAKRKSSKRSQKKKVRSQRGSTPMPNELRQVNLHAAGIDVGSNEHWVAVPTNHGQSVRCFGTFTEDLVALADWLVECDIETVALESTGIYWITLFEVLEGRGLHVRLVDTRKLKYVPGRKSDVMDCQWLQQLHTYGLLEGAFRPADEICVLRGYVRQRCMLVESLSREILHMQKAMEQMNVKLTEVLSDVTGVTGMQIIRAILEGERDAKELAKFRNHRCKHDEATIAKALRGNWRKEHLFQLRQAVQLYDFLTTQVGECDTQIEAYLKSFETKADSSTLKESRGKARRSRQGNAPAFDLRQHLYAITGTDLTQIDGIEAYTVLRLISEIGLDMTRWPSVKHFVSWLGLCPGTKRSGGKQLSSKSKRSANRAAAVLRMAAQTLYRSRSALGAFYRRIKARIGAAEAVTATAHKLARLLYTMLRYRKEFVDIGEDGYLQMFKERIIRNMKRKALDCGYKLVPIADLPNPPAPSPGG

SEQ ID NO: 158692 - protein, 412 aa, unidentified
MDIVHTCCCGLDVHKETVVACLIHPAAQGQRPKEVRTFGTTTAALRELAAWLRAAGCTHVALESTGVYWRPVYNVLEDEFTLLVVNAAHIKAVPGRKTDVKDCEWIADLLLHGLLRASFIPDRAQRELRDLTRTRTTLTDERSAAVCRLQKVLEDANLKLAGVATDILGVSGRAILQALVDGNTDPATLADLAKGRLRRKRAALEQALDGRLRAHHRLLIATHLAHIDFLDDTIAQLSQEIAERLRPVEAELERLDTIPGVGRRTAEILAAEIGLDMSRFPSAGHLASWAGMCPGNYESAGKRKAGKTRKGSKWLRRALTEAAQAAARNTHCYLAARYRRLVVRRGKRKAAVAVGHTILLTAYYLLVRQDTYHDRSPAQLDTHRRERARQRAVAQLQALGFDVSLTPTEPAA

SEQ ID NO: 158693 - protein, 398 aa, unidentified
MTRKNTLKSLPTDTDFRVVGLDLAKSDVSVAAIPVDDNTPSLVDRMTYADLLDWAGKISPTLFAMEPCNGYSLLCLQLENLGHEIKVISGSTVSMWINTHLSGQKTDLNDAIALARLAVSDAELTPIRHKSITEIRIQTVQAVRQQLMSQRSKSIVSFKALAQQWGILCAAGHRNLKKLRESIEAKVDLITRPVANAMLFLLDAVKSLDRQIGQLNQTLQELVMSDERGRLLQSVLGVGTQISARVITVVGNVERFNSPRSLVAYVGVAPRNFITGHKNLTKKKHGNCPDLSHKGQGKIRRRGDKLLRSLFIQGAACLYMQFCKDQLPECLLKRWILKQLAIQKPYGKLIVSLAAKLIRIVWAVLTYREKFNIQKAGMTRSMWSEMALETPLNKEVPA

SEQ ID NO: 158694 - protein, 343 aa, unidentified
MEKISTVGLDLAKSVFQVHAIAENGDVVVRRALRRSQVLEFFGKLGPCIVGMEACGSAHYWGREIAALGHTVRIMPPAYVKPYVKRNKTDAADAEAICEATGRPTMRFVPIKSAEQQAAGMVLKTRELLIRQRTQTANALRGHMSELGVVAAMGMASIDKLIVIIRDNDDASIPDAARMALKEMAAQIEALTARVERLDRTIIASVKGDEEARRLTSIPGVGPIIAATVKAVVQDAAGFRTGRDLAAWIGLTPRSHSSGGKERLGAISKRGNKQLRTLLVVGATSVLKQARRGVPLPKWIVALMARRPFRVVAVALANKIARTIWALLVKGGIYQAPPAMTKA

SEQ ID NO: 158695 - protein, 359 aa, unidentified
MQIQRNELNFKGQNIYVGMDVHKKSWSVTIMSEQLEHKTFSQSPDPRALHQYLVRNFPGATYHSVYESGYCGYWIHRELLSHQIHNIVVNAADVPTTGKEKTNKTDKRDSRKLARSLSKSELECIHIPTRKTQEDRSLLRTRYAIRKNLSKEKVRIKSLLNFYGINHPEVFEKNTTHWSKRYLDWLKGIPMEYETGRASIDLLIKGVEELRKLLFETNREIRQLSRTDDYRENFELIKSIPGIGVTIGMTLLTEIEDIRRFNNIDQFASYVGLVPTCHSTSEKELNGEITYRSNGLMREMLVESAWTVASKDPAMHLTFIELCKRMEPNKAIIRIAKKLLNRIFFVLKNKQKYVCCIAK

SEQ ID NO: 158696 - protein, 415 aa, unidentified
MSSVEKGFLRYVAIDAHKYYVVIGGVNAELEVVLPPRRIQLGELEAWLRAQLKATDKAVIEASTNTWTIYDQVARYAGEVVVAHPPHVKLIGGAVVKTDKHDVRRLAKLLAVGMIPEVWVPPLVVRELREIVSHRLRLVGACTQATNRLHSMLQRHNIAAPAGDPFAAKHRAWWDTLPVSFTEKLRVRQDLATLDHFNQQVKEVETELGRLSTVSPWAEQVPFLIQLPGIGIITAMVILAAVGDIFRFEHAKNLTGYAGLGTYVHDSGETHRHGRISKRGRADLRQAMVEAAWVAARTHPHWKAEYERLSKRMLANKAIVAVARKLLVVVWHVLHDHEADRQAQPDKVAAKLRVWSGRLSPDQRQGLSHRHFVRLHLIHLGLGDELTHFRFGGKPCSLPPPDELRRLELASPSSA

SEQ ID NO: 158697 - protein, 391 aa, unidentified
MSMYFVGIDISKYKHDCCIISAADQKVVSKVTIKNNKAGFDELLTIINSLSNPEGIRIGFESTAHYALNLELFLESSLLTFMEVNPVLISEYKKSKTLRRTKTDSVDCESIARWLMTVEYKPHSKGFYHAYSLKSLTRLRDKLIRQRSFYLVKITNVLDHTFPEFKPFFNERFSKTALYLLETYGSAEKMARMNSASYEKLRSLSRGKFSPQQFLKLKELAANTVGVNNSIFDVELNSLLSLFKSLAKEIDTIEKEINKLIEEVHPHYMSIPGIGSLSAAVIYSEYGDISNFSNPGHMLAFAGIEPGVNDSGTESHGGKMVKRGSSQLRYTLINCCLPLIRFDMTFATYYAKKRGEGKPHRVAITHVAKKLIRVIYALERQDIDFNAQKLR

SEQ ID NO: 158698 - protein, 434 aa, unidentified
MRIVYERCCGLDIHKASIAVCVVITRDGKIEEETRRFGTMTADLLELAAWLKARGIEHVAMESTGVYWKPVWNILEAEGFDLLLANAQEVKIVPGRKTDQKDSQWIADLHQHGLLRKSFVPPRQVRDLRDLTRTRATLAQEHSSTCNRIQKVLEDANIKLGTVASDVFGASGRAMLLAMMKGESDAEALAELSKGRLRSKIPELRRALEGRVTGHHRFLIDRHWRQMESLENQMRQFEEEIAERMKPTAEEIARMRESLPAEAPLPPSPREEAIRLWMELPGVGLTTACSMVAELGVNMEQFPTSAHVASWAALCPGNNESAGKRMSGKTRKGNVWLRRTMCEAAWAAAHSKKTYFAAQFGRIAARRGKKRALLAVAHSLLVAAYEMLKHKEHYREFGADFFEGLNKDQVKRRLVQRLAKLGFQVTVTQTPTAE

SEQ ID NO: 158699 - protein, 343 aa, unidentified
MVHYVGLDVSLKQTSICVVNQAGSVVREDVVDSDPEAIDAFVRSKAPGAVRIGLETGPTSTWLWTELKRLGLPVICIDARHAKAVLKMQINKSDRNDAAGIARIMQTGWFKQVRVKDLDSHSVRALLAGRALLVKIKRDLENQVRGLLKNLGLVIGRAKFNVFAVRAEELVEGRPELTAAVKPLLEARKAIEQQVDDLDRKVLKLARCDTQVRRFMTAPGVGPITALCFKATIDDPTRFRRSRSVGAYVGLTTRRHASGEIDWSGRISKCGDAMLRMYLFEAAGVLLTRVPKWSALKAWGTRLVKRNGLRKAKVAVARKLAVILHRMWIDGTEFNWSTKKVAA

SEQ ID NO: 158700 - protein, 414 aa, unidentified
MEKQWNIVCGADIHKKFLIATILSRDGIKTTRRFGMTLDDLLTFKNWVIENGCEQVAVESTGTYWVPIHTVLEGSVGLIVANAYKIKHTPGNKNDLDDADWIAELCLNGMIEPSRIFPKADRDLRRLTRIREGYVNDMTREKNRVHHALESCGIKLSSVLSDIFGKSGRYVLNGLLEGRTIDDILKGIKLKRIKKKADEIKEAIKGSLDLTQIFLIRGSLEQMEAIQKRIDELGVEIKARSAHRNADLKIAMSIPGVGFTSASTLLAEIGDITDFKKPEQLAAWAGLVPSVYQSADKLLTGSITKHGSRHIRRILVQVAHVIARGRNSKLKRFFLRIKSKKGSNVAVVALARKVLCILHHLLMNREMYHEGGINKKIKIDIEKASSSTEIDLEEMIKYIVKAGYEVRKGPSGGG

SEQ ID NO: 158701 - protein, 337 aa, unidentified
MTLYCGIDLHANNSVVAVLDEDDRTVYEKRLPNDLATIIEVLSIYQSELAACVVESTYNWYWLVDGLMAAGFPVQLAHTSALPQYEGLKYCNDFSDARQLAHLLRLGILPTGYIYPREERALRDLLRRRLLLVRQRTLHHVSLQSLIARHSGQRLSAYQIKTLTQPQIADYLQGHALLGGEITHQARCWLDGAVSRIERELQQHIKPRQDYQLLQSVPGIGSVLGTTIALETGAIERFASAGNYASYARCVKSEKISNGKRKGQGNKKNGNKYLAWAFMEAGHYSAIWNPRIKRYYQRKKTRVHILVAKKAVANKLARACYHMLRRGEKFDVTRAFG

SEQ ID NO: 158702 - protein, 341 aa, unidentified
MVTTIGIDPHKATHTAVAIDESEVVLGEITLPADRSQTKTLIDWADRVDGGGRIWAVEAAGGLGYLLSQQLVASGERVVDVPAVLASRVRVLGSGRSDKNDPNDALSVAVAALRQPGLAVVRREDHAQILRMLAKRHLELTGLRTQAVCRLHAVLVLLRPGGMTRRLSADKASRMLQGMRNLDVIGEQRRAMARTHLGDIRRLDRELKANKQRIRTAVAASGTTVTDVYGVGPIVAAFLIGYSGDMTRFESAGHYASYNGTAPIEVSSGGKKKHRLSLRGNRKLNHAIHMVAVSQIRYSDTPGRVYYDKKRAEGKTKKEALRALKRQVSDTVYQRLVADQK

SEQ ID NO: 158703 - protein, 349 aa, unidentified
MNRTTYGLDLAKNVMQLHWVDDQTGEIGRKKLARGKLAEYFARLRPVRVAMEACGSAHHWARVLGGLGHQVELLPARQVKPFVRSNKDDAADARAIWLAMQQGDIRRVPIKTCEQQAVLALHRTRQHWVSVRTATINALRGHLYEFGVVLRGGRKAGLKALGEQRAVIDAQMPAVMQGLVDGQLQSLAQVQQRIDALEHEIEALQKQLDNAPALREVPGIGVLGATALAATLGDGRAWRSGREFSASLGLVPSHSGTGGKTRTGKLSKRGDPYLRTLLIHGARSVIEHAKHKPKWLEQLLARRPPNVVAVALANKMARTAWALVAHGREYQREWKNTPPKGCAAQAATA

SEQ ID NO: 158704 - protein, 357 aa, unidentified
MKDIKRSSMIKKLLKQIVGIDVAQKELVVSLGRMDEEAITTVYAYKKFVNNEKGFVALVLWVKKQTTEAFPLRYVMEATGVYHESLAYFLSNKGYLVSIVMSNKITNFFKTLEIKTVTDKSMSEAIAMFGLEKKLDNWVQPKKVFRELRQLTRERDQLIVERTMLKNQLHAEEVEAYPSVKTIKRIKDRIKMANEQGDEIMAEIKQTIKIDVELKHDVALINTIPGIGVLTSAIIMAETNGFELIRNAAQLASYAGFDVKEKESGTSVKGKSKISKRGNRHLRKAMHMPALAAIRHSERYKAIFIRIVARNGIKMKATVAVQRKLLEMAYTIYSTKKPYDNEYLQSQQTESELQEVV

SEQ ID NO: 158705 - protein, 374 aa, unidentified
MHGPQHSTTPLTRILALDLGKFTSVLCVYDPATHGHHFVSAQTTPRTIHDLLVAEQTDDPARTLLVIETCDVAGWVHDLAAALGMTVAVANCAHEAWRWTRVKRKTDRDDALKLAKLAVLGQLPTAHMPSPHQRQRRRLVHHRRVLVDRRTAVKNQVRSIFSQQGLQLPPRGRAWTKPGLAQIAAHARPLAQCGDALDLWRGRLHVELHLLETLNEQVAPVDAKLDALGAADDRVQLLQSVPGVGPRLAETVVAHVDDARRFETAGQVASYAGLVPKQFESGTIRRSCRITRRGPALLRSMLVEVAWMVYLRNDWARHFVQRISRGVASRRNIAIVALARKLLVTLWAMLRDNTRWREPKGAPRLTPAAALAVT

SEQ ID NO: 158706 - protein, 394 aa, unidentified
MKLVGIDVGKNSHHFCVMDKETGEFNVAPSSFSNNKEGFDFLINSLKPYSKKSILIGMEDTGHYHVALLKFLLSNGYTVALINPKTTDLTRKMEGGITKNDKLDTITICDVLDTPERKKQYRITKVDRFDLYEQRQLTRHHHNLKEELNVYCNRLQKSIDLVFPEFNTLFSSKYSIVYMNLLKTFGSAEAIASTDIRTIRKCFEIKGRGNRISLTPEKLKECAKNSIGISSEVETIQIKHLVSQITLIKEQIAEIDKKIEEFSITNNSPILSIPEISHFSGTSILAELGDIGNYSKPSQIIKFAGVAPYHYESSQYNAQHTGITKKGSKYLRKTLYQIILTVINNNPVFKKYYLLKISQGKGHRCAQGHCIRKLLRIIYHLLETGQSFDPALLR

SEQ ID NO: 158707 - protein, 388 aa, unidentified
MQVIADRPEAPSAIRTNLGAIFVSLELSLSTWLITSLSPGSGEKMSKHMVQGGDIAGLLRRFAQLQEKAQARTGRNFPIIVIQEAGLDGFWIDRVLKNEGIESHVVDPASVATSRRRRRAKTDKIDGEALVRTLLAYKRGEPRVCAMVKAPTPEEEDRRRLCRERKVLITERVRHVNRIKGLLFSQGVCGYEPLRRNRRLRLDELRTGDGRPLPKHLKAQISRELDRLELLLEQIKAVETERDALLAAQQIAAPSSAAMLLAIKGIGPDFAAVLWSEGLFRHFDNRRQIASYAGLAPTPWKSGSIDREQGVSKAGNPRLRTTLIQLAWLWLRHQPQSALTLWFKERVVRNGGRLKKAAIVALARKLLVALWKYVAAGVVIEGAIMKAA

SEQ ID NO: 158708 - protein, 356 aa, unidentified
MDNRKYIGMDVHQASISIAVSDAAGKVLMECIIETKAATVLDFIQGLRGSLWVAFEEGTSAAWLYDLLKPHVTKVVVCDPRKNALLKAGNKNDRVDARKLSDLLRAGLLTPVYHGESGVRTLRELSRSYLAASKDLTRVMNRLKAIYRSWAIPCAGQQVYSPRHRAAWLEKLREAGVRRRAEQTYQQLDFLMGIRKETRKELLAESRKHPARQLLEQIPRLGPIRVALLIALIQTPHRFRTKRQLWNYCGLGLRTRSSGEYRYTGGQLQPARKPPALRGLNVNHNHDLKNLFKSAATQAGTSKHDPLGEFYRNLLAGGMEPPMARLTLARKIAAIALKIWKKGERFDPAKLKQQAA

SEQ ID NO: 158709 - protein, 372 aa, unidentified
MKNVSIFVGLDVHKESIDIALVEGDRISTVRYFGTIGGDLTDLDKAVKKIKKTHPEASFHFVYEAGPCGYGIYRYLTKAGHECMVVAPSMIPKRSGNRIKTDRRDSIMLASLHRAGELTPVYVPREEDEAMRDLVRARQDAVKAGRVSKQQLKGFLLRHGIKFAGKGDWKQTHVNWLAGLSMPIPAQQIVLQEYINTVKDCMDRVARLTFQIQEVLPSWELALVVKALQAMRGVSLQVAVTTVAELGDLKRFDNPRKLMSYLGLVPSEHSSGGSRRTGSITKAGNGHVRKALVEAAQTYRLKARIGKELLARQAGLPKQICDIAWKAQVRLCGRFRKMEARGKKHQTIICAIAREICAFMWAIAREVKPITA

SEQ ID NO: 158710 - protein, 366 aa, unidentified
MKKISTVAIERIQIFKQNQLTIGLDLGDRSSHYCILNEAGEVIFEHELPTTPKGIEEVFSRIPRSRIALETGTHSPWVSRQLTQLGHEVIVAHARNVRLIGESSRKDDPLDARTLARLARIDPGLLGPVRQRSAKAQIHLTVIRARAALVGTRTALVNAARGLTKSYGQRLRKCGTEQMNREIAKGLSQELQEALDPLLAEIESLNERIAEYDGRIEKIAKEVYPQVAVLKQVKGVGTLIALTFVLTLDDPHRFRRSRGVGCFVGLRPGRRNSGMSEPQLHISKEGDRYLRTLLVQGAHYILGPFGQDSDLRRWGLKLSERGGKNAKKRAVVAVARKLAVLLHKLWVSGEVYEPLRNNHKVVAAVA

SEQ ID NO: 158711 - protein, 373 aa, unidentified
MSVRLIERCNLFEEGRSVISRLTVHVPKIIIGVDTHKEEHVAVVIDKLGARIGQLTLPTTKVGYVALECWARTLGEIEAFGVEGTGSYGAGLARFLKGQGHTVIEVNRPDRSTRHRLGKSDPTDAEMAARSVLAGVALDQPKSGVEEVEMIRMLKSTKNSAMKGRTQAINQMKALVVTAPVELREVLNGLTSSQLVVRCSGWRSGPLDTPTTAAKYALRSLARRYAQLADEIEKLNKELARLTVAFAPMLVDLFGIGPDTAADLLVTAGSNPERLKSEAAFAALCGVSPIPASSGKTNRYRLNRGGDRRANAALYRIVIIRLRYDIRSRTYLQRRTAEGKTKMEVIRCLKRYIAREVFGILHEIGMRHTFRNA

SEQ ID NO: 158712 - protein, 418 aa, unidentified
MSRDENTRDTRRYVALDIHKHYCVVAGVDREGRVLLQPVRVEHADLEEWLKKKLLSSDQVVIESTTNAWHVYDLLAPLAERVVVANPIKVKQIATARVKTDVRDTLILARLLAANLVPDVWVPPMHVRQMRQLLSQRRQLVETHTQILNRMHSVAHRHHLKHERGKRFNEKTIGWQKDERLSKMEQFQLSLEMENKVYIEKQIERISKEVRKLCHQKPWADDMTYLMQLPGSGVITAMTVLAAIGEIERFETSKHLASYSGLTPGLEQSGTKKRGKGIKKEGRRELRWDLVEAAQMAVKSDPLLKMKFQTLQKRMHRNQAIVAIARHLLELVWYVLTRHQPYRHFSHERIAYKYLTWAWQMDDEARDGLTRQQFTRYYLMRLGIGHDLTRIALDPKHPRRLASEAEVLAIHPELTQVE

SEQ ID NO: 158713 - protein, 406 aa, unidentified
MGFRAGIDWSGSHHAVCVVDEASGAVVARFAVEHTSAGLDELARRLARFGPAAALPAAVERPSGLLVEALLAAGHPVVPIHPNAVKATRPRYRAAGGKSDPGDAYVLADLLRTDGHRFRALRPCSDQLKALRALVRGRDDLVAERVALSDRLTALLEGFWPGAAGLFADIDSPIALAFLRRYPTPASAARLGEARMAAFLRKQRYCGRRSPAELLARLRAAPPCHAGEAEARAKGDLVRALVSLLEALGTRIAEVTARVEQAVADLPDGRIVMSFPRAGRVCAAQILAELGDVRERFRTADQLAAEAGVCPVTRQSGKSRGVAFRRACNRHLRRAVTCFAHNSRYASAWAADIYDRARARGCDHPHAIRVLARAWIRILWRAWTDRKPYDPELHAAAMRYAAPQPG

SEQ ID NO: 158714 - protein, 336 aa, unidentified
MTEFTRIAIDTSKSVFTLHGVDASGRAVLRRNLRRDALVGFFQAAAPLEVALEACGGSHHWARTLQALGHSVRLIPPQYVKPFVKRGKNDRNDAEAISEAAARPGMRSVAVKSAEQQANAMLLSVRELLVSQRTQLVNALRGHAVEFGHVGRIGNKGVAEVRAHLADDETLPAPAAEALGLLGREIDRLDARLAEIDAKLLAQHKATPASLRLATVPGIGPISALSLVLKVDASQFETARHFAAWIGLTPREHSTGGKTRLGGISRAGDERLRSLLVLGATTVIRHAKPGRSSAWLLALLARRPRKLAAVALANKMARIVWAMLTSGQTYRQPATV

SEQ ID NO: 158715 - protein, 405 aa, unidentified
MFDTEDVGVFLGLDVGKSNHHGHGLTPAGKTVFDKQMPNSEPKLRAVFDKLTAKFATVLVIVDQPASIGALPLTVARDAGCKVAYLPGLAMRRIADLYPGEAKTDAKDAAVIADAARTMPHTLRSLELTDEITAELTVLVGFDQDLAAEATRTSNRIRGLLTQFHPSLERVLGPRLDHQAVTWLLERYGSPAALRKAGRRRLVELIRPKAPRMAQRLIDDVFDALDEQTVVVPGTGTLDIVVPSLARSLAAVHEQRRALEAQINALLEAHPLSPVLTSMPGVGVRTAAVLLVTVGDGTSFPTAAHLASYAGLAPTTKSSGTSIHGEHAPRGGNRQLKRAMFLSAFACMNADPASRTYYDRQRARGKTHTQALLRLARQRISVLFAMLRDGTFYEPRTPDDIELAA

SEQ ID NO: 158716 - protein, 351 aa, unidentified
MRVGVLQSGLYQKAEADYKKVLKYLEFLRAVYGNDANFICGYEAGCLGYTLYHQLTEHHVNCVILAPTTMLEQRSKKRIKTDKRDAEIIAKCLAQHNYSPVHIPTAADEETKEFLRMRDDHKLALKKVKQQILAFCLRHNYRYDGNSHWTAAHIKWLKSLKPEALYKEILDEYLLTYTALSDKLERLDKRIEELASKDEYKESVKKLCCFIGVKTHTALSVLVEVGDFHRFASAQNFASYLGLVPGEDSSGDGQTRLGITKAGNRHVRMLLTEASQCYARGQIGFKSKELKSRQAGNSPQVIAYADKANERLRRRYYKMVLGKSKKPNVAKTAIARELACFMWGMMTDHVA

SEQ ID NO: 158717 - protein, 468 aa, unidentified
MTSRKSKSGRVPVGREAVERLQVTHAHAAGIDVHSSAHWVAVSPGSAPAPPRDHPATLPPHVRKFGACTADLEMLADWLKACGVTTVAMESTGVYWIALFELLERRGFEVYLVDPRQTRHAPGRPKTDVLDCQWIQRLHSYGLLTASFRPADQVVVLRGYLRQRQMLIQYAGQHIQHMQKALEQMNVKLTEAVSDITGKTGMAILKDILRGQRDPVKLAKHRHDNCKRTEAEIARALYGNWRDEHLFALKQAVALYEFYQKQLRACDAALEQHLRTFADHSEGEILPAKPRPRKRTPNQPAFSVRPLLFQMSGVDLTVIEGIEESTALTVLSEIGTDMSKWATEKRFVSWLGLCPQHQGSAGRIKSRRVRRGANRAARALRLAGQGCHHAKNALGAFYRRIQARAGGPKAVVATARKIATRVYRLLKFGEAYVRQQMHAYEEAYRLRLVKGLARKASELGYQLTPAPS

SEQ ID NO: 158718 - protein, 361 aa, unidentified
MKCVQSNKLDFSGQNIYVGIDIHLKSWSVAILSEHSVLKRFSQSPEPEALHKYLVSNYPGANYFSVYEAGFCGFWIHEKLTDLGITNIVVNPADVPTMSKEKLRKTDAVDCNKLARELRSGSLEGIYVPKADVLEMRSLIRMRNLIVKDSTRAKNRIKSLLRFHGVEIPEEFTRCSIGCWSKRFLTWLHSLELSTEYGKKTLELHLEQFVRLRKMLLQETRAIREISRKAPFEKPIRLLTSVPGIGVTTAATLMVELDDIVRFKNADHLASFIGLVPMCHSSGESNGTGDITVRCHFMLRCLLVEAAWIAIRKDPAMTVAYTEYRKRMNPQKSIIKIARRLVNRIYYVLKQEKEYVPCVVK

SEQ ID NO: 158719 - protein, 348 aa, unidentified
MPLGGHLINNITKNLMTVLSATVTLAPCLGLDLSQAKIDACLLLGRRTYHHQFDNSKAGLAALRAWCQKLGAPAPLTVLEATGRYSDLAALTLHAAGYRVHLANPRRIKDHARSLGRRNKTDRLDAQLIADFGRTHDLPTWQPPTPDQAHLRMLMRRRADLATMLQAERNRHDGPALPPALAKSLTRIQRALTKELQTLDAQIAAHLQATPTLHADVQRLCAVAGIGQRTALWLCAEVPRHLPNPRAAAAWLAVTPRVRQSGVSLRHTAPIGPEGNRHLRRALFMAALVARRHNPRLKAFADRLAANGKSKLSVVCAVLHKLLKITFSILKNQTAYDPNHFPLQQPQI

SEQ ID NO: 158720 - protein, 464 aa, unidentified
MRKGEVAGKTRQQTGTSKGLPPIRRKVAGIDIGSRQMHVSAPVSEDGKTEVRVFATTTGEIVACAKWLKQLQVESVAMESTGVYWIPVLEILEGFPFEALLVDTRPLSRVPGRKTDITDAEWIQTLHSHGLLQGCFRPTEEISQLRSLTRQKAVLVAEQADWIRRMQKCLDQMNVRVHHAIADAQGVTGMLILRAIVNGERDPRKLAELRDEGCHKSQEQMAALLNGHWRPDHLFNLEQGLRMYDAIAERIAVYECEIQKRMEQLTPPGRREQEAPPLLNPAKRKAMKRRRQEDKRQALYRLTGVDLTTIDGVGTETAEVVVSEYGVEMSRFASEKEFVAHLKLAPRQAITGGKQLKRRGGKTKGTRAGRALRNAAVTVGKGATALGAYYRRISFKKGASVAVFATARKLAILIYRMLRWGQAYVDIGQQAYEEQYQARRIRSLASTAAQLGYQLLKKTEVVSA

SEQ ID NO: 158721 - protein, 413 aa, unidentified
MKGRIFVGVDVGSLEHQVAVMDEKGGECWSQRVANTHAGCLEVLEYLHTWQERGYEVWVGLEGLGGYASPLDRILWTAGIYVMGIHPAQSARFREMVGVQADKTDPLDARLLAEMLRWKSQRGELEASPMRDEYFQALRLASSHFQEANEMKVRVQNQFVDNLRTYWPELVMGKKYFERTDAAGLLALVSRYPTPQALVKAGHRKVEKVLREAMGRDSQELAAELLAQSREVSQTYMMSSPAASVVQEEAAMLAGLMQGVQKWERVLTQLLELHPFGQFMLDQAGLGPRTSGCFLGEVGDLGEFKTEAKLARYAGIGPVVSQSGKQPARHHDGHRYNHCLKRTVMLMARSRALHDERSKAYVAKRRALGDGYWKAIKKLARYLLRFLWKSWQQIVQKNEINLEKILAQGALLP

SEQ ID NO: 158722 - protein, 408 aa, unidentified
METIHPICCGLDVHQASVSACLRRVNAQGAVNVESREFGSTVKELVALADWLVAEGCPIAAMESTGVYWKPVWNILSPLLDVWVVNAREVKQRRGKKSDRADAKWIAELVAHDLVQPSFVPPRRIGVLRDLVRMRTVLVQTRTQVKNRVLAVLEDTNVKLASVVSDPFGASSRKMLDALVNGERDCKVLSEMAKGVLRRKIPQLEVALQGGFTEHHAFMIRLGLESLDQSNRQIAELDAQIERLMDPLQEEALRLTSIPGVGHNAARVVLSEIGTDMSRFGSAERLASWAGLCPGNHESAGKRYSGRTRKGNRYLRRVMAECAWAASKTNTFLGRTFRRFQIRIGGKKAAVAVGHKILVIIFHLLNEGRLYDDGRYDPIAQREQIRQRNRALTTLQRLGYQVVLTPTP

SEQ ID NO: 158723 - protein, 361 aa, unidentified
MNNNNRQDNKGREQKDQELQVIKLGIDLHARQVTFSRQVDQSVPQPAQRMHPRAFVQWVREQQTPGLKIYSCYEAGACGYWLHRELEKVGVKNFVIAPQPMDQGASRQKTDRLDAAVLVDQLDRYLRGNHKVFSVVAVPSEQQEQQRALIRLHRQLLGDRLRAEARGRALLCSQGIEVGGCWWKTKNWKLLSNGLLASWMLETLQSWRAKILDLDKEQNRLRQRIEALAQASDLPKGAGRYSWVVLQSEMRSWERFNNPGQVSSYTGLCPGVHNSNGRGHEGRINRCGNKTVRYTLIEMLWRMVRWQPHYGPIRQLVKGLLSKRAKRRVAVAAARRLAVDLWRLATGRTTAEKLGLIMQKH

SEQ ID NO: 158724 - protein, 324 aa, unidentified
MTTTTTPVFVGIDVAKAKLDIGVRPGGEYWQCANDEAGMTEAVQRLGDRSPLLVVLEATGGREALAVRALHAAGIPVAVVNPRQVRDFARATGKLAKTDKLDAGVLAHFAEAVRPEPQQPPDEATQRLGEGLARRRQLVGMLTAEKNRLESAPAWLREEIAEHIAQLEKRLEDLSEGLQEAVAQNPEWRSKAEMLRGVPGVGPVLTLTLLAEMPELGKLNRKKIAALAGVAPLARDSGKMRGKRSIWGGRAPLRAALYMGCMSATRYNPAIQVMYERLRAAGKLPKVAYVACMRKLLTVLNAMVRDGKPWDATLGMTAGAAEAA

SEQ ID NO: 158725 - protein, 308 aa, unidentified
MTTIYTGLDIAKLNLQLHLLGRRHDLPNTAAGHRRLVKLLAALPGAHVICEATGGYERDLVAALHDARIPVSVLNPARVRHFARATGQRAKTDPLDAAILTAYGQALQPPPTAPRTPQEHHLSELIRRRVQVLALLVAQRQQAQRLTVPALRRQAQSLVRRLERDLKQIETQLGQLQAQAKALGERVQKLIAITGVGTITALGVLAELPELGTLNRRQAAALAGLAPHPRESGQWHGRRRIGGGRAPVRRALYMAALVAARSNRQLKAFYQRLRAAGKPAKVALTAVMRKLIILMNHTLKNPNFVPQN

SEQ ID NO: 158726 - protein, 338 aa, unidentified
MPLYGGIDLHANNSVVVLLNEQDQVIYQRRLANHLPTILEPLALYQADITGVVVESTYHWYWLVDGLMDAGYRVPLANPAAMQQYSGLKYTDDYSDARWLAHVLRLGVLPEGYIYPKAERAVRDVLRKRSHLVRQQTANVLSLHNIIVRNTGVRLSAKRIHELTLEECERLLPEPDQVLAVTSSLAVLHCLGQQIKALEKLVHKRLQHTPAYEQLQTVDGIGTILAQTIVLETGEIRRFPTVGNDAAYCRCVKSTKISNGKRKGQGNVKNGHPYLEWASMEAAQFAVRFSPTVQRFYQRKQAKSPLMVARKAVAHKLSRACYYLRRDLVPFHVHQAFG

SEQ ID NO: 158727 - protein, 343 aa, unidentified
MSEVTTIGLDIAKTVFHAHGADERGRGVFSKRLTRAKLLAFFAAQPRCTVALEACGGAHHWARELTALGHEVRLIPPAYVKPFVKRHKNDAVDAEAICEAAQRPTMRFVAVKSEEQQASALVFRTRDLLVRQRTQLANAIRGHLTEYGWVAPKGVSYVSMLGDILEEEMAASLPPAAVAMFKVMLDLMADLNERIADLDREVERRAREDETARRLTTIPGIGPITATALTALAPAAQTIAKGRDFAAWLGLTPLQHSTGGKQKLGATSKMGERTLRRLLIIGASAVIKQVVRRGPVKGSWLEQMLARKPRMLMTVALANKMARIVWALLAKGGIYRAPMAVAA

SEQ ID NO: 158728 - protein, 339 aa, unidentified
MSGIYVGIDAAAESFMASVLHSPERASTAATPFENSEAGLLALEGWLRSLGVDPHEVRVCIENTGVYTEVLCYQLHERGYALSLLDPRTLWKAFGDGQPKNDPLDSRRIAEYGFRYADRLRLWKPQEVIVEQVRVILSTREQLVEQSTATKNARSTLARKFIQTPAANRALETTIANLQAQIRELEEALKHLIRTHPTLMQGVSLLMSAPGVGWLLSSHLLVLTRGFTDVPSYRTLAQYLGISPNEHSSGTSVRKRNRSRRYGPPAIRKLLHLAARSLRTHEAKSTRYFLEKVASGKPKPLVINNIANKLLKRLCAMMRSRTPYIHGHQSIDPRLLTLA

SEQ ID NO: 158729 - protein, 366 aa, unidentified
MEARRFVGIDLGKRHYEACVLHAEERIVRWRGTTDAEGREELAEKLEAGDVVALEAGALSFTLARRLVQVDGVQVKVLHSAKLAVIYSSMRKTDKEDALKLARVLQGTAEECLPVVSLPSQEEEDARRLANHQIFLNRERTGIINRFHAACVEHGMTEITKKDLATEKGRMAVLGRMTGIYRMLAEQYCVILAAIESQRVLVKEQVRQALLKREKEAEILLSIPGVGPTAALAYLGFVGTEDRFENPAQVSYYVGMVPRVELSGTSIHHMGHITKQGSPALRRALVQAAWAAVRSPMGAHFRVVYDRIAERRGKRIAVVAVARHMLELMYTLLTKHELYRYCSEEERFRKLKFYKLGSLGTEEILT

SEQ ID NO: 158730 - protein, 338 aa, unidentified
MSKKLIVGVDMAKKDFAAALRVDDIVVELEKCENDGSGRQLLNEQVKALCEQQRVEQVHLVIEATGGYEAALVAYAYEQQWLVSMPNPKQVRDWAKGVGYRAKTDRVDARILAHYGAERQPPTRPPLAVEVSHLDSLLKRRLDLEQALQKERTRLTESAHRPGIAAKVQESFQQVIDALEQALAEIEQTIDELCQRHEPFQQNLKRMLALPGVGTKVVLPLIVKLFQWQSLTHGQGNAKGLTSFVGLDPQPYESGRSVRKQLGISKMGDKEMRRLLYMGALGGVRGHNPLKPFYDRLVGRGKAKKVALVAAARKILTWAWTIFSRQTEWNPAFHAIAP

SEQ ID NO: 158731 - protein, 318 aa, unidentified
MNSNNKVESTEPVRYVSLDISKARLDYAIAGQKCRKVPNTAAGIATLITLIQPLPGVRVVCEATGGYERRLLEQLHQARVPVCRLQPGRVRHFARAEGTLAKTDKIDVGVIYRYACSMHPRVEKPLLPEVIALRELMDYRRQLVEQCGQTANRLETAGATLQALLQGQREQQHAALAKADELITQHLREQPALQAKSERLQQVQGVGPVLATTLLAYLPELGEEDDKRIAALVGVAPFAHDSGETSKPRHSRGGRVEVRNVLYMAAVSAAQHNPVLAPFYERLRAAGKPANVCLLAVMRKLIVVLNRMLKDPNFTLVD

SEQ ID NO: 158732 - protein, 349 aa, unidentified
MEYYAGIDVSLELSSVCIVDAKGKIVKEAKVESEPAALVDFLRGLDMSIDGIGLEAGPLSQWLNAGLTSSGFDTVLLETRHVKAALSAMTVKTDRKDARGIAQLLRMGWFRPVHCKSVGSQEVRALLVARKLLLGKLLDVESSIRGILRGFGLKMSQVTRKSFELRVHELCAGQMMLEQVCSALLAARSSLQTEYNKLHKKMLAIVRKDEICRRLMATPGVGPLVAIMFKTAVDDPTRIGKSKAVGALFGLTPKKYQSGETDITGGISRVGDGMVRTALYEAANILLSRVTRFSALKRWGMDLVKRRGAKRAKVALACKIGVILHRMWIDGTNFRWTREASKVQQLVRA

SEQ ID NO: 158733 - protein, 413 aa, unidentified
MSVTPETPPARVCAGLDWAKDDHAVCVIDADGQVLDRFTIEHTAAGLKRLIRNLLTAGVDEIGIERGDGPMVEALLQAELTVLVISPNQVKNLRSRYGSSGNKDDRFDAYVLADVVRTDRRRLTPLTRSTAQTRALRSSVRARRDLVEHRVGLANQLRAHLQIVFPAAASLFTAIDSAISLSFIERYPTQTKADWLTPTRMADWLRKVAYSGRTSPEVLHARLLAAPRGTTDTDAEAHASTTVAFVAILRALNTQIDTLEDAIAAQLDVHPDARIVTSLPRSGMLRAARLLAEIGDARGRFPTADSLACLAGVAPSTRQSGKVKAVTFRWSADHQLRDALCDFAGDSRHANPWAADLYNRARARGHDHPHAVRILGRAWTDIIWRCWQDGLAYDPDRHNALQRILNEHAQKVA

SEQ ID NO: 158734 - protein, 427 aa, unidentified
MNLLPIAGIDVGKRFSELAVLSPDNAVVARMKIYHDASANIDKAVEVLRKVEKDFAARPVVVMESTGHYHKILFYSLCKAGYDVCVINPLQTDSIKNLGIRKVKNDKVDARKVALLYRFQELRTTNVPEEDLECLRSLCRQYFNLSDELTAYKNRLIGVVDQIMLPFTEVFKDICSLTALAILEKYPTPTHILKAKPAELIELIRKTSRKNVKWATKKYELLLSKAKAFEPLSLSTHANLAMLDVNISMVKSLSKSLEKVLSAIVELLATDADKELPLLSMTIALLCSIPGIGLITAATVLAEIGDFSAFSNPDKLVAFFGIDPSVKQSGQFEGTQNKMSKRGSRLLRRVLFTTALANVRKKRNGNEHNPVLYDFYRKKCVNKAKKVALGAVMHKLVFVIFAVLRDKKPFELRKPEDHAKTLNKKAS

SEQ ID NO: 158735 - protein, 325 aa, unidentified
MAKRITVCAGIDTGKRKLDVAIDGSCEQLQVENTAEGHKVLLEWLQRHKVKRIGIEASGGYEQPVVAALRRKRFVVVVFQPAQVRAYAKFHLQRAKNDKIDAALIAACTAAVKQIYPAPDPRLSPFAEQLTMIDQIGEDIMKLKNRIETCRNERIRAVWKEDIARLAKRERTELKALVAAIRQYPDLAERLELIHSVGGTGLPTAVAILVRMPEIGQLTREQAAALAGLAPYDDDSGDQVGARHIDGGRERLRRALYLAALPASFRWNPQLIALYQRLRAAGKEHKRALIACARKLLIFVNTVVARGTPWQGEPPAARTANPSTA

SEQ ID NO: 158736 - protein, 316 aa, unidentified
MTEALRYAGIDVAKDWLDIAIYGVGQPWRVTSDEQGVQDLIRALQEQGVAVVVVEATGGLEIPLAVALDVAGIPVALVNPRQVRDFARSLGKLAKTDRLDAQVLAHFGAATRPVPRPLPDEQARELAALVARRRQVLQMHAAELQRRQRALLVVRHRIDRVVAVLEQELRDLDTELRDRLRASPMWREQEDLLQSVPGVGPALTFSLLANLPELGTLSSKQVAALVGVAPMNRDRGHWRGKRVVWGGRANVRAALYMPTVVAVRWNPVLREFYQRLVAAGKPKKVALVASMRKLLVILNAMLKHRTPWQANHALTS

SEQ ID NO: 158737 - protein, 349 aa, unidentified
MGEVITIGVDIAKSVFQIHGVDADGVVVIRRRIGRARVLEFFAHLPPCRVGMEACATAHQWARELAKLGHDTRLMPPTYVKAYVKRGKNDAADAAAICEAVTRPSMRFVPIKSVEQQSMLMLHRVRDLLIRQRTQLTNALRAHLAELGLVAAKGREGLHQLAAVVTECGNERLPREARFACQSILTQLHSVQIEISGLDKRISQIHRANAESKRLEAIPGFGVILSTAVAATIADPKAFRTGRDFAAWIGLVPRQNSTGGKERLGSISKQGDRYLRRLLVIGATSVINSARARPYQYPWVIELLGRRPTKVVAVALANKMARIAWAVLAKGERYRVPTRSGNTVVTAAA

SEQ ID NO: 158738 - protein, 444 aa, unidentified
MLPRDGAVIGIDLADEKQAFAVIDHDVRVLARKTVRVKAFRLGPALDWAVAQAGAKGLARVTVACEPTGPRWLQVQMLCAERGLPLVCIQPLVSHIAREQQDYTSHKTDEADCVMIARLAAELHCYVPEELDETWADLRHLGRRRAQLITQQTASMHRVRDFLSAAWPTVIETCAQPLLSKTWLAALEVVTARCGGQPAGLAAMGEQAFTASVRGAVAGWGGQRAWGTISSRIFAALTDTEGVVVSSRRGLLRRCAGELGDLRRARAQLRAVEAEMVAVLAELGLSRLGDIPGLTAAGAAAILAETGGPRRYDSSSSLVKHAGLSPSENASGAFHGEARISRRGRPGLRLTVWRAVWPMLRFNPVMAAKYQAMTAAAAPASAGSRQAAAADAAARARRAKARVACAASLLRWIYSLVAHGTSWDPEIAAGRKDHQAAPRYLEAA

SEQ ID NO: 158739 - protein, 338 aa, unidentified
MVLYAGIDLHSTNNVVVVQDDKDNVVARRRLANDLRTVSAWLEPYRDDLAGVVVESTYNWYWLVDGLLEQGYTVHLANTVAIQQYDGLKYRDDASDARWLAKLLRLGELPEGHIYPRKERAIRDLLRKRSCLVRQSTGNLLSIQNLFARNTGECLSANRVKQLTPEVVDATFADANVSLAIQSALKVMNCLQEQIGVVEKVVVDQMRLRKPYKQLLTVPGIGKILALTIMLETGDISRFARVGHYVSYCRCVGSSHLSNGKRKGSGNTKNGNAYLCWAFIEAANFAIRFDETIRRYYQRKKARTKRIVALKAVAHKLARACYHMIKDDVAFDVARAFG

SEQ ID NO: 158740 - protein, 358 aa, unidentified
MKKIVIGIDISKEKIDASAIDVRDCQQGVVRLDYQTFDNRPMGFRRMLVWARHLMNGATLQDVLFCCETTGGYDRGLCDYIYGKGLDIWREGALQIKRSMGVRKGKDDKADSLMIAEYAMRHMDKAVIYESPNETIRELKALFLYRHKLVQEKAEKQVRAAHLADTAAKSKSMRFILHDAKRSVKAIQKSIKECEKHILELIESDEEIQRNYGHIVSVKGLSIVNATAFIAYSNNFRGITTANKMASYYGVASFRDQSGTSVDKKAYVKYYSCSLLRATITQAAEWTVKENGIYRDYYLRLKAEGKPYGVIINNVKNKLIHLVFSLVTNDTDYEQNHESLRVKRKSEQKMSAQLENIN

SEQ ID NO: 158741 - protein, 323 aa, unidentified
MRKHNMVCAGIDTGKRKLDSALNERPPELQVDNTPDGHGTLSAWLQRHGVKRVGIEASGGYEKAVVARLRRDGFVVVVFQPAQVRAYAQFVLQRAKNDKIDARLIAACTAATKKIHAPPDPRLAPWAEHLTLIEQIEEDLARYKTRLESCREPRCAAFWRAEIAHLNKLLKSELAVLVSAIRQHQDLAARLDLIESVDGVGLRTAVAILVRMPEIGRLTREQVAALAGFAPYDDDSGDHTGSRHIAGGRKRLRRSLYAAALPAAHRWNPQLIALYRRLRAKGKEHKVALVACARKLLIYVNTVVERGTPWVETPPAPAALRAK

SEQ ID NO: 158742 - protein, 373 aa, unidentified
MHRAGLALASMSQNNNFTTTIYAGIDVAKATLELSLSGVCHSVDNDAKGHARILKLLSAAETARLGTKVHLILEATAGYEAALVRALHGAGCALSVIQPSRGRHFAHAKNKRAKTDPIDAGVLAAFGEAIRPQPTAPPSAAQSRLAELVGRRAQLVETRTAELNRAAHYSDKLLCKQSAQLLALLDRQVAACNRAIAAQIEADEMMKARSERLQQVPGVGPVVAAVLQAEMPELGTLSEREAAALAGLAPYSCDSGPHKGTRRVWGGRAPVRCILYMAAMSAVRHDPILRVFHAKLLAAGKKPMLALTAVMRKLVVLLNRMLKNPQFKLTGAEDISSAQIAPGERLRLNKLADSWTAEPPFVEARAADSAKSK

SEQ ID NO: 158743 - protein, 349 aa, unidentified
MKIIGCDFHPGYQQIAMLDEKTGELSEKALSHEKTEEVRAFYSALPGPVRVGIEASGQSQWFERLLAELGHELWIGDAAKIRAGCERKQKTDRRDALLLLQLLMEGRFPRIWVPTPAERDVRQLLLHRAKLVRMRTQVKNQLQALALNQGVQRKWKLWSVAGRKQLEGLPLMPWASRRRAELLVLLDQLDASIGELDDAATEQANTRAAVRRLMTHPGVGPITALAFVLTVGPAQRFRRGKQVASYFGLIPSEHSSGGRGQRLGHISKQGNTFLRGLLVEAAQSAVRHEPEMRREYQRLAQRKCRALAKVAMARKLAVRLYWMLRSEVDYAQLIQGSHAGQPESFRGRG

SEQ ID NO: 158744 - protein, 349 aa, unidentified
MDSMSLTGRDVIGGVDTHQDLHTAAVVDATGEVLATQAFATTRAGYRAMLAWFRSYGELARVGVEATGTYGAGIARHLAAAGIPVLEVTGPDRAARRGRGKDDRLDATAAARAALTGQRVQVAKDRSGAIEALRVLRTTRKTAVRRRRATLQQLHNTIVAAPDELREQLRHLTRMRLLRTCAAWRLDLVAYRDPAVATKIALRSLARRVLDLGDEIADLERLIAPLVAELAPGLLALPGVGTQNAGELLVTAGQNPERLRSEAGFAMLCGACPIPASSGKTTRHRLNRGGNRQANSALHMIVVCRMRRDPRTKAYVSRRSAEGLGKREIMRCLKRYVAREVYHVLVPST

SEQ ID NO: 158745 - protein, 349 aa, unidentified
MVMTIVEAARAITGGVDTHLDVHVAAALDGVGALLGTEAFPTTPAGYQALLSWLESHGEVTKVGVEGTGSYGAGLSKFLTRAGISVVDVNRPNREERRRSGKSDPLDAIEAARSALSGKAKSIAKSKDGAVEAIRTLVVAKRSARVARTAALTQMRHLIVSAPDQLRSRLHGLNVHHLTTEAARLRPSRHGEPVLAATKAALSSLAHRVQGLDDELAELDGRIKALLEALCPDLLGLFGVGPDTAAALVVCAGDNPERLRSEPSWARLCGVAPIPTGSGQTSGRVRFNPAGDRQANAALWRIVMVRIAHDPETTEYFLRKVKEGRSKPEIIRLLKRYVAREVYRHLPRR

SEQ ID NO: 158746 - protein, 338 aa, unidentified
MHITTLGIDVAKNVFQLHGVDARGRAVLSRRVTRSQLVHAVASLPPCVIGMEACGSAHHWGRAFAQLGHTVKLMHPKYVKPYVKTNKNDGRDAEAICEAVSRPTVRFVSIKTVEQADLQAVHRTRSLFVKHRTAVINQIRGLLAEYGLVVAPSPEKVRPTLVRVLDDAESGLTACARETFSELYEQLTELDSRIERVTHRVERVYRAHPVCQKLAAVPGIGPLTATALVATVGRPQAFRNGRHLAAWLGLVPRQYSSGGKERLGGISKRGSRYVRTLLIHGARAVVQRAERRTDTQGRWLCALKHRKGTHVAAVALANKNARVIWALLAHDEEYRSPA

SEQ ID NO: 158747 - protein, 319 aa, unidentified
MAQNDLIVVGIDVAKDKVDACIRRFALRQTFPSTPQGHRKLVAWLRKHKVGKAAMEASGGYERDWAKALRQAGIEVRIVDPKRVRSFALSAGRLAKNDTIDAEMIAWFAETFDEAPSQAHDAAREELAGLVKARKNLIDVKTRLQSQNEHAVPGPVQKAHAHVLKSVAGEIAKLEAAISARVKATPEFAERAEIIESVPGLADNTSAVLIAGASELGKVSDEIAAALIGIAPYDDDSGKRRGERHIKGGRRWVRNALFTPCLGAATQHNPVLKAHYERLIAKGKEPKVALVACMRKLIIILNTMIARGEKWDPSRYALR

SEQ ID NO: 158748 - protein, 373 aa, unidentified
MFHFTTLFIGMDVHKESFSLCYYDMMTNQFKHSTKVGPNVSYIVNYVNELRRLYGQDAEVLCGYEAGCLGFTLYHQLQAHGIPCIVMAPTTVMKEGSKRVKTDKKDAAQLAKALAFRSYRPVHIPTVEDEQVKEYIRMRTDHKVALKKIKQQIFAFCLRHDFRYTEGSSNWTQKHVRWLHSLNPKGLYAEILTEYLLTYEKLVDQIERYDARIVQLAQSDSYQEKVSQLSCFIGVKTLTALSIVTEIGDFNRFATAQHFASYLGLTPSENSSGDKERRGAITKAGNSYVRRLLIEAAQSLAKGTIGYKSKELKRRQSGNRVEVIAYADKANERLRRCYRTLVLGKNKKQNVAKTAIARELSGFIWGMMTGRIA

SEQ ID NO: 158749 - protein, 372 aa, unidentified
MNYNTVYVGMDVHKESFTLCSCKYEDEKASHYQRTPASYKNVLRYLAFLRTIYGEDTRFVCGYEAGCLGYSLYHQLENFNVECVILAPTTMLEQRSKRRIKTDKRDAEIIARSLAQHNYSPVHIPTETDNQTKEFIRMRDDHKAELKKIKQQILSFCLRQGYQYDGSGNWTAKHVKWLRSLKTEGLYKEILDEYLLTYTILTDKLNRLDQRIEELASKEEYKESVSKLTCFLGIKTHTALSVIVEVGDFQRFVSARKFAGYLGLVPGQHSSGDDRNGLGITKAGNTHVRRLLVESAQSYTRGKIGYKSRVLRSRQAGNSPQVINYADRANERLRRRYYKMVLKDGKKYNIAKTAIARELACFIWGMMTDNIY

SEQ ID NO: 158750 - protein, 344 aa, unidentified
MVTIGIDTHKATLAVSAIDEAGREHAAETFPNDREGHARLLHWARIHGPERRFGIEGSGSYGAALARRLVASGEQVVEVPAVLTDRERRHLRRAGKSDPGDALAIARVALRERSLGPAPMPGITEDLKLLVDAREHCLAERTRVANQLHAHLVVLTPGYKDEIKNLSAARYLAAVTRLLRRVGSVRAELARAELVRLRALDVESDALEGRIRALVQLSGSSLPTIRGVAALTAAKLLGETGDPRRIRSAPAFALMSGTAPIPASSGQTSRHRLNRGGNRQLNRALYTIALTQARTDPRAKTYMARRIAEGKSWLDALRCLKRHLADVVWRTMLADAQRHAEFGA

SEQ ID NO: 158751 - protein, 350 aa, unidentified
MLIIGCDFHSRFQQIAMLDGETGEVIERRLEHATGEARAFYGGLPGPARVGMEATGYAQWFEALLAEQGHELWVGDAAEIHAARVRKQKTDSRDACHLLDLLLQNRFPRIWVPSLQERDVRQLLRHRHKLVCSRTSVKNQLHALAMGQGVCRKQKLWTAAGRQELERLALGPWASRRRRELIEMLGRFDASIQELDQAVVQEAGSRPAAVRLMEHSGIGPVTALAWVLTIGPIERFEKSRQLVSYLGLNPRESSSGGKQRLGSISKQGNSMLRSLLVEAAQTASQFDPELRRHYVRLKFRRGSAVAKVAIARRLVVRLYWRLREQVSAAPPARTQGSPGNFLMGLSPSTK

SEQ ID NO: 158752 - protein, 439 aa, unidentified
MNSILYVGLDVHTSNYTICTYEPEYDRISREVQVKPDYKLIKKYIDNLRKEMGKNREVICGYEAGCLGYSLYRQLTAVGINCVILAPTTMERPVCYPIKNDKRDAKGVARCLATHGYSAVYVPTPEDESVKEYIRMRDDHMEALKRTKQQLIALCTRHGKLFTEGKSYWTQKHLTWLRALDFGNRQMNETLSEYLATYYWLDEKVKRLDSRIEEIAVQTEYAQRVKKLKCFLGIRTHTALSLLVEIGDFKRFPNAKSLSAYLGLTQGERSSSERRRTLGITKAGNKHLRRLLTEAAQSYHHGAVGYKSKGLLERQKGNPPEVITYADKANERLRRKYYRMICPDEQQIYELDANLNLQVRERGGLHDIRLLSEGYQDLVSLCRRMSMIEAMYKQEKPFLILDDPFVNLDDKKLQGAKEFLSQISTKYQVIYFTCQQSRA

SEQ ID NO: 158753 - protein, 360 aa, unidentified
MRIIGCDLHARQQTLAMLDTETGEVVNLTLMHEGNQVREFYSQLLRPVLVGIEATGSMQWFLNLMEELGIECRVGHPATIRAAAPRRQKNDRLDADLILRLLAEDRFPAIWLPSKELLDLRALLLHRHQWVRIRTRIQNALQAIALANGLRRGPSLWSYDGQAQIAFLPLPPHASYRRSALQAMYKKMEEEIKPLTQQVAEQASQRSDAQLLMTHPGVGPVTALATEVFLGDPERFADGKALSSYVGLIPGERSSGRRQRLGKITKQGSPLLRFLWNEAGVHAVRHDPELKRFYRRKLVQKGLGKARVAVARKLGIRLWIMLRDKIDYQEFCRRGQKQQSGAACAGMPETGMVRSHRAVD

SEQ ID NO: 158754 - protein, 357 aa, unidentified
MRLYTKQHQFYCGIDLHARTMDLCILSQDGEVRLHRNMQARPDALLKAIAPYRHDLVIDVECIFTWYWLADLCAQEGLPFVLGHALYMKAIHGGKAKNDKIDSQKIAVLLRGGMLPQAYVYPAAMRATRDLLRRRMHLMRKRAELLAHIQNTNSQYNLPEIGKKLAYKGNRDGVAERFLDPAVQKSVEVDLALIDHYDRLLRDVELTIVQTAKQHNAQALYRLQSVPGIGKILSLVLLYEIHEITRFPRVQDFVSYCRLVKCAKESAGKRYGTSGKKIGNAYLKWAFSEAAVLFLRNNPQGQKFLARLEKKHGKGKALTILAHKLARAVYYMLTRDTVFEMDRFLNGYGSRVGEPAA

SEQ ID NO: 158755 - protein, 452 aa, unidentified
MKKKRIYGAVDVEKFDVGSVLSLLTVGCIVAVDVAKTKFVAALATAAGEVVRLLRFEHPRQTGAFLRLLVALREAKLEPHVVMEPTGTYGDALRYQCHRLELPVHMMSPKHTHDFAEVLDGVPSMHDPKAAVALARLQAVKPAKRWEPEAGSIRDLRAVLDLRGPAARTQALYYGLLEGMSARHWPELGTLIDVRTQHSWKALLKQLPGPRLVAMSREEASKTLRQASRGRLGHELIAAVVESASKTLGVPMTQGEEAKLRTVVEQIDHQTQRLDALDSELSELVHADPVMTRLANVVGPACAAALFGYIGSPLEFSRAAALEKAMGLNLKERSSGEKKGRLSITKRGPGEVRQLLYLAALRLIQSDPIVAAWYRGRRAFQRENKVAAVVAVMRKLSRALWYVARGDAFDATKLFDTRRLDLTKAPAVKDVSMGPSSPIERRNEGGVPQSMQ

SEQ ID NO: 158756 - protein, 398 aa, unidentified
MAELVARLSQKLEPRSAGARAGEGRQQDLPGPNRDRLTVGVDLGDKWSNFCIVGLDGEKLTEGELRTTQEDFAELFQSLAAARVVMEVGTHSAWARDVVAGCGHEVLVANPRQMEGPKRRKRKNDRIDAHKLARIGRMDPQSLFPVEHRSVEVRQDLVAVRARDALVAARTQLINATRGLVKSMGGRLPKCSSPSFPHKVKEALPAEVREVLLPLVRLVETLSDSIAAYDEKMEKLGSEKYPQTKLLRQVKGVGPITALAYVLTLENPERFAQSRDVGPYLGLVPKQEDSGDNQPQLRITKMGDMMLRRLLVGSAHYILGPFGPDTDLRRYGIRLSERGAKNAKKRAVVAVARKLAVLLHSLWVSGEVYEPLRHALPKATEEEAVRHAPAEATEKEAA

SEQ ID NO: 158757 - protein, 420 aa, unidentified
MYESFEFKTHQVFDTFEVALISQSQIIVRKDLIFMKLVGIDIAKYEHAAYIMDAATGESLCDPFFFKNNKNGFQKLYIELNKYAKDELFIGMEDTGHYNFDIETNLLAKGYKVALINPITTKNLRKAALKSVKTDKEDAILITNALLDKDYYRIISIQDEKLKEAKELTRYRTQLTIEMNRKKNVLQRHIDIVFPEFNTLFHDEYTITYLNILRKYGDAYTIAHTDIRSLRKCFKYCNSFTAEELKKLASNSVGIHDVSISFIIQSVISSIDLINSQIEELDKKIEELAITQDSSITSIPGISIITGTSILAELGDISKYSNAGKLIKFAGVNPYISESGEFSADKTVITKKGSKYLRTTLYRVIIPVIRHNPVFNNYYHLKRSQGKKHLCALGHCVRKLLRIIYHLETNHLSFDINSLK

SEQ ID NO: 158758 - protein, 417 aa, unidentified
MKPWKELTHFAALDWADDHHDLVVVDAGGQSVLELTFEHSAEGWQQAEQALTQWPGLPVAVETSAGPAVDQLLQRGFTVYPVMPKAAARYRERKRPTGSKDDLHDAWSLADALRTDGHAWCALSPLDPLTAELRALCRDEISLIEQRTALVNQLQAALKEYYPAALEAFDDWTKPASWAFVLVFPTPAALVAAGKRKWEKFLHTHKLWRAQRAAERLEVFARANQFSGGAAITAAKSMLAQSLARLLQTLEQQLIAYRARIQALFEQHPDHELFGSLPGAGAKLAPRLLVELAGVNWSLLSLVQARAGTAPVTYQSGKIKRVKIRRACIHWLRATLHLWADLSRHSSAWAAAFYHAHRDKGQSHACALRCLAHRWLEIIGAMIRNRTTYDAEKHLAQIQKHGSYVLRLITSPDPKSL

SEQ ID NO: 158759 - protein, 331 aa, unidentified
MNYSHFVGLDVGKKTFDASLMSADEKELSHKSFDNTPTGIQSLLDWIAGYHLSLSKLLFCAENMGSYVTELSVSSVSMGFSLALVCPLTIKKSIGLQRGKNDRIDAKRIANYAVLHYRKLELYKLPDKDLVRLQGWIIIRDNLVKQKVSSIKLLETFSWMAKLADVTESISFLEEQLKSIKERILEVEEDMEQLIAASTSLYTNYLLLRSIKGIGIINAIVLLYVTDNFQRFDNPRKFACYCGVAPFEHTSGISIWGKTQTSSLANKEVKVYLTRAAITAISWDPQMKAYYKRKIAEGKHKASVINAVRAKIIARSFAVIRRQTPFVTLAV

SEQ ID NO: 158760 - protein, 340 aa, unidentified
MDEYDGRQYVGIDLHRRRSVIVRMTPGGERLGDAVRIENSPFELAGQVASWGEGPEVVLEATYGWYWAADVLAEAGANVHLAHPLGVKGFAYRRVKNDERDASDLADLLRMGRLPEAWVAPPRVRGLREEVRHRCKLVALRSGLKAQVHAVLAKQGVQVPVSDLFGVGGQRLLEELALDPPFQARVASLRRLIDAFTFEIDILAKRTGAQLAGHPGFRAIQAIPGVGPVLAAVFVVEIGDVTRFARPQQLCSWAGMTPKHRESDTTVHRGRITKQGSPLVRWAAIEAVQRPNGGPIGRTRARLTERRGTNIAKVAAARKLLTLVFYGLRDGHIRCLARPA

SEQ ID NO: 158761 - protein, 353 aa, unidentified
MIVLGADTHKRSHTIAGVGATTGELLGERTVQVGRAGFGALLAWARALGGERVWALEDCRHVSGSLERFLIERGERVLRIPTNLMAETRKSARQRGKSDAIDAVNVARAALREGLATFPAAHLDGPELDLRLLVDHRERLVIHRVELNNTLQWHLHDLWPELELPGGALFSKKWSTRIARRLSRAEQTMRVRIARDELRRLRELTETVKALAREITQLIEQIAPRLLAEPGFGPLIAAKLVGEIAGAQRFATDAKLARAAGAAPIPASSGNTRRQRLDRGGNRQINAALHRVIVTRARCHQPTRDYIERRRREGKTTRDAIRCLKRYLARQVWNLLRASPPEHDLDHTINFLT

SEQ ID NO: 158762 - protein, 369 aa, unidentified
MLPPQQQVMLMRGTKDKEHAMAEALRIAFVGIDIGKNSFHVVGLDGRGAIVLRQKWSRGQVEARFANIPPCLIGMEACVGAHHLSRRLQRLGHDARLMPARYVRPYSKGQKNDFRDAEAIAEAVQRPTMKFVATKTADQLDLQGLHRVRERLVSQRTGIINQIRAFLLERGVAVRQGLRFLRAELPDILAAPSDALSPRMVRIIEDLAGDWRRLDERVERLSKEIEAIARRDAGCERLISVPGIGPIISSAVVAAIGAGDVFSKGRDFAAWLGLVPRQISTGDRTILGKISKRGNRYLRVLFVQAAWVVLIKPQSWERHGLKSWIEAARKRLHHNALAIALANKLARIAWSVLAHGRSFEASKLAAAST

SEQ ID NO: 158763 - protein, 333 aa, unidentified
MIQLKEGIEMNKPVLGIDISKLKFNICLINSNQKPRHKVFPNTLSGFEQLITWLSAQNAGDAQTCLEATGTYGEALVLFLLQAGYCVSVVNPAAVKAFAGAGLSRTKTDKVDADLIARFCLSQEPEVWKPPAPEIRELQALVRRLESLIEMRVSEENRLSSGIVVEVVRRSLEEHIAYLIEQTKHTERMIREHIDNHPDLKRQSELLDSIPGVGQTTAALFLAEIVDIRQYKSARQVAAFAGLVPRERRSGTSVRGKVRLSKIGNARLRKALYFPAITALRCSEFFKQWASGMRERGKCKMSVIGAAMRKLIHLAFGVLKTGKPFDPNWAKTA

SEQ ID NO: 158764 - protein, 383 aa, unidentified
MSATTRFTDPTLPEPPALYLALELSNRSWKLAFSIGHGQKPRFRNVPARDLDALTREIALARARFGLADSVPSISCFEAGRDGFWIHRFLESQPGRHNLVVDSASIEVNRRRRRLKTDRIDALKLLSMLIRYHNGESRVWSVVHVPSPEAEDARHLHRELLTLKSDRTRITNRIKGLLAAQGLSVSSLGPGFLDLLDDLRLWDDTALRAELRQRLEREWTHRCDVSRRIRLIEKLQTQRLEVASHDPALELVRQLMTLKGIGLQSAWLFTFEFFAWRNFQNRREISALAGFTPTPYQSGDDSFDQGISKAGSSSMRAMTIQIAWGWLQFQPDSALTLWYQTRFASGGQRMRKIGIVALARRLLIELWRFSQTGALPQGAITSS

SEQ ID NO: 158765 - protein, 410 aa, unidentified
MNNPLFVGIDVSKKDNHVQFLNAIGEKLNRFKVDNNQTGVSILVDNIKKVFSNTDANSVIIGLESTSIYGDHLAASLRQDEFLSHIDGSVHVLNAKQVAKFKESYADLQKNDTVDAFVIADYLRFGRISNEVHMDEKYITLRNLTRARFQAAQNLTREKTRFVETLFYKFSDLQSSEVFSDTFGATSLAVITEFFSVDDIAYMDLQELADFINNKGKGKFTDSTAIAKELQAVARSSYRLSKTVNESVNQLLAIRLIGIKAIQNQIKELDKAIENYMQLFPNTLISVKGIGSVYCAGIIAEIGDIKRFSSQAARAKFSGLAWTEYQSGGFKAANTRMINSGNKYLKYYLLEATNKVRMHDAEFNRFYQFKFKEVPNHQHKRALALTARKLVRLVYCLLSTNRLYTPPTQM

SEQ ID NO: 158766 - protein, 360 aa, unidentified
MDRHKYVALDVDSANIVAGVYDRQGVALMQCCLRNNGQVISEFFKTMTGTVHVTFEEGTQAVWLYGLIRPLVAEVIVCNPRENKLLKAGNKSDRIDVAKLGKLLRLGELRPVYQGPSAAQGLKQLVHGYAALVDDTTRVKNRLKALYRGRGLSCKGGLIYRPQPRQQWLSQLETKEMQTRAASLYEELDCVLRLRAEAEKVMCQAARRHAAYKWISSTPGLGAIRTAQILATAITPHRFRGKRQFWPYCGLAVVTRSSSDYEWVDGGARRKRKPIQTRGLNQNYNRTMKAAFKGAAVSALQQHPEFREYYQRLCAKGMRPEMARLTVARKLAAIVLILWKKGELYDSERLNQAAPGAGQQ

SEQ ID NO: 158767 - protein, 353 aa, unidentified
MTNGSSLNETMGLDLSDKTGVYVVLDHEGEVCREGKVALTRQALSRAFGGGSPCLVAIEVGTHSPWVSRELALLGHEVVIGNPRQVKLISQNKKKSDREDALLLARLARLDRRLLRPVQHRGEQAQADLAMLRARSLLVAGRTSLINSVRGMVKTTGLRLPRCSAESFAARAQPHLPRELVPALEPLLAEIASLTARIKQITHAIEHAAAERYPETQQLRQVPGVGLICSLTYVLTLEEPQRFRRSRAAGAYLGLVPRQRQSGEQQPQMHITKAGDVALRSVLVQSAQYILGRYGPDSDLRRWGLKLAGEGNKARRKKAVIAVTRKLAVLLHHLWSTGQVYEPLRQADLQTVG

SEQ ID NO: 158768 - protein, 486 aa, unidentified
MAKRKKSTFERLSSGGMNRKQRRDLARRLAGLDPGLTIIHSNAGGIDVGNESHFVAVPPDRDANSVQEFGCWTTDLKRMAAWLKACRIDTVAMQATGVYSIPLYDILTGYGIQVVLVNAQHTKNVPGRKSDVQECQWLMKLHTYGLLRDSFQLEERMESVRTIWRLRDRHVKDASRAVQHMQKALTKMNIQLANVITDITGVSGQAIITAILKGERDPWKLADLKHEMVRASREEVARSLEGNWRDDLLFELRQAVESYHFAHLQMRECDRQLEEFLASLPTRILERPPQPSDATAATAPQTKKARKPKKTRRNEPTVDLATELKRIGGVDLTSIDGIDVITAQTIVSEIGTDMSGFKTEDHFASWLGLTPNKDISGGKIIGPGKRKVQNRVAMALRMAATTLLRSQTYLGARYRHLRKRLPSHASAVKAMARYLAVLVYRILTHGQAWVDRGAARFEQRRTELEMASLNSRALAKGFKLVPITAS

SEQ ID NO: 158769 - protein, 356 aa, unidentified
MATYSLSTLQTFISIHQTDPFWIGVDVHKRSYHIALLRADNKTITFTSTASPEAFVEQLRRLNIPIAGVAYEAGPTGFSLARALLAENIPVTVAAPSKIPRSVSAGSKTDRLDCLKLAHYAGKGLIRPIAIPTAEEEAQRALLRRRHQLVDRVRQSKQRIKGFLLYHGFKETDAIRNWRSDCEEQIAGLPLLPEGRLTMESHLRELRFLQQELSKVADQLECLNRQPEHHTVIKSLTSVPGVGKVVATSFHLELFRPERFQRGEEVASYLGLAPTVSHSGEKTPRGYLVPCGQKRLRSLLVEAAWVWRAKDAKAGEIYNKLLSKTGIPQKAITALARRLAIILWRLSIEQRTYRPA

SEQ ID NO: 158770 - protein, 334 aa, unidentified
MDTNLYVGCDISKATIDVCVHQKNHSHRKKQFPNSAPGHAQLLEWITQSNAHVRVVIEATGNYSIDFALTLDAYSDLELMVANPSATRQFARAQMRRSKTDRVDADMLADFAKRMTFVPWKPPKDEVLQLRGIARRMQALTVERTRERARLHQAHSTQTTPVVVINDIGVNIRHLERRLDEMLRQALRVIAQHEHMRQAFALLTSIRGIAAKSAVLILPEILILPESMSIRQWVAHAGLDPRKYSSGDSVEKRERISKMGNVKLRRALYMPALVAIKWEPNITAFYEHLIAQGKKPLVAVVAVMRKLLHAIYGMFKHGEAFRGNMFYQMPAANA

SEQ ID NO: 158771 - protein, 463 aa, unidentified
MSRKNGIRKNRSRPIRAAASLPALNPHVAGIDVGATQMFVCVPPDSCAEPIWIFDTFTEDLYQLADRLKDCGVLSVAMESTGVYWIPLYQILEDRGIAVTLVNPGYRRSYTLKTDVEDCQKLQYLHSVGLLTGSFRPAQQVCAVRSIMRHRTNKVEEAASHVQRMQKSLDQMNLRLHNVITDITGMTGLSIIDDILSGEQNSDILALHRDGRVKATAAEIAKSLVGDYRPEHLFTLAQALESYRFCHAQIAKCDAQIETMLAQFDSQIDAAQSDDPSLPPTSHPKHASHSKNDIKLTNTSLTAELRRIFGVDITVVPGLGASSVCALLTEIGPNLSKFASAGHFVSWMALCPQNQVSGGKVLSKGTRKVKSRVAAIFRLAAQTLWRNQSYLGETYRRLKYRLSPAQVNTALAHKLARIFYHMVTTKEAYNEAVFEIETERIKQKKLNRLYKDAAHFGLTITPA

SEQ ID NO: 158772 - protein, 345 aa, unidentified
MPIVGGLDIHRKQITFDYLNTVTGEVRRGQIAPADRAHLAGWLAGRFTGQDAHFAVEGCTGWRYVAEELAAAGITVHVAEPADTAALRGRKRHAKTDRTDSRHLRQLLADGRLPECWVPPWHVLECRALLELYHDLRVEHTAWVQRIHAALFHQGAPQLGEQRLRTGEGLAALQAIAAAQLSPAGQLQVAVALDKLAALDRHLDVLRRRLLTAARQLAGAKELHARLYGVGPITALALVCWLGGAGRFSSARKAVRFAGLDITVWSSDRKGPPGRLSRQGPEVLRWCVYEAGKTHARGSAPDYRYYAAVKDRIDGKRAAISEARKIIRQAVHILAELGDGALAAA

SEQ ID NO: 158773 - protein, 498 aa, unidentified
MANGKKSTFERLTNGRLNRKQRREWMRKLSAEDPGLEIVNRNVAGIDVGNESHFVAVPVGRDAQPVQEFGSWTADLERMADWLKACGIETVVMQSTGVYWIPLFDVLEARDFKICLANARHTKNLPGRKSDVQESQWLQKLHTYGLLRNSFRPPDEIRALRSLWRLRDRHVKEAARTVQHMQKSMVTMNIQLSNAISDISGVTGQAIIRAILAGERNAEKLAKLRDKRIKATPAEVERSLEGNWREDMLFELKQAVDTYDFIQKQMAECDQRLQKLMAELPAREVEAAGVAAEAAGVAAEAAGEPAGKNGKPARKNKKKSRGSKKNVPRFDLHTELERVCGVDLTSIDGIDIMTAQTVVAELGTDFSRWKEETHFASWLGLSPCRDISGGKVLKQGSLKVKNRVAAALRTAASTLLFSDSYLGARFRSLRTRRGAPKAIKAMARYLACLIHRMFTRGQAWVDRGAREFENKRTQRELAALQYKAAAHGFKLVSLQASA

SEQ ID NO: 158774 - protein, 342 aa, unidentified
MYVGLDVHKDFCQACFLDEEGIVVKETSFSTNKNGLEDLVEATRNSKVVMEASGSSLHIYDALSETCTVTVAHPSKVKVIASARIKTDKIDARILAQLLRADMIPKSFIPVKKHRQARLLVRHRASLVRARTRIKNQIHALLTKEGVKVPFKEAFGRKGILFLHDVELGEMQRISMNSLLSLLESFNEQIRGFEKRIRDMASQDAYAKRLVEMKGVGHLTALAVSSEVCDVSRFPSYKHFCSFLGLVPSIHQSGNVERRGHITKQGNNLIRWLLIQDARVAVKHSERFKRKYHRLLAKGVDENKAIVAIARNMAVIMYLMLVRNEPYRDESKGGKPVTSLGR

SEQ ID NO: 158775 - protein, 388 aa, unidentified
MFAGIDIASERHVLARLDDAGAAIGKPITITEDRAGYDALLAALAPPPVLIVMEATGHYWKNLFAVLTAAGHEVALLNPLIARRFQEASLERTKTDAIDAAGLARLAFEKRPAPTHLHDEVAEALRELVRHRDRLRQDFDDRVRQLHRLVDLGFPEFTRYVRGLGSMLATCLLAEYPTAHAFARATPRRIAKLRYDGRHFVGPELAQSLVEAARRSVGQHHGPAYKLQARHICQDLDTWRKRLAEIEHDIEDLLDTHVPGKLITSIDGIGPQTAARIIAAAGDPAHFKTAGAFAAFVGVVPGLRQSGKQTSTRAGIGPLGNARLRRALWMPVLSAIKRNAWLRAFYLRLRAAGKPAKLALIAAMRKLLHAVYSVAKHQGNRVKLSPRE

SEQ ID NO: 158776 - protein, 411 aa, unidentified
MRRVIGMDLHRTFAEVVVWEDGRLRHAGRVDMTRSGLEGFARTLQASDEVVIEATGNAMAVSHLLRPHVARVVIANPLQVKAIAHAHVKADKIDAGVLANLYAAGYLPEVWTPDAATERLRRLVARRNQVVRHRTRLKNETHAILHAHLVPPCPHADLFSRVGRAWLERQALPDDEHAAVRRHLRELDTLGEDLAVLDRAIGEATVGSPVVRRLLTVTGINVTVAAGLAAAIGDVRRFSSPQKLVSYFGLNPRVRQSGLGLAQHGRISKAGRSQARAMLVEAAWAAAKAPGPLHAFFVRVRARRGHQIAAVATARKLAVLCWHLLTKEADYLWARPALVATKVRGLELQAGQPQKKGNQRGPAYAYNVKALREQEMEIARRAETAYERVVAHWTPRPPKAVHGRLKPARLE

SEQ ID NO: 158777 - protein, 401 aa, unidentified
MKRLSGGIDVGSESHHILILDDEDNVLYNQKVFHKLNEFTESIKQFKKIEKKEKGEISFALEGKNGYSAPFDQLLINQGFTLYNVDNLKLKRFREAFAGEWRDDERDSLMLSKMLKLKDYINSEREKVFIKIEKPSLVTESLKLLSRHQQTLINEKIRLVNRLGKKLLEVCPQILELGKLKNKKIIAILAKYPDFSKYKRITLKSLLKIKGIGKIQAPFLLKRLNNIAYMPGLTGIYKTIILSYAKRILELQKEISDIDKKLDEIGEKSKEVNHLKTIPGVATKLASRFIGEIGNIDRFPSEKQLAVYCGVACVDNNSGKVTKARAVYKANKICKKTLITMAGCSIRFSLQCKAYYLKKRTEGKSHNHTLRCLARQLIKVIYRMLTEDREYIVRKELKKVA

SEQ ID NO: 158778 - protein, 409 aa, unidentified
MNPLYVGIDVSSRNNVVFLMKPDGTKIKNFSVPNSKDGSHKLVKEILSALTSFALTDVIIGLEATSVYGDNLVCFLREDGSLAPYNRKIHVLNPKQVNKFKESYNDLPKNDFVDSFVIADCLRFGRINKEVYLDDYRYKALQNLTRARFVAVQNLTREKQRFMNVLFKKYSSLAQEKVFSDTFSATALAVYEEFDSADTLAYMDLHELTAFLQEKGKNHFSNPEEVAKAIQKAARSSYRLPKTVNDSVNQVLSISITSIKALEAQIREFDKAIAAQMELIPNTLTSIKGIGPVYSAGIIAEIGDINRFPNQAKLAKYAGLAWKQHQSGDFEAQNTRLIRTGNRFLKYYLGEAAMSLVRCDAEYSRFYHLKYKEVNKYQHKRALALTARKLVRLVYRLLKDNRMYIAPKA

SEQ ID NO: 158779 - protein, 467 aa, unidentified
MSKAKKGASKKPGKKNKNKKKDVLEGLPPLNLNAAGIDVGNAEHTVAVPPGRDPQPVRTFGSFTADLHRMGQWLVTCGVDTVVMQATGVYWVGLYQILEMYGLEVKVVNARYTKTLPGRKTDVQECQWLQKLHTFGLLNNSFLPNEETRVLRTYLRQRENLVAAAGTCMQHIQKALTEMNVQLANVISDLSGVTGMAILRAMVGGERNPQRLAELKNERIQASRQEIARSLEGNWREELLFVVEQSLQMYDTYHQKIVACDGRIEAHLKSMDAKVDVVAQPIPEPRRVKWPRKHQPQYDLRGELYRVTGVDMKQTDGLDVGTVQTVISEVGVDMTPWKTEHHFSSWLGLSPDNRISGGKVLKRGTRKVVNRAATALRLAAWSLLRSQSALGANFRRLRARLGAPKAITAMAHKLARLIYRMLKYGKEYVDKGMAYYEEKYRQQQLKWLTKQAAALNLQLVPATGVVR

SEQ ID NO: 158780 - protein, 313 aa, unidentified
MAAAGRFIGIDVAKRQLDVAEQPSGERWAAANDGPGIAAVVERLGTGEAVALIVLEATGGYELPLAAALTAAHLPVVVVNARQVRDFARAVGKLAKTDALDAAVLAHFGEAVRPEVRAVPDELTQTLQSWLARRRQLLEMLLAEEQRRAIAVPTLCPQLQQHIEWLRQQLRALDGELQKLIRQSPVWREQENLLRSVPGVGPVLATTLLADLPELGRLNRQQIAALVGVAPLNRDSGQQRGSRHIWGGRAPVRTALYMATISAVRCNGVIRAFFERLCGAGKPKKVALTACMRKLLTILNAMVHHRTEWAPAA

SEQ ID NO: 158781 - protein, 351 aa, unidentified
MTMVGGLDVHRKQITFDYVDDDGLVRWGQIRPATRKTLRGWLAEHCTEGDAEFALEGCTGWRYVSEELAAAGVGVHLGDPAETAAARGRKKRAKTDRADARLLRTLLVEGRFPESWIPPAHVVEMRTLGRLYCALMDERRAWQQRIHAQLFHQGCPPITALLSAAGRDGLAAAELSAAGRQYVDTALRRIDELSTEIYPLRAQLINFAQHQAGCRALQARHYGIGWLCAVIIWAEIGDARRFHSSDQLVRFAGLDVTVYSSDSKRSPGHLSRQGSPGLRWAAFEAAKCAARRGSPDRAYYHRLAASNGGHNGKNPTLAVERKILRRCYHTLRELGDAALAMPAPERQEVAA

SEQ ID NO: 158782 - protein, 422 aa, unidentified
MMHEERRWFVGIDWASQEHVVSLCDGQGKKIGQRKFAHGGTGLSDMIAWLLKASGGEPREIHVAIETPHGPIVEALLERDFNVYSINPKQLDRFRDRFTVAGAKDDSLDADVLADSLRTDTRLFRKLSVAEPLVVELREWSRIDAELKVERVRLTNRLRDQLWRYYPQMLELGDLDKDWMLDLWQAAPTPEKAARVFKTAIERVLKKHRIRRFDATQVLSELRKPALSVAQGTVEAATAHIRVAAERLRLVNRQLTDAELQLDRLCKKLAEPVAGDDEENVSGQRQEHRDVTILDSLPGVGRTVLATMLAEAPDALQRRDYHALRTLCGSAPVTRRSGKSCIVMRRRACNRRLSNAAFNWARVAVQHDPISKAKYEALRARGHGHPRALRSVVDRLIYVACAMLENGTLFDPSFAEKKNAAA

SEQ ID NO: 158783 - protein, 323 aa, unidentified
MEESSVYAGIDVSKDQLDVAVTGEADGWSAANTESGIRGLVDRLVERAPTLIVLEATGGFEVPAAAGLAAAGLPVTIVNPRQVRDFAKATGQLAKTDEIDARVLALFAERVRPSIRPLPDEAARALDAVVARRRQVLDMLTAEKNRLGFAIAPVQGDIRKHIKWLERQLAKVDQDLDTMIRKSPVWSAKSNLLRDVPGVGPNLARTLIAELPELGRLNHKEIAALVGVAPLARDSGTQRGRRMIWGGRAPVRSALYMSIWSASKWNPVIRVFYRRLRDAGKPPKVAQTACMRKLLTILNAMVRDGREWDPSIPLDQLRLQHSC

SEQ ID NO: 158784 - protein, 405 aa, unidentified
MGSTQLYVGIDVHKRVQVSTILSLPVLKNKNNEWKKVKPILIKNNIKDYESLHKAIHRQAKDASSVSIAVDRTGSYSLPIVHFLVSKEYKVYFLTNQSVKAAKERLLKEENKTDKLDSAILAYLIYLRDYHGLSLNISATQPDLESHASLLRSLVLQRAQYVRLEVQATNRLHQYLLVVFPEGEMNYFSQLLRIAPYYPTPRDILCNGLNGIEKITEKDRKSIIALAQDTIGVPGEPYHWIISDLCEQRLDAHQKVLLISRQIKKEVDAHPYGTILRSFPYVGDVIAATLIGIVKDISYWPNDKTLKKVLGVYGREYISGASPPVRRPGKSGNRAGKVALFQACIGCIKKTSTNNDFKDYYERQMNHNKIWIQAMANTAGKMAEIMYHCLKTDAKYQYQGKYKVH

SEQ ID NO: 158785 - protein, 409 aa, unidentified
MEAIVACCAGLDVHQASVVACLNRGGGKRGGGKEIRSFGTTRGELAEMCAWLRAGGCTLVAMESTDIYWHPVYFALEGQFALIVGNAQHIKKVPGRKTDVKDCEWISDLARHGLIAKSFVPPKPIRELRELTRYRRKLAQVQAGERNRLIKLLESAAIKLAGLIADVFGVSGRAILHALIEGEETPDEMAQHARGRMRRKIKALAQALDGRLEEHHRFLMRLQFARIEAAELDLERLDQRLQEKLAPYAEPLHQLMRIPGVDWIIAATIIAEIGVDMSAFVSAAHLASWSGICPGNHQSGGKQRSGKIRKGNVHLKTALVTAAIAAAKTRNCYLAEKSRRLHTRRREMRAHVAIAHKILIAAYHVLAGNEYQELGADYLDGLNKKRTVNQLTRRLQAMGYDVQITPKAA

SEQ ID NO: 158786 - protein, 369 aa, unidentified
MGQCIIYVGLDVHKDTIAVAVAEAGLRGEVREHGKIANTPAALKALAERVARRGRELRFCYEAGPCGYGIQRQLSAVGHECAVVAPSLIPRKPGERIKTDRRDAINLAKLHRAGDLTPVWVPDQAHEAIRDLVRARQAAVRSLRQSRQQLSGFLLRHGHHYHRPAWTLLHRRWVASLKFDQAVHHIVLEDCIAAIEAATARRDRLEADIEAALPEWSLAPVVQALQALRGIGLVAAATLMAELGDITRFTNPRQLMAYLGLVPSEHSSGRTRRQGGITKAGNGAARRMLIEAAWSYRFPARISREQLLRQERLAKPIRDIAWKAQERLCRRYRALARAGKLPTVITAAIARELVGFIWAIAKQIPSAAS

SEQ ID NO: 158787 - protein, 429 aa, unidentified
MLCRVGYLEELLRVLFIGDDWAEDHHDVEIEDEDGRRLVRARLPEGLEGITRLHALIAEHAPTSWAELPPEQVAAQAVVGIETDRGPWVTALRAAGYQVFAINPLSAARYRQRHSTSGAKSDTADAHLLAEIVRLDRDHHRPIAGDSDLADAVKLLARAHQTAVWERTRQVLRLRSTLREYFPAAVEAFEDLAAVDALALLTRAPDPARAAKLTRGQLVAALRAARRHHVEAKADALLVVLRAPALRQPSTLQGAYASVVAGQLGVISALNAQIAQLGQVVGEHFGRHPAADIYLSQPGLGVVLAARTLGEFGDDTDRFATARARKNYSGQSPITRASGKKSIVLARYATNRRLGDALHMQAYAALGSSRGARAYYDALRARNIGHHAALRQLANRLVGILHGCLKTGTRYDENTAWAHHRSNTETAAA

SEQ ID NO: 158788 - protein, 413 aa, unidentified
MEVLIDRCAGLDVHKKTVVACVRTPGTGRQKRVIEVRTFGTFEHQLVELREWLIECGVTSVAMEATGVYWKPVWHVLDDGQRFELLLVNPAHIKNVPGRKTDVNDATWIGQLLECGLLRGSFVPPAEIRELREVTRYRRQLTEERARETQRLQKVLEDANVKLSSVVSQVLGVSGRMILDALCAGERDPDVLAEMAQRKLRAKIGDLRQCVPGRFNEHHAVMVGEIVAHVDYLNAAIVRLDERVEAMMIPFRAARELLTTIPGIQQRSAEIILAEIGVDMTRFATAAHLASWAGVCPGNNESAGKHRSTHTRHGDLWLQSALVEAAWAAIRTKNSYLAVRFWRIAKRRGQQRAAMAIAHTLLIIIWHMLKDGTIYTEIGVDYLIRNDNPDRRRRHLINQLEHLGYQVELTPAA

SEQ ID NO: 158789 - protein, 459 aa, unidentified
MNRTIGIDLGVTSMSRIAVAEGATIMSNSRVRSTPAALTNAIRAAFNGEPLAVVVESTAMAWFIAAVAAKRAQVPHTLYRVAGHKAAALRSFYRLHTKTDRIDAPVLARMPLVDDSLHAFELPTASELALKRLITFRQKLVQEATRVKGRIRSLLHWSAPGLVTGPNLSDGSVRILRRWPDLRKLATAHLTTIAREGGIGLKQAQELRNRAREAINFYAGYVDHEILALEIEVLTAHLASLDTQRQRLDERIESEYEQAYPHDVIRSIPGVGPTVGSIVRAVVGDASHFRNAAAFRAYTGLVPRESSSGDSEKRGAITKTGPNLLRWALYLAADVARKHDPHLAALYRRLMVERGRHHNQALCAVATHLADRIYALLRENRPYQPRDLEGKPITVAEAKAIAASLAVDAQTRQRLRNQKRGPRPPRPRQPKAPHDATQPSPESVADAALAYAPDRLTKT

SEQ ID NO: 158790 - protein, 411 aa, unidentified
MRLFVGDDWAEDHHDVELMDERGRVLARGRLPEGVAGMARLHELIGEQLGEDADDAEVIIGTETDRGPWVSALVAAGYVVYGVNPLQASRYRERHGVSGAKSDRGDAHMLTDMVRTDSHQLRAVAGDSPGAAAVKVVARTHKTLIWERTRQVQRLRHQLREYFPAALEAFDDLDAPDALELLGRAPDPAKAAKLTRAQISAALKRARRRDIPGKATVILAALRSAQLGQPPAVTAAYAVTARSLIAVIAVLNEQVKALESQVEADFGRHPDAEIYLSQPGLGPILGARVLGEFGDDPDRYVSGKARKNYAGTSPLTRASGKKKVVAARFIRNDRLIDALMAQALSALGASPGARALYDAERARGAEHNAALRKLANRLVGILHGCLKTRTLYDEATAWPYQEKTPQSDIAA

SEQ ID NO: 158791 - protein, 448 aa, unidentified
MAQHKRVAVDAATISLTHPNAAGIDIGSASHFCAVPPDRDDEPVREFTSFTADLQRLTDWLDACNIDTVAMESTGVYWIPLYELLESRGFTVLLVNARHVKNVSGRKSDVLDCQWLQQLMSFGLLHGAFRPGDQVCVLRSLTRQRATILRSQGRFVQHMQKALTQMNIQLANTISDIVGETGQKIVRAILAGERDGLALAQLKNSRIRASADDIAKSLQGNWRSEHLFALKQAVDAFDFCVKQLLECDGQIEAQLQVLQSRQGEPAKGKKRGRARNAPKFDLRTQLFQMCGVDLTRIDGIDVTTALAVVSEVGADMSRFASDKHFASWLGLCPGTKITGGKVMSGKTKRCANRAAQALRLAAAALRSSNSALGAYYRRMCARMDRAKAVTAAAHKLARLIYAMLTKGQEYTDRGQDYFEERYRQRVLHNLAQRAKAMGMQLVPSEASV

SEQ ID NO: 158792 - protein, 364 aa, unidentified
MHSINNTELSSLEETRCQFNGGRCAIKLGIDVHQEFYVVVMQEGGANPKPPQRFQKEAFLQWAGRLKQKSGAEVYAVYEACGFGFSLQRNLSGLSIHCYVICPQKLDEQNRRVKTDGLDAKALCLKLDRFVQGNRAALAIVRVPSEEEEQKRAIHRQREQMVGARKRLEAQGRSLMVNHGFEPVQNWWKPRPFAALEVPQWMRELLSNSQPILVALQQKIAALSVQLQCAAAPEQPRGLGKMTSVVLDREIGDWNRFSNRRQIASYTGLCPGEYSSGNTRLQSCVTKHGNPRLRAALVELAWRLVRFQPNYKPVLKWRAILAKGALATGAARKKAIVAVARQLAVDLWRIKTGRLRPEELGLIN

SEQ ID NO: 158793 - protein, 309 aa, unidentified
MKVSTLGIDLVKNVFQLHGVGCNGQTVLKKKLTRDKFLPFLMQLEPCLIGMEACASSHHFARVLRQYGHEVKLIPPQYVKPYVKTNKTDAADAEAICEAVARPNMRFVQIKTAEQQAILVLHTERNILIRERTACANSMRAILAEFGIIMPRTLSQLYKKIPEILEEYDNELSPFVRCSVARQLERLQGVEDQITLIEQELSRWAKTQPACQRVMKVPGVGLMTATYLVASVGNGQQFHSAKQFAAWLGLVPREFSSGGKQRLGRISKRGDRYFRYLLVHGARAVAAVIERHKDNMPWFYRLLNKRPIT

SEQ ID NO: 158794 - protein, 335 aa, unidentified
MQIYGIDLAKEKFDVSFFDLTSKKVSNQPSHKVVKNNFKSIGRFLETLPSDAVLVAEHTGVYGDTLLKCCMDSNVKIAFVGGYVIHRYRATPDRAKTDVLDCALLREFGERYPDKLKYRKFPEEALYELRQLARHREMLVEQRKQLMTADKSEDCRPIRSLAVKRSMDRIKEMLDTEIAETEKEMLKVINGHESIHHNYELVKSVDGVGLITAVELLVKTENFTKITTARQYAAYAGTAPYEKSSGKMDKGAHISKIGNRRSKTLLYICAESARLHNKEIKLYYERRTLIDKKPRHYVLNAIANKLLRIIFTLVEKGEYYDANFIRQDPRVVKYN

SEQ ID NO: 158795 - protein, 375 aa, unidentified
MTTSITHVAMDTHKKEHTVAVGYPGQDKPEILTVDNTVLEIRRMVRRILKQAPGEVVFCYEAGCCGFTLQRRIESYGGHCQVIAPSLVPVKRGEHVKTDRRDAIKLLKLFRAGLLTVVQAPDPQQEADRDLTRLRQTARENLQRVRHQILKLLGRHGYVYTDGDHWTVRHRNWMRTLEWDSSLLREVFDEYSTEMQHCLQRLESLDRRVLALAGEDRYRETVGLLGCFYGIDTMTAIVFLTELFDLARFASPRQLMSYLGMTPSEESSGDCHYKGPITRSGNGRIRRLLVQAAWHYRHPQATTPKTLRDRRKDQPQWAVNLAERAGHRLRKRYWHLLNKGKPPCKVVVAVARELAGFLWAMLRESALRRTLRTIE

SEQ ID NO: 158796 - protein, 430 aa, unidentified
MSKCNYLSVGIDVGSAFSWMSIVDPDENLLLKPFKIIHNNLDSLERALCAIRKAEESHSMKSRTFLESTGIYHFPLFCYLMESGFEAFVINPLITHSIKNIGIRKVKNDKLDSIGIAKLGLKSDLQVSVIPTKLVLELRALTRNYYSLVDIRSSYVNQLKTHLHTVFPQYLDVFCDVTGKTSMMILESYPTPDKILRAHRDSLISKISKTSRKGLERATEKYDKLVMAAKAAKIFGCNLDSVYFNISTTLTLIKSMDLAIAATMDNIHALVKKHSSEKFVEQIYLLNSITGIGFLSAVTIMCEIGDFSVFKNPKQLFAYFGMDPEVKQSGKFNATEVHMSKRGSRIARRAIFAAALACIRKKRNGEAINPYLHEFYQKKAAAKPKMVALGAVMHKVCNYIFAVLRDKTEFVMRSPEKHRLTYKSPSSLAA

SEQ ID NO: 158797 - protein, 342 aa, unidentified
MNFIGLDIHKKTISYCVKDISGKVLSEGKIPATRQALQEWVGTLGKPWTVAMEATMFTGWIYDYLRPHAAAVKVAHPLMLRAIAVAKKKNDRIDAGRIADCLRCDFLPECYMAPMEIRQRRRTLRYRKLLVRQNVQLKNKIAQLLMESGVTYNKEKLHQQGYFHRVLPANPEIDPSLWPLLKLTREMIERTQKTERALLRSLEADPLLAARVERLMTIPAIGHVTALTWVLEVGEVERFHSVKQVISYCGLCSGEKTSADSSRRMPISKQRNRHLQTVLLEAAHLAPRLNPELAVLYEREAAQSNRNQATIAVARKLAAYLLAIDRRERAFVTHQVHSSVAA

SEQ ID NO: 158798 - protein, 349 aa, unidentified
MKVLIGVDPHKTSLAVAAIDEATSELLERASFPQDRTGLRALERWAKRFPQRRWAVENAGGLGRHLAVRLAGSGESVVDVPPKLSAQVRVLSSFAGNARKNDGVDALATAMAASRNERLAAVDAEAASETMRLLSERREDLVAERTRSLNRLHALLRDLLPGGVAGKLSAERAARILRGIRPKEGASARLRRQLASEVLRDVRTLDRKIADVDERIEAEVQASGTTLTQIFGIGPILAARIIGTVGDVMRFPTKAHFASYSGTAPLEASSGEVVRHRLSMAGNRHLNYALHMVAVCQARSDARGGAYYRKKLAEGKSRKEALRCLKRRVSDAVFRSLLEDSQAASRGAA

SEQ ID NO: 158799 - protein, 355 aa, unidentified
MSKLKYIGLDVHQASISIAVLDESGKLVMQSVVATRASAILEFLEGLPGTLHMTFEEGTYSAWLYDLLVQRVSQVVVCNPRKNALLKAGNKSDRIDALKLAELLRGGMLSPVYHGQNSTRTLQELARSYRTVTVDTTRVMSRLKAIYRSQAIPYAGKKLYTQRHRGEWLKQLRQPGLLRRAERLYEELDLLQQLRRQAKQELMVESQKHPVCARLRTIPYLGPIRAAVLAARVQTPHRFRSKRQFWAYCGLGLETRSSADYQQIEGRLKRSRKKVLIRGLNVDHNHDLKNIFKGAAMSASIFSGPLQEFYQERLVAGIQPEMARLTLARKIAAIALTIWKKGESFDPSKLKAQAA

SEQ ID NO: 158800 - protein, 409 aa, unidentified
MELLYARCAGLDVHSATVVACARIAMGGTVTYHHRTVSTTTKGLLELAEWLTAQGCTHVVMESTGVYWKPVWHILEGQFALTLANAMHVRNIPGRKSDKKDAIWLADLLAMGLIRSSFVPPAPIQDLRDLTRTRKQFVREMARHTQRIQKTLEDANVKLTEAISDLLGVSGRAMLNAFIAGETDPERLADLANGRVKASRTQLVDVLHGRVTVHHRFMLKVHLDQIEALEKIVAALEARIDEALIPFRAALSLLKTMPAVRATIAPVVLAEIGTDMTQFPSAGHLLSWAGFCPRLDESAGKRHSTRTRKGAPWLKTTLVQAAWAAARKRDSYFHAQFVRLTSRGGPKKAIVAVAASMLTDIYYMLRDGVEFHDLGSQYFAQRDKEHLTKRLLRRLHDLGVDVEVKDNAA

SEQ ID NO: 158801 - protein, 486 aa, unidentified
MKKPNIYQNQSQALLHLFEEAGSSEKVMCVPMDYAKNDHLVMFCNGHGDILRKPFSVKNTPEGIAYIDDQVTRFCRRQGIKKKHVFFGGEDANSFAKNFVSTLRSKGFVVANVNAHDAKKQRSNVQASTDRIDLMGIATMLLSCRANCCAAQSGIYRNLRTLVRHRRRLVQMLTEVKNRVHGIVDELFPGFLNEKNSGIVPFTQSSLYLMQDRFSPKQIRRRRRQKLIEILKRSSTSKAEHTAAKLQQYAGKVLHAPVEHVDTMQLSLAQHIKHIRCLKESVAQMDKEIALNLAQTQGAFLTSVRGIGLVLAAGVTAEIGDPNEQKPLNNLASYSGIIPRVKQTGGLDGKTYTGPVAKRCNRILKDYVVKSAYHIGLHGPPDLMADYKRRDASGQHADFGIGRRYLRMAKSLMRTSQVYLPPNLRKADSTRQDRPGYYLMSWPYLREKWKKVGALEAAFANNRPLGRWRQIVQELYDISSVRLKLI

SEQ ID NO: 158802 - protein, 340 aa, unidentified
MNATTYGLDVAKRVLQMYWVDPQTGEIANRRFGRDELIRFLAQRPAGRVALEAGGSGHWWARKIQALGHEAVLLHAQFIRPFVQTNKTDAADARAIWTAVHQPGMRTVAAKTEEQQAMLGLHRIRALLVKFRTMQVNQLRGLLYEFGVTFRGGRQAGLKEIRARMAELEQALPGVLLCSLQEQLQRIDGLEQEIDRLEQRIGSWQKQEAACRAIAQVPGIGTLTATALVATIGEAKAFKSGRELASFLGLVPRQSGTGGKIRLGSISKRGDPYLRTLLIHGARSVMYHTKAPTAWQKGIQARRPANVAAVALANKMVRTAWAILAHGLVYQKDHISVKPG

SEQ ID NO: 158803 - protein, 336 aa, unidentified
MVQIYGIDLGMSSFDVSFLSESGSVRHLSGVKNTVHGISKFLLSLPSSAVLCAEHTGVYGDLLLRLCTLNRICLCFVPGYQIKHSLGLQRGKSDPLDACRIREYAERFYDLLRPCFYPGEEMSELQELYRTRSLLVDSRKRLDTLNIGDNCKSSVSLAADHARRAVLAELNTQISGLDHEIEALIQNSSEFSRNYQILTSIVGVGPVTSCELIIKTENFRKLDTAKKCAAYAGIAPYPKESGKMKCGHKISPMGDKQLKTLLFLCACSAKEHNKEIRLYFLKKHKVEKKHFFVAMNNIANKLLRLIYSLIHKQQTYDRDYIQRDPRCVVISDTHKC

SEQ ID NO: 158804 - protein, 480 aa, unidentified
MSLQRDVSSEKNQTVRYTKRLEVVNPHCAGLDIHKEKIWVCTSPFHDGVAPEVSTFATDTGSLEKLAAYLRERKITTVALESTGVYWLPTFLMLRQKNLNPILVNPRDVKNIKGRPKSDRADCVWICRLHSYGFLRASFVPPDVVLDLRSFYYAHEKLTVDSASMLQRMNDELVKMNIRVDLILTDLSGASGIRLIEAILGGECSPERLYQLLDEQIMKKGKDVILPYLHGDYREGNLAILRTWYDLYLGIRKEISRINQKIYELLQSFPKKADAKDLPRVKKNYREDKLDFPYELRPIFFEIYGVDLTQLPGIGAGVLLALVCMVGTDLSPWPSAKHFVSWLGLAPINKESAGYRKSGSTQRINNLLSNAFKMAAMAAKRTTTDIGRTARHLAGRILPKKAKVATARKLAELVYNILQNGMELKVKTEEEYEQRRKQRDIQFFVKGLFKYIINGQLLPEVEKVYQEHCQGIKAASLTNA

SEQ ID NO: 158805 - protein, 320 aa, unidentified
MRNAVGLDISKLTFDASAIVGNAEYSAKFDNDSKGLDQFSDRLKSLGCQNLHICMEATGNYYEEVADYFAQYYSVYVVNPLKISKYAESRFKRTKTGKQDAKLIAQYCRSAQESELVKRQKPTDEQYRLLRMTAAYAQIKSECAAMKNRHHAAKDEEAAKAYAQIIKAMNEQLEVLKEKIKEQTEKPNCKEGVKRLETIPAIGRMTAAVLFHHLTSSKFETSNKFAAFAGLSPQQKESGTSVRGKGKLTKFGNRKLRAVLFMPAMVAYRIRAFPDFIKRLEEKKKPKKVIIAALMRKLAVIAYHVHKKGGDYDPSRYKSA

SEQ ID NO: 158806 - protein, 340 aa, unidentified
MNQTTYGLDLAKRIFQMYWLDAQTGEVANRRFRRDELIAFLAKRPAGRVAIEACGSAHWWARKIKALGHEVVLLHAKFIRPFVQTNKTDAADAKAIWTAVQQPGMRTVAAKTEEQQAMLSLHRMRSLLIKFRTMQVNQLRGLLYEFGVSFRTGRMAGLTEMRTRMAELEDVLPATIFTSLRDQLTRIDAIEQDIDRLEKQIGAWHKQEAACRAIAEVPGIGKLTATALIATIGDAKTFKSGREFASFLGLVPRQSGTGGNILMGAISKRGDSYLRTLLIHGARSVISHSKVPTPWQKGIKERRPVNVVAVALANKMARTAWAILAHGSKYEKNHVSMKPS

SEQ ID NO: 158807 - protein, 423 aa, unidentified
MSYRIAGIDVHKKMLAVVVSDVEVDGECQFERVRYSSSPEHLRFLAQWLIAQRVEEVVMESTAQYWKPVWGALERYWKPICQERADAGPKSGTLHLAQAQSNRGRRGRKKDFPDAERLVKRLVADELVLSFVPDTEQRLWRTVTRRKYQLTRNHVRLQNQLEGLLEECHIKLSSLVSDLLGASARRMLKALAEGETNPVALAAMADRNLRATQAQLCDALGACAELTPIYRRLLKMFLEELQFIEQQISELDQELASLLSRHHDAVVHLAEIPGLGVDSAQQIIAEVGAGATTFPSAKQLSSWVGACPGEEESAEVSKSHRSPKGNRHMRRILNQAANAAAKSKGTIFEIVYHRLVSRLGHNQTIGAIAHRLCRLIWIILHRAVRYQERGPLVNAKTRRHRTNRMIRELRNLGYRVEPSVTTV

SEQ ID NO: 158808 - protein, 401 aa, unidentified
MNPVIGLDVSKGQSQGQVFLDKGQPYGKSFSFLHTLEGLHYFLNLINDVTKLTGHSPTIILESTGHYQAAVVQFLEEHSIIFIVVNPLISNQAKKSSSLRKVKTDAVDAYQLCELYYKEEFEAYKQRGVHFLNLRHLTRQFESLTDMYVQAKLQFHAVLDQVFPEYNGVFGDLFSRISLLLLREFPTAESILAAGENTIWERVACICTSRSERWAKEKAELIMAAATRNPFQKTAYPSHLISLELYISLILQYQEHLSNLQDQIDALAEDVEEYEIIQSIPGIGKKIAATILSEIGEIDRFTHAKKLVAYAGVDPSVYSSGKFTATANRITKRGSKRLRHALYLAVLCGLRRSCNKKLKEFYDKKREEGKPYRVAVIACVNKLLHWIYAVLRSKQSFLDLA

SEQ ID NO: 158809 - protein, 370 aa, unidentified
MKSTIILAFDQHAATTVAAVLLPGQRTSALHTLTSDSATILRFVERVRRQGSVRCCYEAGPCGFELQRALAARAIPCDVIAPALIPRRPGDRIKTDRRDASQLAILYRADALTAVHIPTDQEEAARDLLRCREDMRADLLRARHRLSKFLLRHGRRFTGTKKAWSKRHYVWLRAHTWPIAALDQTHRAYLRAVDEIEARLRDVETEIRALLALEPLRDRVQRLRCFRGIDAELGDARRFPSAPSVMAFVGLVPSEHSSGAKRAQGAITKTGNAHLRRVLVESAWHYRHHPFVGRTLRLRQRDAPTDAIARAWTAQQRLHRRYARFAARGKPKQHIVTAIARELTGFVWAALTQPSDRSTVERRTLEASMR

SEQ ID NO: 158810 - protein, 407 aa, unidentified
MNDSGKRYIGLDVHKHYLIALGVDADLNVVLPARRVELSHLESWMKKTLTKQDEVVLEMTTNTWQLYDELVEYAGSVMVVHPPHVALITRSQVMTDKIAASILARLLAKGLLVGIWIPPQEIREARGLVAQRQKMVRLATQAKNRLHAVIQGHHLVPPAGNPFGANNKAWWQSLPIGKLEKFNLQSDLETLQFGEKQVKDMTEIMEGMTAEQEEIGRLLHLAGFGRVTAVTVWAAIGDIRRFAEPKYLVGYAGLGTRVHDSGMTSRSGKITKAGRRDLRTVLIEAANVAANNHPHWKAELARLEPRLGRNKAIVAIARKLLIAVWYVLQGQTDKYAEPETVAQKMLRFAYAVGKANRPKGQTAAQFARIRMDALGLGRELTSIPWGSKKPIPLPPSGLKEGSDVPNK

SEQ ID NO: 158811 - protein, 309 aa, unidentified
MFCVAGIDISKRYLDCCLQPSNHQFRLANDLEGVSTLIACFFESEVTRVMVEATGGYEKLLRHELGKVGIEVMCVNPKRVRHFAEAMGMEAKTDKIDAQVLAEFAATLKTYKAVPFSLEHDQLSEQIKQRDRFIQHRDDDKRRCQQSSTPVVIDRYQAHINFLQAQIKELESLIARTMKDMDDHRANRLMEVKGIGLVTASNLVCYLPELGTLSRGKIAKLVGVAPLNRDSGDGSKPRYVRGGRGKVRRVLYMATWVIVRYDAGFKARYERLRERGKCAKVAIIACMRVLIIRLNAMLRDGTPWRSDVI

SEQ ID NO: 158812 - protein, 353 aa, unidentified
MRTYYVGMDVHRATIAIVALNGAGKVVEQLVVETSATRVRNYLKQLRGRVYVTFEEGTQAQWLYDVVQPLVTEVLVCDPRHNKLLKAGNKSDRIDAQKLAALLGNGALQAVDHRDHGVRALKELVRNYDCLVSDTTRVMNRLKAMFRGRAIACGGHEVYRQDRREVWLSKLTERGAKERAGSLYRQLAALRALRQEAKLAMVREARRAAAYSWLMSVPRLGAVSVAQLLAVVGTPHRFRTKRQFWSYVGLAVVTSSTADMEVVEGVLRRSRRPVATRGLNRNHNHLLKRVFKNAATSACQSEPFKQHYERRLQQGMEPALARLTVARQLAAITLSLWKRGEKFQAERMKRPAV

SEQ ID NO: 158813 - protein, 432 aa, unidentified
MASLTFKKGALPMKVVYQTCCGVDVHKSFLVATIIKTTSGVQPSYQKKRFSTFNNSILEFKKWLLDNSCRDICMESTGKYWIPVFNLLEDEINVTIANPKWVKAVKGNKDDTKDSKWIGDLFRLGLVPGSYIPCKPIRILREFTRYRYKLTSCRSSEKNRFQNALTVCNIALDSVVSDIFGKSATSVIDYLLEQSDNSINHEEISSRLLRSLKKKSESVIESIEGYQMTDPQKYRMRLVHAHMDYITSTISDIDSMINSLVEPYDNAVKLLCTIPGVDRNSAITIISEIGTDMTQFSNSKRLCCWAGLTPGNNESAGKKKSVRITRAGVYLKPALVQVAHAAVKSDKSPYYKAKYERIMKRRGKKRAIIAIARMILTAAYQMLSTGEAWNPTDLYKIDMPEPLKEKQKEKAIKQAKKLLIAEGILDESLLAS

SEQ ID NO: 158814 - protein, 339 aa, unidentified
MKQYVGLDISMEETSICVLDENGGVTFEGSAPTDPEAIAKLLRRHAGNAERIVFETGSLSNWLWHQLRTLGFPVICLDARHANAALSMRINKSDQNDAKGLAEMARMGWYREAAVKGAESWKTRSMLAARTKLVNLRRDLDNQMRGLCKGLGIVLGKAGNLARKVDAVLAQAPDLQDIFAPLLLAQSCLTEQIEKYDRQLLAVAKGDQTVRRMMTVPGIGPLTALSFVVTIDNPTRFRHSADVGAYLGLTPKRHQSGEIDRTGRISKRGDHQVRTYLFEAANVLLTVVGRGSALKRWGSKLAKRIGAKKAKVAVARKMAVMLHAIWTDGTEFQAEMRTA

SEQ ID NO: 158815 - protein, 420 aa, unidentified
MKAYDVDDFAALIGIDWADKKHDICEHPKNTEQYHYTVIKHKPEALHKWAMELKLRYPDQKIAIVCELKKGPLIYALAKYDHLVLFTVNPSAVANYRKAFTPSGAKNDPTDAFIQTEIIKLHMDKLSVIEPESSSMRALAQLVEYRRNLVQDSVDLSNKITVTLKNYYPQALEWFKEKDTFIFCDFISKWPSLTAVKRARKQTLVDFFNRHNSHYETVNNARLLSIKSALPLTEDEGVIGPNQLLIEVLIMQFKVLLKGIEQLDKTIKQMYKKQNDKAIFDSLPGAGPQLAPRLLVAFGHNRERYTDASQMQKYAGIAPVIESSGKKTWTHWRYSCPTFLRQTFVEWAGFSIRYSFWAKAYYEQQKSKGKPHNSIIRSLAFKWIRIVFRCWKTNTPYDESKYLEALKRRGSPLLKFAINS

SEQ ID NO: 158816 - protein, 367 aa, unidentified
MKKTSTAAAKQSRNISRQRLTIGLDLGDRNSWYCVVDEAGQIQLEQRVRTSVKALQEVFGTMARSRIALEIGTHSPWISRLLSELGHEVIVANARKVRLIGESRKKDDRLDAQTLARLARIDPELLYPVKHRSAQAQADLMMIRARAGLVRARTGLVNTARGLAKSYGERLRGCNVRNMNPEKAEGLSPELQRALEPLLSVIEELSERICEYNDRIEALAQTSYPQVELLKQIKGVGTLIALTFLLTLEDPHRFRKSRDVGCYLGLQPGRRKSGESDPQLHITKEGDPYLRTLLVQGAQHILGPFGIDCDLRRWGLKLAERGGRNGKKRAIIATARKLAVLLHHLWVSGEVYEPLHHSNRMALAVVA

SEQ ID NO: 158817 - protein, 395 aa, unidentified
MSHIIGIDIGKDKIHISTPTPDEPPKQWVVHVIDMKDPNWWHDLIGHVSHNALVAAEATGYHWFAPIARVLIDNRAANIWYVDGRTTRQVRNVNISKHKTDNMDARALTLIAQRLAGGQAQAGCYPFNLEELTQVNHLRLLVNAHRRSIKQVTRRKNQLRALAHSVWPLLSQRLPTWRTCLTYNCVSPAQIHWLAENMETKMDGRRRRHIANLASLMPPIDADPVIETQSINIDAALRIAESETKDIESEITELLNAQFPIIANRWRTIPASSDIFIAALLVATYGKPDEFERDNFVAAVGAAPLWRSSGKQHKTKPRKTGYRPAVDALHLWTLLLLNSKQPENPVRNYYKAGQRRKLPAARNKLARLLWSVAQSEEGYIYKKTEKEIKNETDRT

SEQ ID NO: 158818 - protein, 337 aa, unidentified
MIVIGVDVHKHSLTAVAVDEVGRTLAETSVADERALLAWSRSLPVERLWAVEDCRHVTRALERALVAAGEQLARVPPKLTAPQRRSGRVRGKSDPIDALAIARAALREPRLDRPRAGEERLRELSLLVDHRDDLVDERRRAQQRLRWHLHELEPLLGVPAGALDRPVWLERVTRALARREQTLQVRIARDLVRRCRALTRAILDLERELAVMTAQTAPALLQLPGCGAVTAAKLLAEIGPIERFETDAQLARHGGVAPLEASSGRVRRHRLDRGGNRQLNCALHRIAVTQARTHPAARVYLERKQAEGKSRREAIRCLKRQLARVVFNTLKASPALT

SEQ ID NO: 158819 - protein, 400 aa, unidentified
MSTPHARIWVGVDAGKGHHWAVALDADGETLFSTKVINDEAQILTLIETARERTGEVRWAVDISGRSSTLLLALLVAHGQQVVYVPGRTVNRMSAAYKGEGKTDAKDARVIADQARMRRDFAPLDTPPELVSTLQLLTHYRADLITDRVRLINRLRDLLVGVCPALERAFDYSAAKGPVVMLTEYQTPAALRRIGVKRLMTWLERRKVRGAAQVAARAVEAAQTQMTTLPGEKRAARMIGDLAHQLLALDERIKDNDREIREMFRTDDRAEIIESMPGMGPILGAEFVAIVGDLSGYKDAGRLASHAGLAPVARDSGRRTGNYHRPKRYNRRLRHIFYMAAQTAMMRSGPSRDYYLRKRSEGLLHTQALLALARRRVDVLWAMLRDGRLFTSAPPVTQAA

SEQ ID NO: 158820 - protein, 403 aa, unidentified
MVFVGIDWAEAHHDICVVDEEGQVLAKRRVPEGLEGVGKLHSLVAEHADDPAMVVVGIETDRGLLVGSLVAAGYQVYAINPFASSRYRDRHATSGAKSDPGDARVLADLVRTDRHKHRPLAGDSNLAEAVQVLARAHQGLVWTRQRQVNQLRNALREFYPGALAAFDDLDAIDALAILERAPTPARGRALSQAKIITALRHGGRERNLKAKAAQIQGQLRLSQLEAPALLAEAYGHSVAATVAVIKQLNLQIAALEHELASSFEMHPDAEIYLSLPGLGLVLGARAMAEFGDDRTRFLNPKARKSYAGTAPITKASGNRQVVLARVARNRRLADACYLWAFSALTRSEGARHRYDVLRARGQTHHQALRALANRLVGILHGCLTNRQAYNEHLAWSSHVEVAA

SEQ ID NO: 158821 - protein, 279 aa, unidentified
MLYAGLDLSRKRLDVHVLREDGTTALVTAVSPDTDALRTLARKVSAEGEPVRATIESMNGARFVHDTLEFAGWEVLIADAQRVRGLAPLAAKTDKIDARVLAELTWRTLVPEIWLPTPEVRQERERARFRLHLVQHRSALKNRIHAILIAFGHPRPMADLFGVAGRELLDSLKLPEPWQTNLVESLTLVDDLSTRIDALEQELRTLGADHPSMRLLMTVPGVGWVLAYTIASEIGDISRFASPKKLAGYTGLCPLVRQSGGKDRRGPLAKNGPTYLRWA

SEQ ID NO: 158822 - protein, 341 aa, unidentified
MKIIGCDFHPSYQQIAMVDSETGELWEGRLEHEQGEARRFYQALVGQTVRVGIEAVGNSQWFEQMLAEMGHQLWIGDAAQIRRLVVRQQKTDRRDAKHILELLMDGRFPKLWVPSQQIRDVRQLLRHRQKLVEIRTQVKNQLQHLALNQGVRRKRRLWSVQGRSVLEQLPLQGWTARRRSDLLAMLDRLQQQVGELDRAVSAEAQQRPEVRLLMTHPGVGAVVGLAYVLTIGPHTRFARGKKVASYLGLIPGEHSSGGRQSFGPISKQGNTMMRTLLVEAAQTAARFDEELRRAYGRLKAKKHSAPAKVMVARKLAVRMYWMLRENKSYAELYARRPLARM

SEQ ID NO: 158823 - protein, 341 aa, unidentified
MDQVTLVGIDLGKHSFHLHGQDRNGKALFRKKLGRKQLIEFFATCEVCTVVMEACAGAHHMARKLATFGHEVKLISPQFVRPFVKSNKNDFVDAEAICEAASRPAMRFVTPKTESQQTLSVLHRVRESMVRDRTRTINQMHGFLLEFGVSLPVGKAAVARLPELLDANALPPRLIAILERLHEHLKYLENQVGEIERELARQLADDDVGQRLMSIPGIGPITASVLAAEMGDGRQYGCSRDFAASVGLVPRQYSTGGRSNLLGISRRGDKHVRSLLVLCARAYLRGLEKRTGRLAEWARAMMARRHSNVVACALANKLARTAWAIVARHGTFDSEFARPSA

SEQ ID NO: 158824 - protein, 274 aa, unidentified
MTSLPDSTSTPVTIGIDVAKTALDIAIGLNAPPLSLTNNAEGFDTLLGQLATRKVALVVMEATGGLETAAAAVLQAAGYAVAVINPRQARDFARAMGQLAKTDRIDARILAQLGEVIDRSPERDKFVKPLPTAEQQALAALVSRRRQLIATLVAERNRLTQSPAAIRQSIDTIIEALTKELDRIACDLAGHVQANFADLSALLDSVKGVGKTTISTLICEVPDLDRLSRREISALIGVAPVNRDSGHMKGKRTIVGGRSSVRHVLYMAALSATR

SEQ ID NO: 158825 - protein, 346 aa, unidentified
MGQSGVFLNPNSCMGFEPEPSKEGSWMMAQNDLVVAGIDIAKDKVDVCIRSLALRRTFASTAEGRRELASWLRRKKVGKAVMEASGGYEREWAKALRDAKIEVRIVDPKRVRDFARSAGRLAKNDTIDAEMIAWFAETFDEAPGQAYDAEREKLAQIVNARLGLLDLQTRLLNRGEHAGPEPVQKMHARMLKKIAVEVAKLETVIAAMIKATPHFAELAEIIESVPGLAETTSATLIAKMPELGQVNNKIGAALLGTAPYDDDSGRRRGERHIKGGRRKVRNMFYMACLGAATQHNPVLKAFYDRLIAKGKEKKVALVACMRKLIVILNIMIARRQKWDPNLHVLG

SEQ ID NO: 158826 - protein, 368 aa, unidentified
MSEIIRIGVDTSKSVFQLHGVDAAEQPVLRKKLRRRDMLGFFERLPATKVGMEACGGTYYWARELTALGHEVKLMPPQHVKPYVRRGKNDRNDADAICEAMSRPRMSFVAIKTAESQAAQMLMTTRERLVAYRTQLINTIRGHAAEFGLTAAKGPGHVEPLLTRIAEDGRMPELAKELFAMHGVELSRLKIELREIEAKLKAWHRQNEMSRRLAEVDAIGPIGGCLLAIKAPDPQAFRCGRDFSAWMGLTPKDHSTAGKMRLGVITRAGDEALRRTLVVGATSVIKQVSNGKGHPSPWLRDLVARKPPKLAAVALANKLARIAWRLMVSGERYDAARAGIVSPTARIAPCSRRQGRGAPPAAVACGQP

SEQ ID NO: 158827 - protein, 372 aa, unidentified
MNYNTVYVGMDVHKESFSLCAYTIEAEKASHYQRTEADYKKVLNYLEFLRTIYGDDANFICGYEAGCFGYTLYHQLTANNVKCIILAPTTMLEQRSKKRIKTDRRDAEIIAKCLAQHNYSPVHIPTSKDEETKEFLRMRDDHKLALKKVKQQILAFCLRHNYRYDGKSHWTAAHLKWLKALTPEALYKEILDEYLLTYQTLSDKIERLDKRIEELATQDEYKEAVKKLCCFIGVKTHTALSVLVEVGDFKRFASAQHFASYLGLVPGEDSSGDDQNRLGITKAGNRHVRLLLTEASQCYARGQVGFKSKELKSRQSGNTPAVIAYADKANERLRRRYYKMVLNKYKKHNVAKTAIARELACFMWGMMTDNIV

SEQ ID NO: 158828 - protein, 412 aa, unidentified
MNQDKLYVGIDVSSKNNVCYLMYSDGSKHSSFSVPNNRNGAKIIVDRVTSVLLLQDIPQVVIGMEATSVYGDNLMRFLRESGSLGRFERNLHMLNPKQVKKFRDAYSDLPKNDHVDSYVIADHLRFGRINKEVYMDDYKYQALKMYTRARHQLVQELTREKQRLLNTVFISFSGLTQEKIFSDKFGATSMALIEEFSSLDELAYMSTDELVDFIRKKGKNHFDDPEEIAEAVQRAAKNSYRPPHVIADAAKQMLAISMNTIRLLQKQIKEYDKAIEKMLEAFPQTLTSIKGIGNIYAAGIIAEIGDINRFPSQAGLAKYAGLVWTQHQSSDFEAEDKRMIQGGNHHLKYYLCEAANALRRCDPEFKRFYALKYKEANKHNHKRALALTARKLVRLVYTLLKTNRLYIPPEEY

SEQ ID NO: 158829 - protein, 347 aa, unidentified
MDASYDGRQVVGIDLHRRRSVIVRMTEDGRKLETVRITNSPAALRREIAKAGKNPKVVIEATYGWYWAVDVLEEAGAEVHLAHPLGVKAFSYRRVKNDERDAADLADLLRMGRLPEAWIAPPEIRELREISRYRHKLVKARTSLKDQVHGVLAKLGIPVTHSDIFGVHGQAWLDELKLPQPYAGKVASLRQLAGGLTAEIGLLEQVLGDLLAGHEGYAAIQQLPGIGPVLAAVIVAEIGDIRRFPGPGQLASWAGLTPRHYESDTKVIRGHITKQGSRMLRWAVVEAIQRQPAGTRPRQVRDGIIARRGKEAKNIAKVAAARELLTLVFYGMRDGHVRRALQRGQAA

SEQ ID NO: 158830 - protein, 404 aa, unidentified
MWYTGIDWADEHHDALTIDEKGHQMGSIRVDHSPQGFAKLDTFLMQIIGSASKEQMACIIETTHGLLIVHLLEAGWPVYPVNPRTVDRRRAASGAKTDTIDAYLLAKTGRADFADLHRLTPDSDKVAELKQLTRDQDSLIRTQTRLVNQLTACLKAYYPVALDLFSKLQQKSTLGFLQAYPTLEIARAASLQEIQQQLKHTRHPHPADTAASIVELLHHPQLQADVVLTRTKSRLMLALVSQLLPLMEQIATYDKEIHTLFLTHEDHAIFESLPRAGQHLAPRRLSEIGDDRQRYQDASSLQALAGTSPVLYQSGMYSKAHRRLGCIKPLRNALYQFAWQSTQSEAWAQDYYQRKRTEGKSHTVAIRGLANVWVRIIFAMWTRRECYQTATFELAQHQHARTAA

SEQ ID NO: 158831 - protein, 368 aa, unidentified
MKMNAIKAAPAASAIALKNEKSAKAKRILIGTDVHLRGYQAARKVDNGVIGVVENFRSEEALLLHVEKQCERAEQVVVVYEAGPLGYTLYRKLTARGVLCYVCAPDSSEQKRKRRKNNKIDARNLTSKLFNYLNGDEGALQLARVPTEAQEQLRLASREHDQMVEERKRLGAKGNALLLTQGFGSRSNWWRPKAWAQLSSLVPEWLLERLKIWVDVLKMLDEKICLAKVALARACSGSRPKGVGALSQIQLQSEVLDWSLYTNRRKIACLAGMVPSEWSTGDTERRGSITKVGVPAIRRIIVEMVWRIVLFQPQYKPVQKWQKVLQGTNPALKKKAVVAIGRQLIVDLWRLQTGRVTAQELNLVMVGA

SEQ ID NO: 158832 - protein, 407 aa, unidentified
MQEATQHDAVDVFVGVDVDVGVDVGKGQHHAVALDRNGKRLYNKALPNDEVKLRALIAELKTHRRLLFVVDQPSTIGALPVAVARAEGVLVAYLPGLAMRRIADLHAGEAKTDARDAAIIAEAARSMPHTLRSLRLADEQLAELTMLRGFDDDLAAQVTQTSNRIRGLLTQIHPALERVLGPRLDHPAVLDLLERYPSPSALAAANEKTLANRLTKLAPRLGKNWAAEIVQALNEQAVIVPGTQAAAIVMPRLAQQLAALRKQRDEIAAEVERLVLAHPFWPVLTSMPGVGVRTAARRLTEAAPKAFATAAHLAAYAGLAPVTRRSGSSIRGEHPSRRGNKVLKRALFLSAFAALRDPVSRAYYSRKIQQGKRHNQALIALARRRCDVLFAMLRDGTIYPPKSAPNA

SEQ ID NO: 158833 - protein, 381 aa, unidentified
MKRYYMGVDWGDRLHQVYVGDQEGKKVKEIKVPETVEGLTEFGRWLDEKRAEGFELWAAIEKPAGRIVDFLLDHGVEVYPVNPKAVDRVRDRYRMSGSKSDAFDAYVLAEFLRTDQAHLRVLRPSSEKAQELKMLCRDQRRVGRHKTRLLHQLTTTLKEYYVRPLETFEDIETEVALDFLTRYPTPAHLQALKPKEFKRFATKQHHLSQQRCEELWEKLSQPQLKVPEHVVRAKAQLLEVLIDQLRAAIKAVNTYNHKVESFFASSPAAQIAKTLPGGKSGTLVAAIWAELGDAQGRWESFRHLQAEAGAVPVTKASGKSRVVQFRFACNKHLRYAMYWFPLSRSTTVSGPSSTTDNSGPKGIPIPRHCALWEPSGLRLSL

SEQ ID NO: 158834 - protein, 322 aa, unidentified
MTPPEIYAGIDVAKEQLQVALRPDGETWSVTNDRPGLRDLVKRLAVSKPALVVLEATAGMEMPVAAALAGAGLPVVAVNPRNAREFARAIGRLAKTDVIDAHVLAQFGEAVKPPMRPLPDTATQELNALVTRRHQLVEMLTAEKNRLGQAVAKAVRTGIREHTRWLEKRLADIDRDLADAIGRTPVWREKDELLRSVKGVGPVLSTTLLAGLPELGALGRKQIAALVGVAPLNRDSGRYRGKRMVWGGRARVRAALYMGTLVATRFNPVIRVFYQRLLAAGKPQKVALTACMRKLLTILNAMARHETPWQTMHLTLARQDGC

SEQ ID NO: 158835 - protein, 331 aa, unidentified
MEEVKRFVGIDVAKVALDVFIGSAGGAFSVANDEVGIQELLRQMKPADFVIVEATGGLETPVAGALAAAGIPVAIVNPRQVRDFARATGKLAKTDRLDAEVLARFGEAVRPEARPLADEQAQALEALVTRRRQLIEMLTAEKNRRARAPKVLHRSIDEHIRWLEKRLSGLDAELAELIRETPLWRERDELLRSVPGVGKVLSSTLLAQLPELGMLNRKQIAALAGLAPFNRDSGNMRGSRCIWGGRAQVRRVLYMATVAGVRSNPTIRTFYLRLRTNGKHAKPALIACMRKFLVILNAMLHNKTHWQTPALISPTAPPFPLLGAVSEHGCC

SEQ ID NO: 158836 - protein, 371 aa, unidentified
MEKSIMYVGLDVHKNSIEIAFAEAGRDGEVRSYGSVDGSLAALDKVIRKLVSKNYDLHFVYEAGPCGYDIYRHLAAQGFDCVIVAPSKIPKQSGNRIKNDRRDAQMLARLHRAGELTSVYIPSVEDEAMRDLTRSREDVKASERKAKQRILAFLLRHGHRYSGKSSWSRAHFRWISDIKMPHPAQQIVLQESLEALAECTCRVDRLTEQIQLLSPQWRMFPVAQALQALRGVSLIVATTTVAEIGDLTRFDGPTELMSYLGLVPSEHSSGQTTKRGSITKTGNGHVRRVLVEAAWAYRLPARVSRKLLIRQEGLSQEICAISWKAQLRLCARYTRFLIKGKSKQLIVTAIARELCAFMWAIANEVQNPSKA

SEQ ID NO: 158837 - protein, 433 aa, unidentified
MKVKYEDRLKQKIIAITPDTLVVGVDIAKNYQWARFVDFRGIEHDRALKFKNRKGGFETILARIREICKKENFTKAVVGMEPTGHYWKAFANWLEKQDGITVVLVNPYATKQAKELDDNSQTKSDKKDALTIAKLVKDGRYFELYLPHDIYGELRGLSTTRIGLNKRKNALKNTITAILDEFFPEYEEVFKHPLTGKASRHILKTCPFPKFIMELGEEGVTTEIKKAVKKTVGRKKAGQLVEAAKGSVGVDYGEEAARLKLRLMLEEVELLERQTEELEEQMEAALEKTDYAEYLLSIKGIGVVTLAACLGELGDPTRFDSPRQMSRMAGYNLVEDSSGKNKSGTKISKRGRKNLRSVLYQMALTMVATNDEMKQLYHYLKTREKSPLRKMQALVVVSKKILTIIHTLAKKKESYEPEKVFGHVRREQFKEVA

SEQ ID NO: 158838 - protein, 411 aa, unidentified
MEVVYPRCCGLDVHKETVVACIMVREGGKVQKELRTFRTVTSDLLVLHDWLLAHRVTHVGIESTGVYWKPVFNLLEGDFSVLLVNAAHLKTVPGRKTDVKDCEWIADVLAHGLVRGSFIPPEPIRDLRDLTRYRKSLIDERVREINRLQKLLESANIKLSSVATDILGVSGKAMLEAILSGNTNPEVLAELAKGRLRKKLPLLKEALQGRFRPHHRFMLEQILLHLDFLDEAIAQMSEEVENRIRPFLPEIDLLKTIPILAQRTVEMLIAEIGVDMSRFPDDRHLASWSGFCPGNNESAGKRKSGKTRKGDRWLRRGLIEVAWTASRSKKTYLHAFYHRIARRRGHKKAAVAVAHAILVMVYHILKHKVPYQELGADYFDRLNHKYVKNHFVKRLEGLGYKVILEPTQVAA

SEQ ID NO: 158839 - protein, 355 aa, unidentified
MTTQTHRVTGGVDTHTETHHAAALDHVGRLLGTREFRAGPAGYAELLEWLQSFGSIDQIGVEGTGCYGAGLTRFLRGHDHSVIEVNRPDRGSRRTRGKFDPLDAESAARRALAAEDHIIPKDTTTIVEAIRALRIARTGAVESRTAAYNQLRDLTLTAPESLRETLRTKTLHRVALESARLRPDKSRLADPIQATKLAMRTIGHRVASLNTEIKALDRQLGQLVKRAAPRTLELVGVGTENAAQLLITAGGNPERLRSEASSAALCAASPIPASSGKTTRYRLNPAGDRDANRALYIITLVPMRYCPQTRAYIERRQAEGLSKREAIRCMKRYVARQTYHAIRADLAAARALDDL

SEQ ID NO: 158840 - protein, 346 aa, unidentified
MGYFAGLDVSLEETAICIADDAGVIVREARVASEPEALVAFFGASGMAMERVGLEACSLTAWLHQGLTEAGLAAICIEARQAKGAVGAMSNKTDRNDARGIAQIMRTGWYRVTPLKNPACRSWRALLTARRMVLNKRRDVENGVRALLREAGLKVGTPSRKTFATRVGELVADDPVLAALAGSLLSVIDVMTREVDRLTKRILDEVRVEPTCRRLMTVQGVGPLTALAFRATIDRPVRFRRSLDVGAHLGLTPRRYQSGETDVQGRISRCGDELARTALYEAAHSLLIRSTKWSALRAWGMNVAKRRGMARARVAVARKLAVILHRIWTDGSEFRWGKQAAASVTA

SEQ ID NO: 158841 - protein, 408 aa, unidentified
MNPLFVGIDVSSKNNVAYLMKPDGSKHSSFSVQNNLGGAKLLSERIVSALGSMQLSDVVIGLEATSIYGDSLVYALREDGSLGRFQRKIHVLNPKQVRKFKEAYPDLPKNDWVDAFVIADHLRFGRIAKEVYMDDYRYQALRTLTRARFDVIQNLTREKQRFANYLFLKCSGIAQNKDIQNTSATTIALMERFETVDELANADLNELTAFISEAGRGRFADPDAAAKTVQAAARGSYRLPKTVNDTVNQAMSVSIASMRALKEQVKVLDKAIEQQFEIIPNTLTSIPGIGKVYSAGIIAEIGDVHRFESQASVAKFAGLVWHKHQSGDFEAEHSQMIKSGNRYLRYYLLEAANSVRRCDSEFRRYYDLKFKEVNKYQHKRALALTARKLVRLIFRLLKDNRLYIPPEG

SEQ ID NO: 158842 - protein, 346 aa, unidentified
MNHYAGLDVSLEETAICVVDSTGQIVKEARAASEPETLIAALREIDLPLERVGLEACSLTAWLHDELHSAGLPAVCIETRHANAAMKTMPNKTDRNDARALAQIMRTGWYRQVHVKSRQCRLWRSLLVARRTVLNEMRSIENVVRAVLRDGGLKLGTPSRAAFAERVRDLMAEDASVKPLVDPLLTILVTMLDQFARLTKQVLDIVRREKVCRRLMSVPGVGPITALAFRATIDRPDRFRRSRDVGAHLGLTPARYQSGETDVSGRISRCGDELARTALYEAAHTLLVRSRKWSSLRAWGMKVARTRGMARARVAVARKLAVILHRMWSDATVFRFGKEAGGPASA

SEQ ID NO: 158843 - protein, 342 aa, unidentified
MKVLKQVLGIDVAQKELVVTLGRLNDDLSIELCAYSVFKNTDKGFLKLSQWIDKLTDKTTKVRYVMEATGVYHEKFAHYLDEKKEDLSIVLPNKISNYIRTLEIKTITDKTCSEAIARFGLERKLDNWKKPKAIYRTLKQLTRERRQITDERTIVKNQLHAEEAEAMPHISSIERSNRRIHFLNTLEKEIKNEIESSIKENKELSKDISNICTIPGISILTAATVIGETNGFELIRSKKQLTSYAGLDVKERLSGTSVKGKPSISKRGNRYLRSCLHLPALSSIKWDDNFRDQYSRIVAKHGIKMKGCVAVQRKLLELIYILYKNKAVYDKDFESKKNSVPA

SEQ ID NO: 158844 - protein, 435 aa, unidentified
MEEVTDEPLYRDRVCGIDIGKAGLYATIRVPSDTSPQRRMSETRSFATTRRGVLALADWLRSWQVPAVVMEATSTYWMGPFFRLEAEGFECVLADARQVKNLPGRPKRDPSDSSWLAQCFERGAVRPCFVATAEFRVIRLHTRYRRDLINERTREKNRAEKLLETAAIKLSSVLTDLHGVTGRDIMDHLIAGQRDPKVLAQMARTRARAKITELQHALEGAEFFTGHHARLLKTMLQRIDQIDDQIDGLTAVIEELLAPYEEQLAQAESMPGWGRRSAEDAVAETGVDMTRFATGGHLVSWAGRAPLDKQSGKRKGQARHKKGNTYLGGVLGETAVCAGRTQTREGARYRKLARSRGKNKACVAVGNTQLKVYHTLLSSPGMRYADLGPDYYQRRAQNRRTIDYHVRELEALGLEVTLCRIPEPEPGQAAATPAA

SEQ ID NO: 158845 - protein, 428 aa, unidentified
MKYNTQNAKIKSITEKTLIVGIDVGSETHFARAFDWRNYEYSKKPLEFSNTEAGFMTLKAWMADFAEKYGKNVVIPGMEPTGHYWFNLGAYLQDNGMKPVHVNPHHVKKSKELDDNNPNKNDRKDPKTIAALVNEGRFSYPYIPTGIYAEIRSLSNLRLQTQEEITRIKNRIARWFSIYFPEIKDVYRNPDSVSGLMILKEAPLPQDIVKLGVDGINKIWRDAKLRAAGLKRAKTLVTVAEHSIGSQEAPDSARIELKNLLNDYEIYKNREEDLMSLTEEKLSEIPHIDKLLEIKGVGLKTVSGFVAEVGDITRFDNPKQLQKLAGYAIVECSSGKHKGESHISYRGRKRLRYVLYEAAISLIARNEEFKEVHRYYRTRKENPLKKMQSVIAVACKVLRIFYTILTKGVTYDGAKMMQDIKRPQMLAA

SEQ ID NO: 158846 - protein, 337 aa, unidentified
MEQVTTIGLDIAKRVFQVHGIDGSGAVVVRRQLKRAQVVRFFGKLPRCLIGLEACGTAHHWGRQLQALGHDVRLIPPAYAKAYVHRNKPDPADAAAICEAVSRPAMRFVPIKNEAHQAICAVHRVRERLIGQRTMLINMLRSQMAEFGSVVAKGPQHVKELIGELVEPASLPEPLRQALFGIVRLLAELKEQIAGLDKQIALWHKGNERSRRLAQIDGYGPILSIALAARVQQPERFRCGRDLSAWIGLAPKQNSSGGKIRLGAISKKGDAYLRRLLINGAQAVLSKWAKEDPWIRHLLERKPRLVVAVALANKMARIAWAVMVRGTDFRRAPAAAA

SEQ ID NO: 158847 - protein, 351 aa, unidentified
MFYVGLDLHKRYVTACAIDAVGQLVAEERRLATDLVVLHGWLGRLTGPVTVVLEATLYWAWLEQHLTALGYTVLVAHPYQVKLIWQARTKTDPIDARKLAELARVHLLPAIWIPDAATRAQRQLLRGRAFLVRQRTVLKNRIHAYLTGENLQCPALDLYNRAGRAWLATVPLPPIVRRQVDLLLANLDLLTTQIAVLDKYIQRHVRQDPVAQRLQTIPGVGPFGALLLQAEIGPITRFGSAQELAAYAGLVPSTQSSGGKTHHGHVGRGSPWLKWIVVEIIQAHKLAPGPVGSHYQKLLRAKGKPKATVAAARKFCTYLYWMLKEEWSYTEWLRQHDRLEVRPTQPLGSVA

SEQ ID NO: 158848 - protein, 369 aa, unidentified
MDHHSVAYVGFDTSKTKHAVAVAEGGREGEVRYLGEIEATPAAVERLLGKLERKYKTLHVCYEAGPTGYGLYRHIRALGYACDVIAPSLVPKRPGDHVKTNRRDAVTLARLLRAGELTAIWVPDEVHEAVRDLVRAREAAAQDLRHKRQQVLSFLLRHGRIFTGHRHWSRAHLRWLAGQAFTHPAQQIVFQDQVDAVADAQARLERLDHQLAELVPTWSMAPVVAACQAMRGVSFLVAVTFVAEIGDVRRFESPRQLMAFLGLVPCERSTGDTVRRGGLTLAGNRRVRRALVEGAWSYRHPARITETIRVRLENLPKAVREIAWKAQVRLSARYRRLIAAGKKAPVAIAAIAREMAAFLWAIGRVVEPA

SEQ ID NO: 158849 - protein, 416 aa, unidentified
MTFKVVRFICGGMDVHKNLIVATIGTTDRQTLITEYIQQSFSTFYSDLIRLKEWFISHDCYDVCMESTGKYWIPIYNVLETELNICLTHPKYVKAIKGKKTDKRDSKWICDLYKCDLVKHSFIPKKEIREMREIARYRCKLVYMRSSERNRYQNCLTVSNISLASVVSDPFGKTATNIMKELMQSEVIEDDKILKLIHKNCKDKDKILDSLQGYHIESDQRFKMDTVMNHIEYLDKQIQACEAELIKRAYPLRDYFQHITHIKGISALSAILIVSEIGTDMNQFESDKQLVNWAGLSPANNESANKKKSVRISKAGQYLKPLLVQCALSSIKDKNSYFGIKYCRIKKRRGHKKAIIAIARMMLVCIYHMILTGEEFNPCDYESLTNPKPKKEPIMTVESALQFLKDSNFDFSSIQL

SEQ ID NO: 158850 - protein, 363 aa, unidentified
MTTHMKPTVGKKIKSISLAEGEKVYLGVDVHRRSYSVAVWSDQRGLISTWTQLAEPALLVAKLSPFAGQVAWIVYEAGPTGYGLVRALRTAGFKADVIATSKMLKTTAREGKSDRVDCRRIAEHAAKGLLKIIRVPTEEEEHDRQVMRLREQMVRKMRLARQQIKSFLLVHGVAYEGSVKAWSETGIKKLRELDLPEALRTCLDVLLDAERQAREQVMRMNQAVAKLMTTSRHKTKVKVLRSVPGVGPVTAMTFRTELVAPERFNEPGEIAKMIGLAPLVQESGERRREGSISKAGNWRLRTILVEAAWRWVQKDEAARQVYRRYIRNTGDVKKAIVAMARKLAILLWRMVTREEMYRMRAAA

SEQ ID NO: 158851 - protein, 351 aa, unidentified
MCLAIGIDVHSKKLTSFAVPQNDEDIEETEFCMEFNKEFRSTPADRATLSRAADWLKDREHLILIENSTKTHEVFWILTDLGCTVVVANASDLFRITMSVKKTDYHDCRELAHYARRYLDGEKEFSTCLMVTAEQLNRRQLCRTYAHASSDLSDLRRRIRSYILARGIAVSVPGRDIVSEATLRELDKVADSSMRLLIDEARHQRDRMRRIKNEILKEFKDDETFQLIYSIPGFGIVTASYLSAMIIDIDRFTSPGAYAAYHGVVPKQRESADHSVRCGITRRGDDIAREMLVTGTFIHISQDKDRVSDVSRFYDRLRNRGFPHKKALLACSNKMAHKIYTILKTKTPYRS

SEQ ID NO: 158852 - protein, 345 aa, unidentified
MSNIKRIGLDTSKAVFTLHCVDENGKAVLRTNLRRGQMVTFFKNLAPAEIALEACASSHHWARELTALGHEVRLIPPQYVKPFVKRVKNDRNDAEAICEAAGRPGMRFVPVKTATQQAQGMVLKVRETLVNQRTQLVNALRGHAAEFGIIAAKGISQIKPLLEAIEAEPTIPSDAKDMLALLGQEIEHLDSKLNEMEVKLTTAHKANALSQRLATIPGFGRIIALTFATEVDPTAFESGRHLAAWIGLTPKEHSTGGKQRMGGISRAGNERLRRLLVTGATAVIRFAIRPGNKHASEWLLKLLQNKPRKLVAVALANKMARIAWAMMRSGEAYRRPTAIAATVAG

SEQ ID NO: 158853 - protein, 404 aa, unidentified
MPDGIRWVGLDVHARESTVAIFDQATGEVVTRRVVGHPHELLPVLVEIERPARMVYEAGPTGFGLARRARAAGIELGVCAPGKTERSPADRIKTDKRDAIRLARLLAAGELTLVTIPSVEREQLRDLVRCREDIRIDLQRARHRLGNFLLRREIYWEGPGVAWTRKHRSWLTSIRFSDHASQATLADYLHAHDVLIARRDQVEADLASLALSAPCAPTVARLRCLRGIDTLSALGLCAEIGEWERFDHPDQLAAYLGIVPSEHTTGQQRRLGSITKAGSTHARRLMIEAAYHYRRNPVVGQTLERRQRGQAPEIIHIAWRAQRRLNARWRQLKDARRKPNGIVAVAIARELTGYCWEITTWTPHPDRIPPASLPAGDPLTQPAPNPRSRNNTPTTRRRRLTNSR

SEQ ID NO: 158854 - protein, 362 aa, unidentified
MSQPKSVVGLDVHATQTHSCVLTPETGELRSKRLNGPPARALDHLEGLQAPVLAVYEAGPTGYGLARGGAERGLDVRVCAPGSIPKAPSDRVKTDRRDAERLARLCLAGELSFVRVPTPEEERFRDLARAREAIRADLMRARHRLGKFLLRRELRWEGPGSAWTGAHWSWLRSIEFSDGASKAVLGDYLSAVVSLEQRRSATEAVLEELWPESPWAQTIARLRCLRGISTLTALGLCAEAGDLRRFDRPASLVAYFGIVPSEHSSGPQRRRGPITKAGSPHARRLLVEAAHHYRHQPAVGAALKRRQQGADPRAAEIGWRAQRRLHQRWGRLRVDRGKPANVVRIALARELGCFVWEVGQLS

SEQ ID NO: 158855 - protein, 342 aa, unidentified
MIMADTSSKSGHPHASVDSPVPTAPQAPIPEVFIGIDVAKASLAVDAYPLRHPLSVGNDAAGIKALIAFLLPLAPQRVVMEATGGYERRLAAQLLSAGLAVVVVNPRQVRDFARGIGQYAKNDLIDALVLAHFAAVVKPKPRTAQTTPDEILAELVGRRGQLILQRDQERNHLEHVRFKKVRASIEKVLKLLEAQIDELDALIADRIDSDDGLKENNAILQSVPGVGPQTSAMLLALLPELGKLNRRQIAKLVGVAPFDNESGKFKGRRSIWGGRAMVRSMLYMAALVARKHNPVIRAFADRLAAAGKAKKVVITACIRKLITLLNSLLRSRQSWHINPKNA

SEQ ID NO: 158856 - protein, 398 aa, unidentified
MISIGIDISKDKSTVCILKPCGEIIRSPYEITHTDTQLSELVSLIKSFNDEVKVILEATGNYHLPVLSYLEENNVFVAVINPLVMKKYANKSLRKVKTDKMDAIKIANYGLDNWYHLMKHEVSAETYVELRFLGRQYAHYIKLRIESKLALTNILDLTMPGIKRMLNNRSIHPENDKLNDFVEKYWHFDNIKNKSQKQFISNYATWAKKKGYHQSESKAIAIYELAQGGIPTLPSNTTTQVMVLEAVRVLREIDKTLAIILAKMQELARGLREYDVVRELNGVGEVLAVKLIAEIGDIQRFHSSKTLIAYAGIDAPPYQSGKFIGTNRKISKRGSSLLRKTAYEVMNCLKSNKPQDDPIYLYMLKKESEGKPKKVAKVVGINKFIRIYYSKVKELYAL

SEQ ID NO: 158857 - protein, 388 aa, unidentified
MQLNNNEQANTPMKKELYLGLDVHKDCIITAVAQEGRKGEVRDTGVISNDLHALEKWVGRLRKAHGSDVILRACYEAGPCGFGIARRLKQLGVECEVVAPSLTPKRAGERVKTDRRDARKLARLLRAGELSPVYIPESTDEAIRDLCRARTDAVDDRCRSRHRLKGFLLRHGYHYQGKSSWSAAHERYLRELVLPHPAMKVILEEYLQGIAAAGERIARCEEAMRALLEKWHLRPAVEALMAMKGFRTVAAMILVSELGEVHRFSHPRQVMAYLGLVPTENTSSDRRRQGHITKCGNAHARWLLVECAQHYATPPKVSKELSRRQEGQPREVRALSWKAQNRLHGRFARLSARRLQRNKALVAIARELCGFIWELLHMQPCYQAQPPS

SEQ ID NO: 158858 - protein, 405 aa, unidentified
MDVVHERCCGLDVHKKMVVACTLTPEGKEIRSFSTMTENLLEMVDWLQQHRCTHIAMESTASFWKPIYNLLESADFQVLVVNAKHMKNVPGRKTDVKDAEWIASLLRHGLLQASYIPDREQRELRELIRYRRSLIEERAREVNRIQKVLEGANIKLSSVASNTLGKSGRAMLEAMIRGEENAKVLSELAVGRLKAKKDDLNKALNGLMGDHQRTMLAAQLRHLDYLDEEIARMDAEVKERMLPFEEDLELVDTIPGVGRRTAEQILAEIGTDMTQFPSAGHLCSWAGLAPGNNESAGKRKSGATRKGNQKLRAALVEAARAAARTRNTYLSAQYHRIAARRGKNRAAVAVAHSILTIVYHILQRRQPYIELGPTYYEERKKDAVVKQAIRKLQSLGMEVIVKPVA

SEQ ID NO: 158859 - protein, 400 aa, unidentified
MNAVGIDVSKGKSTVAVIQPFGVVIAEPFDVFHTDSGLKELVNFIKSLSGETKVVMEYTGTYYEPVANVLHHAGIFVSVVNPLLIDDYDTNRVRKVKTDRLDALKIASYALDKWIKLRKYEPAKTVRKTLKMMNRQCIKLNKILVMHKNSLIALLDCCFPNANTMFTSPRRESDGHEKWVDFILKFPHADTVAKLSLSAFKTKYQSWCKKEHYKYNESKAEEIHAYARTLVCTLPMTEAVEKMIVDSAKLLNSTLEALTNLHNEMDSLASQLPEYDTVMNLYGVGKILCSQLIAEIGDVTRLKSGKSLVALAGIDPPPNQSGKDDPKSRSISKRGSPALRKTLFLIMTIYLQRQPVDEPVYQFLNKKRSEGKPYKVYMIAAAHKFLRIYYARVKEAIPVQ

SEQ ID NO: 158860 - protein, 388 aa, unidentified
MQVIADRPEAPSVIRTNLDAIFASLELSHSTWLITSLSPGSGEKMSKHVVRGGDIAGLLQRFAQLREKALAQRCRNIPIIVIHEAGLDGFWIDRVLKNEGIESHVVDPASVATSRRRRRAKTDKIDGEALVRTLLAYKRGEPRVCAMVKAPTPEEEDHRRLSRERKVLITERVKHVNRIKGLLFSQGVFGYEPLRRDRRRRLDELRTGDGRPLPKHLKAQISRELDRLELLLEQIKAVETERDALLAAQQIAAPPSAAMLLAIKGIGPEFAAILWSEGLFRHFDNRRQIASYAGLAPTPWKSGSIDREQGVSKAGNPRLRTTLIQLAWLWLRHQPQSALALWFKERVVRNRGHLKKAAIVALARKLLVALWKYVAAGVVIEGAIMKAA

SEQ ID NO: 158861 - protein, 325 aa, unidentified
MESKKKYCGIDVSSSKLDYCYSDDMGKIIQCEVSNTKSGYGKLVKIVGSDRQFIMESTGVYHLGLMFYLYAHNIGYSVINALQIKRYIQMHLERNKSDRKDAKRIYEYGVDRSPTSSDMPDKYYFTCRLLNNSIHDLTKEITRLSNQLHAMKLSPFDTKSVEKSYRSIMKHLREERIKLEISLQDFLEKWEGDKLKLISSIKGIGKRASAELLILTKGFSQVTNYRQLISYAGLSPVEYSSGSSIRGKSRICKQGGKQLRNILYMCSMTAMKTNRNCRHLYERLVASGKNKKLALIAVANKLLKQVYGVVKNGCVYQDDYVKKLV

SEQ ID NO: 158862 - protein, 355 aa, unidentified
MKQSQQSNKLSFDGQVFFIGIDVHKKSWTITIRLNGMQLKTFTMEPNAKQLQKFLKKNYPGGHYFSVYEAGFSGYWLHHQLTELGIKNIVVSPGDVPISNKEKSYKDDAIDSRKLARELENNSLKAIFVPTPKQSATRQISRLYALQSNENKKIRLRIKSFLNYLGVEIPFEVGSRWSNRLVNWLEKLELENEGDRYYLDQLIKNMKAKRKELLATLKLIRKNYADHQVIKRLRTIPGIGLITAFTYYAEIMDIRRFDNENKLASYVGLIPSLKSSGNRTRVRGLNHRQNKLLKFRIIESAWVAIKNDPALTSSYMSYIKRMPKQKAIIKIARKLLNRMRSVWINQKEYQIGRMI

SEQ ID NO: 158863 - protein, 352 aa, unidentified
MTWVGLDLHKRYITACAMSDAGVIVAEHRRLPADDVTLIGWLAALPGPVTVAMEATLYWAWLHERLTTAGYAAVAAHPYQVKLIWQARCKTDPIDARKLAELARTNLLPTVWVPDAEVLARRKLLRGRAYLVRLRMRMKNRLHGYLTAENCRCLVTDLYGKAGRAWLHAVVLPEITRVQVDLLSELIDAVDARVKRLDQRIRKTVARDAAAERLQTVPGIGPFGALLLLAEIGRIDRFASSHQLAAYAGLVPSTRSSGSKTSHGTVDGAGSPWLKWVLIEIVQTLKLAPGPIGMQYQKLLRSKGKAKATVAAARKLCCYLYWMLQNSWSYEEWLQQHEGWGVRPEQALVSVG

SEQ ID NO: 158864 - protein, 428 aa, unidentified
MNNTKEKRLSQLDERSFLVGVDIAKGFHVARAIDNRGIEIGKKIKFSNDIIGFKSFEFWYNNLMLKNKKNKIIVGMEPTGIYWFNLARYLIDKGIEVVTVNPMHVKKVKELDDNSQTKTDEKDALLISNLVKNARYSRPNLLDGVYAELRNAKKFRKILIKDITRKNNQIVNWLDRYFPETGKAYKSWDAKSLIMILKEYVFPVEIAKKTTEEIYRFLPPKSRRGVGKNKLKKLIEVSKESIGSTVGLVAARIEILSLLTDYERKNKELDHLDKTIKEMCKSLKETQLIAEIKGIGIATASAIVAELGDIRKYKSPSQIIKMAGLSLIEHSSGKYKGKTTISKRGRAGLRTSLYMAIISMLAHNNGFKQLYSYYTKRPKNQLKGKQAIIALIRKLLRIIHTIIVKDIHYDEEKMLSDIIHPEEFRLVS

SEQ ID NO: 158865 - protein, 363 aa, unidentified
MQYHNDTELSSLEETRCQFNGGKCVIKLGIDVHQEFYVVVEQVGGNNPKPPQRFGKGVFLDWAAKLKRQAAEVHAVYEACGFGFTLQRQLAALGIQCYVVCPQKLDERNKRVKTDSLDAKALCLKLDRFVEGNHDALALVRVPAEKEEQLRAIHRQREQLVKARKQLEAQGRSLMVNHAIEPVQQWWKRRAFAQLQVPQWMRTLLLNSQPILLVLEEKIRALTVQLQSAAAPNQPRGLGQMTSVVIDREIGNWHRFNNRRQVGSYTGLCPGEYSSGNTRLQSCVTKHGNPRLRAALVELAWRMVRFQPNYKPILKWRALLAKGGLASGAARKKAIVAVARQLAIDLWRFRTGRGTPEQLGLTI

SEQ ID NO: 158866 - protein, 384 aa, unidentified
MNKHSILFIGLDTHKEFNEVAYIEDHRGAQPVHFGRAPSSKIAVKKLVRHFESKYPDATLHFVYEAGPCGYWIYRLITSLGHCCYVVAPSLIPKKPGERVKTDKRDAIKLAKLLKTEDLTPIYVPEPEDEAVRDLSRAREVAMKDLKDAKYQLKALLLRNNINYAGTANWSLKHLRWLTELVLSHPAQQLVLQEFIQTISERMARLERLDNELTHHVHQWRYYPVVKAIQAMRGVRLLVAAGVIAELGDLSRFDHPRKLMSYLGLVPSEHSSGGKRHIGAITKCGNGRARRLLIEGAHTYRYAANISTDMQKRQEGLPKQIIDIAWKAQLRLCKRYKKLISKGKHYNLVVTAIAREMIAYIWAIAKEVVLTPVDPKLRLARVPA

SEQ ID NO: 158867 - protein, 317 aa, unidentified
MTKHITICAGIDTGKRKLDVALDGSTEPLQVDNTPEGHKALLSWLRQHRVKRIGIEASGGYEQPVVAELRRKRFVVVVFQPAQVRAYAKFHSLRAKNDKIDAALIAACTAAVRNIHAAPDPRLLPFAEQLTLIDQLGEDSARLKNRIESCRNARIKELWEEDIVRLEQRQKAEFKALVASIRKHPDLAKRLALINSVDGIGMPTAVAILVRMPEVGQITREQAVALAGLAPYDDDSGERIGVRHIEGGRKRLRRALYTASLAASFRWNQQLIDLYQRLIAAGKGHKRALVACARKMLIFANTVVARGTPWGDIRPAS

SEQ ID NO: 158868 - protein, 340 aa, unidentified
MTEITTIGLDLAKKVIQVHGADETGAAVLRKRLRRSEVLAFFTSLPRCLIGMEACATAHHWARELIAVGHEVRLMPPQYVKAYVKRNKNDRADAEAICEAVKRPSMRFVPVKTSEQQSALMMHRARDLLVRQRTMLVNALRGHLAELGLIQAQGLHRVAGLTAILMDDTDERVPRMARQVLKVIAGQIGELQGRIAALEAQILAWHKSNPVSQRLATIPGIGPIIATAIVATVTDPSMFHSGREFAAWLGLVPRQNSTGGRAKLGGISKRGDGYLRRLLVSGAHTVLLRSKTAQADPWLISLLGRKPRLVAAVAVANKTARVAWAIMNSGDTYRRVAAAA

SEQ ID NO: 158869 - protein, 406 aa, unidentified
MVIYMNSVGIDISKGRSTVAVMRPFGEVVISPFEVRHTDSELSELARRLKSLNGETRVVMEATGNYHAPVAKLLHDAGLYVSVVNAKLVHGYGNNDLRRVKTDRKDAVKLANYGLDRWLTLPRYVPEENTRLLLKNCYRQYRQYSKVQTVLKNNLISLLDMTFPNANRLFVSPARADGSEKWVDFVAEFWHCECVSERPLKSFVNKYWRWCRKHGYNFSEEKAHAIYDEASGHIGVMPKSETTKLLVEQAVSQLSATSAALAALKQEMQSLSSQLPEYPVVMDMFGVGPTLGPQLIAEIGDVRRFYSKKALVAYAGIDAPPNDSGDVIGRHKSMSKVGASSLRRTLFLIMSAYLQNSPPNEPVYQFMDRKRSEGKPYRVYMMASANKFLRIYYATVKAYLETLEQF

SEQ ID NO: 158870 - protein, 412 aa, unidentified
MQDILTCAMGLDVHRDIIVACQVKGAVDAEPEAETRTFSTLIPEMQKLRDWVIESECRNIAMESTGIYWQPIYEMLESCFDGEISILVVNARHMKNVPGRKTDMKDAQWIATLLRAGLLKGSYIPDKAFRELRHLTRYRKSVVHDITAQKNRIDKFLQSSGFRFTAFLSDTFGASGRNIIRHLIEHGSIDREALDKCLKTKTRNRIDEILVALNGSLSEHQRRFLNMVFRHLEDLEAHKHTVEDEITEEVLKHTDALNLLCSIPGIDVTAAAAIIAEIGTDMSSFPDSQHICSWAGLSPGNNESAGKRKSVHINKGNPYLKSMLCEVAWIMASHRKLYLSGWYWKVKQRKGAKRATIALARKILSIIYTMLKTGTPYNEECFEQRRLRCERKRANRLVNELQKLGYVVVAPD

SEQ ID NO: 158871 - protein, 313 aa, unidentified
MTKLNTAFSGFIGCDVGKAEIVIHDSRDGTTTAIANSAKPLAAFAATLKTTCLVVCEATGGYETVLLNAMLKAKIPAHRADARKVKAFIRSFGIRGKTDAIDARALAQYGRERADKLRLWEKVEVAQGQLQSLVLGRDDLVRQRVANKNRLGAPGNAVIKPSLTAVIACLGKQITKIEAQIKLLIETNPKLARNAEILTSIHGVGPVVANALQALMPELGTLGRREVAALAGVAPHPNQSGGRDKYRKTIPGRPIRSILFMAALSASQSQSGLGDFYRKLLAHGKTKMVAMVALMRKIIVIANAKLRDADLPA

SEQ ID NO: 158872 - protein, 410 aa, unidentified
MKVLFLGDDWAEAHHDIELQDGDGKVLVRRRLLEGVAGIADLHSLVGDHLDDEGPDQVLVGIETDRGPWVQALVAAGYQVWAINPVQAARYRERHTSSGAKSDPGDAHVLAEIVRLDRAHHRPVAGDTPVAEHVKVAARAHQTMIWTRQRNTAMTRSMLREYYPAALAAFDDLASRDALAVLAAAPSPEQGRRLTAARVEALLRKAGRQRYVQSRAAEIVAALRTEQLPARPGVVDAYAAAVAALVAVTTEMVRQIAALEDHVRAGFGRHPDVEIYLSQPGLGMILGARVLAEFGDDANRYADSRARKNYSGMAPVTRASGTKRVVLARHARNQRLADALYQQAFAALTGSPGARAYYDRQRARGVTHHQALRALANRLVGILHGCLTHQTTYDETTAWAAHPAETRAAA

SEQ ID NO: 158873 - protein, 330 aa, unidentified
MHFIGCDVSKLTLDLAGGDPHRDTRMLIHTVPNSQAGWRQLTNWLEQQWPGPRSEIGIVMEATGVYHTLAARYLHAAGFRVMVCNPGRAADYSRSQNRMNKSDALDARSLQRYGARLEQIHWFQPNSPEIEQLRALLALLWQLEKDIRRWHNRLEKARFEPAGDAVCDAIKRQLRNLERELKRTQAGIDTLIASSEALTRDQQLMCSIQGIGPKTSQSLLPLLHQGRFTSARQVAAFIGLTPCHRQSGTSLHPPGRLSGRGDARLRAKLYLPALTAIKWNPALGAFYGTLIERGKTPKQAITAVMRKLVHLCYGVIKNQTPYRADYGCLP

SEQ ID NO: 158874 - protein, 341 aa, unidentified
MNKVAIAAIDLGKHSFHLHAQDDRGHELYRKKFNRAALTQHLANLEPCTVVMEACGGAHFMAQEVAKLGHTPKLIAPHLVRPYVKSNKNDFADAEAICEAATRPTMRFVPPKTQAQQVLAMLNSTRDAFIKDRTATVNRIHAALLEVGVSLAPGFKSIKELPARLETSPLSEPFKKILMKLHEHFNHLDEQVKALDKDVECQAAEDDLAARLMTMPCVGPITSSVLAAELGDGKQFKCGRGYSASIGLVPKQHSTGGKTVLLGISKRGDRNQRRLLVQCARVYLMQLERQKGWLADWVRQLLAHHHSNHVVCALANKLARIAWAIAAHHTEFDAGPSAMNA

SEQ ID NO: 158875 - protein, 443 aa, unidentified
MSARTGTGQHRGGSDSMGVCTMEDERNWFVGVDWASETHHVRVSDARGRKLGARAFAHSGEGLAAMAAWILAVTGAAPEAVFVAIEVPHGPVVESLMERGFRVHAINPKQLDRFRDRFSPAGAKDDSRDAEVLGDALRTDPRCFRALQPLDPVVVELREASRMAEDLKQERNRLGNRVRELLWRFYPQMLGLTDDVAAPWFLDLWRLIPIPEKATRVREVTVDRLLKRHRIRRLSAADVLEALRRPAILLAPGTVSAAVSHREAIAKRLDLVNRQMLAVDERLDRLTQSLAGAQERAGGQRPEPCDVTILRSLPGVGRIVLATLLAEAFEALQRRDDRALRCLAGVAPVTKRSGKSRIVLMRQAAHVRLRNAVYHWARVAVQHDPRSQAKYAALRARGHGHGRALRSVADRLIGVACAMLEAKTIFDPNLASQRAPNLGKPTC

SEQ ID NO: 158876 - protein, 450 aa, unidentified
MKNSAAKKIRQVPAGYLVVGVDPHKKRHAAVAITQDFAVHGKFKFNNSKEGFMMTLERVRVEMTKTGSRGVIFAIETGGHYWRNLAYFLDEVGIPFRFINQFTLKRRREGKDLNRRKNDYRDSEVAAQLLCTGEFTETQLQQGVYAELRAAYNAYRRLVKERTRIVNLVKSLLDGLFPEFTQVFKDPCGLTALSVLSTCPIPGVIAGMTEKEFASTIKASHHGRLMRKKLCALRYAAETSIGVKAGAQPVSTELFFLVEKLQLIRCHIRSIDGTLVKLVDRTEEGKYLLSIIGVNYISVAGLLAELGSFRCYRSAKQLIKMAGSNPTESESGGKRRSHTPMSRQGRPVLRYCAWTAVIPMLRFNPDFRAWAKELRERPVHKNPLAKREVVGAALNRLLRLAFTLVRKQTFYQTPHPIQVTSYELVTTYQVGRETPPFLLGVPIISGQTRA

SEQ ID NO: 158877 - protein, 312 aa, unidentified
MMDAVYVGIDVSKDRLDVHALPQGAAFMVARNGEGVAQLVERLKALSPALIALEATGGFETVVAAALAAASLPIVVVNPAQVRHFAQALGRRAKTDPLDAAVIARFAQATQPAARPLPDEMTQLLADLVARRRQIVEMMAAEGQRERRADKRLKKSIARLRKALEKELAELDGEIDDYMRGTPAWAEKQDLLASVPGVGPVIARTLIAELPELGALDRRRIAALAGLAPYTRQSGQWRGKSFIGGGRKTVRSMLFLGAMVAARHNPVLKAFRDKLVDSGKPKIVALIAVARKLLTILNAIIRDAKPWRAQNA

SEQ ID NO: 158878 - protein, 350 aa, unidentified
MEHHAGLDVSLKETSVCIVDGAGKIIRETRVASEPEALVGYFSSLEIKVVRIGLEAGPLSQWLHAALTQAGFEVVLLETRHVKAALSAMTVKTDRRDARGIAQLLRMGWYRPVHCKTLPSQEVRAIITARKTLLGKLIDIELSMRGILRGFGLKIGSVTRKSFEIRVRELMAGQATLTTIMEGMLNARATLVAEVAKLHKKLLEIARADEVCRRLMTVPGVGALTALTFKTAIDDPTRIAKSRDVGPLFGLTPGRYQSGETDIIGKITKVGDVMVRTALFEAATVMLTRTTKSSRLKAWALDLAKRRGTKRAIVALARKLGVVLHRIWVDGSTFRCAKEGAAMPALITAK

SEQ ID NO: 158879 - protein, 341 aa, unidentified
MKNKSFIGIDISKNVIDVSIFCEETPIKDFSHDVFNNSRKGFGEMCTWLKKNHVVLSNSLFGMEFTGSYSMELEKFLNTRNYQFCMLSTHVVKHYPMGPKDKSDKIDSAKIADFLYRYNGTECVKPYNMPDKTMQRLKALMNERKFLVEQRTCFMNRRQLCITKEDAQLYDGYIKKFSRDIENIELEEQKLLATDDSLLSTYKNLLTIPGIGFVNTINVIVITRNFTAFETARQYASYVGVAPHFRTSGTSVKWRPRPSARCDGQAKADLSMAATVVVQYDAELQSFYNRKLGGKQDSDTKRKALNAVKFKLVLRMFAIGKQNRKWEPLDSKSSNEKLAIS

SEQ ID NO: 158880 - protein, 336 aa, unidentified
MLYVGVDLHRKASQVAVVDEQGKLIFNRHVPSQREELLRIFGEAGPVESMQVAYEATYGWGWFADLLEDVGIPAHMAHPRANKAIASARVKNDAVDAKTLAQLLRTGLLPESWIAPPEIREARRLVRMRTAMVRIRSRLKNQIHALLADRGLHPEGSDIFAGDLTRMSKQLPAVTKQRAEANLRLIEELDKEVDLADSHIHKLFARDEGVRRLLPIPGVGIITAAIVVAEVGDIARFPTARQFSSWCGLTPTEHSSADNIRRGHISKQGSRWLRWVLVEAACHAYRNRELSSFEAGIASRRGDKIARVALARRIATLCYHALRSPQGCRAFPARTR

SEQ ID NO: 158881 - protein, 310 aa, unidentified
MGDSIGVDVSKHHLDWTLGGDGNVERIPNTPAGVRRVVAKFRSLEAALIVVESTGGYERGLTEALSEAGLPVVLVNPWRVRRFGEGLGVLAKTDPLDARILALYGERAQPERRPLPGPRQRQMADLVRRRRQLIAMIVAEKSRLDTASAVIRRDIQALVKLLERRVVKIDERIDAAIAADPEKAENCERLQSAPSVGPGVARALIVDLPELGALSRKQITSLVGLAPFAKDSGRKTGQRRIRAGRSGPRTALYLAAMNGARFNPVLKAMYERLTAAGKPPKVAFIALARKLLTILNAMVRDGTTWKQAAA

SEQ ID NO: 158882 - protein, 337 aa, unidentified
MSYLGVDLHTNSFTVCRRTKHGKDSIRTFQIIRIADFRKTLRKRDLLAVEATGNTAWFVSQVRDRVKKVTVVNPFQFEVIRRSVKKTDRNDSKTLAFFLSKDMLPEARMKTKENAQLHSLATTRDKLVKQRTALINKIHNVLNSYGIKFKKESLGSEKGLESVWAYEWDVIVKIELEVLVEQIRSLNKSIKTLDKEMTDHGKKLKGHKSLTSIKGIAGRSATMLLTVIGDVNDFADENKLAAYFGIVPRVSDSNETVRHGRITKHGSKLGRTTLVQCTLVAKRYSPYLNRYYERIKSHRGSGKAIIAIARKFLGIIYNTLKNDWVFEDFPNFVIANS

SEQ ID NO: 158883 - protein, 324 aa, unidentified
MIDAILGIDVSKNTLDVSISRCTKVRTKSFANSSDGWHHLLDWLTTRKIQRVHACLESTGRYSLGIACALYEAGHVVSIINPAQIRDFVRTKLGRNKTDGIDASHIREYCELFKPSPWAPPSEAHRRLGELQAIRAGIIAGLTEWKNRKNSGIVDAGAQALADATISHFTSQLGAVDKAIALTIDNDSDLRSKRDLLLSISGVGDTLAGVVLAELPGPDVLRSSGEVIAYAGLNPRQHQSGTSVDRATRISKIGNAVLRAALYMPALSAMRYNPAIVALVTRLKSRGRLKPKQIVVAAMRKLLVLCFGVLKTGKPFDPAIAMGC

SEQ ID NO: 158884 - protein, 412 aa, unidentified
MNQDKLYVGIDVSSKNNVCYLMYSDGSKHSSFSVPNNRNGAKIIIDRVTSVLLLQDIPQVVIGMEATSVYGDNLMRFLRESGSLGRFERNLHMLNPKQVKKFRDAYSDLPKNDHVDSYVIADHLRFGRINKEVYMDDYKYQALKMYTRARHQLVQELTREKQRFLNTVFISFSGLTQEKIFSNKFGATSMALIEEFSSLDELAYMSTDELVDYIRKKGKNHFDDPEEIAEAVQRAAKNSYRPPQVIADAAKQMLAISMNTIRLLQKQIKEYDKAIEKMLEAFPQTLTSVKGIGNIYAAGIIAEIGDINRFPSQASLAKYAGLVWTQHQSSDFEAEDKRMIQGGNHHLKYYLCEAANALRRCDPEFKRFYSLKYKEANKHNHKRALALTARKLVRLVYTLLKTNRLYIPPEEY

SEQ ID NO: 158885 - protein, 327 aa, unidentified
MDATSVGADVSQDWLDVHVLPAGQRFRVGNDDAGIAELRERLSRLSPERIALEATGGLERLAVAAMAAAGLPVVVVNSAQVRAFADALGTRAKTDPIDAAVIAAFAAAVRPQLRPLPAATTRALADLVARRRHIVQMIMAEQNRLRTASSRQALKSIRRLLAALKRELEAIDADMDGHIRKSPLWQVSEKLLISMPGMGPTVARILLAEPPELGSLDRRQIAALAGLAPFTRHWGKLRGKSFAGRSSVCAALFMIALAAIRNNPHPQGTPRPPRPRRQGQDRRRRRHYAQTAHKPQRHDPGPKTLANRLTAKKVALASDQPMISGPG

SEQ ID NO: 158886 - protein, 347 aa, unidentified
MTTVTIGMDLGDRKHQICVLDEAGDKVAQVSVDNTATPLRKYFGQYAGALVAMETGTHSPWVSRLLASLGCRVLVGNSRKLRAIWNSPNKSDLHDAEMLARIARFDPQLLYPVQHRSEQAHADLERIKARDALVRCRRSLINHIRGAVKAFGVRLPACSAESFARRVPECVPRVLAEAVTPLLETIQRLTEQIRDYDRQVVALSRQRYAESQRLQQVGGVGPLTSVAYVLTLEEPNRFEKSRSVGAYVGLAPKRDQSGQTDKQLHISRAGNRYLRQLLVTSSHYILGPFGPDSDLRRYGLRIAERGGKNAKKRAVVAVARKLSVLLHRLWKTGADYVPLRTAAASKG

SEQ ID NO: 158887 - protein, 316 aa, unidentified
MTTTPVFVGIDVSKDRLDVALRPTSDRWALANDAPGVATLVARLQGLAPTLIVLEATGGLAVPLTGALAAAGLPVVVVNPRQVRDFAKATGKLAKTDALDAAVLAQFAEAVRPALRPLPDAATQALSALLARRRQLIEMLTAEKNRLGSALPPVRPGIRAHIRWLERRLADLDAALAQAIRESPVWREKDDLLQSVPGVGPVLATTLLASLPELGTLTRQQIAALVGVAPLNRDSGAWRGKRRVWGGRAPVRAALYMSALVATRYNPVLRAFYQRLCAAGKAKKVALTACMRKLLTILNAMLKYRTPWENNFAHAS

SEQ ID NO: 158888 - protein, 389 aa, unidentified
MTDYDVVVGVDVGKSFHWLHATDQAGGTIRSHRIDQDESQLDAVFTALVVDHSVLVVVDQPNNIGALTVACALRAGCDVGYLPSLAMRRAADLLGGDAKTDRRDAEVIAWAGRSLSEVLRPVTSNPDREQLLALVAFDEECRDERTRHMNRLHSLLAEVNPGFEKALGTQVGSPFVLALLQRFGGPWGMRRAGRARIKRWVTTQQRVPHTLLDAVVAAAWSMEHQPAGADMHEQLAIPAAAARVAALTKTRADNEDRINTMLATNPTYQALLTMPGVGPKTAGALVTMVDITLFADHEKLASYAGVAARTRQSGTSVKSDTKSRHGNKTLKNTLFMSAFASLQRDPKALAFYQAKRAAGKHHNTAILALANKRLKIMYAIMRDNTPYRT

SEQ ID NO: 158889 - protein, 433 aa, unidentified
MPTEFAAMIAIDWADQKHAWAMQTATSKVETGAIDHTPEAIDVWAAELRMRFGGQSIAVALEQSRGSLVFMLTKYDHLVIFPVHPTTLVNYRKSFRPSGAKDDPSDARLLLDILMLHRDKLRRFNPDTPETRTLQFLVEERRKFVHEKTRYSNRLTAQLKMYFPQILDWFDEIGSNIAAEFLERWPSLEKLQRARPSTIERFFIDHNSRDPDRIKERLEQIRKAVPATTDLAVATSSSTAVLGWAALLKQVLVAITAYDQQIDDLAQAHPDYALVKSFPGAGPAMAPRLIAAMGSQRERYQSAAEIQRYSGIAPVVASSGKLRWVHWRWACPKFLRQTFHEWALHSIAYSDWAREYYEQQRAKGKRRNTAIRALAFKWIRILFRCWKDGTSYDEAAYQRCLAARRPDQQPITPTVELQWKNVAGFSKISLAGA

SEQ ID NO: 158890 - protein, 373 aa, unidentified
MPRYSTAFEMDVHLRSTTVCALDAETGEAVARRFRGNPWGEVAEWMSGFPGPSLAAYESGYLGFTPQRELSALGVDCVVAAVSKVPRSAADFSSKNDRNDAARMAKAILSHDISPVWVPSPEIEGLRDLAGAHDAATARLAAAKQRLLAFLARRGYAYGGTTPAGNPRKYWTYGFLRWLDKVRPADDGGIRALAALRNEVEAAAETRDDLLAEYRAAVAAGPLSAEVEALQSIKGCGFALAAAFASEVGDFSRFRSGRQVTSYFGLAPKQRSSADSVRLGGISGAGNALVRRLAVEGSWSYIQASHQPKLMPKGSGVPLEVRMHGRKGSERLLRRRKEMLARGMPQAKANAATAAELVRWLWALGAMCREATE

SEQ ID NO: 158891 - protein, 371 aa, unidentified
MSRIAEQALPVTGGVDTHADMHVAAVVDQVGRVLGTQAFPADAAGYRAALAWMRAHGELVKAGVEGTGSYGAGLACYLAACGIEVAEVIRPNRQARRRRGKSDAADAAAAALAALNGEASGMPKSHDGAAESIRMLRVARGGAVKARTQAGNQLRDLILTAPEQVRQQLAGLSCQQQVDAAARFRPGDLAVPTKGAKAAMATLAHRHQELTAEITRLDAALAGLVTRAAPAGFLAKQGVATQVAATLLATTGDNPGRVRREASFAALCGASPVDASSGKQLRHRLNRGGDRQANSALWTIAMTRLAHDPRTKAYAARRTTEGKTKKEIIRCLKRYIAREACKALCRPPTPSPPGGTSVPQIKQDLSASVLT

SEQ ID NO: 158892 - protein, 356 aa, unidentified
MSNITRVGVDLAKNLIQVHAVDAAGKVVTNRALKREKFLVWCAALPAGCLVAMEACSGAHHWCRKLRESGLDARMIPAQFVAPYRIQGKSGKNDANDAAAVCEAASRPHMNFVPPKTLAQQGMLCVHRLREALKEERTACINRIRGLLAEFGVVLPQTPAILRQNLNEVLEDASNDLAGMARLVLQRAQEHWRELDKHIQWCDERIAAHQKDDEQVQRAAELKGVGVITASAVVATVGDFKQFKNGAQFGAWLGLTPKQNSSGGKTSLGCITKRGSSYLRTLLIQGAKAAVLTSKHNDDPISQWVQRLRERCGWQKAVVALANKNARILWAVMTGNKRYDAHHVSVPPTGAMPATA

SEQ ID NO: 158893 - protein, 314 aa, unidentified
MTERFVGIDVAKDQLDIAVRPSGDRWVVANDLTGVAELVDRLTGLAPRLIVLEATGGYEWPALAALAARGLPVVAVNPRQVRDFGKAVGRLAKTDRLDAEILALFAERVQPAVRPLPDEATQQLQAWLARRRQLVEMITAEENRQQQAPPAIRRQIERHVQWLREQLAELERQLAERVRQSPVWREAESLLRSVPGVGPVLARTLLGDLPELGQLDRRQIAALAGLAPLNRDSGTRRGRRAVWGGRAPVRGALYMASLVATRHNPVIGAFYHRLLAAGKLKKVALTACMRKLLTILNAMMKHRTAWKPAPAVGA

SEQ ID NO: 158894 - protein, 421 aa, unidentified
MRGLRGTRVRAVKEGTLIATVDIGATTNTGYCTSVDGRDMKVFKFGNTKEGFEKFSHMIVAAQNRFKCSEVIMGYESTGPYAEPLVHYLMSKPVSIVQVNPMHTKRLKEVNDNSPGKTDDKDPRVIADIIRLGRALSVVVPEGDPAYLRRLNNARERHVGERTALLNQMQQLVFLIFPEFKTVIKQMIGKTVRFILKNYTTPERIGALDKNVLGEEMRKKSWGRLGIKEAELLITAAQQTVGIKEGVAGIVLDIRHIIAQLEVVERFISEIEGEMVVTLGRIPCSARLLSIKGFGVVSAAGLIGEVGDFSKFRTQSEIIKLTGLDLYEVSSGKRKGEKRITKRGRSLMRKILYFTAIQMIRKNGIMYEYYERLTGRGVEKIRALVAVMRKLLRIIHAILRDDRDYVGQYCAPKRRVIKRAA

SEQ ID NO: 158895 - protein, 347 aa, unidentified
MSNTHVATIGIDLGKNIFHVVGLDATGAIALRKKRSRNQLEQSLANISPCLIGMEACAGAHHLGRKLEKLGHKVRLLPAQYVKPYLKGHKNDFRDAEAIAEAVQRPTMRFVPLKSAEQLDLQALHRARSRLVTQRTAVINQIRGFLLERGLPVRQGAAALRLVLPRLLSMLTDDLSPRIVRLIHDLAEDWRYLDWRVACITKEIDELADQDAHCRRLMSAPGVGPIVSSAMVAAIGTGDAFAKGRDFAAWLGLVPKQISTGDRTILGRISRRGNRYLRTLFIQGARSVLLRRQSWPKHGFGAWLEAASKRLHSNVLVVALAAKLARMTWSMLAKGRDYDANFLAHAA

SEQ ID NO: 158896 - protein, 354 aa, unidentified
MIIIGVDFHPEFQQIALLNTTTGEVEEKRLAHPEEAEKYYRALASAGETVRIGMEASGHARWFERLVAELQFDLWIGDAAEIRAKRGRKQKTDRQDAQHILKLMLKDDFPKIWVPNWENRDLRQLLWHRHRMVQARTRVMNQLQAVALNEGLHCKKKLWRERGRQQLESFALAPWASRRRRDLLELLDRLNPSIADLTQAIEREVENYPAAQRLRTHPGVGVLTSLAFVLILGDAERFRCGKQVASYLGLVPLEDSSGNRRRLGHITKQGSSILRFLLVEAAQVTVRSLPEWRSKYFHLVLRRGRKIAKVAMARRLAVQLFWMMRKEWNYEQLKKFGSHAGQPGNRHGVQSNTE

SEQ ID NO: 158897 - protein, 362 aa, unidentified
MRIIGCDLHARQQTLAMLDTTTGEVVAMILTHEGDNVREFYSALPRPVRVGIEATGSMQWFVNLMEELGMECLVGHPAQIRAAEPRKQKHDRRDADLILKLLMENRFPAIWLPSKELQDLRSLLRHRHQWVRMRTRIQNALQSIALANGLRRGPALWSHDGQSRIASLSLAPHTAYRRSELQAMYKQFEAEIEKLNQRVEQQASQRPGARLLMTHPGVGPITALATEVFLGNPARFADSKALASYVGMIPREYSSGGRQRLGGLSKQGNPLLRFLWGEAGAHAARKDPELQRFYRRKLVQKGLGKASVAVARKLGIRLWIMLRDHIEYHEFCRHGQKQQKSSGACAGMPETPYGARSHRPVD

SEQ ID NO: 158898 - protein, 388 aa, unidentified
MQDVTDQSAALTTIRADLRAIFISLELSRSTWLVTSLSPGGGEKMSKHSVSAGDIAALLARFSELRKKACARTGESFPIVVIQEAGLDGFWIHRVLRSEGIESHVVDAASIATPRRRRRAKTDRIDGETLLRALLAHQRGEPRVCSMVRAPTPEDEDRRRICRERKVLIMERVQHVNRIKGLLFAQGASGYEPLRRDRRARLDTLQTGDGRRLPQHLKAQVCRELDRLELLLEQIKAVEDERDALLSAEQAKVSAPPPMLLDVHGIGPEFASVLWCEGLSRHFDNRRQVAAYAGLAPTPWQSGSINREQGISQSGNPRLRTTMIQLAWLWIRHQPGSALTLWFKDRMERSSGRRRKTTIVALARKLLVALWKYVSAGVVIEGAVIRPA

SEQ ID NO: 158899 - protein, 359 aa, unidentified
MGLTGTTVRTHHHQKEGVHMMNVTRIGIDLAKQVFQVHGVDERGHTVLRRRISRSQVRAVLAQLPPCLVGLEACGSAHHWAREMRALGHDVRLMAPQFVTPYRKNDKNDGNDAEAICEAVGRPHMRFVPVKDVGQQAVLTVHRARQLLIAERTALVNQSRGLLAEFGLIVPVGIGALRRLWPSLLEAPEVPALAREVFTDLADRLRAVDERIAAYDHRVVQLARQTEPAQRLMQVPGVGPVTATALIATIGNAHAFRNGRQLAAWLGLVPRQHSSGGTRRLGRITKRGDVYLRTLLIHGARAVMRHLARRTDATSRWVTALHARRGFNKAVVALAAKQARILWALLATGRTYQPAVACP

SEQ ID NO: 158900 - protein, 327 aa, unidentified
MAHEPSEPSSGPQSVVVGIDVSKGRLDCCIDPPQRALAVGNDAVGIAALLEELRALDVRLVLIEATGRHHRRVAAELLDAKIPVAVVNPQRVREFARALGKLEKSDAIDAGVLAAFARASDQHRHCEKAAKNQAQLDDLVSRRRALVQVRVAEKNRSSDPDLPELARRQGHKLLRLVEQQIQDLDRAIAGLIERDDDWRNKNSLITSVPGVGAITAQQLIADLPELGTLSRGRIAKLVGLAPLNCDSGKHRGTRRIAGGRGVVRVALYMATLSAMRFCDRFRDHAQRLRKAGKPFKVIITACMRKLLITLNQMLKTNTSFQASPVPV

SEQ ID NO: 158901 - protein, 338 aa, unidentified
MQETMIQIKTADKLFIGMDLHKNTSTFVVKNKDGKLINFAKVLTDKNEVTRYINSIRRNNADKGLSLVVEPVSQWYYYADLIENLGVDVHLAHPMEVKAIAHARIKTDKIDADVLADLLRTNFLPEAYFAPAEVRGWKEQCRFRASLINLRTQTKNKIHAILFKHSLKHNFSDLFGKSGRRWLAALDLKEPFKNNLNKYLSLVDYLTEQIVLAEEIITNTVINCPQAKLLISIPGISYCSALTIMAEIGEIDRFISVKHLQSYAGLIPSTYNSGDKQIHGRITKRGSKWLRWIMIEAAYHQMNCKRIPGFGAYYNTLKKRKGSKTAAVATARKLLAVV

SEQ ID NO: 158902 - protein, 358 aa, unidentified
MQSNTLNFKGQKIFIGIDVHLKSWNVSIFTSNVKMKPFSQSPDAVALRTHLDRNFPGGDYFSAYESGFCGFSVHYDLLRCGIKNIVFNAADITDSHKERARKADSVDSAKIARNLRDGNLTPIYVPSQEDLSDRQLLRTRRSLVKNQSQTKIRIKSFLNFYGIKCPLSLECNGTHWSQRFINWVKYEFGNMADSQRKSGMFLLRTLEFQHAEVLSATRELRDLMRSPKYEKNMRLLTSVPGVGLIAAATFLLEIGDISRFSNSDHLASFIGLVPDTRSSGEKDAKIGITNRSNRYVREALIEGAWRAIRKDPALTLAYEELRKRMEPNKAIIRIARKLANRIMCVLRTQEPYVPAVIK

SEQ ID NO: 158903 - protein, 308 aa, unidentified
MYFSHYIGVDISKASLDAAIYPAMDKKSDFIHIENSPKGLREMMSWLKHRGIKSKELVICAEHTGAYTNQLIDFTHKKGIALSLNSPLDIKRSMGIVRGKNDVVDAARIAEYAYTKREKLQLYEKPGESIMTLQYLLTERRQYMRQRTALLNFKSALVEYETSAARSRNETAINSLSKLIKKTEEQMLSIVYEDPELKRSYELVSSVMGIGLINALNTIVYTNNFHSFDSPRKYACYIGVAPFDHTSGTSVRGKTQVSKICRTQQKSELSMAARSAIIHDPGLRKYYQRKMKEKGGGREMHGVVLNAV

SEQ ID NO: 158904 - protein, 483 aa, unidentified
MDTIAHIVGVIRQMGVVMMFVNGELQARFMGRIRGLDPQRCLVVPVDVGKASAVALVADHYGEILVPPFEFALTETGFAVLVAAVGRARVERDPAILRIGVEAAGHYHRTLVARLQAAGLEVVELNPRAVKDARGQQLLRTLKNDARDCGAMAELLIRGSGRPPQCRDEALAAQAAWVAHRRRKVAAQVVLGNQIHGQLDLIFPGLTGCFAHGLDAKTLRVLIRDLPDPDRVRRLGVDGVLRFVRRRGVHMTRPKAQQIVQAAHVALRLFSTERRAPLAVLAADWALFEALDAQICEATAQLAALLPNTPAGVLLGIPGVGVPNASSYRAAIRDTNRYRAAAAAYRASGLVPMSYESAGRARPRTGISREGSVELRRAIIDLGRGVGLHHPDFIAYRRELLARGKPPLVALIAVGHRAHRLAFAMLRSQRSFDADRWTRAVAGHRHPTDEQARHGDTPVVGGPPARRDLPAQHTLTHAEVSSN

SEQ ID NO: 158905 - protein, 347 aa, unidentified
MALATVSVLGVDLGKNVCSVVGLDGSGKVVMRRRVRRETLVGLAEKLPPCMVAMEACCGAHHLGRVFAAHGHDVRLMSPEYVRPYIKAQKNDDRDAEGIAEAATRPTMRFVDLKSQDQLDVQTLHRSRDRLVGERTALINQLRAILLERGMVVPKGRRNLEQFLMVLMDEQGGAGLSPRMILLVADARMQWAELDRRIAAFDAEFVRWTKENEDARRLAAIPGVGPIVASALVAAVGHAESFDHGRDLAAWLGLVPRQFTTGGKPKLLGISKRGNRYLRKQLIHGARAALPYVAEKDSPLGRWAKALMSRAPRNVAIVALANKLARIAWAVLRRGERFVAAGVSMAA

SEQ ID NO: 158906 - protein, 324 aa, unidentified
MNYAALDLHERTVQCVLKDQDGRIVKESKTVKDEGRILAFLDGTDASVVMESGRNHQHIYDVLKERGYDVTVAHPLMVKAIAYAKVKTDRVDARVLADLLRADMIPESYVPGRDIREIRDLVRRRHYMVKLRTMQKNKVHAELATRWLKYEGDPFTEDGRKYLRSLAIDAVNDYLETIEFLNRKIHQLDEKVRRVVESDKYAKLLMTVPGISYYSALLISSEIADIDRFPDHEHLCSYAKLSPGVRQSGETQHTSKSMGNSMMNWIMIQCTRIHVRRYDSAITRFYQQVSKRRGEKVAIVAAARKLMRAIYIMLKEEQAFRLDG

SEQ ID NO: 158907 - protein, 344 aa, unidentified
MNISRVGVDIAKSVFHVHGVDRHEQPQWRGKYTRAKWLDAVCRRVPQGAIIGMEACATAHYWARQLQARGYQVKLVAAQFVKPYVKTNKNDRADAEAICEALGRPTMRFVAIKSVEQQDAQATHRIREELISQRTAKANQIRGLVGEYGLIAPTGIQQLRRALPLWLEDASNGLSDHFRRLLAELANDLRYLDDRVEQLTTAIEKHANTDPVARRLMTLRGIGPITASALAGVLGDGTIYQRGRDFAASLGLTPRQHSTGGRERLLGISKRGNGYLRKLLVHGARSVLRYAVTQEDGLSQWIKRLAMRKHRNVAIVALANKTARMAWAITRHQVPYDPELAAAT

SEQ ID NO: 158908 - protein, 343 aa, unidentified
MECYVGLDVSLKQTSICVVDQTGAVVREGVVDSDPEAISVYVRSKALNAVRIGLETGPTSTWLWTELKRLGLPVICIDARHAKAVLKMQINKSDRNDAIGIARIMQTGWFKEVHVKDIDSHSVRALLASRALLVKIKRDLENHVRGLLKNLGLVIGRAKFNVFAVRAEELIEGRPELVVAIRPLLEARSAVEQQVSELDRKVMKLVRRDAQVRRFMTVPGVGPITALAFKATIDDPARFARSRSVGAYVGLTSRRHASGEVDWTGRISKCGDAMLRSYLFEAAGVLLTRVPKWSAVKAWGVKLAKRNGLRKAKVAVARKLAVILHRMWIDGTEFNWSKQEIAA

SEQ ID NO: 158909 - protein, 433 aa, unidentified
MSLNRLQVGIDFSQKRADFCLLFPDGQPLVAHQAFPNSRPGYQQARQLLLDNLRAQSFDGLDVSGEATSYYWLPYFWQMAHDRELSACDLSLFLLNPRQVFWFKKSLPPDDKTDNVDPFYIAERTRTRRPPSSWDPQDEWMPLRFYTRLRFHLAQDLTREKNYYLIYLFLMHNTYQRIKPFSNTFGVTSQQVLGAELSLAELVALPENDLAEKLEVWSGGTLDDPLETAQKLHQVAAESFALSEPLALPVQRILDLTLEHINFIEKQIQQVEQWIAAEVDNRHPEVRFLDSVPGVGLVLAAGITAEIGDLERFFRTKKWNKRHKCYRARTLREVEDAVAKLAGLWWPQNSSGDFVSENRHLAKTGNRYLRYYLTQAANGMRRQIPAYVSFYGSKFREATRFKHKRALVLTARKSIGLFVGLLHRKEAYCPQEV

SEQ ID NO: 158910 - protein, 349 aa, unidentified
MRFYNGQHRYWCGIDLHARTMYVCILDAHGQTLVHKNLKATPEAFLEAVDPYREGLVVAVECIYTWYWLADLCAKEEIAFVLGHALYMKAIHGGKAKNDRVDALKIATLLRGGLLPQAYAYPAGMRATRDLLRRRLHLVRKRGQLLAHIQMTAQQYNLPPLGKRIAYPANREGVAEHFPDRSVRRSIDVDLALLERYDELLRDLELDLVRQAKQHDPQAFQLLRSIPGVGKVLALTILYEIHDVHRFDRVQEFASYARLVKCAKESAGKKHGTSGAKMGNVHLKWAFSEAAVMFVRHSTEGKKALARLEKRFGKGKALSVLAHKLGRAVYFMLRRGKAFDGERLLAAMN

SEQ ID NO: 158911 - protein, 415 aa, unidentified
MEVEWFVGIDWATTEHVVCLLDARGKVIGERAFAHTGEGIAALCSWLFDKTGATTPAQIHVAIEVPRGAVVETLLERGLSVYSINPKQLDRFRDRFSVAGAKDDRLDAYVLANSLRTDRERFHVLRIDEPVIIQLRAWSRIAEELSDERVRLMNRFREELLRYYPQFLEVADDIGRDWFLALWELIPTPAKAKRINELKIADLLLKRRVRSKNASEILAKLREEPLTVAPGSTEAAVAHITSILPRLRLLNELIKTAETKLDELIELLQSEKEKKNEQSDATILLSWPGIGRIVIATLLAEASQPLAARDYQSLRSLCGVAPVTKATGKRSGPRATVVMRRACSVRLRDAVYYWAQAVIRHDPKSKALYAALRARGKTHGRALRSVADRLLAVACVMLRNGSLYDPEKRKLATAA

SEQ ID NO: 158912 - protein, 345 aa, unidentified
MKEVYAGMDIGSKECAVVAIESGGSQIDSVVFKTSERNMVAFFSRHPNSKVLIEECEMAAWVRATIKPHVASVIVCDPKRNAWVAKGTNKNDRVDAAKLAELNRLGSFSEVWHPDDEDVAGFKVLVKHYDDTSKRLAEVKCQIKARLRKQGVVTRGEAVYGPRRDEALSRVDNTFARIAIEQDYELLDYLEGAKKAARSSVVAASGRFPVIALLKEIPGVGPVLAARFVAYVADPHRFNKRTLASYSCLGIVKRSSDGSPLGREHLSKAGNSALKDLSRTAFERAMATRSPNGIKEFYAGSLTRTGDKTKARLNTQRKILALMLAIWRDKTEYRDELVTRAFTGA

SEQ ID NO: 158913 - protein, 388 aa, unidentified
MIYVGIDIAKTNHYASIVDYSTGEVIEKPFLVTNNKQGFELLYSKIKHFDKEKVLIGLESTAHYGNNLIFYFHEKQFKLGVINPIQTASLRKTRIRKVKNDKVDSMLICEALSLGYYNLLSDYDIELLEIKSLCRFRKELKDKASDAKIQLKTYVDQLFPELNGFFKDNIDIKTAHELLKLYQSPEDISNINLTKLSNLLIKNSRGKYDKSRAIELKQLATNSVGINNNALCIQIKMTIELIELLESQIKDIEKQVSEFIKKSDNVITSIPGIADTTAAIIISEIGDINRFNNPGQVLAFAGLDPSVKQSGNFNASSTRMSKRGSSLLRYALILAANNVQLNTKTFNNYYNTKRAQGKLHYNALGHCAGKLVRTIFYMLKNNVTFNLD

SEQ ID NO: 158914 - protein, 482 aa, unidentified
MKAKPPEKIQKATNPSTRGHWNEMNRKQRREMMRKIQSEDISLEVVHPDAAGIDIGNESHYVAVAPSRDKQPVRCFGCTTGELKAMTDWLKQCGIRTVAMQSTGVYWIAVYDILEQAGLEVYLVNARETKNLPGRKSDVQESQWLMKLHSYGLLRNSFRPSQEIRTMRTYWRQRNDLVQSAGRHVQRMQKALTQMNIQLANVLSDVSGVTGQAIIKAILGGQRDPHKLAEFRNPRVRASEEEIARSLEGHWEEDLLFVLQQEQDGYEFCQKQMAECDRQLNHYLEQREDRSQGAPLPEEKRKGRRKKKSGNKPQFDLRTGLFRMSGTDLTRIDSIDVMTATTILSEAGWDMSKWETEDHFVSWLRLCPDNRISGNRIIGKGRLPTNNRVTIALKMAASALRLSDTYLGAQFRRFRTRLGAPVAIKAMAAKLARLVYRMLRYGMKYVDKGAATYQEQHRQLQIKQLKRKAATLGYQLIGVPAT

SEQ ID NO: 158915 - protein, 340 aa, unidentified
MKKFLFIGIDFSKSKFDVTVLKSIDQQDFVQAIFLNEKQGFIEFLKWVTKQSNVPKEHWLFCGEHTGLYSRGLTEFLIKKKLFIWLENPLQIKCSWGIKRAKTDKIDSLEIARYALRFEDKAVAVEPANKDIEALRLLWAYRGRLVKNKVSLEVSAKETRRVIKREVTSRLVFENSQHNIDRIKKEIKVIETKMHQVIMSGDLKENYLLVVSVKGVAMITAVALIIHTNNFEAFKTARQLACYCGVAPFEKTSGTSYNKGNHISQLANKEIKTLLTQGARCAVQYDKELAAYYARKVAQGKKDRVVINNVRNKLVHRIFAVVNNRITYRENYLNPFADCA

SEQ ID NO: 158916 - protein, 403 aa, unidentified
MNAVGIDVSKRKSTVTIRRPGDQVVFEPRDFRHTQSDINALIRIIKNLDGETKVCMEHTGRYYEPVATWLSDAGIFVSAVNPILIKQFGNDSLHAPKTDKADARKIARFALDRWPNLKQYGPMDEIRNQLKTMNRQFGFYMDQKTAMKNNLIALLDQTYPGANDFFTCPTRSDGSQKWVDFVYTYWHVDCVRSRSLKAFTEHYQNWCKRKGYNFSADKAEQIYRVSTDLIAVFPKDACTKMLIHQAVDMLNTISGTVETLRAEMDKTASMLPEYPVVMAMNGVGPTLGPQLIAEIGDITRFEKRGSLTAFAGVDPGKNESGDYVQKSVHTSKKGSPHLRKTLFQIMESLIQRAPADDPVYAFMDKKRAQGKQYYVYMTAGANKFLRIYYGRVKEYIAGLSESD

SEQ ID NO: 158917 - protein, 338 aa, unidentified
MTIETLGIDIAKNVFQLHGVNRNGRVALKRRVMRDRLLAVLAQIGPCTVVIEACTGAFYWARKFEAVGHQVKIISPQYVKPFVRRQKNDGNDAEAICIAARQPHIPFVPKKTVAQQDIQALHRARQRMVNHRTAVVSQIRGLLLDRGFAIAKSITRARRAIPEILADLKNELTAMAREALSELYDLFRDLDRRIGSFDKKIERIFRQSEPCQRIAKIKGVGPKTATAVVAAIGDGSEFKNGRHFAAWVGLVPRQHSSGDRKVLMGISKRGNQHLRSLLVHGARAVVRTAPSKTDPNNEWVNQLRERRGFNRATVAIANKNARIIWAVLRTGEPYRAAF

SEQ ID NO: 158918 - protein, 315 aa, unidentified
MKEPRKVIGIDVSKSTLDCALGNSKERFHVNNDEAGMVTLLERVRALAPDLIVMEATGGFETAAATALLSAGLPVAVVNPRQVRDFAKATGRLAKTDRIDAEIIAAFGLAVEIRVSPLPDADSRALAALLTRRTQLIAMRTQECNRLALAPATVRKPLKAHIAWLEAAIAALDVDLTAKLRSAPAWKAKEDLLRSLTGIGPVNSRTMLVALPELGRLNRRQIAALVGVAPFNRDSGTLKGRRTIWGGRAQVRKLLYMAATSASQHNPIIKAFYEQLTARGKPHKVAIVACMRKMLTILNTMVKTNTHWNPNFKVA

SEQ ID NO: 158919 - protein, 388 aa, unidentified
MIQVDDLSRSLIAFEQISTLVIVVELSQSSWLAAGVVPGIERRPLKKLDPDPTALLHLVEGWRDRATKAGRAITRTVLAFESGRDGFWLARWLRVHGVETFVMHSTSVAVSREPRRAKTDRLDTEMLIRVFLGWLRGEPRHCKMVAIPTLEEEDARRPSREREILVGERTRIINRMKAALVRLGIRGFKPGLLTAPQKLDALRTPEETPIPPNMLDEMRRDMARLAWVREQINAIEQARLERLERAPATGRHAMVRMLARVIVVGVETADMLVQEALSRNLRDRRAVARYAGLTGSPDESGSKRREQGLSKAGNARVRRGLIQLAWRFLRFQKDSALAQWYRGRTEDAAGKRKRTMIVALARKLLIALWRLATIGEIPVGVALRPAVA

SEQ ID NO: 158920 - protein, 339 aa, unidentified
MKRLYCGIDLHSNNSVVVLIDDEDRAVYEKRLPNSFEVILLELSRYKKKIAGVVVESTFNWYWLVDGLQEEGYKVHLANTAAIKQYEGLKYTDDKSDARWLAHILRLGILPEGYIYPKEERAIRDLLRKRSQLVRQRTTHILSIQNLMSRNTGRSMSGTKIKTLTELEVDGMFGSDDVAAAVKCNLRACRFLAKEIIMLEKMILSRASIRPEYENLLTVDGIGKALALTIMLETGDISRFGKVGNFASYCRCVDSRRISNEKKKGENNGKNGNKYLAWAFVEAANFAIRYNKVIRRFYERKKSKRNGIVAIKAVAHKLARACYHILKDNVPFSVELAFS

SEQ ID NO: 158921 - protein, 332 aa, unidentified
MKKVQFFVGIDVSKATLDVFIHGLNLYFVVENSLHGFVCLLEKVMTGTKCKKEEVFFCFENTGKYSRMLSVFLQSENILFTMESALQIKKSLGITRGKNDRIDAKRIAHYAYEKRESLVPTILPGAKIDQIRSLISLREKLLKHRTAYKNGISDLHDCYEDGESELIKEVQLRLINNLNEEIEKVEQKIEGIIESDESISRNYKLILSIRGVGKILGFYMVGYTANFTSFVNARAFACFAGIAPFSYSSGTVKGTPRVHPFANKMLKALLNLAAMAAIKYQGEYLQYFNKRVNELGKNKMSTLNIIRNKIVYRVFAVVQRQTPYVDLLKFAA

SEQ ID NO: 158922 - protein, 427 aa, unidentified
MRFYTTPHRYYCGIDLHARRMYICVLDGQGKILVHRNGPATPEHLLATIAGYREDIVIAVECIFTWYWVADLCAQEGIPFVLGHALYMKAIHGGKAKNDKIDAHKIAVLLRGGMLPMAYVYPRAMRATRDLLRRRCHFMRKRAELITHIQNTASQCLLPPFGKKIAYHGNRTDLAEHFTDPEVRKSIETNLALLDHYDRLLTDLELHLTRSAKVHDANAFYRLRSVPGIGQILALVLLYEIHDIHRFPRVQDFASYCRLVKCAKESDGKHYGYSGAKIGNAHLKWAFSEAAVLCLRRNPAAQQYVARLAQKHGKAKALTILAHKLARAVYFMLSRGHAFDAIKFFPPAAARGRAGQTTEGGHDTTSGAASPGRRAPRLDDAARAGATRPDREGGRDLTTLEIDPSTEEISLATDDEEVSMLSTTREP

SEQ ID NO: 158923 - protein, 344 aa, unidentified
MAKVNIIGVDLAKNVIQAAVLTPTGKTLTNKELPRKKFAEFLAKQPISTVAFEACASAHYWARQAEKFGHKAMIIPAKAIIPYRQGHKTDRNDAVAVAEAASRPTIKEAPIKTIDQQGLQAIQRSRDLLMRDRTAHSNHIRGLLMEFGIYIPKGIFHLRSAIPEVLEDADNELPDMYRPVLACMYRHFQRIEADIKSIDLEIKALLKENDACSRIMELEGVGPIGAILLFATLGTGEAFKSGREFSAYIGLTPKQHSSGGKTNFVGISKFIANHQLRAILVQGARAYVHKLKDPTTPKQKWLHALILRAGYGRAAVALANKTVRTAWAILTTGAAYDRYRGAFV

SEQ ID NO: 158924 - protein, 322 aa, unidentified
MSAPVLGIDIAKQKMEVALLVEGKVKNKAFKNTTEGFETLALWLRRLGIVQVQACLEATGNYGEDLAISLHEAGHSVSIVNPARIRGFAQSELIRTKTDKMDAGIIARFCLAMKPEAWIPPSPQVRFLRALVRRADGLIDMLTQEKNRLGTAHESVLPLIKEHMDYLNKEIKKVRGQIGDLIDQNPNLRQKKELLASIPGIGKVTIAVILAELDNLEKFNHVRELVAFIGLAPKETLSGSSIKGKPRLCKIGHVRLRKALYMPALVSIQCNPVLIAFYNRLKERGKNGKVIVCAIMRKLVHLIFGILKSGKKFDPNYKPIST

SEQ ID NO: 158925 - protein, 373 aa, unidentified
MNNVAGIDVSKGKSMVSVLRPFGEVVAKPFSIGHTGSELKELADYLKSLDGETRVVMEHTGRYYEPVARFLHDEGVFVSAVNPKLIKDYGNNTLRKVKTDKADSRKIARYGIDNWAELRQHTPMDTIRMQLKTLNRQQSLYTKTKTMMKNNLIALLDQTYPGVNALFDSPVREDGSQKWVDFATTFWHVDCVRNMSLTAFAERYRKWCKRHGYNFSQSKAVEVHAGAQDLIAMLPRDALTKTMVRQAIDALNAISASMERLKAEMQALAAQLPEYPVVMAMHGVGDSLGPQLMAELGDVTRFTHRNAITAFAGVDPGADQSGTHEAKSTRVSKKRGAGAAPRLIPGYGLPKNNSHYCGNVPFSYKKFCNRQLI

SEQ ID NO: 158926 - protein, 326 aa, unidentified
MIIGVDISKATFDVVLRTQTSEKHQVFSNDPKGYAAMVAWVEKQPEKVVHICSEATGSYWEGLAEYLYGRGYTVSVINPYQIKKYAEHLLNRNKTDKADARLIAEFCDKEQEHLRVWKPYSEDIKALRSMERRLDELQGMRQQEQNRLKSGVTDLVVIESLQDNLKHLEESIKQLKKKINDHIDQHPDLKEKEKLLISISGIGKITATKLLAEIGDIGAFESASQLAAYAGLSPKQFRSGSSVHKQTRISKQGRSQLRTCLYMPAVTAIAHNPVVKDLKKRMLASGHIMMEIVVAAMKKLLHLVYGVLKNNRPFDPYYTLNSKVTP

SEQ ID NO: 158927 - protein, 369 aa, unidentified
MSERTRFVGLDVHKASIAVAVAEAFGDPEDHGHIANDPSAVRGLMQRLGGPDLHLEVAYEAGPTGYALHRQLTAMGISCLVVAPSLIPVKPGDRIKTDRRDAAKLARLLRSGDLTPVWVPDEAHEALRDLVRARDDAKADLLRAKHRLSKFLLRRAIHPPVGVRAWSRAHDAWLARLTFEHAADGVVLEHYHAVVREAAERVRRLETALAQCAAASPHAELLAALQAIRGIGFLTAVTIVAEAGDLRRFPTARQFMAYVGLVPSEHSSGDSRHRGHITKTGNRLIRHVLGQAAHNARYRPNVSTSLRARQRRVLPAVVELDRRAQARLHARYRHLAGRIGTNKTIIAVARELAGFVWATGQLVPTALAA

SEQ ID NO: 158928 - protein, 482 aa, unidentified
MKPKQKDKGKRATCGRTPPSWREMNRKQRREMTRRIQTDELRLEVVHPDAAGIDIGNESHYVAVPPSRDNQPVRRFGCTTAELKAMADWLKQCGIRTIAMQSTGVYWIAVYDILEAAGLEVYLVNARDTKNLPGRKSDVQESQWLMKLHTYGLLRNSFRPSQEIRTMRTYWRQRNDLVRAGARHIQRIQKALTQMNLQLANVLSDVSGMTGQTIIKAILAGERDPHKLAAFRDHRVKASENQIAQSLEGHWQEDLLFVLKQEQDGYEFCQQQMAECDRRLEQYLQQREDRSRGTSLPEEKRKERLKKKKGNKPQFDLRTGLFRMTGVDLTQIDCIDVMTATTILSEAGSDMSKWETEHHFVSWLRLCPDNRISGDKIIGKGRLPTNNRITNALKMAASTLRTSNTYLGAQFRRLRTKLGSPVAIKAMAAKLARLVYLMLRYGMKYVDQGAAFYDAQHRKLQIRHLKSKAAKLGFQIVQAPAA

SEQ ID NO: 158929 - protein, 411 aa, unidentified
MRVHHNVCCGIDVHKKSVTACLMWGPADKEPKFEIRRFGTMTRDLQKLAEWLKQAGCEAATMESTGSYWKPVWNVLEGQTPRLILANAQHVRALPGEKTDRKDGKRLAELTRHGQVRPSYVPPRAILELRDLTRYRSKLLSAGSSERNRIQKVLEDANIKLGSVLSDVFGLSGQKMLQQLVKTDTVDIANVIQLAHWKLKPKMEAIEQSLEGKLTDHHRFLVQASLEHMRFIEEQLKRLDEEIQRRLQPYQEEYALLQTIPGIKETGAARILAEIGADMSVYPDGDHLSSWGGVCPGNNESAGKKFRSKIRKGNVHLLSALTQCAWAATKKKDCHFRNKYYRLKSRRGSQRAIVAVDHAMLKCIYVVLSQRKPYQEPKPVSLSEAQKQRKASSLCRQLRVLGYDVKIQKTA

SEQ ID NO: 158930 - protein, 318 aa, unidentified
MTTSNQKGTGINVGIDVGKARLDIYLYERKVHFSVENNPQGVHKALGRLARYTLARIVIEATGRYEHAFVEVALDRRLPVIICNPLQIRRYAGAIGLLAKTDAMDCRLIAEYAAVIQPPVRRHKSKMTIKIKDMLTRRRQIIEMMTMEKNRYQIMPSYLRADIKRVIQHLQRQLKKLNEQLDALVEQEDSWRERREIMTSMPGVGPTITQTLLADMPELGQLNRKQISALTGVAPYNRDSGKLRGKRRIRGGRASVRTALFMGVLSAVQHNPVLKQFYQRLLANGKHKKVALTACIHKMIIILNAMVRDGIKWNEKYA

SEQ ID NO: 158931 - protein, 418 aa, unidentified
MASKANRQPAIKSDVVVVGIDVAKRRHVAAIRLPDGRIPRPFSFTNDRDGFGKLLARVAQAAASAGCAGVRFGLEATGHYGHALQQFLLSQGAEVISVNPAHTRRVKELLDGSPEKSDPKDAALVAELVAQGRGRPLTMPQGAYAELRRLGKLREQLSGERTRYLNRYHGLVDLVFPELAALVHDVSCTSIRRLLEAYPTAVDVAAAPGEEVGQLLWRASIGHLGGVRGQQICEAAQRSVGVREGLSALRLQMRLTLSAINALAAQLEAVEGAQSQALAGIPYAARLLTIPTFGPVTVATVLGETGDLRQYASAEAVIKLAGLNLYSLSSGKYQGRTRITKRGRPLLRRAIFLAALRTSRGGQPLAAFHDRLRERLAGPQVGVAGARKLLRLMYALARDDADYAPGLLARARANEAAA

SEQ ID NO: 158932 - protein, 418 aa, unidentified
MRIVHQRCCALDVHKKSITACVLVWDGKELIQERKREFGTTRKQLEQLRFWLMACKVSEVAMESAGVYWKPVWHVLEKQKRFRLKLVNAQHYHGVDGKKSDQIDASWLAELLQCGLLKGSFVPPQWQRELRDLTGLRVSLVQDQNRIQNRIEKLLEDANLKLGSVASDTLGTSGKKILKAVIAGDRSPAWMADYAKGRLRAKRKELEEALHGFVTDHHRTLLDMLLRQYDSLERDIATLEADIRRRLAPHQDVVERLKEIPGWGEITAWTVIAEIGLDMSVFRTPGRAASWCGLCPGNRKSAGKRGHGRTRKGNRWIRRGLTQAALAASHDKDSFLRSFYWRISSKRGPKKARVATAHKQLKIAFFIIRDGVRYKELGPGHFDQQQPERTKKYLIKRLEGMGLKVTIEPVETTQRQNC

SEQ ID NO: 158933 - protein, 351 aa, unidentified
MSQKTNAVAVRTIGIDTGKNTFHLIGLDQQGTIVLREKLARGRIGRRLANASPCLIGIEAGMATHYVARELLALGHDVRQIPPAYAKPFRQGHKNDFRDACAVAEAVLRPSTRCVPVKTDDQLDLQALHRVRSRLVGQRTAVINQIRSFLLERGIAVRQGPRFLRQQLPEILAKRIDVLSPRMIGMIEDLAGDWRRLDERVERVTEEIEQLAHGSESCRQLMTVPGIGPLIASAMVAAIANGAAFAKGRDFAAWLGIVPKQRSTGDRTILGHISKRGNRYLRTLFIQGARVILLRPANWARHSFGPWLTAAAKRLHHNVLATALANKLARIAWTVLAQRRNYETRVVTVAA

SEQ ID NO: 158934 - protein, 348 aa, unidentified
MKYYIGLDVHRSTSTFAVVDENGQCILRETVKTSEQSLVHVINRINGERHMTFEESTISQWLYLHLKDKVDNLLICNPTYVAKKQGAKTDFRDALHLAQELRTNHLQPVFHDTSHWMEIRTTVSGYLDIVEEIVRFKNRLKAVFRAEVIQTDESSFYKNKTRVKELKNPAAKFVAEKLFNQIEFLESEKDKYKEVFERNRKKYRPIRNLMTIPGISIIRANIIAALVCQPARFENKHKFWGYCMLVRHIQESGGRIYGNKRFFGRRELRNVFLGAAENVMRLDGELRDQYEALRAKGVDHKDAKISLARKIASIALCLLKSNDKYNENYSEYVKERKKLRKEFFEQSL

SEQ ID NO: 158935 - protein, 312 aa, unidentified
MPLQESPLFIGVDVAKLTLAIQFPDHLWSIANTPAGHATFIAKLSALGAVHVVCESTGGYERALVLGLHAAGIAVSASNARQIRDFARACGRLAKTDDLDAAIIRDYGCRIQPSRDPAPAPGEPEFAELIRARQDLVALITDEINRREHACLPPLLRLSYARQRQLEKQLVTLDALIDAHVAAQADLAAKTERLQQVSGVGRVTALTVVALMPELGTLRDNEAAALAGVAPMNRDSGQHRGQRHIHGGRAALRRVLYMAALTATVHNPILKAFYQRLRQNGKPAKLALTAVMRKLIILLNRLVKNPAFNLVS

SEQ ID NO: 158936 - protein, 329 aa, unidentified
MAKNLFQLHGVDERGRAVLNRRVKRSQLVEAVASLPPCVIGMEACASAHHWGRAFEQLGHTVKLMSPKYVTPYVKTNKNDCRDAEAICEAVSRPTMRFVSIKTVEQADMQAVHRTRSLLVKHRTAVINQIRGLLAEYGLVIAHSPEKVRPALVRFLDDAESGLTAFARDTFSELYEQLKELESRIARVTERVERVFRAHPVCRKLAAVPGIGPLTATALLAAVGRPQTFRNGRHLAAWLGLVPRQYSSGGKERLGGLSKRGSRYVRTLLIHGARAVVHRAEGRSDPQGRWLWTLKCRKGTNVAAAALANKNARVVWALLARDDVYRPSA

SEQ ID NO: 158937 - protein, 383 aa, unidentified
MTQALGTVIDYERTLILAIELSNTSWVLAAQIPGLPGVKAKRSIDPTPEALMAAIENYRARAEKAGRNVDRVIAVYEAGWSGFWLVRWLAKHGVEEAHVIQPSSVPVDRRARRAKSDGIDAELLLRTLLAWLRGEPRVCSMVPIPAEADEDARRRVRERAELISERVGLVNRIGAVLATLGAGEYNPLRRDRRQRLDELQTALGDSLPTNAHAKIARMLDRLELLLIQITELEQSRDAVLEDENPDRASSMIQQLAKLRGIGVQSATVLVREGFVREFVNGKALGSYAGLTATPYSSGGIEREQGIGKAGNARLRTVMVELAWLWQRYQPGSAQVRWFRERGGTGRRVRKVMVVALARKLLIALWRFATQGVVPEGAVMKPAS

SEQ ID NO: 158938 - protein, 428 aa, unidentified
MRKRTYRKISIKSVSVEQVLQKLGERRRLVLAVDVAKTDMVAALWDPGAEREHRALFTLCWKQPQEQAAVERLLVGLQRRAVVIEAAMESSGTYGDALRAMLLELGIEVYRVSTHRSHRAAEVYDGVPSVHDAKSAHIVGQLHQDGLSHRWPMPSEQERTLSCAVAMMDLYKGERQREINRLEAMLSRHWPELLTLMELGTATQLGLLSEVGGAAQVAQKPEFALQVLERKSQGKLKPHVAQAVLASARSTVGIAPIAAELEMLRSLAAKALTTLASLQRAVRKLRALSKRDAQARAMATTVGVATAAVLVHDIGSPEQFPSARAYLKAAGLNLREKSSGKYQGQLKLTKRGPSRARRYLWLAVLRLLQSDPIVRAYYAQKVARSGGRKSKAVVAVMRKLAKGLHACARNGTPFDSSKLFDISQLALS

SEQ ID NO: 158939 - protein, 332 aa, unidentified
MSKFKNYVGIDISKDYFDVAFIQDLKSKSFHNQFENTAMGVKKLMTWLKFLECGNTDTLLCMEHTGMYSKIIVEKLISEEFQLWVEMSLKIMWSGGVQRGKNDKIDAERIAVYALKNQDSFSLYQTNRESVTKLRALFSLREKLIGYRTALVNVSNEFRKFDSNISKITSCYSKNTLSGIKKDLLKIEKEIDSIIEKDEDLKILFKRITSVPGVGKVTAILLIYLTNEFKNFDNPRQLACYSGVVPFEYCSGKSIKSRSKVHYIANKKLKKALHMCAISASKNDPEIHQYYIRKTEEGKNKMLVINNIRNKIVHRICACVREIKLFEARNVA

SEQ ID NO: 158940 - protein, 410 aa, unidentified
MQQLLERCAALDVHKALVTVCARVPDGAGQRAEVVAEFATMTSDLLALRDWLKALGVTHVAMEATGVYWKPVYYALEDDFELLLVNAQHVKNVPGRKTDVNDAQWLCRLLECGLLRASFVPPKPIRELRDLTRYRKSLIGERQREANRLHKVLEDAGVKLACVATDVLGVSGRLIIDALISGGTDPEAMADLARGALRKKLPALKEALNGNFSTHHALIVSHILAHLDYLDEIIQALTLEIEERLVPFERQVQLLKTIDGVAERTAQVILAELGPDMSRFATDRHAASWAAICPGNDESAGKRRSGRIRKANNHLRTALIESANAAIRKRNTYLRAQYDQIKRRRGHKRAIVAVAHSILIAAFHILKDDIAYRDLSGDYFARRADPARLTKRLVAQLERLGHQVTLQTAV

SEQ ID NO: 158941 - protein, 367 aa, unidentified
MFNERTAIGLDVHARSARAAAIDASTGEVIEARLPADAAAVMDWVGGIARRHGPVHLAYEAGPTGFGLARKLNLGGVPCTVAAPSKIVRPVGDRIKTDARDALLLARLLRMDELVAVRVPTEAEEAARDLVRARDDARTDLMAARHRLSKLLLRRGLIYESDRAWTGAHDAWLRQIRRDELDAAGSGTLAAFDAGYDAVTQILARKARLDRDITALAGRSEFTGITNRLACLRGISVLTGFALAVEIGDWRRFTGGTIAAYLGLVPSEHSSGGSRSLGPITKTGNTHARRLLIEAAWHHKPGYTPGKVMKERWALAPATAAARGDAGNRRLHHRWMVLAGNHKKHTVANTAIARELAGWCWSLAVLE

SEQ ID NO: 158942 - protein, 353 aa, unidentified
MSKQVISTGKPAISDNKLTDPGQASVFCGIDVSRETLAVAVIARDQSIEQREFFNTIGGHKALLVWLGKRKALVRVSLEATGIYSLDLALALDAADGIEVAVLNPKMVNRFAQTLRRSKTDRADAQVLAEYSRRMPFQPWQRPRLMALQLRAVTRQIESLTVQHTREQNRLHASEGSEATPRCVIHDLRQSMAGLKRRIEKLRREAIKLLQGDDEMRLRFGLLIAMPGIGEVSALHLLGELATLAPEMKVRQWVAHSGLDPAHRESGSSVHKAARISRAGNRHLRRALYMPALTAVRWNPHLKAFYEALLARHKRKLQALMAVARKLLHAIYGIFKTRTPYDGKKLFPQLDIA

SEQ ID NO: 158943 - protein, 459 aa, unidentified
MRKIDKKQPRRSKGPAPSGLPVLNLHAAGIDVGARAHYVAVPAECSEQPVRCFGAFTSELQRLAQWLQQCGIKTVAMESTGVYWIPLYQLLESYGFRVKLVNARHVKHVPGRKTDVQDCQWLQQLESFGLLSGCFRPEAKICVLRSYMRQREMLISAAGRYIQQMQKALTQMNLKLQHVISDLSGQTGLRIVRAIVAGERDCLKLAALKDRRIKSDVSTIAKALEGDYRAEHLFALKQTLELYDYYQQKIAECDAEILKQLQTLESRGKAGAVLQRKPRSRHAAAFDSQAELYRVLGVDLTRIDGLNENTVQLILSELGLDLCQKWPTEAQFASWLGLCPNNEISGGKLLKRGTRKVVNRVANALRLCAQSLLKSKSALGAYARRMRARKDTPVAITATAHKLARLIYRTLKYGQEYVDAGSDLYEAKYKGTLIKSLQRKAKSLGYQLVSYQTLEAVVP

SEQ ID NO: 158944 - protein, 380 aa, unidentified
MRFIGLDVHQKYVEGCEIGPDKQKRRFRIANTRESWEEFAQTLDPETRVVMEATGNAFWIYDILSDYPAQVVIANTLKTRAIAEARVKTDALDAQILAQLLAADFIPESWVPDKEQYQLRVLLHHRIRLAKIRTMLKNKIHAALIRNGIQSPWSDLFGKNGRKFLESVTLPEMEQIIVCSSLRLLDAVQKEMTALEADLFGRAKENPDVKLLMGIPGISVLSALTILAEIGDISRFSSPKKLASYAGLVPSVHQSGKTRYTGHITKEGRSVLRRILVQCTQRAVQSEGKLRTFYLGLKAKKGHKIAIVATARKLLHVVWAVLVRQEEYRDLRKDLLDKKLKTMNRKAKKYEVTTDELLRIIKDVGEVQGEQEPHWLQGAG

SEQ ID NO: 158945 - protein, 403 aa, unidentified
MTVTALNSGTIFGGIDTHADTIHVAAIDSWGRELADKEFATTPTGYRDALGFLAGLGEVAAVGIEGTSSYGAGITRVAKQTGLEVFEVIRPERAVRRREGKSDPLDAYQAAHAVLTGRATAAAKSSDITALRSLHNARRSAVKARAAAQVQIGQQLITSPVALREKYRTLTAVRLVKALAACRPGVHTDTEERLVLTALKSLAQRHQTLSKEIAALDTELTALIGQTAPHLLHLHGVGNTTAAQLLITVGGNPDRLRSEASFAALCGTAPVPASSGKTTRHRLSRGGDRRANNALHTIAVARMRNHPPTKEFAQRQRDKGRSTPEILRILKRAIAREMFKQLTRPHEDLAVHDLRPARQAKNITIQAAASALGLGTSTISRTERGMFITPEIVSRYRDWLATA

SEQ ID NO: 158946 - protein, 392 aa, unidentified
MVISVGIDVSKDKHDCFIVNSEGEVLADVFTIQNTRDGFNFLLQKIQDCTTPQDKIKVGLEATGHYSYNLLGFLLDNGLPTYVLNPLRTNLYRKSLSLRKTKTDRVDARTIATMLLSDAGLKPYTDTAYHNEELKSLTRYRFDKVKERAKLKSSVSRLVCILFPELEKLVPTLHMASVYALLEEFPGAKQIAGAHLTRLKSLLENASKGRYKRDMAVSIRDAARNSIGSKMPAKSLELQHTIRLIRELDAEIDEIEAEIEAMMEEIHSPITTIPGIGCRMGAMILAEAGDLSRFDSPDKLLAYAGMSPSTYQSGQLKNCYPHMEKRGSRYLRYALFNATKYVCLWDPTFSTYLAKKRAEGKHYNVAISHAAKKLVRLIFAMEKSRQPYRSVT

SEQ ID NO: 158947 - protein, 323 aa, unidentified
MSSIVGIDISKEYFDADLNSKVERFDNNKKGIAKFIKKLPENSLCFMESTSTYCYKLAQELIENGHVAYVVNPLSVKNFARMRLMKTKTDRIDAKLLTDYGKINKDDLKPYHFASEGIEAAKQTQTVIDQLTKQKTALGNQLEALQQYPKPDKEIISTLQGLIKTLGQEIKHLQDKIEKHVKEDHSQLLTQLTSINGIGKRTACYLIAITNGFDTFYSPKQLASYLGCCPRIIQSGSSVRPKNRLCKMGLKGARTLLYMCALSAIKCNSACKNLYDRLVAKGKAKKVALLAVANKLIHQIFGIISKNEFFNNNFNSEKILFGI

SEQ ID NO: 158948 - protein, 338 aa, unidentified
MFIIGIDPHKGSHTAAVIDRDEQFVGEVSVRADRRQRERLLGWAAKFEPRLWAVEGASGVGALLAQQLVGAGETVVDVPPALSARARLLDAGRKDKNDSHDARSTAIVALRHRDLRRVAVEDHRQVLRLLARRHHQLVAGRTRAICRLHALLAELIAGGLARNLSVNKAVSALRTIRPTDPIDTERKRLATELVDEVRHHDRALVELHERIVQAVAAADTSVTDIVGIGPIVACYLIGYTGDIRRFPTAGHYARYNATAPIEASSGPTVRHRLNPNGNRYLNHAIHIAALGQISHDTPGRAYYLAKQTQGKSRKEAMRCLKRRISDAVYRQLRADTNR

SEQ ID NO: 158949 - protein, 475 aa, unidentified
MNVKGTKKKNQVVTANIFEQQELLKKVEVIKKNLTASTWRELEANGKFDKNEKLSFISDDMLILGCDVGSETHYMRAIDTRGRELSKSAFPFNNDSEGFQSAKEWAVKIAAEHDKSQIVLGLEPTGHYWFCLATWMIANGISVVQVNPYAVKQTKEVEDNSQLKDDRKDPKLIANLVKDGNFGMPYLPEKLYGELRRLSMFRDQLNEDRIRSINRMHREMKIYFPEYKDALGKVDGAFSLELLKQAPFPDDLAALGGDGIRQIWHDAKLRGRGYSRAGEILQYAKASVGIKDGAVAGKTAVKWFVQKILELNDKLAAIENQINQKCQEIPHAGNILEISGIGENTLSGILAEMGDVSRFDDVKEIQKLSGLGLVACSSGKHKGETKISHRGRTRLRYWLFQAAKSAVAHAEEFKELHMYYTTRADNPLKKMQSLIVVACKLLRIIYAILKNGTVYDPKKMLMDIRRPEKKEAVAA

SEQ ID NO: 158950 - protein, 431 aa, unidentified
MTKRYILNTKKDPGEGGEAETYLAPPPPSQGKIIGLDCHPDTFTAAVFVGQTPHNARKIGSRERLSLEALLQWAAAELTPQDVVLLEAGSNSFEVCRRLGRLGLRACVLESAHVGKHAKTYADNDKMAAARIALVYLAGNAPCVWVPDEQSRERRELLHAYRKAVSDHTAATNSLKGYLNGRGIRLGQRSLEKKSTAEWIRKQREWSDLQGHILDEHLANIAESKERRQRLYRLMASEMAADATMMRCLKVLGVGIVSAFALLAVIGDIGCFHSAEKLVAYIGLNPGQRQSGQGKDIRLGVGRRGRGDIRSLLIQGAHAVLRMGRHTTLGQWGWKLFARKGNRNVAVVAVARKLVVQVWHLLQGNPPLALETDKSFRLKLRKLAALLGMAARRNTTLGNSLSDTVGILLQRCLTSSDPIPTGPEDLGGGPA

SEQ ID NO: 158951 - protein, 391 aa, unidentified
MFYVGIDIAKKNHEASIINSKGELLDKSISFSNSQAGCDKLTSLLDKFGADTSNVIIGMEATGHYWISLYSYLIDQGFTVYVINPIQSDAFRKMYIRQTKNDSKDSFIIAQIMRFGEFSSTSLADEDIMALRQLSRYRLALVDECSDWKRKCIALLDQVFPEYSKLFSDTFGVTSREILSKYPTPEDMLSTDTDTLVELLSKASKGRFGISKANEIQESASNTFGVSFAKNAFAFQIKQIIAQINFIEDQLEELEIEISTLLHRTNSVITTITGIGDVLGAIIIGEIGDISRFESAPQLVAYAGLDVAVKQSGDFIGTQTKISKRGSPYLRRAIWLAATVAAFKDPALSVYYQSLKSRGKHHLTAVGAVARKMCNIIFAVLRDNKPYVPHI

SEQ ID NO: 158952 - protein, 369 aa, unidentified
MSTKRTTKQTKAGAAESLARCTTVAVDLAKTVFQVAGEDARGEVVYEARLRSREAFAAFLHGLPAGLTVLMETGPGAQAWAREAQAGGQRPRLLPAQRVAEHRSGAKNDRNDAHALLRAGHDHQLSAVPVKSVEALAMQAQHRIRAGYVRRRTVIGQQVRGLLLEHGIALPRGDAALVERAGRVIEDASQPVPGALRELIADLLAEWQHLSRRIDVLMARLEHAARHDPTARRLMTIRGYGPVIATALLAKQTQPERFPNARHYAAYFGLVPEQHSSGRRLQLGRMSKRGDGYLRSLVVEGAHAVLRQLKPDASAPDDRRLQRWVQRHGKKGAAVRLANRNLRITWALLQNDDVYHRDTTTEPEVAMTA

SEQ ID NO: 158953 - protein, 312 aa, unidentified
MNEKITPVYAGLDIAKASLQLHFQNKSYDLPNTAAGHAQLIKRLATIPGSHIVCEATGGYERAVVAALQAAGIAVSVINPARVRQFARASGELAKTDPIDAARLTAFGQAFAPEVTTARTPVEIKMAALVSRRAQLLELRVAETLRADTCTDPALRQLFAAWLAQVKKQITKVEALIEELLTEQTTLANQVQRLDDIMGVGRITAVTVLATLPELGQLNRRQAAALAGLCPYNRDSGQWAGKRCISGGRSEVRRALYMAALSASRSNHLLKPFYDRLIAAGKPAKVALTAVMRKLVILMNHLLKNPNFSLAH

SEQ ID NO: 158954 - protein, 411 aa, unidentified
MSQMLVGIDVSLRSHHVHFMDEEGRTLADFSISNDQEGADALIRNVLEKAEKNQLTDLKIGMEATDQFSWHIAHYLRERLGGYEPKFQSSIYVLNARKVARFKKGYDTLPKNDKIDAWVIADHLRFGRLPFAMQEAHQYEALRRLTRARFHFMKEIGRNKTYFMNQLFLKFSGMRQDNPFSNAFGSTSLAVIEELDPDVIAEMELEELVAFLQDKGKNRFKDPEEIAQYLQKLARNSYRLDKALQDPVNITLSVILSTIRHMESQVKRLDAEIERLMKGMPQTLTSVKGIGPVYAAGLIAEIGDIRRFKDHHALAKYAGLVWNQNQSGEYEAENTSRMRTGNKYLRYYLVQAAESVRRYDSEYRDFYQKKHAEVPKHKHKRALVLTARKLVRLVHSLLRTNQMYTPPERRG

SEQ ID NO: 158955 - protein, 320 aa, unidentified
MESKRVVGVDIGKRWVDVAREGTARVGRHRNEAVDIAVLVATFDASRDLVVFERCGGYERHFEAALGAAGIPWAVVHSAAVKAFRQVQGIKAKTDAIDARLLRDFGRDRLDAGKLRLGRTEDVVLDALVARHRQLKAALHAEQCRRETAAIAAAQASIERMIAHLQAELVTVGVELSLHESSDPQIVFKEAVMCQRKGVAQAPARALLAELPELGRVECKQITALGGLAPRIHQSGRTHPRRGLVPGRASVKAILFNPARSAMRWDPEIRTFCNHLRARGKPGKVIMVAVMRKLLVRLNAAVRDALNQPEVLSPATRMAV

SEQ ID NO: 158956 - protein, 404 aa, unidentified
MWYVGLDWADTHHDVEVQDEAGKRIGARRFAHSHAGLHELQAFLLGIAASPEELACIVETNHGLLITFLLEAGIPVYPVNPKSANRLRKAAGAKTDRIDAHLLAKLGRFDLAELRRLEPDSPSVAELKTLTRDQDALIQTQTRLVNQLTACLKEYYPAALHLFAKVQQRSTLVFLQAYPTPQAALAASIEEITATLRTGKHTNPRRVAPKIVEELHRPQLVASSVIVRAKSRLMLALVKQLLVVIEEIASYDKAIRPLFLSHPDQELWSSLPRAGKRLAPRLLAEWGDDRSRYADGNSVQTLAGTAPVPYESGNYAKAHKRFACSKPLRNALHQFAWQSTQHEAWARDYYQRKRAQGKTHSMAVRALANVWVRIIYRMWMSETCYQTATFEAAQLAHAPRQHVA

SEQ ID NO: 158957 - protein, 312 aa, unidentified
MTEHCYGGIDVSKDRLDVMVLPDRKSFSVDNNAAGYSELVKRLRGLSIAAIGIEPSGGYERAVIRALLAADLSVRRINPNKLRQFGRARGVLAKNDRLDARLIAEYVAIMPTRVVQRDPATEQLAEVVTMRRQLCDEHVAVENQTAHLEDAMLRRLNKRRLARLAADILLLDRRMAQIIASNANLTRRYELLTSMQGVGPTLAFTLVALLPELGQMSRKQIAALVGLAPYDFDSGRLKGHRCIYGGRLPVRNVLYMAALSACRYNPALKVFHHRLAATNKKPKVIIVAVMRKMITTLNAMLRDNVAWQPKSA

SEQ ID NO: 158958 - protein, 379 aa, unidentified
MTRPAAIPTDEHTLYAALELSKNSWLLAIQFPGRDNPSLHPVKGGDAEGLVAKLDAACERLAKIAGQVPRVTLCYEAGYDGFWLARLLEQRGIDCFVMEPASLQVNRRARRVKTDRIDVEALLHTLIAWCRGERHVCSMVIIPSVDEEDLRRSHRGRDRLVRERTAHINRIKGLLFGQGIRGINVKRHYKSLTPADLVTGDGRPLPERLSREIAREIERLALVQEQIIETERERDQALNSCEATERKRHDLLRLKGIGPAFAAIFARELYYRQFANRRQVASYIGLAPSPYDSGEGRRSQGISKAGNGLVRYTMIQAAWLWLKHQPQSALSQWFHRRTQGHTGRMRRVMIVALARKLAIALWRYLELGLIPQGAILSAR

SEQ ID NO: 158959 - protein, 385 aa, unidentified
MDVAVGKAAERSGAGFPTAAGGRSNVTGFSKTATEQDRRRSVETNPNSRQSRRRPQADSSSHLQDRDISMDGSITSFVGIDVSKHSLDLCVLPKETRQEFSYDTKGLKQLFRLLPDPGTCLIVVEATGGYQRRVVAELAAAGHLVAVVNPRPVRHFAIALGILAKTDRIDARVIALFGQHVRPRTIPKNHQKQEELQQLVTRRRQLIDLRTAESNRQELLTSKLIQQSVQKVIALLNKQIEAIEKEIAKFLESDDEWKGKANVMKSVIGVGKVTVNTLLADLPELGFLNRREITSLVGLAPFNRDSGRFHGKRSIWGGRASIRSVLYMAALTARRCNPVIQAFAKRLEAQGKPFKLVIVACMRKLLVILNTLVKTNSPWNPNYAQ

SEQ ID NO: 158960 - protein, 357 aa, unidentified
MADLETTVIGGVDCHLDTHHAVALDTHGRRLGDQSFPTTSHGYHQLLAWLQHFGHVHAVGVESTASYGAGLTRYLVGAGLTVIEVNQPHRQVRRRRGKTDALDAEGAARSVLAGEATAVPKDTTGSVEAIRQLRLARASAVKARTAALTQLGEVIATAPAALRERLSGPASLHARATRCARLRADQARLQLPLEAAKFVLRSLSQRILALDAEIARFDAHLATLVASVAPRTTALLGVGTLTAAQLLITIGQNAARMGDEAAFAHLCGVAPIPASSGKTNRHRLNIGGDRQANAALYLIAVCRLRYCERTRAYAARRTHAGRSKRDTLRCLKRYIAREVFHTLRADLAALTAQPAPA

SEQ ID NO: 158961 - protein, 355 aa, unidentified
MTIVSHAHPFVIGVDTHARTHTLAIMVALTGEQLGSEQFPATPASMDRAIGWASRRTGGDLATLWVIEGIGSYGAKLAHTVAEIGYLVVEAPQMNARSRRGVAKSDPLDALAIASAARSTDVTALRRPRLEKGIRAALRILLAARGQMTTERTANINALIAVVRTVDLGIDARRPLSSVQVKEIFRWRARVEEWAVAIARAEAIRLATRVVALTQEVECNQARMTELLQDSTAAPLLEETRIGPVIAATIFTTWSHPGRVRHEAAFASLAGVNPIPASSGNTVRHRLNRIGDRRLNKAPHQATIVSMTHDPDTRAYVERRQGEGRTNREIRRCLQRYLARHLYRTLNTLYANPAP

SEQ ID NO: 158962 - protein, 317 aa, unidentified
MRVLYGVCCGLDVHKKEITAALMTGAEEVTVKTFGTTTSALKAMVDWLKETKCEHVAMESSGVYWKPVYNILEMEEIPSMVVNASHMKAIPGRKADVNDAEWIADLLRHGRLRASFIPEKDQREYRELVRYRSSRTEERAREINRLQKMLEGMNIKLGDFVSSIMGKSAGRLLSLALSKDELTDEEIAEASDIRLKSSIEEIKESLKGIITPLQRELVTLVIKVIGEQTKQIAEVEALIKKYTKKAYEEAAKKLEVIPGIGTKSAQAIIAEIGIDMGRFPTANHLCAWAGLAPGNNESAGKRKNAKTRKGNKHLKKL

SEQ ID NO: 158963 - protein, 323 aa, unidentified
MSQPNLQCMGIDVAKLSLDIATTDTIEPFTVGNDEDGFAVITDKLKHTKINLILMEATGGLEAAIACKLQSEGYDVVVINPRQARDFARSMGYLAKTDKLDAAMLAQLALVIDRHPDRSRYIRHLPDEARAVLAAMVVRRRQLNHMLVAERNRLYPSHPQSRKSIDNIIDALQNELDRINEQMKQHMTAFFQEQARLIGSVKGVGDITVASLIAELPEQGKLNRREISALTGVAPLNRDSGKMRGKRTTFGGRAGVRATLNMAALVATQFNPAIKLFYQRLLAAGKPKKLALVACMRKLITILNTMLRKGDEWNASFQSQVIS

SEQ ID NO: 158964 - protein, 341 aa, unidentified
MEQATTIGLDIAKHVFQLHGADAAGHVLFRKRITRVKLLGFLAAQTRCVVAMEACAGAHYWAREIAKLGHHVRLIAPAYVKPFIKRQKNDAADAEAICEAAQRPSMRFVPVKTEEQQANGIVFRARDLLVRQRTQCVNALRGHLMEYGYVFPKGITHVETLIALVEDLQSSLPDSVRVILKLLIDTFTALEAQIAVLDAEINQRSKSDPTARRLMTIPGVGPIASTAITALVPAAEGFPAGRDFAAWLGLTPLQKSTGGKQKLGAVSKRGERTIRRLLIIGASAVVQQASRRGAPKGSWLAQMLARKPKMLVTVALANKMARIIWALLVKGGTYRTPAAAA

SEQ ID NO: 158965 - protein, 336 aa, unidentified
MLIIGCDFHSRFQQIAMLDGQTGEVIERRLEHATGEARAFYAALPGRARVGMEATGYAQWFEGLLAGQGHELWVGDAAEIHAARVRKQKTDSRDACHLLDLLLQDRFPRIWVPSPQERDVRQLLRHRHKLVCSRTSVMNQLHALAMGQGVCRKQKLWTAAGRRELESLALGPWASRRRRELIEMLGRFDTSIQELDQAVIQEADRHPAAVRLMEHSGIGPVTALAWVLTIGPIERFEKSRQLVSYLGLNPRESSSGGKQRLGSISKQGNSMLRSLLVEAAQTASRFDPELRRHYVRLKFRRGRAVAKVAIARKLVVRLYWGLREPGQRGATGSHAG

SEQ ID NO: 158966 - protein, 347 aa, unidentified
MSMRTHDSISVLGIDLGKNWFHLVGLNGAGTPVLRKRLSRARLTELAATLPPCIVAMESCPGSQYWGRVFANAGHTLRLIPAQFVKPFLKANKNDFNDALAIAEAAGRPDMHCVPLKSTEQLELQAIHRVRERLITERTALVNQMRAFLLENGIVVAVGRRVFAKHLPSLLEDAENGLSFTLRALLSRLRQRWLALDQEIDEITRLLTRHAEQSEPCQRLRTVPGVGPIVATALVAAVGNAQAFSRARHMAAWLGLVPRQTTTGGKPRLGPISKRGNRHLRKLLIQGAQALMIHLKRDRSALGQWLGRLQARTHRNVAVVALANKITRICCKVLHSGEPYRPYPAAA

SEQ ID NO: 158967 - protein, 406 aa, unidentified
MLYVGDDWAEDHHDVELMDPAGRRLAKARLPEGVAGIARLHAMIGEHLDEDDAEVRVGTETDRGGWVAALVAAGYVVYAVNPLQAARYRERHGVSGAKSDPADAHILADMVRTDAHQLRPVAADSAAAEAVKVVARAHKTLIWERTRHTLRLRHSLREYFPAALEAFDDLDAPDTLELLGKAPDPGSAAKLTRSQIRAALKHARRRDIDTKTTRIQAALRGDQLGRDAVITTAYAATTRAAAAVLVTLDEQIKTLQGQVEAHFGRHPDAEIIMSQPGMGLILGARVLGEFGDAPGRYADAKSRKNYAGTSPITRASGKKKTVHARFVHNDRLIDALMSQAQSALQASPGARAYYDMQRARGLDHNPALRQLANRLVGILHGCLKTRTLYNETTAWSHHNQDQQNAA

SEQ ID NO: 158968 - protein, 403 aa, unidentified
MYKYFLGIDISKDSFDFSFTDETEKILYKDHYQMDMTDFTKLSDYLSSFSKDEILIVMEATGIYHLTLLSYLLEQELNVSVINPLFIHAFTKSMTIRKTKTDAKDAHIISIFAKRNYATIRLSSTSDIETIKPIVREKEKLTNQMSAIKTDIKSIVNQVFPEMLKNTNIFLKSSLNLLLQAPSKRIIRNLKEKKIASYLSCDTKKGAKPKVDAKEILLMAKNSIGINNQSLEKILVSKIKQLEFLQTQLDEFNETIEQFVDEHHHDDMDLLTSIGGVGKPSAASFLTELGDINNFATYKQLTAFIGTDPTIYQSGTSVNVKGSISKRGNSHLRRTLWHMARAATVWNETLKAYYDKKRSEGKTFKQSVIAVANKLIRIIFSMLKNNTKFDTDFSNSAIKSASI

SEQ ID NO: 158969 - protein, 427 aa, unidentified
MRFIGLDVHRDFCEVAISDGGKARRAGRVASRPAELELFARSLGSDDRVVLEATGNALAIARIIEPHVGEVVFAHARKVRAIAEAKVKTDAIDACTLAELLAADLVPRVWLGDERTRLLRRLISRRRQLVKQSTRTKNEISAVLLRTLQGRPPVSDVFGKAGRAWLAALELGLDERETVDAGLRQLDFLQGELTQVDRAIAEQALASVEIRRLMTIPGVDVTTAATLMAAIGDISRFENPRHLAGYLGLDPKLRQSGVAKPRHGRISKEGSAAARHALVEAAWSSAKAPGPLRAFAERTAARRGRHIAAVAVARKLAVLAWHLLSRGEDYAYQRPSVVRRKLRRLELKTGAPRAKRQAGAAPLWGSRAQDDLERELAHQAERAYRRLVTDWKRTRPKDGAGATPGRASSRPSERQAARQETAPPPAL

SEQ ID NO: 158970 - protein, 400 aa, unidentified
MAVMIGVDPHKRSHTAVVIDGDDVELGRIEVRASGGQVDELLVWAARFGDHIWAIESADGLGFLLAQQLVAAQERVLDVPATLSARVRVLGSGRSNKNDANDGYAVAVAAMHAPALRVVERADHAAVLRLLAKRNKQLGSARTAAACRLHALLAELVPGGIPKEINANRAARLLGGVTPTNPVEATRHMLATEHLEDLCRLDHQLRDLHRRMNEAVRASGTSVTELFGVGPVGAAIAVGYTRNVDRFASRDRFAAYNGTAPIEVSSGGRTVNRLSRRGNRQLNHAIHIAAITQIRHKHSPGRAYYDRKLAEGKTKKEAIRALKRRISDALYDRLVADAAATVGPGGHAGTAEQASVTGITPQQPALRNSHSRTHSERRTRQSSGTTTRRQRATQATRRRT

SEQ ID NO: 158971 - protein, 331 aa, unidentified
MCSVVGLDLSGAVILRRRVRRDTLIDLVAKLPTCIVGMEACCGAHHLGRLFAAQGHDIRLMSPEYVRPYVKAQKNDDRDAEGIAEAATRPTMRFVETKTEDQLDMQTLHRSRERLVGERTALINQLRAILLDRGIVVPQGKRKLDQYLVILMNEHDGERLSARMRMLVADIRAQWQELDRRIGEFDAEFVRWAKENEDARRLVTIPGVGVTISTALIAAVGKAETFEHGRDLAAWLGLVPRQSTTGGRPRLMGISKRGNKYLRKLLIHGARAALPYVAEKDTALGRWAKSLLGRVHQNVAVVAFANKLARICWAVLRSGQRFAAKGAPLVV

SEQ ID NO: 158972 - protein, 387 aa, unidentified
METVADRAKPTAIRTDLRAIFVSLELSRSRWLITSLSPGNRDRMSKHSVQAGDIAGMLARFSELRHKTQARTGQSFPIVVIQEAGLDGFWIHRVLRKEEIESHVVDPASIATSRRRRRAKTDRIDGEALIRVLLAFKRGEPRVCMMVRAPTPAEEDRRRLCRERKVLTAERVQHVNRIKGLLFAQGVSEYEPLRRDRRDRLARLVTGDGRLLPNYLKAQIGRELDRLELLLEQIKAVEAERDSSLASTEANKSALPAMLLNLKGIGPEFAAILWSEGLCRHFDNRRQVAAYAGLAPTPWQSGSVDREQGISKAGNPRLRETMIQLAWLWRRHQPRSVLTLWFEERVRHNAGRLKKRTIVALARKLLVALWKYVNAGIVIEGAAIKTA

SEQ ID NO: 158973 - protein, 350 aa, unidentified
MSEYAGRQFVGIDLHRRRSVMVRTTETGEVLEAVRITNDVDRLASVIARAGEDPEVVVEATYGWYWAVDALQHAGARVHLAHPLGVKAFEYRRVKSDLRDATDLADLLRMGRLPEAWIAPPATRELRELVRHRAKLVGLRSHCKAEIHAVLAKCGIQVVTSDLFGIEGNALLDRLRDQHRLPAPYAARVASLRRLLEDLEFEIDLFTNLSQGRLRTDPGYVALRQIPGIGPVLAAVFVAEVGDVSRFRTAPQLACWAGLTPKHHESDTHVHRGRITKQGSRLVRWAAIEAVQRTPADAGWLVATRARLVERRGRNIAVVATARRLLTLVYYGLRDGHIRALTRPAAQGAA

SEQ ID NO: 158974 - protein, 425 aa, unidentified
MNNDFLSTLFVGIDVSSKTNVLCALDFQGNKLLNIEATNNQPGAKFFLDNIIDCLNSNSLKFVVIALESTSFYSTHIANFLSSSKELLFFKPLVYCLNPKTVANYRKPFVDMDKTDPLDAFVIADFARCGRITCSPWRGAQFLALQRLTRHRLHLVESGTREKTYMISNIYLKFSELAVLDKDEKPFSNTYGVTCAAVLTEFLSLDDIAYSPVEDLVAFIREKGKNRFSDPHKTAKLLQKAARDSYRLDKVLYEPLNVAIASSFNVIKAVEAEIKAVDNAIKKTIKGLNTTEYQSLISVDGIGPVLASGILAEIGTIAAFDSHNALAKYAGLTWRVNQSGNYSSDDTKMTKTGNKFLRYYLIEAANSVKKHVPEYKEYYYKKFGEVTTHQHKRALALTARKLVRLIFGLLTKNQIYSSDKVGEIK

SEQ ID NO: 158975 - protein, 371 aa, unidentified
MAKVRSWAGLDVHAAKVIACVVDGESGEMTVHRLPRDTRAVVAFCVGLPGPVRVAYEAGPTGYGLARVLVAAGVGCVVAAPGKIERPAQDRVKTDQRDAERLVRLLMIDALHAVRVPTSEEEALRDLVRAREDLRGDLMRARHRLSKLLLRHDVRYEDTTSRWGERHRAWLAKVDLGQRGAQLTISEYVGAIDALRIRRHTLEAAIGELIESSPWARDVARLRCLRGIDTLSAVGLAVEVGDFPRFEHPKLLMSYLGLVPSEHTSGEQRRQGAITKSGSQHARRLLVEAAWHYRRPPRLGTILERRQDGQEQAVIAIAWKAQQRLHHVWRRLDRKRGKRRTVVAVAVARQLAGFCWAIACHDQLGESRERS

SEQ ID NO: 158976 - protein, 425 aa, unidentified
MNYKQNEKINQVKESTLVVGIDIGSTTQYARAFDWRGIELGKVFPFSNSREGFESFKAWMQHLQDKYKKLDAIVGIEPTGHYWFDLGAYLEDEGILLVMVNPYAVKQTKELDDNSQSKNDRKDPKVIAKLVTEGRYSAPYTPDGVYADLRIMVANRKRLIREMTQIKNRFARWFAIYFPEYTDVFGDYEAQSSMLLLKKVCTPEAIVELGAEKINQIWRDAKLRAVGMKRATTLCETAKRSIGLKKGSSAARYEMKLLLEDYEYKKAQLDAVMEEIEKLCRKIPESEQMLAIKGIGVITVAGFLAEVGDVRRFESPRQIQKLAGLSLRENSSGKHKGQTSISKRGRSKLRAVLFNAAIPLIAKNPEFKSLHEYYTTRANNPLKKKQSVIAISCKLIRVFYAILARGVTYDAQKMLSDIHRQPQAA

SEQ ID NO: 158977 - protein, 445 aa, unidentified
MQRPVEVRVDEHEPIVERVAAIDVAKASGMVCLRTPHDTIPARRVTKVWAVEATSAALVELGDHLRCERVTRVVLESTSDYWRPFYYLLEAAGLTVWLVNAAQAKNVPGRPKTDKLDAVWLAKLAERSMVSPSLVPTEPMRQVRDLARARFDLVEDRTRVKQRIEKLLEDALIKISSVLTDVLGMSGRAMIEALIGGQRSPQALAELAKGRARRNRAALQRALHGRFTDHHARLARLLLGQLDELTARIEEVTGLLDAAIRALPTPTPAAADSDNPAPAGYDSAVARLCAVPGGGPDSVRAVLGEIGLDMSVFGTAGRLCSWARVAPRTVQSGRRNGRARTGKGNPYLKSALAQIATGAAKTDTFLGERYRRLIKRMPKAKALVALQRSILVIFFHLLADPTAEFTDLGADFYAKRIDRARRTTHLLRQLHALGYQVQLTDTAAA

SEQ ID NO: 158978 - protein, 320 aa, unidentified
MSDCLVIGLDVDSKELVPAVVDCKAGDRIPNTKAGIAKWLKTLPPRCRIGMEATGKHHELVARMAGQAGHVVYVINPRLIKSYAKATGARGKTDAMDAQVIARYVKKESDRLREYVPRSNEQQQMHDLLRKRQTLVEARARLEQSFDVTKSDPRELADIFRALASALSALESDLQRLGRDGEQGPLYKRLLTIPGIGPAVAAHLVYYMTRWPLANANAWIACTGLDPRPNESGGRTGRRRLSKQGAPILRQMLYMAAMGLKRCRNGQPLYDELSKRGHPSTAVFNILARKLARIAWGVFKSGRDFDPAMLKVSQACFQQA

SEQ ID NO: 158979 - protein, 463 aa, unidentified
MSKTAEKGKRKTRSKPKQGLRVIRPDVAGIDLGSREHYVCCPPTPEGEPNVQHFGTTTPELNRLADWLKEQGVESVAMESTGVYWIPIYEILERRGLEVLLVNARALSSVPGRKTDMLDCQWIQMLHSCGLLKGSFRPSDDICALRSLVREKTTMEEQRSDWIRRIQKSLDQMNVCVHHAVSDISGTTGMAIIRAIVGGERNPNTLAKLRDPRCRKPEKQIAAELTGNWRAEHLFSLKQALQMYDHICVGIAQYDAEIQRTLTVLQPPENREIEAPEVTNPTKRKNFRSRGQEPMREALFRLSGCDLTAIDGIGVQTAETILSELGTDLSCFPSEKHFVSYLKLAPKLAISGGKPVTSKRSGSTTTRLGATLRMAALTLRNSNTALGAEYRRIARRKGASVAVFVMARRLATLVYRLLHYGQAYVDEGMQAYEERFKAARLRTCKQIAKEFGLTVLEPDEAVA

SEQ ID NO: 158980 - protein, 352 aa, unidentified
MVVAVQYRSPSLNKNVMVQIYGIDLGMSSFDVSFLSESGSVRHLSGVKNTVHGISKFLLSLPSAAVLCAEHTGVYGYLLLRLCTLNRICLCFVPGYQIKHSLGLQRGKSDPLDACRIREYAERFYDLLRPCFYAGEEMSELQELYRTRSLLVESRKRLDTLNIGDNCKSSVSLAAVHARRAVLAELNTQISGLDHEIEALIQNSSEFSRNYQILTSIVGVGPVTSCELIIKTENFRKLDTAKKCAAYAGIAPYPKESGKMKCGHKISPMGDKQLKTLLFLCARSAKEHNKEIRLYFLKKHKVEKKHFFVAMNNIANKLLRLIYSLIHKQQTYDRDYIQRDPRCVVISDTHKC

SEQ ID NO: 158981 - protein, 367 aa, unidentified
MKQQTSATSETRIKDKMIIDFSGTTVYVGIDVHQKDYQVAKVHSGICLGNHRMSANGDLLIKHLRSCYRGAEFKCVYESCAWGFNLQRRLTAAGMECIVVHAADVSTSDKERRRKTDKVDALKLARNLAVGELKGIHVPDETIQKQRNLIRYRSRLIRDINRSKNRLKSLLKYQGIEIPVQYSKNNWSRNFLIWIEEQAAKDEQLADTLLLMLDQIKLLRQLLLKTEKKLRELRKGKYESKVKLATSVPGIGPTTAMLFLLEVGDINRFKGFDALNDFIGFCPDTDSSGETDRDRGITTRRHKQLRSGLIEAAWLAIRTDPALMNCYQALTKRMKGTHAIIRIARKLLRRLRAVLLTGMEYQTGVVA

SEQ ID NO: 158982 - protein, 429 aa, unidentified
MNYNTQNAKIASITEKTLIVGIDVGSETHYARAFSWRNYEYSKKPFAFSNDEDGFASFKAWMDDIAEKHEMEKVIPGMEPTGHYWLNLGAYLQGQGMRPVHVNPHHVKKSKELDDNNPNKNDRKDPKTIAGLVNEGRFSYPYIPTGIYAEIRNLSNLRIQTQEEITRIKNRITRWFSIYFPEIKDVYRNPDAVSGLMVIKQAPLPCDIKGLGVDGVNKIWRDARLKGAGIKRAKTLVTAAEHSIGNTEAPRSARKEIRNLLNDYEIYKSRMDELIEEIEELLSGIPYIDKLMEIHGIGIKTVSCFIAEVGDIERFDNPKQVQKLAGYAIVADSSGKHNGESRISHRGRKRLRYALYEAAISVIGKNKEFKEIHHYYRTREKNPLKKMQSVIAVACKLIRIFYTILTKGIDYDGEKMLRDIVRPGMQSAA

SEQ ID NO: 158983 - protein, 430 aa, unidentified
MEVIYPKACGVDVHKSFIVAVICDSTSVKPQYLRNRFSTFNNSLIEFRNWLLANDCQNVCMESTGKYYVPVYNALEGHISNVVVANPKWVRCIKGEKDDNKDAKWIADLFKLGIVRGSFIPNKDIRILRELTRYLYKLTNMRTSEKNRFTNALTVGNCKLDLVFSDIFGKTSSAIINTILSQNEYDDEDILKNIDKHCKSSNEDILNSISGISWESSQKQLMNVIQEHIDYLDKSIKTVREIIDSIIAPYESAINLLCSVPGVDRKSAITIISEIGTDMSQFSSHYRLASWAGLAPGCNESAGKKKSVKISRAGVYLKPALVEVAHCAVKDKDNPYYANKFNVLSKRRGKKRAYIAIARKILVAIYHMLSTGELFNPSDLSRVETSDKDKIKFTKNNFMQSTKQLISLGLTIDDLQTLIQSKISESTPVI

SEQ ID NO: 158984 - protein, 331 aa, unidentified
MEYYVGLDVSLKQTSICVVDRAGLVVREGVVDSDPEAISVYVRSKAPEAVRIGLETGPTSTWLWTELKRMGLPVICIDARHAKAVLKMQINKNDRNDAIGIARIMQTGWFKEVHVKDIDSHSVRALLASRALLVKIKRDLENHVRGLLKNLGLVIGRATFNVFAARAEELIEDRPDLVAAVRPLLEARNAVEQQVSELDRKVMKLARRDAQVQRFMTVPGVGPITALAFKATIDDPARFARSRSVGAYVGLTSRRHASGEVDWSGRISKCGDAMLRSYLFEAAGVLLTRPEMVHREGLGYEARQAQRAPQGQGCSRAQARGHSASHVDRRN

SEQ ID NO: 158985 - protein, 400 aa, unidentified
MRAVFGIDVSKTSSEVAILVNGEKVHGYTILNDAIGFNRLLGDLKTVHNPEIIFEATGVYSRRLQAFLEEYSYAYTRLNPLEAKKQLDSLRVRKTDKIDAEKLAKSQLVHNRKPTYVQEEVYQHLRDLSRFYQNMTEDLVRTKNRLHKVLQVTFPELENLLSTPTGEQYWNLVMAFPCKEFVLSLSQSNLCEIIRQSTSKRISEKRVTYLVDKLTKLANQSYCAVKKTSPMLEEVRYYAQELLRLSERRQVVLSDMVALAQPLPEYDILRSIPGIAETTATSIIGELGNIRRFQSTNQINAFIGIDLKHYESGNFLAKEHITKRGNPYARKILFKCIHNIASASHTNPCHIADFYEKRKRQSTTASTKPHTIASIHRLIRTMYYLITHNKLYDYSLTQNR

SEQ ID NO: 158986 - protein, 346 aa, unidentified
MNANRIGVDLAKSVFQAHGVDAKERVVWRQRLTRGRWLEAVCARLEPGGEVGMEACAGAHHWARELQSRGYWVKLMAPQFVKPYVKSNKTDRNDAEAICEAMSRPGMRFVEVKSVEQQDIQAVHRVRSELVAQRTAKANQVRGLVAEYGLVAPSGLWKLKSTLPIWLEDAENGLSERFRRLLFGLWSDLQSLCQRVSELDEEIASIAKSDPVAQRLQQLRGVGPVTATALSAAVGRGTQFRRGRDLAVWLGLTPKQHSTGGKARLLGISKRGDPYLRRLLVHGARAVIQHAKDKDDPLSQWVMRLVARRHVNVATVALANKTARIAWAMIRTGEDYQHERAAGLAV

SEQ ID NO: 158987 - protein, 343 aa, unidentified
MTITVIGLDLAKNIFQVHGIDESGRAVLRRKIRRSEVLPLFSKLPPARVGMEACHTSHYWAREIARFGHDVRMMPAQFVKPYVKSQKNDATDAEAICEAVQRPTMRFVPIKSENQQAALMLHRTRDLLVRQRSSLISSIRAHFAEFGIVVGQGIRNVERLLALLGAEGDNRLPALAAEMLGILAEQLREIAARVREVEVKVLAWHRANPASRRLESIPGIGPITASAIVATVGDPRQFQSGRQFAAWLGLVPQQRSSGGKERLGGISKRGDGYIRRLLVHGARAIVGWRKRSAVHTTPWIARLLERRPMNVATVAYANKLARIAWAMIREDRYNPVRAFAAVG

SEQ ID NO: 158988 - protein, 344 aa, unidentified
MMPHFVGLDVSQKMTAICVVDNAGLRLWRGQCPTAPEQIAAMVRRHAGDNSRIGIETGAMTPWLVHELRALGLEVICLDARHARAALKMQINKTDQNDAEGLAQIVRTGWFRSVHVKSFDSHRARALLGARAQLVGMTTRLSNHIRGVLKTFGLLPGAMRGLRFDRKVEVLLEDRSDVAPIVRPMLVAWRQLREQISAFDKAIRVLVRSNSPCRLLMSVPGIGVLSALAYVSTVEDPARFSQSRSVGAHLGLTPRQYQSGDVDRSGRVSKCGDTLARTLLYEAAVVIMTRVKKASELKDWALAIAKRSGIGKARVALARKLSVILHSVWRSGKPFRWTEQAITG

SEQ ID NO: 158989 - protein, 343 aa, unidentified
MKYIGMDAHSRTCTFVVLTKSGKVLGKTTVETREDKLLGFVKSVKGPKNLAYEEGVMSQWLYLLFKDEVDELVVCQPQEKKGAKTDELDATEIADLLRVGRLKSVFHADNVLMNLRITVSGYDDVVQELVRAKNRYKALFRQVAIPTGATGFYESKQILLSLKGDERFYVACTLFEQIALLEQQRGGYVERFEANARKYKAIKLLMSIPSIGPVRANQIVAILVTPYRFAKKYNLFSYAMLTKHNRISDGKLYGKQRALGHAELKRVFKSAALSAIKSDNAFRRKYDEMMAAGKDDRAARHAVAKKIAATVLGVWKSGKKYNDKHKEVTRRRNRIAIAELENL

SEQ ID NO: 158990 - protein, 353 aa, unidentified
MAIVAHTHPFVIGVDAHAKTHTLAILAAPLGELVDTAQFPTTHAGLQRAIDWAGRRTGADLDVLWVIEGIGSYGARLAQTVAQTGYQVAEAPRMNARTNRGVGKSDPLDARRIAAAALPLEITHLRNPRDDDGERAALRVLVTAREHMTTERTGTINALTALLRTVNLGIDARRPLTSTQVTEITRWRARAETVAAATARAEAIRLAKRVTALNDELAENRLRMEALVHATPAATLLDEPGIGVVTAAITMTAWSHVGRLRSEAAFASLAGVNPIPASSGNTARHRLNRGGDRRLNRALHMAVVTRMRCDPATRAYVERRRTEGRTNKEIRRCLKRYLARRIYRQLNRAVTPT

SEQ ID NO: 158991 - protein, 413 aa, unidentified
MGHVGGGPRLIDEHEAFRCQIELAVEPVLALPQDVGAVLLDRVPGLYGMARPFSPASDMMLVLEEERSGPMSIVILGVDLGKNACSVVGVDAAGAVVVRRSMRRQTLVDYVAKLPVCVVAMEACCGAHYLGRLFAAHGHEIRLMSPEYVRPYVKAQKNDDRDAEGIAEAASRPTMRFVELKTQEQLDIQTLHRVRSRLVAERRSLTNQLRAILLERGTIFPVGRRKLELGIDALLADEDTTLSPRLRQLVAELRAEWRELDTRVEALNGEFVELARNDTTARRLTSIPGVGVLNATALIAAVGDASSFAKARDLGAWLGLVPRQHTTGGKPRLLGISKRGNTYLRTLLIHGARAALPSLARSETPLGRWLTGMIERGVHRNAIVVALANKLARIAWAALRKDATFERGYPVAA

SEQ ID NO: 158992 - protein, 520 aa, unidentified
MISAESDVRRHCCHPFQPALSETAYKACSLAHMAHSAYTEAASPAVAPAKNADWMNAHNARLRSPYAVQDKPLLKTPTILIRKERDNMIKINYMSTLFVGIDVSSKSNVVCAIDFDENKYISSSFKNNQPGAEELSTMIADCMAHHKNLNTVVATLESTSVYSVHIANFLSTCETLMPYKPYVFCVNPKMTANYRKSYIGMDKTDPLDAYLIADFARCGRIKKCEPWRGSQFLALKRLTRHRLHLAECITREKTYMVSNLYLKFSELQLLDDDSQPFSNIYGATSSSVLTQYLSPQEIMDSSEEELLQFLADKSKNRIADISKTSELLKKAARDSYRLDKCMYEPLNVSLASSFNCIQTYQKEIKLIDQAIKKTINGMNPNAFIILKSIPGIGPVWAGGMLAEIGDITAFHSSDALAKYAGLTWRKSDSGDFASEDNPITKAGNTYLRYYLGEAANSVRRHVPEYGEYYAKKYAEVTKHQHKRALALTSRKFVRLVFGLLVKNQLYTGEQLDAEYNIESN

SEQ ID NO: 158993 - protein, 347 aa, unidentified
MNDHRVYVIGIDLGKNWFHLVANDERGTELFRKKLNRGQLAEFAVTAPRCLIAMEACPGSQFWGRRFQQAGHELRIIPAQFVKPYLKSNKNDFNDAQAIAEAASRGSMRCVPLKTTDQIELQALHRVRQRFIVERTAVVNQMRALLLEHGIVIPVGRALFARRLPAVLADPQSGLSPRLSQIISRLRQRWLALDEEIDTASAEITQIARESELCRRACTVPGVGPVVSTALIAAVGNGAAFKRARDMSAWLGLVPKQYSTGGKSNLGGISKRGNAYLRMMVIQGARALMIHMKRDQSRMGLWLREVEQRSHPHVALIALANKIVRICWKVLTSQQSYRPFVEVPATD

SEQ ID NO: 158994 - protein, 338 aa, unidentified
MTLYGGIDLHSNNVMISIIDAQDHLVSEKRLPNSLSGIQSHLDPYRSRLDGLVVESTYNWYWLVDGLAEQGYDVHLANTAAIQQYSGIKYTDDASDARYLAQLLRLGILPEGYIYPPAQRSVRDLFRRRLLLVRQRTMQHHSLQSLIARHSGIRLSAQQVKQLKSGDLKAYFRYPASLETARILHRQMAQLSQAIDQVEKRVGAQCQDSADYDLITSMPGVGAIIGKTILLETGPIERFPAVGNYVSYARCTPTARISNGKQKGQGNRKNGNRYLAMAFVEAAHYAAIWNPTIKRFYQRRQRRVHTMVAKKTVANKLARACYHMLKRQERFDVKRAFS

SEQ ID NO: 158995 - protein, 368 aa, unidentified
MGQKSSKLYVGMDVHKESIDIAVAEEGGEVRHHGQIAGDMNALWRAVRKLESLGRELVFVYEAGPCGFGIYRGLTGRGHTCWVVAPSNTPRRVRDRIKTDRRDSLKLAGLARAGELTPIYVPDVRDEAMRDLVRSREDAVVMQRQARQRLAALLLRNDVRYAGKTAWTAAHRRWIAELKLPQCAQRLAFEEYVQAVEEASARVQRLSQCIEQELATWRWRSVVAALQACRGIQLIHAVRIVAELGDLCRFSHPRRLMAYLGLIPSEDSSGEHRHQGAITKAGNSSARRALVEAAWAYQYSAKVSALIARRQADVPKAALDIAWKAQVRLCARFRRLAARGVNRNKIVVAIARELAGFVWAIAQQVKPV

SEQ ID NO: 158996 - protein, 346 aa, unidentified
MLYAGLDLSRQRLDVHVLDEDGRTVEVTAVRPDAGALRALAARVLRHGHEVRGAIESMTGARFVHDTLERWGWEVEIADAAKVKGIAPLAAKTDRIDAWVLAELARLDLVPAIWLPDPVIRAERERARFRLHLSHHRTALKNRIHATLMTFGQPVPMADLFGARGRELLAGQALPEPWTATLTTSLAMIDELDARIDACEAELRVLGADHPSIPLLLTVPGVGWVLAYTIASEIGDITRFASPKKLTGYTGLCPLVRQSGNRDVRGPLAKNGPRYLRWALIEAATHAARHPAYRLRYERTKQRLGRQRGAKVARVELARQLVEAIWHILTKREPFAPAGPTIVLVA

SEQ ID NO: 158997 - protein, 359 aa, unidentified
MSRCIPTGAATIILGVDTHKDTHVGVALDGLGRFQGALSVAANPAGYKRLVEWASEFGHLEHAGVEGTGSFGAGLARFLKAQEIKVFEVIRPKRRDQYRSGKSDPIDAEAAARAVLAGTATGEPKDADGEVEMIRTLRTTRRCAVKARAGAANQLQTLLVTAPEGLKSDLCGLSTARLVEKASRLRPGANPSNVEAATKFALRSVSRRYQQLSEEISELDEQLDRLVTEAAPELVAVEGVGTDTAASLLIAAGDNPERLRDEAAFAHLCGAAPIPASSGKKSVRHRLNRHGNRDANRALYVIALCRMSRDERTRAYVAKRTAEGKSKKEIIRCLKRYIAREIYRILSSLPSRDSSISMP

SEQ ID NO: 158998 - protein, 344 aa, unidentified
MRVGVDLAKQVIQVHAVDGHGQVLERRALARAKFLGWCARLPAGCMVAMEASSSAHHWARQLQALGLDARIISAQLAEPYRREGRSGKNDANDAAAICEAASRPQMRFVPIKSIEQQSMLCVHRLREGLKADRTACINRIRGLLLEFGVAVPKGPSELQRQLHGLLEDAGNELGGLARLALQRARQQWHELDEHLAWCDERIAAHRANPAVKKAATLLGIGPVGASAAVATVVDFKQFKSGAQFGAWLGLVPRQRSSGGKSQLGGITKRGDVYLRTLLIQGAKSAVMTASKRSDRISLWVAALRDRVGWQKAVVALANKNARILWAVMTKGDAFDANHLSVKPI

SEQ ID NO: 158999 - protein, 399 aa, unidentified
MTSSYGVFLGLDVGKGDHHAVALDATGKRLHDGPLPNTEPKLRALFDKLAVHGPLLVVVDQPATIGALPVAVARACGHQVAYLPGLAMRRIADLYPGNAKTDARDAFIIADAARSLPHTLRPVDTGDEALAELDGLVGFDDDLAGEATRLGNRIRGLLTGIHPTLERVLGPRITHPAVLEILSRCGGPTGIRKAGRRKVTAIAATHAPRLGEKLVADIWTALGEQTVTVPGTAAADTVLPRLADSLKTVLQQRNQVATEVEDILDAHPLAGVLTSMPGIGVRTAARILLEVGDASAFKSSAHLAAYAGIAPVTRSSGTSIKGEHPTRNGNRKLKRAFFLAAFAALHDPTSRAYYQRKRDEGKKHNAALICLARRRCDVLYAMLRNGTHYRHPPPAPAAA

SEQ ID NO: 159000 - protein, 327 aa, unidentified
MTQFYLGIDVAKKTFDAALLGGPQTYAGHFSNDKQGFVKLARWLQKRDVQQLHACLEATGRYGEALAHYLYQQGYQVSVVNPMRIKKYAESKLQRTKTDAVDAKLIAEFCAKEKPVLWSPPSEAESELQALVRHVEALKVDRQRERNRQQSGQQSPQVLQAIEAHLVFLETQINDLEQQINDHIDRHPDLKQKKRLLVSIPGIGDVTAAKFLAEVPDVSRYPQASQLAAYAGLTPQYRQSGTSVHTPGRLSKIGNSHLRAAFYMPALSAARFNPIVRTLVQRLEAKGKSKMTIIGAVMRKLLHLAYGVLKTGKPFDSDYAVNIPFYS

SEQ ID NO: 159001 - protein, 446 aa, unidentified
MKKSSRMSIVHPHAAGVDIGAEFHVVAVPPDADAEPVRTFQSFTGDLHRMSDWLKTCHITTVAMESTGIYWLPAFEILEAAGFNVILVNARDAKNVPGRKTDVNDAQWLQKLHSFGLLRASFRPEHDISVLRSYLRQRERLTEYRAAHIQHMQKALMQMNVQLHHAVSDITGVTGLSIVRAIVSGERDPSILIQYRDVRCKKTPEVLQQALTGNWQPEHLFELEQSVAFFDFYQEKICECDDQIETSLLQLSTEIKEPEGVLPPARHRTKQPNQLSFDVRPLFWKITGADLTQIHGFGPYLALKFVAECGTDMSRWPDASHFTSWLCLSPGNKISGGKVLSSKTRRSSSRIAAALRLAATTIGRSDTALGAFYRRLSSRIGKAKAVTATARKLAILFYNALKYGQKYVDPGADYYEERYRSRVLDGLKRRAKSLGYSLQQDPELCV

SEQ ID NO: 159002 - protein, 340 aa, unidentified
MRVLYAGFDLHGNSNYLGIMDGEGKRVFRKKLLNDLPWIREVLVPFKEELVGIAVESTYNWYWLVDGLMEEGYRVHLANPSAIQQYSGMKHSDDRHDAFWLAEMLRLGILPEGYIYPKEERPVRDLLRKRGHLVRLRTSLVISLQNILSRNLGRKVNVNDVKALREDRVVPLLEGHEDLALAGRVSKEAIDFLTHQIRRVEGVVLKKITLREAYRYLLTLPGVGKILALTIMLETGSIGRFATVGDYVSYCRKVPSQWTSNGKRKGSGNRKNGNKYLSWAYSEASELARRFDLEPRAYYHRKMQKSNAAVAHSALAHKLARAGYYVMRDQVPFDPGKLFK

SEQ ID NO: 159003 - protein, 420 aa, unidentified
MKAHVVDDFAAIIGIDWADRKHDVCEFSIDTKKYTFSVILSKSEAIHDWAMSLKERYPDQLIAVTCELRKGPLIYALNKYPHLVIFPINPSTVAKYRKAFTHSGAKNDPSDALVQTEILALHMDKLSPILPECPTIRALAQLVEYRRKLVQDRVDLSNRITTTLKNYYPQVLDWFKEKDTLIFCDFISKWSSLDNAKKARKTTLLNFFNQHNSRYPAVNEKRISDIKEARSLTDDKGVIEPNQIMIEVLINQLKVYLVSIERMDAEIKARYKEQNDRIIFDSFPGAGPQLAPRLLVAFGGNRDRYQSASELQKFAGIAPVIEQSGKKKWTHWRYSCPTFLRQTFVEWAGLSIRYSFWAKAYYQQQISKGKPHNAAIRSLAFKWIRIAYRCWKTNTPYSETIYLNKLKVRGSPLLEYAVNR

SEQ ID NO: 159004 - protein, 337 aa, unidentified
MEQRYVGIDLHRRRSVIVTMDHAGEVLSSVRIENDPVAMSLAVAEAGEGAEVVFEATYGWYWLADLLEADGHVVHMAHPLAMAGMTNNRRVKTDWKDATLLADVLRMGSLPEGWIAPPETRELRELVRYRAKLVALRSGLKAQVHAVMAKHGILPTRVQMFGPGGRAQLDALELPAGYAMRIASLRHLVDVYDKEVAVLEREVHRHLKDDPGYRAIQQLTGVGKVIGAIFVAEIGDIDRFPSAKHLCSWAGLTPKHRESDLTKFQGEITKQGSTLVRWAAIEAISGYRGGARLQADYHRIAERRGVYKARVAVARKLLSLVYYGLRDGEIRCLTQAA

SEQ ID NO: 159005 - protein, 354 aa, unidentified
MNPIIGCDAHRRYSLFAVLDTTTLSAEQTRVNHQPGVIRAFLSDFPEGTPVALETVGNYYWIVDEIEQAGCIPLLAHAAKAKVIMGNVNKTDKLDAQGLALLIHLGSLPTVWLPPAEIRDERELHRTRMSLSKVRTALKNRIHATLAKYALNTSAHSDIFVGKGRAWLDRTIHKLPPETGRCVDQELVLLDATMEQISTLEKRIRERIRLTPNMQHLKSLPGVGNILAIVIQREVGTADRFPSAGHLAAYAGVVPKVHSSGGKTRYGRMRKQANNYLKWAFIEAANVVVAHRHHASWRDKKVTQVYERICRRKGHAIAVGAVARHLAESAFWILKKGEDYQDPALRRQGSPKLV

SEQ ID NO: 159006 - protein, 311 aa, unidentified
MPAKADPHYVGLDIAKDQLDYCINDSDEGSLLNTHEARAAFVEKLKLLGLARVVCEASGGYEKIVVAELLEAGIEVCVVQPGRVRAFAYAEGLLAKTDRIDARLLRRYGEKIALRLVVPADAAASTLRELLEHRRQLTVQLSEVEGRLALAGPTLHKLLQRQKTFLQKQLKAVEAMMGKHIGHDPDLRSKSERLQQITGVGPILSATLLAYVPELGKIEAAQLSALIGVAPYPKDSGTLHAPRHVRGGRAQVRHVLYMAAVSAARSNPILAAFYQRLLANGKPPKVCLVAVMRKMLCLVNRVIQDPDFVLA

SEQ ID NO: 159007 - protein, 339 aa, unidentified
MEHVAIDLGARKSQICVRSADGQILEEKRWPTKDLDTYLAGRPTSRVIVETCAEAFCVADAARKLGHETRVVPATLVKTLGVGARRLKTDLRDARALSEVSSRIDLPSAHIPRTESRDRKTMCGMREALIGARTKIINTVRGWLRSRGRRIERGGKASLRKRVEAAWEGQLPSYVDRQLKLIEVLNTQIAEADAEMKSWATADETCTRLMTVPGVGPLTALRFVAALDDVTRFESAHQVESYLGLVPGESSSSERQQRLSITKAGPRALRWVLVQAAWALHLRCRRPEAIPLQLWAHRIEQRRGRRTAIIALARKLAGILFALWRDGSVYEGSRGAKMI

SEQ ID NO: 159008 - protein, 410 aa, unidentified
MDVFLERCAGLDVHQASVVCCVLIGAAGRKPQKLLRSFGTTTRDLKTLQAWLAEHGVTHVGMESTGVYWKPVYAVLEGHVDLTVGNAHHIKNVPGRKTDVKDAEWIAQLVRHGLVAKSFVPPPAIRDLREMVRHRRTLIETRTAVRNRVLKLLEGANIKLSGVASDVFGVSGMAMLEALAAGTNNAAEMAGLARGRMRSKHAALEAALDGRMGEHQCFLLGMHLRNLKAIDQDLEALDARIGTQLEPYQVQHRLLTQIPGVDWVTAASIIAEIGTDMDVFTTARRLAAWAGVAPGNYESAGKPKGAGTRRGNVFLKSALFAAASAAVRTKGSYYRDKYNRLRARRGPVRAIMAVAHKLLLAAFHMLSTGEAFRDLGEGYLDQVARKRSTTKLVQRLSNLGYDVMLVPKAA

SEQ ID NO: 159009 - protein, 347 aa, unidentified
MKVLIGVDPHKGSVAVAALDEATGEFLERASFPQNRAGLRSLERWARRFAERRWAVENAGGLGRHLAGRLAAAGESVVDVPPKLSARVRVLSSGNARKNDGVDALATALAASRNERLAAVDPEAASEALRLLSERREDLVAERTRALNRLHALLRDLLPGGVVGKLSADRAARILRGIRPKEGASARLRRGLASEVLRDVRTLDRKIADLSGRIEAEVEASGTTLTQIFGVGPILAATIIGAVGNVGRFPSKGHFASYSGTAPLEASSGDVVRRRLSLAGNRKLNYALHMVATCQARSEVRGGAYYRKKIAEGKSRKEALRCLKRRVCDAVFRSLVADSRAPSSSAA

SEQ ID NO: 159010 - protein, 457 aa, unidentified
MYRELHPLRQALSDKLKADLPPAGPGIEPQHLLQTYLDRLTMYVGCDVADQTFALFAVDAAGEELGHCLNVPNHRQGFEQAWEWLEGLRSQHHLRIIVLAIETSGIYYWAWWDFLAGRPNLARVLYNPRTTEHMTEVLSKRVRNDLVDAYALAEQVRLGSTPEVVLMEDCDLLTARICSRAARDLAQLINDKKNQLRSLLRAYNPALCQVFPKAHLHHPALYALLQHFVLPDEFAAAGPAPIAAILTDHCRTAFGREEAEQLVALCRQTLTRPIGRDVIRYRVHQLTQAILTAQQHKQHFLHTGYGLIESRTETRLLRVVKGAGVSNTLALVSEVGDVHRFPDGSHLASFLGLTTSKHVSGTTLFQSKHITKQGSPYARYAAVNLAGHLKRYVPKYRQMYQRIKARKSRQGHFIALVAIARDFVTNVLYDIWRYQRPFFLEVDDYRDYRRNHPRSYD

SEQ ID NO: 159011 - protein, 334 aa, unidentified
MIGLDIAKHVFQVHGADAVGHVLFRKRVTRAKLIGFLAAQTPCVVAMEACRALLGTRDRQAGPPCAIDRACLRQAVRQTAENDAADAEAICEAAQRPSMRFVPVKTEEQQANGIVFRARDLLVRQRTQCVNALRGHLFEYGYVFPQGITHVATLVALVEDSRSSLPESVRTILKLLVDTFTALEAQIAALDAEINERSKADPTARRLMTIPGVGPIASTAITALVPAAEGFAAGRDFAAWLGLTPLQKSTGGKQKLGAVSKRGERRIRRLLIIGASAVVQQASRRGAPKGSWLAQMLARKPKMLVTVALANKMARIVWALLVKGGIYRAPVVAA

SEQ ID NO: 159012 - protein, 444 aa, unidentified
MQILYSRCGGIDVHKDSVTVCVLVYSGQPEPDIRRKEFETHFKALLNLKMWLLAQKVTHVAMESTGVYWKPVWQALEGHFELILANPYQVKNIPGKKTDARDSQWLAELLAHGLIKPSFVPPREIREQRDLTRYRVKLTEERNRIHNRIHKVLEDACIKLDTVASDILGATGRAVIQGIIDGVESPNFLAERAKGRLLAKIPELRLALRGRVTDHHRLMLHELMEDLEFVERKILRLEQCIASRMDLQTVARLCAIPGIDMITAWAILAELGTDMSLFAGPKHAASWAGLCPGNHESGGKRLSNRTRKGNRWLRRAFCQAAWAATRKRNCYLAAFFYRKAGKHGIRKAIVATAHRLLVIAFCILRDGTDYRELGGDYFDLLRPERTRNRLVRRLQRLGLDVFLQPRAISEDHADAPPAPPRPRRGRPCLCLQRHIPCIHNALKN

SEQ ID NO: 159013 - protein, 339 aa, unidentified
MGQVSTVGLDIAKTVFQVHAVDHEGAVVARHALRRGRVLKWFAGLTRCVVGIEACASANYWARELAKLGHEVRLMPPAYTKAYVRRNKNDAADAAAICEAASRPSMRFVAIKSEQQQAAAGLHRVRDLLLRQHTMLRNQIRGLMAEFGIVAARGRQGFAALLAILADSEDQRIPSPLREALLSTAEVLRDVDRKIAAIDRQLVAAGRDNATYRHLITAPGYGPIVASAMVAMAVDPKAFRRARDFAASLGLTPRQDGTGGKVKLGPISKRGNGYLRRLLVNGATAVLNSKRAKQDPWLRKLLATKPRKVAAVALANKMARIGWALMMRQEDFRSQSATA

SEQ ID NO: 159014 - protein, 378 aa, unidentified
MSNCTRYLGLDVHAETITAAIAEGRGKIRSLGKFANRPEAVRKLIEKLDGGKNLKVCYEAGPTGYALYWQLTKLGVDCEVIAPSLIPKKASDKVKTDRRDAEKLAQSYQSGDLTPVWVPTLEHEALRDLVRQRAAAKADESRAKHRLVKHLLRRGLREPNEARAWSHPWWRWVQSLKFDHEAQQVAFADCIAEVLHMGQRLARLDKEIDRLVAFAPPHMRAVIEALQALRGVAKLTAVTIATEVGTFKRFRRPTELMGYTGLVPSEHSSGQRETKGGITHTGNAHLRHVLGEAAWHARHRPWLNKRLKRLLPTLPAGVAAIAWKAQERLHKKFARMTFHRKHSGTVASAVARELVGFIWAIGSMVESQQVAKTKAQAA

SEQ ID NO: 159015 - protein, 316 aa, unidentified
MGDPGIYVGVDVAKQRLDVALRPSGEGFAEANDKPAVSRLIKRLKALDCTRVVVEATGGYETVLVGALYAAGVPVVVVNPRWVRNFAKGMGWLEKTDRIDAKLLALYAERAELKVQQLPDEVTRRLAELCARRIDVLEMIETERNRLEHASSAVRRAINSHIDYLRKQLKSIEHDIDGAVRGSELWRHNNELMDSVPGVGPTLRACMLAWLPQLGQLNRGEAGKLVGVAPLPDDSGTIRGVRRIFGGRAPLRKVLYMATMGAMQHNPHLRAYYDRLRARGKPHKVALVATMRKLLLILNAIIKNDTPWSEPCPVNA

SEQ ID NO: 159016 - protein, 379 aa, unidentified
MFENITYVALDDHKRKHQVAVLLPGVERDDAVTWKVENTPAGIRKMVRKVLKMAPGDVRFCYEAGPNGYVLQRQISKFDRVTCVVMAPSRTPRRPGERVKTDRRDARKLVGLFRAGELQAIVPPMEEEEAIRDLCRCRRVAQMRATASRHQLDKFLTRNGYIYRDGKNWTRRYWEWLRNLKFDDWRWERTFQAYIFGIEQDEDRVKRLDLEIVRAAEEEPYRTLVGFVRCFLGLDTLSAMILTTELYAVGRFTTAPSLMGFVGMVPSEDTTSWDPHRGPITKTGNGHVRRILVEAAKHYRHPARVSKALAQRRKGQPDWVIAIADKAQTRLHQKYWKLVLGKGKHPNVATIAVARELVGFIWAVLIQAATTQRIDELVA

SEQ ID NO: 159017 - protein, 415 aa, unidentified
MKVVFPTCCGVDVHKTFLVATIITTPTDSLQPHYQKKRFSTFNSDLNRFADWLLEHNCQDICMESTGKYWVPVFNILEKRGIRVVIANPKWVKAVKGNKDDAKDSKWIGDLFRIGLVKSSFIPNLNIRILREFTRYRYKLVSMKSSEKNRFQNAFTVCNVALDSVVSDMFGKSATAITDYLTSDESFDSEHCVSLLQRSLKKKAEQVLESIEGFFIADEQKARIKIIREHHDFIEKMIAKVDTCVNEMVAKYEGEINLLCTIPGIDRRSAITIISEIGTDMSQFGSSKRLCCWAGLTPGNNESAGKKKSVRISRAGVYLKPALVQVAHAAVNDNDHPYYKLKYERIAKRKGKKRAIIAIARMILTAVYSMFCTGEVWNPVDLYKVDMPEHLKEQQLAKAIKQATRFLEKQGLSVA

SEQ ID NO: 159018 - protein, 382 aa, unidentified
MLSENTLRIAIELSVSSWLIAVLVPGADKSRLRRIDGGDARALLALIGEFRSFASAKCGQAVDVACCFEAGRDGFWLHRFLTAHDITTYVLEPTSILVNRRARRAKTDRLDAEGMLRVLAAWLAGDRQVCSMVRVPTPEEEDAKRPHREREHLVREKLRIENRIEGLLFTQGIRGRPSLRSWERDLAELRTGDGRALPRLLQAELNRLRRRLVLTLQLIREMEVERAETQATTIDDAVTKKITALQRIRGIGENFSNVLVHEVLYRSFANRRQLASYVGIAPMPYQSGGMDLDRSISRAGNQRARTTLIQLAWLWLRYQPASALATWFRDRVGTLQGRTRRIAIVAMARKLLIALWRYVETGVLPEGVELGVELGAAMVGPA

SEQ ID NO: 159019 - protein, 394 aa, unidentified
MILVGIDIGKNKHTFSIIDKNSGEILLSPSDFSNNLKGFLFLIQKLSSYTKSELLIGMEDTGHYHFALLKYLLDRRYTVVLINPTTTDLTRKLQGGITKNDPLDSLTICDVISSNHRNKPYRVTTLNRFDLYEQKQLTRHHHNLKEELNTYKNRLQKCIDIVFPEFNSLFHSKYGIVYMNILKAFSSAKAIANADIRSIRKCFEFKGQGKRISLSAEQLKLTAKSSIGIPSVAEEIQIRHLVSQIELLEKQLSEIDKRIEEFSLKNNSPILTIPGISHFSGTSIISELGDICNYTKASQIIKFAGVAPYHYESSQFTAQHTAITKKGSKYLRKTLYQIILPVISNNEVFYAYYTKKLNEGKGHRCAQGHCIRKLLRVIYHLLSTRQPFNPKLLV

SEQ ID NO: 159020 - protein, 320 aa, unidentified
MSELISLCIGIDVSKAHLDVAFGAEGTVERLLNEPAAAEALATRLRELHPGLIVLEATGGYEFEVASTLQLAGLPVLVVNPRRARDFARGMGRLAKTDAIDARALAHFAQVLAGHPDLHLKPLADEQLQQLQALVLRRRQLVGMLSTERARLLITHRTARKNVESMIQVIKQHLHEVDGELTAHLEEHHSVLTRLLRSVKGIGPTSAATLIAELEELGHLPRRQISSLVGVAPMNQDSGQLRGRRAITGGRAEVRKTLYMATLSAVRFNPTLRIFYEHLLALGKPKKVAQVACMHKLLIILNAIVRDQQPFQPRAAIMSA

SEQ ID NO: 159021 - protein, 315 aa, unidentified
MTKPVIGIDVGKAKLDVGLADEKRVRVWANDEPGRAELSDWIVAQEASLVVVEASGGYETALVSELVSRGQAVALVNPTRVRAFARAEGILAKTDKIDARVIARFGVTMKPQARARREAAQVELNELVIRRRQLVLMLTAEKNRLQTASPAMQAHIARHIAWLQAEIEALEQQISQAIEANPAWAETAKRVDSAPGIGFITAATLVADLPELGQLNRQKIAALVGVAPFNHDSGKHQGKRRIFGGRTSVRSVLYMATLSAIRHNPVIKEFYQRLLNTGKLKKVALTACMRKLLVILNTMVKTGQDWNPPTPSPAI

SEQ ID NO: 159022 - protein, 391 aa, unidentified
MIYVGIDVSSEKHNFMIMNHENKFYSKESIEIPNDELGYKKLHKSIQEFCGATKDYKVRIGLESTAFYHITIVAYLTRMKYEVMVINPSLVTDYKKGRKVHSAKNDNLDAIAICKFLKDPETEFIPYTSISYHSEALKSLSRERYRLVKRLSQEKLRIYRLITLIFPEYLKLFTNIYKGCPKEIITKYPSPNKIKTAHISTLSDMLHGGCKTNAEHLHDVASKSIGKSDDYLSFELIKSYSCLDFIQSQIDSYDEKIKEIIDSSNTKIMTIPGIGYTTASLILGEIGDLSKFKSADSIVAYAGIDTNIYESGKNVGKSKYITKKGSSYLRYALYQAAKVCWIFDSQFNSYYLKKKSENKHHYVILGHIMKKLIKVVYSVLKYNKEYYIPQK

SEQ ID NO: 159023 - protein, 311 aa, unidentified
MTTSSEKYVGIDVSKDRLDVAVLGEKQPWQVDNTRDGIACLVKQMVNLHPELIVVEATGGYQRNVVDALFHAGLSVAVVNPARVRQFARASSLLAKTDKLDSFVLAEFGRKMQPRRYESKSEAEKQLSALLVRRKQLEEMLKAEQNRLRTISPSLRGSVERIIAILKEEKKRLEEQIQQFLNEQKAWQEQTEILSSAPGVGMVTTATLLAELPELGKMDRKRIAALVGVAPMNYDSGKKRGYRKTKGGRTNVRSVLYMSTLVATRYNPLIQAQYQQLLKRGKLKKVALTACMRKFLTILNAMMRDQQPFRV

SEQ ID NO: 159024 - protein, 428 aa, unidentified
MSYRIAGIDVHKKMLAVVVSDVEIESEYQFERRMFSSNPEQLRSLAAWLVEQKAEEIVMESTAQYWKPVWGTLERYWKPLCEKREGARRRSGTLHLAQALSNRGRRGRKRDFVDAERLVKRLVARELTLSFVPDAEQRLWRTITRKKYQLRRDLVRIHNQLEALLEEAHIKLSSLVSDLLGVSARRMLKALADGETNPAALAALAHQRLRATPEQLCDALGACTELKPVYRRLLKMTLEHLQILEQQIGQLDQELATLLHPHQDAVERLAEVPGFAVDSAQQIIAEVGPAAATFPSEKCLSSWVGACPGEEESAGVNYSHRSPKGNRHMRRLLNQTANAAVKAKGSIFEIIYRRCVPRLGHNQAIGVIAHRQCRLIWLILHQGTRYEERGPAVTKRSRYQRTWRMIRQLRNLGYRIELPNPQASQAQA

SEQ ID NO: 159025 - protein, 347 aa, unidentified
MTTVGIDLHRRRSHVAVIDEQGELFLSERIANGREEFLELLAGLEGECQVAVEATYGWEWLAELLEDSGYELHLAHPSRTRAIAAARVKTDAIDARTLAQLLRAGMLPEAYVAPRELRDLRELLRYRIALTQMRTALKNRVHATLARQGVRNDHADLFGRAGREFLGGLELRKPTRRRIESILSLIDDFDRELASTTGEIEACAKADERVPMLCQIRGVGAYTAMLIIAEVGEISRFPSARHLCAWAGITPRVRNSDQKVRLGHITRQGSAALRWAVIEAAQKAVQGGGPLRESFERIAKRRGTKIARVAVARKILTLSYYGLRDGEIRCLALRAKASTGLMLEPSQ

SEQ ID NO: 159026 - protein, 385 aa, unidentified
MNSSKYIAMDVHKDSISIAVRNATGKIVMESLIETKASMILQFIDGLRGDLHVTFEEGTSAAWLYDLLKPHVTRVVVCDPRKNKSMREGNQSDKIDARRLAELLRLNHLTPVYHGEHGLRTLKELVRTYLTVTKDLARVMTRLKAIYRSWAIPCSGKQVYARCHRAEWLGKITEPGVRRRAEFYYLQLDALRVLRQDARRDLLAESKKHKAWKRLCEIPAIGPIRAAVLLGILQTPHRFRNKRTLWNYGGLAIEMHSSADYRSVDGELQRSRKNVLVRGLNRNCNHDLKNLFKGAAAVASSKPGPFEEFYAALVAKGMKPEMARLTLARKIATIVLIVWKKGVCFDAQYLKPQTAFICSGALCRVASVSACRSVHSSWITAHRIS

SEQ ID NO: 159027 - protein, 413 aa, unidentified
MQCNCFVGIDVSLKSNAVCVLDSQGSKLCSFTVRNDREGSQTLVDRVCSCLSKAEVAPSIKFGIEATSIYGLPLLYFLKQEQTLKNLDAHYYILNPKQVNGFKRTYSDLPKTDPVDAFIIADCLRFGRIGTKEAYMDDVYSSIQKLTRARFHVAQDLAAEKNRYLSSLFLKFSAMTQVNLFSDNFGATAMALVEEFETVDDIANTSVEELAAFLNDHGKGRFADPNELAHTIQSAARASYRLPKTVLGSVNQTMAVSARTIRFYEKQLKDYDKAIADLVSTLPGNPLATVAGVGPVYSAGIMAEIGDVSRFKDQAALAKYAGFAWSRHQSGEFDADQTHMINSGNHYLRYYLIEAANKVRMHDPDYMAFYQKKLGETKTTPHKRALALTARKFVRLVYALLRDNKFYLPSSTE

SEQ ID NO: 159028 - protein, 373 aa, unidentified
MEHSSEAFVGLDTSKLRHSVAIADGGRTGEVRFLGEIENTPAATAKLVRKLAAKYERLTFCYEAGPTGYGLHRQIKSLGHQCVVVAPSLIPKRPGDKVKTNRRDAVGLARLLRANELTAVWVPEGRHEAMRDLTRARETAMLDLRSKRQQISALLLRQGKSYPENKNTWTKTHMSWLASQKLEYPEQRLVFEEMMLAARQAQERLQRLEEAIRAAVPDWSLAELVTGLMAMRGLDLVSAATLLAEIGDLSRFRTPRQLMAYLGLVPSEESTGDTIKRGSITKAGNRRARRMLVECSWSYQHPPRVGALKQHKVDAAPPAVREIAWKAQCRLYRRYRALVRKGKLKTVAITAIARELAGFIWAVSREITPAAAP

SEQ ID NO: 159029 - protein, 345 aa, unidentified
MEPMYYIGLDVHKQKISYCVKEGGGKVFAEGWIPATRFDLDRWMKTLPQPWSAALEATMFSGWIYDHLKPHAAALKVAHPLMLRAIAAAKKKNDRIDANKICDCLRCDFLPECYMAPTAIRERRRTLRYRSLLVRQMVQIKIKISTLLMEAGISYNKSKLHKAGYFRELLASNPDINESLRSLLRQCREMVVRLAKMENALIHSLQQDPLLAERVERLMSIPGIGPITALTWALEIGEVQRISSIKKAISYCGLCGDEQRSANSVQRTPISKQRNKHLQTTLIEAAKMAPRYSPTLALLYDREKQKGNANRATLAVARKLVAYLMAVDRGQTHFLVIDQETCTAA

SEQ ID NO: 159030 - protein, 371 aa, unidentified
MNSIVYVGMDVHKEQYTICCYSYETDKVEYKQTIPSDYKLVLKYIDQVRSRYDGEVTFVCGYEAGCLGYSLYHQLKEHAVDCKILAPSTMAVTNTHHVKTDKKDAANIARCLAFHTYSEVYVPDNDDNDVKEYIRMRDDQKLYLKKVKQQILAFVLRQGKHFECGKTYWTIAHLKWLKTLELSALQRETLDEYLLTYEYLTEKISRFDERIEELASAERYEEKVKHMSCLLGIKTHTALSMIVEVGDFERFEKAPKFASFLGLVPSEDSSDARVNRYSITKAGNCHLRRLLVEAAQSYTRGNVGHKSVALKQRQKGNPQEVIAYADKANERLRRRFYKMTLNKGVSRDVAATAIARELACFIWGMMTEHVS

SEQ ID NO: 159031 - protein, 341 aa, unidentified
MSIVGAFDVHRRQLTFEYLDTVTGELKRGRIMPADRPHLRAWLSRFAGQADVQFALEGCTGWRYVVEELLAAGITPHLAEPADTAALRGRKRHAKTDKTDTRHLRVHLMAGDLPECWIPPEHVLEARAAARLYKDLVDERGGWHQRVAATLFHQGVPAAVSVAKPDGRAAAEQAFLSPAGRQATETGLRQIDRLTAELEPLRRQLDMLSRRQPGCAALRAAHFGIGAVTSVAIWAELGDVRRFGNSDDVVRHTGLDITVWSSDGKGPPGRLSRQGPELLRWALYEAAKCAARPAAPDYRYYTAARDDRGGGRATLSVARKLARRCYHTLRELGEDALAPAA

SEQ ID NO: 159032 - protein, 409 aa, unidentified
MGLYCGIDWAENHHDFAILDDNGEVVSRGRVDNDAAGFARLLEAFADAGDTAQDLIPVGIETDHGLWVAALRASGRVIYPINPLAASRYRSRHSVSGSKSDSADAVMLANIVRTDAAAHRPLPADTNSALAIRVLARAQQDAVWSRQRFGNEIRSLLKEYFPAALTAFQSLEDGLTRPDARSVLAAAPTPTAAAALTRPQLKAALKRAGRSRFLDRDVERLREIMRAPALRQPPQIEAAMGISLMALLRQFDAACAAAETLAEHVSALFAEHPDAKIITSFPGLGPLAGARVLAEIGDDRNRFATARGLKAYAGAAPITRASGKKTFVLHRHVKNRRLAAAGTIWAFSALQASPGARRHFDARRAGGDWNHQAQRHLFNRFLGQLHHCLTTREFFDELHAFPPPLPIAA

SEQ ID NO: 159033 - protein, 338 aa, unidentified
MKAYAGIDLHSSNNYLGIIDDNDKRLYGRRMPNDLNHLLMALEPFRSQLEGIVIESTYNWYWLVDGLHDHGYKVHLANPSAIRQYEGLKHTDDKWDSFWLAHMRRLGILPEGYIYPKGQRPIRDLMRRRLLFVRQQTAHILSLQSMITRNLGYKMSNNEIKKLSLKDVENLFDSPHLVLMARNSLSAIDLLKRIIKSIEKEVTSQVKLRKEFVMLLTIPGIGPILALTIMLEVGDIGRFAKVGDYSSYSRCVESKRLSNGKKKGENNKKNGNKYLAWAYVEAANFAKRYCCGAQSFYQRKKAKTNNILAIKALSNKICRASYYIMRDQVAFDEKKLFG

SEQ ID NO: 159034 - protein, 430 aa, unidentified
MTDFEFNKIDHFRQIKKEIRGNTDYLIVGIDIAKDKHYAFFGDANGHTLLRKLPFENNQQGFQKLIIHTEEKKTKYSFEKVVFGLEPTATYHKSLGEFLIRKGYSLVLIGAGAASKNRELLDGRWDKNDMKDAANVADLISQGKCLYYDYAQDSIRELRSLLSLKRKMKKVEHSTRMRIRNHLVPQFFPELDPYITGYVDGCLSIIKHCFDPCKIAQMPFEAFVSLVTSKQPTRLQWSKLKTIWELAPHSVGCLMTSAVEFEASMLVDSLRKTKTDIIAADREIKKICQSFPEYEYVMSIPGFGETISAVTIAAIGDYTRFENTRQLLKMAGLDLSANRSGKSSDNQIPRISKKGKSELRYGLYQAAMIASTRNLDFMAYFTNLIKDRNKEKGIKTRMRVKLAAKMLIIAWTLMRKQTHFDPSYLRSKKD

SEQ ID NO: 159035 - protein, 431 aa, unidentified
MLKINPLSTLYVGIDVSSKSNYVCALDFYKNKYINSSFANNQPGAEELALKILECLKEHPDITTIVAALESTSVYSIHIANFLSSCEELMHFKPYVFVLNPKCTANYKKSYIGLGKSDPIDAFVIADYARAGNIESEPWRGSQFLALKRLTRHRLHLVECMTREKTYLVSNLYLKFSELQMLEGDDQPFCDIYGATSSSVLMEYFSPEEILDSSEEDLIAFLAKKSRNRIKDISKTADLLKKAARDSYRLDKALYEPLNVSIASSFNCIETFKREIKVIDNAIEKEIKGLNPNAFIILQSIDGIGPVFAGGIIAEIGDITAFHSSDALAKYAGLTWKSNQSGDFDGEDTPMIKAGNRYLRYYLGEAANSMRKHNVEYGTYYRKKYNEVPKHQHKRALALTSRKFVRLVYGLLARNQLYSGVSLDTSIKDSN

SEQ ID NO: 159036 - protein, 444 aa, unidentified
MALSGMILIREVADAPVIMGISKSAGLKFPCGEVRIVNPLFVGIDVSSKSNVAYLMNPDGSKHSIFSVQNNLGGAKLLSERIVSALSSMRLNDVVIGLEATSIYGNNLVYALREDGSLGRFQRKIHVLNPKQVKKFKESYPDLPKNDFVDAFVIADHLRFGRIAKEVYMDDYRYQALRTLTRARFDVIQNLTREKQRFANYLFLKCSGMAQDKNIPNTSATTIALMEHFETVDDLANADLDELTAFIAKTGRGRFADPDVVAKAIQTAAKGSYRLPKTVNDTVNQAMSVSIASMRALKEQVKVLDKAIEQQFEIIPNTLTSIPGIGKVYSAGIIAEIGDIHRFNSQASVAKFAGLVWHKNQSGGFEAEHSRMIKSGNRYLRYYLLEAANSVRRCDSEFRRYYDLKFKEVNKFQHKRALVLTARKLVRLVFRLLKDNRLYIPPEG

SEQ ID NO: 159037 - protein, 362 aa, unidentified
MSEYAGQQFVGIDLHRRRSVLVRTTASGDVLEATQILNDVDRLNAVMERAGENPEVVLEATYGWYWAVDALQAAGAQVHLAHPLGVKAFEYRRVKNDLRDATDLADLLRMGRLPESWIAPPATREIRELVRHRAKLVGLRSHCKAEIHAVLAKCGVQVLMSDLFSPAGEELLDRCSLPGPYAARVQSLRRLIDDLEVEIDLFARLARGRLVADPGYVALQQLPGVGPILAAVFRAEVGDVTRFGTAAQLACWAGLTPKHHESDTHVHRGRITKQGSRLVRWAAVESVKRLGPTHVVGAYKKQVADRRGKNIGTVAAARKQTEFVFYALRDHHVRALHPPRPPAGAAASPPRSRRSAARPRRS

SEQ ID NO: 159038 - protein, 411 aa, unidentified
MDRIYDNCCGIDVHKKLIVACFRKGNRQEVREFGATTRELLELADWLQSGNCEMTAMESTASYWKPLYNILESSNLNAMVVNARHMKAVPGRKTDVKDAEWIADLLQHGLLQPSYIPDKDQRELRELVRYRKSLVGERTRELNRLQKMLEGANIKLSGTVSDINGKSARSILEYLLTGKFIDEAKYDEMYAQKIIAHNLKATKEQLIDDLSGVMSPLQRRMMKELLNHRDELNVQKKNRDDEIDNFMKPEEKKPSKAIQDVTVIGNPSAQAIISVIGTDMSRFPSDKHISSWSGLCPGDNESAKKRKSGKTRKGNSLLRTTLITCAHAAVKNKKSYFYAQFMRISAHRGPKRAYVAVAHSMLIAIYHILKDGVVFKDLGAEYYNQFNKERKINAYLKKLKALGWEAPVVAA

SEQ ID NO: 159039 - protein, 341 aa, unidentified
MEKATIIGIDLAKRVFQVHAASKDGRPVLRKKVSRAQLLGFLAKQPPTIVAMEACATAHEWGRAISGLGHDVRLVPPIYVKPFVRRQKNDAADAEAIAEAASRPTMRFVAVKTEEQQARSMIFRTRDLLVRQRTQLVNALRGHLAEHGIVAAQGLAKVKVLATAMRDTGSLHPLVRELGQRYLDHIARLDVEIAELDKRLRRPSKDDEAAKRLQSMPGMGPITAAAIEAFAPPMATFKRGRDFAAWLGLVPRQHTTGGKPRLGRTSKMGQRDIRRLLIIGAMTVVRWAVRKGAAKGSWLARMLAKKPRLVVAIALANKMARSVWAMLSKGEEYRGSALAPA

SEQ ID NO: 159040 - protein, 354 aa, unidentified
MKRRTKYVGLDVHQAMTVASVREEGGRVIARSIVPTEEPALVEFFSGMRGSVHVAFEEGTQAQWLHDFLAPLVDRVVVCDRRGESRRGNKGDQVDADHLSELLRHGGLRAVYHGSADRATLKELTRTYQNVVEDTTRVMLRLKALFRARGIKTPGRGVYHVKQRAQWLAKQPERGARFRAETLYAQLDVLRELRPKAKAAMVAEARRDPAWSVLRSIPFLGPVRVALLMATMRTPWRFRSKRNLWGYCGLAVVTSSSSDFTLVEGRPVRRRRKPLTRGLNRNHNRVLKDVFKSAATAATGRPGPLKDFYHAMIARGMDPELARVTLTRKLAAVTLRLWKKGERYDPTMLTVQAR

SEQ ID NO: 159041 - protein, 343 aa, unidentified
MYVPYHFIGLDVHKRTVAFSEMRGDGKPIDSGTFSTRRTAVEAWARARTQPWIGAMEATLFTGHLYDVLTPFAVEIQVGHPARIKAISAAKHKNDAVDAKTLANLLRADLFPQCYMASTRVRELRRVLRYRNFVVRQSICMKNKTTGILMETGVEYDAKRVHHKKYFNELLDNLDEVPNSVRELLRITRTNMEMFQSAQKQLLNALMTLPELHERVERLMTIDGVGQVTALTWALEIDDPFRFSNLKQAHSYCGLCSGQKESAGKNKSGPLSKQRNAHLQTALIEAAKLAPRWNAQLARVHAASLVQDKNRNRASCAVARKLIAYLMAVDKSTTPYEDRSSVK

SEQ ID NO: 159042 - protein, 343 aa, unidentified
MAKVYVGLDMGSSCFHQVAMDKEKVVVQDRKFDSSEANLIRAFEDIKGEVHVHLEAAELAAWVRRVLKGRVARIVVGHPKSSAWIAKDPLKRDRLDAYKLADLLRMDQVHEVYYADEDHRTVFKQIVQHYDDVTDQEVRLKQKIKAALREQGVIAKGLDVYTGGGREKYLTEVPSAAAREAIGQLYGLMDVTLKAQKDARNLMRRESQKYPEIARFEGVPGLGVVLSCRFSAYVQTPHRFSAKRKLWRYCRLGITDRQSDGKPLGRKALDWNGNGRLKDMSRTAFLGAMKTVEENLFQRTYRQTLQRTHNQTHARLTTQRKILAVLLAMWKGGTSYQDNKEKG

SEQ ID NO: 159043 - protein, 371 aa, unidentified
MVWTAPYGIECARMRLLQSQTREPSVNQIIRIGMDTSKHIFQLHGVDAAERPVLRRKLRRSEVLAFFAKLPPTVIGMEACGAAHYWARELRKLGHEVKLMAPQHVKAYVKRNKNDGRDAEGLCEAMSRPTMQFVPVKTEEQQAALMLAGVRQQLIARRTQLSNAIRGYAAEFGLTTAKGLDKIEPLLTRIALDETVPALARELLAIHGQDYARLQIELKAIEVKLMAWHRANACSRRLAQIPGVGPIGATALVMKTPDPRAFRSGRHFAAWLGLTPKDHSTAGKTRLGKITRAGDEMLRSLLVAGATAVIQQVRRGRGRPSAWLLALLKRKPPKLAAVALANKVARIAWKLMTTGESYDGARMPGAQAFAA

SEQ ID NO: 159044 - protein, 319 aa, unidentified
MDEPRSASICVGIDVSKDRLDVHLRPSDEAFAVARDGKGLERLVERLKPLDVSLIVLEATGGFEIAVAAALAGAGLPLAVVNPRQIRDFARALGKLAKTDAIDAKVIALFAEKIGPQARPVASPEAQRLGELVARRRQIVEMIGMEQNRRRRAGDKRVVKRIDRHVAFLEKELADVDADLDAGVRASPAWREAEELLVSVPGVGPVTARTLIAELPELGQIDRRKLAALVGVAPFNRDSGTWRGHRMIAGGRASVRTVLYMAALAASRHNPLLKATYQRLVARGRPKKVALIACARQLLTILNAIVRDGRPWTPETAHA

SEQ ID NO: 159045 - protein, 389 aa, unidentified
MLCVGIDVAKRKHDCCIIDSDALKTVESFTFPNSREGFDMLLSKISELGIPKDKIRVGLEATGHYSSNLAHFISEHDLPLLTFNPLLTNRYKQGFSLRKTKTDKVDACAIAQMIVSGKGSQTYSSSLYHNEEMKSLSRYRSQTMQKCSKLKISVSRLVTILFPELEGLTSSIHLASIYALLKAYPGHEQIAHCSMKRLTHLLSDASQGRFDKSKALEIHQAACRSIGKVSLSASMELVHTITDIEVLKQHIVEIDEKLKEMVDQEESSIIDIPGIGYTLCASILGEVGDFKRFPDVDKLLAYAGMSPSKHDSGDYHSKHNKMEKRGSPYLRKTLYLAARLVAQNVPKFKEYLEKKLSEHKPYKIALSHVAKKLIRLIYRLGISGCPYLA

SEQ ID NO: 159046 - protein, 340 aa, unidentified
MGDITTIGLDLAKNVFQLHAVDEAGSVVMRKRLRRGQVLAFFAGIPPCLVGMEACATAHHWARELIALGHEARLMPPTYVKAYVKRNKHDVADAEAICEAVRRPSMRFVPVKTVEQQSALMMHRARDLLIRQRTMLVNALRGHLAEFGLIEAQGLHKVARLIAVVMDENDRRVPDIARQVLKVIVNQIEDIQTRIAGLETQVMAWHKSNPVSQRLATIPGIGPIIATAIAATVADPSIFRSGREFAAWLGLVPRQNSTGGKARLGGISKRGDSYLRRLLVNSAHTVLLCSKQAKTAPWLMSLLGRKPRLVAAVALANKTARVAWAIMRRQDTYQHAAVAV

SEQ ID NO: 159047 - protein, 317 aa, unidentified
MTKTSMVVAGIDTAKDKLDIALYGQARHWCVENNLQGWKRLRSELAKAEIERVGIEATGGYERGVVRHLREAGFTVLVLQPIQVRAFAKAHLRRAKNDVLDAALIAACAAVMEKPPIEPDQRLTDLADLLTFVEQIEEDIARLKTRLEHIAEPRLRRIVLGDIVRLKARRRAQVRLIAKQICSHHDLAARLNLVLSVPGIGERTALALIIRMPELGRISREEAAALAGLAPFDDDSGKHKGQRHIAGGRGRLRRSLYAAALPAAFRWNKALIDLYARLIARGKAHSAALVACARKLLVYANTVVARGTPWVDSLIST

SEQ ID NO: 159048 - protein, 423 aa, unidentified
MMKLKYSICCGLDVHKNVIVATIVTTNKDGISEYLQKSFSTINSDIQRFHNWLIENNCYHVCMESTGKYWIPIFNYLENDIDVCLTHPKYVKAIKGKKTDKKDSKWIADLYKFDLVRCSFIPPKDFRQLRELSRYRFKLVCMKSSEKNRIQNCMTVSNVGIASVLSDPFGKTATEIISYLLEHTADSMDEKAVRKLIKKGAKSKSDEIIEAIKGYTIETDQAKKLELARGHLEYLDDMITQTEVELYVRIKPYYEFVEFVSTMPGMTELSSTIVLAETGVDMDIFDDAKHLCSWCGLSPANNESAGKKKSVRIAKAGDYLKPMMVQCALAAIKSKKQPYFAIKYGRIKKRRGHKKAIIAIARMMMVCIYHMVSEKKPFTPTDYEELTDPQNHVESVVLNENNVFAYLESLGYDSSKLVKRNDN

SEQ ID NO: 159049 - protein, 344 aa, unidentified
MKITTVGIDLAKNVFAVHGVNEHGRTVLKKVLKRNHVAEFFANLPACVIGMEACASAHYWARKLQAMGHTVRLIAPQFVKPYVKTNKNDAADAEAICEAVARPNMRFVPVKTVEQQSVLSLHRVRQGFVRARTAQANQIRGLLAEFGIVVPKGIGHLERQVPELIEDAENELTGSFRLLIQRLMDQLKELDRQVKELEAQIQAWHRSDETSRRLARVPGIGPLTASALVASVGDAKSFSSARQLAAWLGLVPRQNSSGGKNVLLGISKRGDVYLRTLLIHGARSLLQVAKRKECKSGWLHGLLQRRNANVAAVALANKNARIVWALLVHGREFHPDYHAPAATA

SEQ ID NO: 159050 - protein, 388 aa, unidentified
MVCVMRPFGEVVLEPFEVLHTAQSLNDLAGKLKALDGETRVVMEATGNYHKPVAFVLHDAGLFVSVVNPVLIHDYDNNSLRRVKTDRKDAVKIANYTLDKWTRLRQYLPEDDTRLALKNCYRQYQQAVAVRTMLKNNLISSLDLTFPDANKLFSSPAKSNGCEKWVDFIGDFWHSECVSSLSSDAFAKKYLKWCQKHGYNFTRSKSDTIYACAVNAASLPKSPTSKLLIQQQVAQLKAVSQSVAAFQQEMLRLSQQLPEFDTVMEMYGVGPSLGPQLMAEIGDVRRFSSKKSLIAFAGIEPQPNDSGKIVGNDSGISKVGSAVLRRTLFLIMTVILKTQPQDEPVFQFMNKKRSEGKPYKVYMMASANKFLRIYYARVKAVMDSKHSK

SEQ ID NO: 159051 - protein, 419 aa, unidentified
MSFKIIKNNCCGLDVHKTWIFACIGITDSNNRTEYKQARFSAFTKGLNELCDWLAKYNCNDVCMESTGKYWIPVFNILEQRSLWVTLSHPKYTKPMKGNKTDRKDAKWICDLYMCGMVKPSFIPPADIRELRDLVRYRFKLTCMITGEKNRAQNCLTVSNLKLDDVFSDVFGKSSRSITEQILQHPGETFDVAPFVNSRCKTPIVEIQAAIDGAISKEQAVKLRQCLDHIDELNKHISEVEQEILRLSDKYEVALNLIRTVPGFDKNPLTAIQVLSEIGGDMSVFPTAKHLVSWAGCCPRNDQSNQKIKSTRISRAGSYFKPVLVQVANALIKSKKHSEFTNRYKRIKARRGHKKAIIAICRMILTAIWHILSDLKPYTPEGFLESRPVKEEKVLSTSQALNLLKQRGYIIKDKPLAVF

SEQ ID NO: 159052 - protein, 316 aa, unidentified
MAHTSMTTAGIDTSKLKLDIAIHQRTERWQVPNTLPGWRELIIHLGKAGVTHVGIEATGGYERGVVEHLRLAGFTVLVMQPIQVKAFGRVHLRRAKNDALDAVLIAACAATLDPPKIAPDPRLAELAQEMTFLEQIEEDIARFKTRLEHIGESRLRRMVTGDIARLKARRAAQIRMLVRHLRHHEDLGKRFDLVLSIPGIGERTALALIIRMPELGQISREEAAALAGLAPFDNDSGQYKGQRQIAGGRGRLRKSLFAAALPASFQWNKALIALYARLRAKGKEHNLALIACARKLLVYANTVVQRGTPWVENATG

SEQ ID NO: 159053 - protein, 341 aa, unidentified
MLYSGIDLHKRSLVIHTLDADGTTTREAQLKSDRGAVLAYFGTLAGPHRAVVECVQSWYWLRDLLGPTGIDLRLAHAKYVKAISYAKVKTDRVDARMLAQLLRTGLVPEAHMIGAEHRETRDLLRSRLQLVTRAVRCRHAVGSLLEKYNVPTPEELPELARMQAALQEEQRTLIRTHVRRVEAVLKTRLLPTPDVQRLVWIPGIGKLSAYALVLEIDTISRFPTVRHFHSYCRLVPGADNSAGKVRHKRSRDGNRYLKQVFHTAAIRAAQYHPEIRQEYRRLSRRKGKIVARALIAKELASIVYWVLRKQEAFNGKFRGHVLTAKPAVWPRLASPESLTDA

SEQ ID NO: 159054 - protein, 426 aa, unidentified
MSQRDYNRQVAKRKRIRKATLIVGVDIGNAFNALGFMDKEGNVLGSCAKLYNNREGFEEFINLIEGLKAKHHLRDVLIGMEPTGHYWRKLAYFAKDHGYEVRFVRTTALKHHREIDESSSAKSDQRDALTIANITREGKYIDTVIEDGVLRQLRTLSKARERHLRYSVSAKNSLHAALDDYFPELHEIFWSMGSRSLWTILEQCPFPQDSMLMDVSALQELIARSSRKKAGSALKAEKLTEAAQKSIGIKQIGNADRYRVQMCLEEVKRTVLSLKNIDKQLKCLLKETSAASYLMSIPGIGPLSAAVFLGELGDPTHFHNARQIVKYAGYDPQESDSGSRIGRKFISKKGRWLLRKYLFFMSMRVVVLSNYFQEYYLRKLETKNRVGQQPRRKEMLCAVAIKLIKVIFALLRDKREFEDLVPVAAA

SEQ ID NO: 159055 - protein, 339 aa, unidentified
MERQYVGIDLHRRSTTIYRMAEDGEVLGTERILSQPFELAQAMAAAGPKPEVVLESTYGWYWAADVLRELGAHVHLAHALGNNWGNRRVKNDTHDAQDLALLLRIGRLSEGWIAPPEIRELRELVRYRHSLGRHRTSAKAQIHGVMAKNGILPVVAELWGPIGQAQLDSLELPEAYALRLRSLRDLLAHVEREVTKVDAQLHHRLKADPGYRALVRLPGVGKVLGAVFFAEIGDVTRFDSPRKLCSWAGLTPKHRESDTVVHRGSITKQGSGLVRWAAIEAVGNYRAKGNEKLRADYRQIAERRGKHKARVAVARKMVTFVFYALRDGEVRCLDTPAAA

SEQ ID NO: 159056 - protein, 400 aa, unidentified
MLSIGIDVSKGKSTVCGMKPGGEIVYTPFEVQHTREGMSELVSLLRGSGEEVRVVLESTGSYHCPVVAALLENGIFVSVVNSLRMKRFCSQSIRRVKTDQIDAMQIALYGLAYWQELQPTRLPENTYRELQLLARQYYQMTSLLIKAKVDFNALCDQVLPGMQELMNDHAGRHKLSDFVLRYRHTTHILEMGETRFRKDYCKWAEKKGYRNRERMAALIFATAQNGIPVLPNAPSTQIVITEAIRVLHTVEASRDAILTQMQALAKTLPEYSLVREMPCIGDTLAPRLIAEIGDVRRFHSKRALIAYAGIDAPPYQSGKFCANNRHISKRGNRYLRKTGYEVMQSYVMHKPANDPIFTFIEKKRGEGKCGKLAMVAGLNKFLRIYYGKVTELYRSLPAIE

SEQ ID NO: 159057 - protein, 346 aa, unidentified
MSNHKLKGSVVVLGIDLAKQSFQLHGVDANGQVVLKKKLNRGKFSAFVAQLPLCLIGIEACGGANHWTRVFEKLGHTVKMIAPQFVKPFVKSNKNDAADAEAICEAVQRPSMRFVPAKSVEQQDIQSLHRVRSQAVARRTAQANQIRGLLMEYGVIIPQGISHIRKSIPLILEDAENELTAMFRELLAGLYDEMVHLDERIETLQNKLEALCAQNEDCQRLLSIPGVGVLSATAMMASIGDIDAFKNGRELAAWLGLVPRQHSTGGKPTLLGISKRGDTYLRTLLIHGGRAVVRFADKHQDRRSQWVTQLDARRGKNISAVAVANKNARIAWALLSHKTMYQTSAV

SEQ ID NO: 159058 - protein, 347 aa, unidentified
MNFYNNIHPYYCGIDLHARSLYVCILDQEGKTCLHKEISADPDKLQQLLEPYIGNIVVGVECMHCWYWVADFCSDAGIDFILGHALYMKAIHGGKAKNDRIDSFKIANLIRGGNFPLAYVYPKEMRATRDLLRRRMKIVRHGADLKAHVVNTTSQYNLPPNKVNLKNKVAREQLRSTFPERSVQKNIDLDMVILDCYAEQLSKVEWYIQQQAKQHKPNHFHLLKSVWGIGPILALTIIYEIGDIDRFDSVQKFASYARLVKCKAESAGKSYGTQGNKIGNAHLKWAFSEAAVLYLRGNEKAQKYLLKLQKRMSKAKALSALAHKLGRCVYFMLKNETVFDESRFLKG

SEQ ID NO: 159059 - protein, 503 aa, unidentified
MTAPTTKRKAPCASVASAQEAQAHRQAYHRRQTRAKAKSEARRQKEAAQVEALPVQHPHAAGIDIGSRSHWVCVGFTTDAASCLIREFPAHTAGLKAIAAFLREHQVTSIALESTGIYWVPLYELLQAEGFEVLLVDPSYSHQLRGRPKTDRRDCQWIYRLHSVGLLAAAFRPDEQTCQLRAYLRQRGNLVRQASRHVQHMQKALEQMNLKLTEVLSDITGKTGRAILRAILRGTRAPEKLARYRDKGCKASEAEMAQALTGTYREEHLFELKLAYEAWQFTLGQVDKVDGQVALQLGRMKGDRALPPLKPKARPKRRANSPRFDVRAALYYVVGLDLTEIEGVSALTALTVISEVGPGVSRFATVKKFCSWLGLCPNWQKTGGQIKSSRTRRGVNRAAQALRLAAQSLHHSQGALGGFLRRMKGRLGTQPALTATAHKLARIVYLALRHGLTYVRQTQEEYEAQMKEKQLKALRRKARQLGLEVVEKPSVSGAPAAAGPAQG

SEQ ID NO: 159060 - protein, 338 aa, unidentified
MYYGGIDAHKTYLTLAVVDKAGELVHRRKRIPIGAGEPLLKELEGFRPLQVVVETCPFWPWIHDLLAPTEIDFHLAHASKLEAIASAHTKTDSVDAELLARMLQGDLIPGAYPKPPAQREMARLVRHRAMMVKDRTRCINRVHNQLHQKGIQGERETLLRDKGREWLEKTVWPDLSAEQQTLVGGQLELADWFTSKIEELDKRIEREAGNHRAASLLQTIPGVGPYRGFLFAAELLPIGRFESPGRLVSYAGLAPTVKQSGSGHPRHGPIPRGANRWVRGELISTIPNHVQHAPDSSLTLYYQGLKERLGWPTARVAAARKLCRVIYAMLSTGELWRG

SEQ ID NO: 159061 - protein, 357 aa, unidentified
MISKKISVKSKKNNSCSLTENESYGHYIALDWSEKNMAIARLGKKDTEPKIIDVPSDLKELKLYLSKLQGEKILTIEETTTSQWLYVELYEYADRIFICDPYRNRLLTDGPKTDRIDAGKLCKLLKNGMMKEVYHSTNQMYELRKLVSYYDDEVRAGVRLLNQKSALYRAENKSWKKKQELEASRVNKFIVAQLDEKIESYREKKKKYEEEFEKISKKSKVIRSLKSIPGLGPISSVTILSIVIDGRRFKSSNHYLSYCGLVKHEKQSGGRSYGRRSPRYSRRLKAVYVSAAVRVASTENPLRQYYEYLLNEKKLPVYNAKNALARYIAKISLGIIKSGEKYKPYKWRESKKGKEAA

SEQ ID NO: 159062 - protein, 421 aa, unidentified
MTPTSHDTFAAFIGIDWADAKHDLCLQAAGTAQRERFQLEHTPEALDAWGTTLRTRFNGQPVAVCLELDKGPLVSALRTDDFLVLFPINPLTLARYREAFTPSRAKDDPTDAELQLELLLTHRDKLQPLQPQSPTMRALAQLVEHRRRVVGDKVRITNRLTSALKNYFPQVLQWFQDKDTRIFCDFLSRWPTLKAAQLARRSTLETFFRDHHVRTADVLATRMHAIKTATPLTTDEGVIAPNALLVQTLVSQLRVTLDAIEAFDHAIAQRAQHHPDFPLFQALPGAGPVFASRLLVAFGEQRERYASAAALQKYAGIAPVTERSGKKAWVHWRLQCPKFLRQTFVEWTAESIRHSFWAQVYYQQQRDKGNTHQAAVRALAFKWIRILYRCWQERTPYDESTYLQALTRRGSSLLQNLAKVS

SEQ ID NO: 159063 - protein, 308 aa, unidentified
MNKIICGVDVSKDWLDAHVWPGGAAERFANDAAGIAALWLFCRSHGAALTVMEASGGYERLGFMLLWAHGMPCGVVVRRFAEAMGYLEKTDRIDAAVIAHYGAVKNTVPTPPPSAAQQRLAALVGRLCQIVGDATINKQRRSAARDAEVCASIEAMLAFLKREQRRLEGEIASMIDDDPLWARLERAFRSLKGVAGRTVARLMAELPEIGLISNKAIAKLAGLAPFANDSGKRTGNRHVRGGRAGPRGILFIVAAIVAKFDPHLKAFAQRLQQAGKPKMLIRIALARKLLVILNAKARDARNEVAIAT

SEQ ID NO: 159064 - protein, 477 aa, unidentified
MGKPTSVNIRGLRGDRRAQELDGLDLSRVLVVAIDSARDFPKALICNYFGKVLESPFFFAVNSEGIFTLHAKIQHWVSCVKALRVFVGVEVAGCYHDAIGNALSRHGYQVELVNSYTTASNRRMMLDFSKTDDKDLLAIAQAVIANNGLSPKRVTGFYEQMQTVCRTRRQLVHEISALKAQIRQLMSIVFREFQGLTCSNTLKQEKVFSSFWASKSRLIMSYCPLPGQLLEMGEEGLKELARFKGLKLKEHEIKLLLQAAQRDLMITPDQVACFNAEQIKFRLAQLNMLEEQIDALESEMETMLVKTPAILLLSIKGISIVSAAEFISEVGSIFNYTYNRQLVKLAGINPVLSQSGGKKAKGYKISRQGNPALRYIVTMIGKNLCNKKCCNRIFVDYYEHLQRRGKCSNQIYAAAGNKFLRIAFSMLKSHTLFYVPGYEDSSSDIIIKLNHKENKTAAKTALALLTEKENKKTTVAL

SEQ ID NO: 159065 - protein, 399 aa, unidentified
MLAVGIDISKSKSVAAILNQDGSMHTSPFEFHHTQPELDAFIKYILNSNQSATILMENTGHYHYPVLKAFREAGLPVCMVNAYQIKKFGDMDLRKAKTDKKDAVRIARYALEKSYSLVPYTSMEQKYEDLRFLARQYNQRMLTLKNNKVFLLNLLDETMPGITNILPLTTRAPGTSLSVLFINRFKSYDRIKKMGKSRFLDAFEKIARKSRNRQTKTYGLAIYEAALRNITTRGENEYTLAAQDQCLELVCESQKAADSIILKMQTLAETLPEYAVLRSMAGVGDRLGPLILAEIGDIRRFHSGKALNAYAGNDAPPYQSGTFESHNRHISKRGNAALRKYCFEVMQALKLTRPQNDPVYLFLLKKEQEGKPYNVAKMAGVDKFLRIYYARAMETLKQQ

SEQ ID NO: 159066 - protein, 458 aa, unidentified
MRRAKRILPKATAVPKLRPHNAAAAGLDIGATEIWVCVPADRDAHPVRAFGTFTPDLYALADWLAQCQITTVAMESTGVYWIPIYEILEARGVEVSLVNARHLKNVPGRKSDVQDCQWLQQLHSYGLLTASFRPAEDMRVLRAYVRQRAMLIEQRAGHIQHMQKALQQMNVQLTQVVSDITGTTGLAILRAIVDGERDPQGLARWRHGRCQHSEAEIAKALSGHYRPEHVFALKQALALYDFYTAQVQECDTYLEQHYAAIKPTYDEQTPPPPLGPNPKPNSHAKNAPAFDVRACLYRILGVDLTATEGLEASSAQVLLAEIGTDMSKWPTEKHFASWLGLAPHNDISGGKVLRSKPLKGNRRAAQVLRLAAQTLGRTQTALGSYYRRLRARKGPTQAITATAHKLARMVYHVLKHRTPYQPQSQETYEQHLRQRALRHLKRTATQLGFTLLPQPVAA

SEQ ID NO: 159067 - protein, 317 aa, unidentified
MEQHQSSTQVAGIDVGKHRLDVALHGSDDEIQLDNTPAGWADLLAWLRARHVARVGLEATGGYERAVRASLEAAGLAVVVHQPIEVRLFARLRRLRAKTDRLDARLIAAATAQVETVKAAQDPRLPALAEHLSAYEQVSDQAAQLKTFRESLTLADLVTPIQAQIRALAQLKARLLAVILHRIKAEPDLLERFRLLLSLPGVGPLVAASLVIRMPELGGLHRGQAAALVGVAPFACESGQSKGLRRIAGGRARPRRLLYLAALSAKRCDPGLKAFAEGLQARGKAAKVITVAVMRKLIEAANLVLQRQQPWSLSPQH

SEQ ID NO: 159068 - protein, 346 aa, unidentified
MMLIGCDFHPSWQQVSWLDTETGETGEQKLVHATGDAKQFYQQVAAPVLIGMEATGNSQWFIEMVEDLGHQIWIGDAAQIRASYVRKQKTDKRDAAHILKLVVEGRFPKLWAPDREQRDLRQLVLHRHKLVMIRSRVKNELQHLSLNKGMQRKRTLWSQAGQKLLRELPLKPWAACRREDLLGLLTMLDQQIRKLDRAVQHAAEENPQSKLLMTQPGVGPNTALAFVLTIGDVGRFPRGKQVASYLGLIPREESSGGRQKLGAITKQGNRMLRSLLVEAAQAAVQHDPGLRRQYRHRCHQKPKAVAKVAVARKLAVRLYWMLRTQKPYPEIVRIESSSGVALVGAS

SEQ ID NO: 159069 - protein, 427 aa, unidentified
MEVVNPICCGIDVHETQLVACLRVAHGRGKAETTTREFGTTVSELLSLQQWLAEESCPIAVVESTGVYWKPVFHVLSSTVEVLVANAQHVRQRPGKKRDVADAEWLAELLAHGLVVPSFIPPPEIRALRDLTRARVGLVQSRSQTMNRVYKVLEDTNLKFQSVMSDLFGVSGRAMLDALVAGKRDPQQLAQMARGVLRRKLPQLELALQGQFTEHHAVLVKQSLELVDVLTRQIAEIDARIELAMATMAREVELLRSIPGIDHKAANTVLGEIGRDMSRFGSDKRLASWTKLSPGNNESAGKRRSGRTGRGNKYLKRVLVQCAWAARRTDTYLGRTFRRLEARIGGKKAAVAVAHKILVIIYHVLSNGEFYDESRYDHLTERQEQRTKFRALKVLEHLGYQVELTPRAAELPEVTASPEATASPGAT

SEQ ID NO: 159070 - protein, 305 aa, unidentified
MSNSSVVHIGVDISKAYLDCDLQGRALRLPNSMQGFKKLLPLLPPNAHLCIEATGGYERPLVETLHRSQIRYSVLNPRQVRDFARAKGILAKTDTIDARVLSDYGSAMDPKPSTLPEPAQRQLAELNTLRDQFVAIQTQLINAGEHLTDPVAKRIFKSQLLHLQKQIKKVEKACCDTLKSHPPLAARNATLQAIQGVGAVTSITLIALLPELGTASRGQIAALAGLAPLNDDSGPRKGHRHIRGGRSRVRRALYMATLSAIRSKGSLRSFYQRLRAAGKPPKVALIASARKLLLFINYQLKSSSI

SEQ ID NO: 159071 - protein, 387 aa, unidentified
MPQPNDLSRSLVALDQNSTIIAVIEMSHSSWLVAGMLPGIERQPRKKLEPSPERLLGLLHRWQYEAVRAGRTITRIAVAFEAGRDGFWLARWLAARGVEAHVIHASSVAVSREHRRAKTDRLDTELLKRGFLGWLRGERGHCSMARVPTIAEEDAKRPNRERDCLVGERTRIVNRIKSTLARLGIRNFKPTLRKAAERLASVHTPEGMPLPPNTLAELRRDMARLGFVVSQIREIEDARQKQLEQQHETGPHAMVRQLARIVGVGVETADLLVHELLSRTMRDRRAVARYAGLTGSPDESGARRREQGLARAGNARVRRAMIQLAWRFLMFQKESALALWYRARTADSRSGTRKTMIVALARKLIIALWRFVTTGEPLEGVVLRPAF

SEQ ID NO: 159072 - protein, 482 aa, unidentified
MKKRNIYQNQSQELLSLFEQAANNAKVMCVPIDYAKKDHVVMFCNGYGDILRKPFSVKNSPQGVEYLTDQVIRSCRQRAISEKHVFFGGEQVGSFADNFVTTLRCQGWLVAGVNAHEAKTQRENLQASTDRLDLMGIAKSLLNRRANCSPAQSGIYLNMRTVVRHRRKLVDITTEVRNRIHAVVDRLFPGFLNETNSGITPFSKSSLWLMQERFSAPQIRRRRRSTLIETLRQLGTKKPERTADKLQQYATQVLKPPQEYVHMLQLSLAQHVKHFCCLQESIGQLEKEIAVNLSQTQGAFLTSVRGIGIVLAAGVSAEIGNPYEQKPLNNLVSYCGIIPRVKQTGGPQGETKTGKVAKRCNRILKDYAVQSASHLGLHGPADLMSDYKRRDAAGQHADFGMARRYLRMAMCLMRTSQIYLPNGLRKAQAQIEQRADYYLMTWPYLREKWQKLGALETAFKADHPLGQWRKIVQQFYGIKLTL

SEQ ID NO: 159073 - protein, 341 aa, unidentified
MHKRESQIYILAEGGEIIEQRIRTEGERFAAVLGARPRARMLIEASTDSEWVARCLEALGHEVIVADPNFAPMYATRSRKVKTDRRDARALAEACLLGAYRPAHRLSDPQRHVRGRLGVRDALVHTRTRYISVIRALLRQHGYGVPSGSADRFIDRVRALSLPGRLRSVIAPLLAVMRPLNQQLAYSDATIEHLAVQDPRVPRLRSVPGVGPVTAAAFFAAVDDAQRFHHAHQLEAYLGLVPREYSSGETQRRGPITKAGHSRPRWLLIQAARSILRCRPPAAEALWTWALRIATRRGTHIAVVALARRLAGILYALLRDGTVYAPRRPAALPDPVAALHA

SEQ ID NO: 159074 - protein, 342 aa, unidentified
MNYKIVGIDLAKNVFQVCALNQAGKVLFNKKLTRKRFPEFIQKLEKTTLAMEACGSANFWARKFMSMGHEVLLVPAQHVKPFVRGNKNDRNDSQAICEAALRPKMHFVPIKTVAQQDLQMLHRIRQRHIQSSTALANQIRAYLRENGIIISKTLAQLKKALPFILEDAENGLTDLAREMIQQLYNDLLAIKEQVKQIDHKLEIWISQDEDCQRLLTLPGVGPVTATAMVAAIGSGQQFRKSRSLSAWVGLTPRHISSGDRTTMLGTSKSGNSYLRYLLIHGARTVVTWSKNKDDRLSLWIQDLIKRRGKQKTIVALANKMARIAQVLLTRKERYQVDYVNKH

SEQ ID NO: 159075 - protein, 343 aa, unidentified
MKLSRVGIDLAKNVYQLHGVDRSGKRVWKRRLKRHQWFKVLLDKVGPECEIGMEACAGAHHWGRELQARGYTVKLIPPQFVKPYVKSNKSDAKDAEAICEAMSRPNMRFVTVKRVEQQDIQATHRIRAELMTQRTAKANQIRGLVAEYGLVAPKHLSSLRAAIPCWLEDAENGLTGDFRALLQGVWEDLRLLDDRVGEMDQKIKRLADNNADCVRLQQLRGVGPMTSTAMIATVGDARQYQRSRQMAAAIGITPKQHSSGDKHRLLGISKRGDVYLRTLMIHGARAVVARATHKDDRLSRWVTNIANKKHPNVAAVALANKTARMAWAMLRNKTDYDPDFAMS

SEQ ID NO: 159076 - protein, 328 aa, unidentified
MCTLGIDVSKNKIDLCLLTAGPGGKKKHKVLTNEPAVAHKVIDWLNAQRCVPESVTVVLEATGIYHENLAYGLHEAGVSVCMANPCRVREFAHGMDILNKNDAVDAFVLACYGELKSPAVWVPPSPEVRKLRALLRQRDALREDVQRTVNRLEKANSTSTPQEVIRSLERTKSWLNEELARIEKLITDHTDNDPGLKADLDLLKSIKGVKDQVGREMLALLKDGTFKSASQVAAYLGLTPVEKTSGSSVRGRPHMSKTGPSGVRAKLYVAALTASRWNKQAKAIYERLVAKGKAKKAALGAVMRKLVHLCFGVLKTRLPWDENYVATA

SEQ ID NO: 159077 - protein, 375 aa, unidentified
MSFTSDAILVALELSNSIWLVGVRMPGARKSQMHRIDAGDTTALMGFLTGLKSRHERTSQIVAPLVCCFEAGRDGFWIQRFLVDRGIPTHVVEPTSILVNRRAKRAKTDRLDAEGLLRVLAAYLAGDTEICSMVRVPTPEEEDRKRMHREREHLVQEKTRIENRIAALLATQGVRSRPSLRSWERDMAALRTGDGREIPDHLATELGRLRRRLVLTRELIQELDAQREAFLAAAPADDKTTAKVVALSTLYGIGDNFSAVLGREIFYRDFGNRKQLASYVGLTPMPHQSGSMDKDRRIARAGNGRARKTLVQAAWLWLRYQPASALSGWFRERVGELKGRTRRIAIVAMARKLLIALWRFAENGEIPQGAILRAA

SEQ ID NO: 159078 - protein, 372 aa, unidentified
MQTIHRPACAKAMAGRSQTLFVGIDVHKDTHTAVALSPFGEKIFEMTIGNEAEDFISLVEKTKVEAEKAGLVPSFGLEDIHSWGERLSSFLVEEKLSVRAVAPILVDHRRQKATHPEKNDSLDAQGVAEVMIQRIDTLPAYTVSEEAKKAKQTRELSLEREWLVKERSRLKNQLHLLLHRIHNTGYRAKFKNPFSKKALRYWMRSVPKNTDAILEQRTKRAVRRLLDLREEIQEIEEELDLLMKDNDQTLSTASGCGTVIAAEIIGEIGDINRFHSPGALAKYAGCAPREHSSGKTIRWRKTRSGNRRLNRSFHRMALSQISRSGNDAARAYFKRKVSEGKTKAQALVCLRRQLVNVVWMMLKHKTEYRWPC

SEQ ID NO: 159079 - protein, 364 aa, unidentified
MKRKVYVGMDVHKETIQIAILPSNTKALVKEQQIKHEEGQIKKFIQKLKSEGTEIHCCYEAGVTGYPLYRYLKTLGVNCTIVAPGKIPRQSSDKIKTDKRDAIKLAKLLRSGELESIHVPSEEDEAVRDYLRSRDSLRLDLGRNRQRLMKFLLRKGIKYSTTKYWTASHYKWLNNLHFENEILQATFNDYYSRVRVQEENLKAMDQKIREIAESEPYREKVGILRCFRGVDYLTAMFLLSEVNDFKRFKTAGSFMSFLGLVPGEYSSGSKRKQTGITKTGSPRLRRILVEAAWQHRFPGTGSKVVAARRVGQSALVVSLAEKASLRLHKKFKSMQLRGKTPQVMITAVSRELSGFLWAAMNLVA

SEQ ID NO: 159080 - protein, 355 aa, unidentified
MNNEKYIGLDVHQATIVVAVTDSTGKLVLESILETKAATILQFFAGLRGTLTVTFEEGTWAAWLYDLLKPHVDRLVVCNPRKNALLEDGNKSDRIDARKLAELLRGNQLKPVYHGETGVRMLRELSRSYLTIVKDLSRVMNRLKAVYRSWAIPCAGRDVYYTRNRAQWLAKLREAGVRRRAERLYEQLDMLRHLRQQVRRELLAESRKHAITAKLRQIPYRGPIRSALAVALIQTPHRFRTKRQLWAYSGLALETHISAEYRLVEGQVRRSKKVLSIRGLNKDHNHDLKGLFKGAATMASTRPGPFQEFYQAALAKGIKPTMARLTLARKIAAITLTLWKKGETFDAEKLKSQAA

SEQ ID NO: 159081 - protein, 432 aa, unidentified
MNEAVSEQPLSPEAEVAAFVGIDWADLKHDVVLRSAGDPAKSEHQVIKSEINALNDWIAQMHNRFGAKGKVLVCLEQSRGALIYQLMAYELFELYPINPSQLANYRKTFFSSGAKDDRPDADLLSELVMCHRDRLKAWKPDDQLTRELASLNEGRRNAVDRRTELANEIKSQLKVYFPVALQILDNDITTALAADLLVQWPTLAELQKVSPGKLRKFFYGHNSRQEKKILERLTLIKQAKPLTTDVAIIRPNALRVKLLAQQLKSLLPFIAEYERRIAELFGSHPDRFLFDDLPGAGPALAPRLLTAFGTDRDRFEVVGDLLNLSGIAPVRIASGKKTGKNASVHCRRACPKFLRQSFHEFGECSIRYCSWAQACYQAQRGRGKGHHAAVRAVTFKWIRILFACWKQRTPYDPQRYFQALQTRGSDYAQTTA

SEQ ID NO: 159082 - protein, 343 aa, unidentified
MKIAILGIDLGKNSCGLVGLDGRGKVVKRRHMRRASIVGFTKSLPPCIIAMEACCGAHHLGRLLKAQGHEVRLMSPEYVRPYVKAQKNDDRDAEAIAEAATRPTMRFVELKSEEQLDMQTLHRARDRLVGERTALINQLRAILLERGIVIAQGRRNLERELDAMLFEEDGLAVSPRLRKLIEGIREEWRDLDRRIAAFDDEFAARAKTDEAARRLATIPGIGVLNATALAAAIGEGQTFARGRDLAAWLGLVPRQITTGGKPRLAGITKRGNCYLRKLLIHGARAVLPTLCKSETLLGGWLRALLARVHKNAAVVALANKLARIVWAVLRRKETFNPSATALA

SEQ ID NO: 159083 - protein, 347 aa, unidentified
MRKIAYLSMDVHARNCVLGDMDGNGKFRGNRSFTTCEINIIKALKAIKAKKKYLVMEAGPMSNWAAQVANDHTTKVFICDPRENALIYKSSHKHDKVDTKKLCRLLRLNEFKEVYRPENDQRALFKAAVQHYQDFRDQLKALKQKTKAMYRQWGIINVFTDSVYSVSGRDKFLQQVKHRPIYLQLKRLYTLLDATAAMKQEAEKSMASLGRNYPEIKEFKKMPGMGIIGPHTFDAYIQTPHRFAKRNRLWKYCRLAVTDRTSDGKPLGFKRLDKSGVSELKAVSYRAFLSAMKGDNEVKRFYLNSLQRTYNRKHARLNTQRKILSVMLSIWKKGQAYRPELFLDPSI

SEQ ID NO: 159084 - protein, 402 aa, unidentified
MNFSIGLDWASQTHAVCVMEATGQVGWQGTVEHSAAGLAELLRRLARFGPPAALPVALERPSGLLVDTLLAAGHPVVPIHPNALKASRPRYSAAGSKSDPGDAFILADLLRTDGHRFRRLQPLSDETRALRALVRGRDDLVAERTALANQLRALLERVWPGAAALFAEVESPISLAFLTRYPTAQSAERLGEKRLARFLGQHSYCGRRSPAELLARLRAAPASDVSDLEAEASRDVVHALVAVLTPLGVQIQQLSAAIVAAVAQHPDGPLLQSFPRSGGVNAAQILAELGEDRTRFPTDEQLAAEGGVAPVTRESGKHRQVAFRWACNKRLRQALTTFADHSRHASPWAATIYTAARRRGCAHPHAVRILARAWVRVLWRCWQDRRPYDVTLHRAAQRGAAA

SEQ ID NO: 159085 - protein, 405 aa, unidentified
MEIIIERGAGLDVHKETVVACIMGTGIKKEVRTYLTVTNDLLRLKKWLKDNQITHLAMESTGVYWKPIFNILEDSFAVILVNARHVKNVPGRKTDVKDSEWLCKLLRSGLIRGSFIPPKEIRELRDLTRYKRKLIQAIASEKQRIQKILEDANIKLSSVASNIFGASGTRIIEELMKGDLTAEEMAELSKGRLRKRRDDLKEALVGHMEEHHTFMIKASLGHIKAVEEILATLEQRIQVKIERHFKKEYELLQTIPSVKENASVIIAEMGANMDPFPTEMHCSSWAGMSPGNNESAGKKKPGTTTHGNKCLKSILTEFAWVASRMKGTYLRAKYQSLVGRRGKKKALVAVGHKILIMCYHILKYKVPYKELGENYLDVRKKDRIVKSHIKRLTSLGYEVTLKEAA

SEQ ID NO: 159086 - protein, 353 aa, unidentified
MKQSTATVPALTIGIDLSDDMSTFCAVDAAGDVVLKGTFPTTRPGVAEAFGDLASCRVVLEASTQTPWVTRELQELGHEVIVANPRNLHLISKSARKTDANDANTLARIGRVDPQLLSPVVPRDEQCLAARALMGARKKLVQTRTGLISMVRAECKVHGERIGNASSEAFARRARPQVPELLRLALDPVLDTLDELTRRIRDYDKEIEKLCEQVYPKTGVLRQVRGVGALVALAYVTTIGDPTRFRDSRTVGAYVGLVPRSYQSGKSDPKLRITKQGDPMLRTLLVNAATHIMRQSAPDCALKRLGRRIANRGNPRDRARARIAVARKLSVILHRLLLTGEVYDPMRDVIKTA

SEQ ID NO: 159087 - protein, 248 aa, unidentified
MANEEDYMVVVRFDVSKDSIYGARLDCSGTVKERAVLPNNEREIEVLLTRFKSKYRHLLVASEATAEYHRPLNPITTRQFTRSTIRKKKTDVSDAEIVARVAAQGQGTLVTKDTFNCVKPMLRTAVKLAQISQILRLMQHHIAEVIPEEQLLLQELEACRERVNEAADVFRATGRKQVDSQLSKLLQSVPGIGIQTAALLIAELGDITRFKDAKAVVAYMGLDPKVKQSGATLARNTKLTKRGSPYLR

SEQ ID NO: 159088 - protein, 330 aa, unidentified
MKNEFIGIDVSKGTLDVHLYCGNRHQSFKNNVDGRQSLIDWVIEKTNLKLVELRFCLEHTGIYSQPLCELLEQMDLTYYLISGLELKRSMGIKRGKNDKVDAKRIAQYAFLRRDDLIAYKMPGQTVITLKKLLGQRSKLVRQRAGHKVSIKEEKQMYPSTQKSFVIESSGAIIGFLTLQIKLIEKEIVSLIKSDQEILKTYENIQTIKGVGPILATNMIAHTNNFKSFQNWRKFACYAGIAPFEHSSGTSYRGRTRISVLGNRDLKTILSSAAATAILHDSQLKMYYNKRLKEGKNKMSTLNIIRNKIVSRIFAVTKRQTPYVETFKFAA

SEQ ID NO: 159089 - protein, 347 aa, unidentified
MNFYNSTHRHYCGIDLHARSLYVCILNQQGDTLLHKEIPASPEPLLRLIETYLDDLVIGVECMHCWYWIADFCEDQGIAFILGHALYMKAIHGGKTKNDRVDSYKIATLIRGGNFPLAYVYPRSMRATRDLLRRRTGLVRHGADLKAHVVNTTSQYNLPPNKVNLKNVSAREQLGRTFDDPIVQRNIDLDMAVLECYHRELSQVEWLLEKQAKKHQPTYYHLLTTIPGVGRILALTILYEVGDIRRFESVQKFASYSRLIKCKAESAGKTYGTQGNKIGNAHLKWAFSEAAVLYLRGNPDAQKLLQRFQKRMSKAKALSALAHKLGRAVYFMLKNEKVFDEQRFLTS

SEQ ID NO: 159090 - protein, 356 aa, unidentified
MNNSIAGLDLAKNVFHVVFFDRHFKEVRKRMLRRNQVLAFFANTPPVLTGMEACSGSSYWGRELIKLGHEVKIIAPQHVKPYVRGNKNDYNDARGIAAAAKIPGMPTVPVKTIEDQDIQAAHRMRTQCVRDRTALCNSMRGLLAEYGIVLARGVSKVRKGIPELLEDPDNALTPFFKEMLARRYEQLVEIDGHIDFYTQKIKQRAKEDDACKRLQTIPGFGPINSSAFKSAVGDGSAFSKGRDVSASLGVVPRQHSSGGKDNLLGISKRGDRYLRSLLVHGARSTVRAAANKDDQLSQWINRLRERRGIHKASVALANKMARIGWAVLHNKTTYRASLGAGAMGGDASGGGSEQGL

SEQ ID NO: 159091 - protein, 346 aa, unidentified
MEIVGCDFHPSFQQVAILDVSTGEVRELKLLHAGGDAERFYRELEGPVLIGMESTGNTLWFERLMEQLGHELWIGDAAQIRASYVRRQKTDKRDAAHILQLLIDKRFPRIWVPSQLERDQRQLLLHRQRLVQMRTKVKTELQHLALNQGLQRKYHLWSARGRADLEKLPLERWTARRRADLLKVLDMLEAQVTDLDEAVGQVALANAGARLLMTQPGVGPVTALAFVVTIGDVRRFKRGKQVASYLGLIPSERSSGGKQRLGAISKQGNVFLRTMLVEAAQSAVRHDEQFKKEYAHRCHSKPKGVAKVAAARKLAVRLYWMLRTQTPYSKAVHNEGSPSHSLVRQS

SEQ ID NO: 159092 - protein, 314 aa, unidentified
MTPDCRQIHRVVGIDVGKTSVTLHDLASDRTIKVANEVEALREALEPLRDCDLAVCEATGGHEDVLLDLLHALSIPVHRAHGGRVSAFARSFGLAKTDRIDARILAVFGRERGAGLPRWTPADAIGLRLVALVRRRADLVELRKRERARTKGPRAGFVDASIARTIAFLDAEIDELEARIKATIAEGTRLRARHDALRSIPGIGPTVAAGLLALMPELGFLDRRAAASLAALAPHPRDSGTIRKRRVTTGGRRELRPLLFNAALAAVRGQNLLATFFKRLVDAGKPKLLALTAVMRKIIVVANARIREVEAKLT

SEQ ID NO: 159093 - protein, 321 aa, unidentified
MTAVLGIDVAKNKFDVALLRSGKYKNRSFENKPSGFESLATWLEQHDVTSFHACLEATGTYGDALARFLFDAGHMVSVVNPARIKAFGESELLRTKNDKTDAKLIARFCDTMKPVAWQPDPPEIEHLRMLGRRRDALISMRTQEVNRLGVAAASVNESIQKVIAFLDEEIEQISKLIREHINSHHGLRKKHDLLKTIPGVGDVTIEAILSEANAFEGFDSVEKVVAYMGLSPKEKTSGTSVKGKPSLCKIGSARLRKILYMPALSAIQHNPLINALYNRLKAKSKNGMIIACACMKKLVHIIYGVIKNGKPFDPAYNVKTA

SEQ ID NO: 159094 - protein, 372 aa, unidentified
MNYNTVYVGMDVHKESFSLCAYTIEAEKASHYQRTESDYKKVLNYLEFLRTIYGDDANFICGYEAGCLGYTLYHQLTANNVKCIILAPTTMLEQRSKKRIKTDKRDSEIIAKCLAQHNYSTVHIPTAKDEETKEFLRMRDDHKLALKKVKQQILAFCLRHNYRYDGNSHWTAAHLKWLKALTPEALYKEILDEYLLTYQTLSDKLERLDKRIEELSTQDEYKEAVKKLCCFIGVKTHTALSVLVEVGDFKRFASAQHFASYLGLVPGEDSSGDNQNRLGITKAGNRHVRLLLTEASQCYARGQAGFKSKELKARQSGNTPAVIAYADKANERLRRRYYKMVLNKCKKHNVAKTAIARELACFMWGMMTDNIA

SEQ ID NO: 159095 - protein, 398 aa, unidentified
MSIQAQCWYAAVDWASEKHDVVVTDYEGRRLGRLQVEHSGEGLARMADWLVATTNGTADAILIAIEVPHGPVVDTLIERGFSVHSINPKQVDRFRDRFTVAGAKDDSRDCDVMASALRTDRHCFRRLATRDPTLVELREWSRMHEEHGRDRRRYVSRLREQLIRYFPAFLQLEGELDADWKLELLERAPTPRSATALTKLRVSKILERHRARGRDAGQMLAVLQQQAVTTSPGTTKAAAAHVTALLANIRLAKQLEKEAKDNIERITYQLVDPNSDELESPCDAGKPTSEQSAPLRDAAILLSFPGIGPLNLATLLTEATDGVRDRDYQALRCQGGVAPVTKQSGKSRCVVQAGPAISAIGDARRRGQLSLFGCPNLGTSRSSPTSRSSRRSTRVEEP

SEQ ID NO: 159096 - protein, 322 aa, unidentified
MAKLSFCGIDVSKDRLDVMVLPDEYSSSVPNDPAGWAILVEQLRGFSITAIGIEASGGYERGAVRSLQAAGMPVRQVNPFKLRQFARASGVLAKNDPLDARMIASFVGIMPTRPAQRTTPAAEQLVEMLAVRRQLSAEKTAAENASRLLEDLMLQRLSRRRIARLAADIELLDKRLVESVATDATLAHRYRLLTSMPGVGPVLACTLIALLPELGGMSRKQVAALVGVAPYAFESGTLKGRRCIWGGRANVRQVLYMAAMSASNWNPVLKLFHDRLKGAGKLPKVVIVAVMRKMITTLNAMVRDDIAWADRLSGRHSVTTAR

SEQ ID NO: 159097 - protein, 316 aa, unidentified
MTRAEVWVGIDVSKARLDVALGSGGELFGVDNDARGVADLVGQLCKLGPQLIVLEASGGLETELVSELAAAQLPVAVVNPRQVRDFARANGRLAKTDALDAEVLALFAERMRPPLRALPDEQTRQLQALVTRRRELVEMLTAERNRLSSVPTELHREIRAHIRWLEARLKQRDRDLDRTLRNSPLWREQEDLLRSVPGVGPVLCTTLLAGLPELGRLNRREIAALVGVAPLNHDSGTMRGRRTVWGGRAHLRAALYMGTLVGVRYNPVLRTLYRRLLERGKAKKVALVACMRKLITILNAMLKHRTHWSAPCFDPA

SEQ ID NO: 159098 - protein, 403 aa, unidentified
MNSVGIDISKGRSTIAVMRPFGEVVISPFEVRHTGSELSKLARQLKSLDGETRVVMEATGNYHASVAKLLHDAGLYVSVVNAKLVHDYGNNELRRVKTDRKDAVKLANYGLDRWLTLPRYIPEEDTRLLLKNCYRQYRQYSKVQTVLKNNLISLLDTVFPNANRLFSSPIRGDGSEKWVDFVAEFWHCRCASEKSERAFTSKYLRWCRKHGYNFREAKAHTIYAEASGHIGVMPKSETTKLLVKQAVSQLRATSTALAALKQEMQSLASVLPEYPVVMDLFDVGPTLGPQLIAEIGDVRRFYSKKALVAYAGLDAPPNDSGDVTGRHKSMSKIGASSLRRTLFLVMSVYLQTAPLDEPVYQFMDRKRAEGKPYRVYMMASANKFLRIYYATVKAYLESLEHTA

SEQ ID NO: 159099 - protein, 337 aa, unidentified
MKYAGIDLHSNNCVVSVIDETDRVLAERRVGNEMERVIAVLQPHRSELVGVVVESTFNWYWLVDGLQDRGFVVHLANTAAMQTYSGLKHSDDRHDARHLAHLLRLGVLPTGFIYPKTQRAARDLARQRMRLVQSRSSVIVAVENILARETGGRLSCEQIKRLTAEQIEAMELHADVRLGLQAQIALVGALEQQIGALEKRLQERVRLQAEYRLLQTVPGIGPVLATVIALETGPIDRFGSAGDFASYARCVGSARVSNGKKKGEGNVKNGNRYLAWALVEAAHFARRYCAQARRFYDRKRAHTNTALATKALAHKLARACYHMLKRSAPFDVARCFG

SEQ ID NO: 159100 - protein, 338 aa, unidentified
MTNVTLVGLDLAKNIIQVCGVNREGKALFNKAVKRARLLEFLAQYPGVTVAMEACSSSHYWGRTLQALGYPIRLIPPQHVKPFVKGNKNDRNDAFAITEAARRPGMCYVQPRSLEQTDLILAHKVRDRRVRERTSLINQLRGLLGEYGIVLPAGKEKLSAELPLLLEDAQNGLTPVARQCFAGMLAEWRALDEAIADLDQQIRRQCRACEASSRLLEIKGVGELTATAAVAIIGNGNQYRNGRHLAANLGLVPREHSSGGKQKLGGITHRGNSYMRTLFVQGGWSIIRHCAHSEDRLSRWARQLIERRGKHRTAIALANKLARITWAMLNKQTRYQPA

SEQ ID NO: 159101 - protein, 344 aa, unidentified
MQIRSIGIDLGKTTFHLIALGSRSQIVVRKKFSRTQLLAYTANLPSALIGMEAGVGSHFLGRALRQQGHEVRLIPAQFVRPFVKSNKNDYRDAEAIAEAVERENMRFVPIKTEDQLDLQAVHRVRDRLVARRTSVINQIRAFLLERGISFRKGPASLRRQLPEILENADEQLSPGMRRLLDFLWQEWKGLQSQIESLNEDLEQIANSDPACVRLQQIPGVGPLVATAVVSAIGNGAAFHKGREFSAWLGLIPRQWSTGGKTKLLGISKRGNPYLRKMFIHGARAAVLRVKREGSSLGNWMGQLETRTARNAVIVATANKLARITWAVLASGNNYHPRHKVAFSN

SEQ ID NO: 159102 - protein, 352 aa, unidentified
MTKKRGRVVGLDVHPDSFAGAVVAGSDPGSAQVLSSSTRVQLEQLEQWALRYTKTEDTLVLEASGNAFSVAERLRGIGRKVEVLDSHRAGKVGKVYCANDRVDAVKIARIYLSALSPIVWQPDPKTLERREVFSAYQAVVKESTRAKQQLRSMLNEHCVRLEKGFRLCHPNAITRLLALREWTPARRMLLEQLHGSLVAARARRTLLRRHMAQEIVAEETLLRLTRLCGINLVTLYGVVAAVGDVRRFSHSKKLVAYLGLNPSVSQSGNFEGSTALKRHGRGALRALLIQSGKKLLQVTNPLQKWGLAVAARRGRNKAAVAVARKLCVALWHVLMGHVISERWSDSTPSRLS

SEQ ID NO: 159103 - protein, 448 aa, unidentified
MVEKELRSYTWRDLETNGKFAKNDKLSFITDDMLIAGCDIGSETHYIRAIDVRGRELSPGAFEFSNTSEGFENAKAWVLALAAKHDKKQIVQGLEPTCHYWFALAAWMISNGISVVQVNPYAVKQSKEIEDNSQLKDDRKDPKLIANLVKDGNYGMPYLPEKVYADMRRLSMFRDQFTEDRIRNINRLHRELKIYFPEYMDAFGKIDGAFTLEVLKVSAIPTDITALGAEGMKNIWHNAKLRGRGYSRANEIVNYAEKSVGLTDGTDAGREAVKWYAEQILRLDEQLAEIESALHEKCREIPYAENILAINGVGENILAGILAELGDISRFDDVKEIQKLSGMGLVACSSGKHKGQTKISHRGRKRLRYWLFQAAKSAVSHADEFKQLHEYYTTRSNNPLKKMQSLVVIACKILRVIYTILKTGTTYDSQKLLKDIKHPAASQAPMAA

SEQ ID NO: 159104 - protein, 387 aa, unidentified
MFYCGIDIAKRKHAVSLLNDQGQTLKAVFTIANTRPGFDHLLAELQTLQGSVTVGLEATGHYWLALYDELTRTGYPVIVLNPLQVAAYRKSGIRKIKSDATDAVWIADYIRIANLPPTEQSLPVMLQLRELSRFRFRLTEQVGNSKRKLLTILDRVFPEYEHLFSSVFLKASRAILKEAVSAQEFADFDLQELTDLLAQASRGRFSQDQAEKIQEQARQSVGVGFLTNAVHLEMHCLLAQLDLLDEQRSQVDQTIAALMQQVPQYITCIPGIGPVTGAAILAEIGDIQRFETVDKLVAYAGIDATVYQTGQFEASEVHMSKRGSPYLRHALWCAATAAFLHDPSLQQYYQKKRNEGKHHGTALGAVCHKLLARIFVVLKEQRAYVIR

SEQ ID NO: 159105 - protein, 420 aa, unidentified
MSPDEKAAFARTFLVHVGVDTGKRFHVLVARGPDGLRRKPLKVLVSREGFERADAELQALFPDTERSRMLIGLEFAGHHGFTFAHFLASRGYPIVNVLPAHTKRTKELEDNSPLKTDAKDAAVICKLVADGTFVRFPFLESPYAELRVLVSYRHRLAVEATRFKNRLQGLLDLAWPEFVAQVSTLAKHTPIGLLERWPLPQDLLSAHKATVRAYARKISKGKFVTERFERLYTSAQQTIALLQAMAERRMEIQATLARWRLVRKQMVEAEARISELMARLSSAQALLTVPEVSAVCAATILAELGTPHDYAHPRQVLTLAGMNLIEKSSGSSQGRRRQSKRGRPMLRRQLFLLAGRWCQRRGLYRSYYEALLARNGGLKTKAVCAIARKLVPLVLAVLQRGEPFDKTRWQAARHQPALTH

SEQ ID NO: 159106 - protein, 413 aa, unidentified
MPKVRQTPLKSEYPNHLIGCFDIGKTKQFGYAEAPNGKYIQVFDFANNLAGFKDCYNKLESFRRLEGLSGILMGSESTGSYGEPLTAWLSKQGVKMVGVNSKHVHRFKEIVGNSPLKSDKKDPIVGTRVIQAGSYYKPLPSTGLAGELRELTKHRKRISLKENRTLNQLESQVVRVFPELLSVMKSLRLTTPIELLEHYPLPEDIINLGLEDLTKKISKISRKRLGKDRALELMEAAKNSIGITSCTTSISMIINDLIAEYRFLKEQNKRVELDIQTLLIESPEATILMTHPGIGHITAAEIIGETGGLNNFTNAGKVLKLAGLKLYEKSSGIHNGVRRITKRGRHDLRRTLYLAGVRMIKKNGVYRKQFEEHIKTMNKPKAIVAIAKKLLRSLFSMVKNNEVFDASYAEIRK

SEQ ID NO: 159107 - protein, 305 aa, unidentified
MEIIAFDSHKRYTLASVETKDGKLVKQERINHRQGEICRFLATCQRGSPVAIETIGNWYWIIDEIEQAGMQPRLVHARKAKLMLGCINKTDKLDVRGLNKLQRTGTLPTVWIPPGDLRDNRELPRTRMVFGQQRTRLKNRIQSVLAKYGLQAEFQDISDTFGKMGRQQIAVCLKKLPPETRYTTLGLLHQLDSVDSQIKRIERRMTKVFEPTKDVQLLQTMPGVGPILAVVIAQEVGDISRFSGPDKLASYAGTTPRVHASGDKVRFGRLRPDVKGPRFAGTQSLSKVGVFGGGQFGYGESRALS

SEQ ID NO: 159108 - protein, 348 aa, unidentified
MMLHAIDLHKAVLQIASMRADGDQVIRTARLPASPQALRAYLAQWPASRHHVVVEATGSWYWIADFCRAHQVQLTLAHPWKLRAITGAKVKTDPMDAETLLTMLRLGLVPKAHQVSPERRESRDLMRLRLRLVNKRVSCLNSIARLLEKFNLDSVEALPELVRLQVPFHQEQIATLQRQIRQIEKTLHRRVIPHEDVQRLLRVPGIGRINALAIHLEIDDIGRFPSERQFFSYARLVPGADNSAHSVRSKRSRAGNRYLKLAFSHAAVRAIQVYPEIREAYRKRLRKKGKPLAQAWVRKELARIVYHLLKERRDFAGEFRGRKLSRTKQPQWPQRARPSQRPAVPSAS

SEQ ID NO: 159109 - protein, 324 aa, unidentified
MLPTLGIDISKDSFHLELSVNDKLRQRKFANRKEGFIEVCAWLTKHKAFPVHACLEATGPYSEDLALYLHQQGHTVSVVNPAQIKAFGQSELLRNKDDRPDAGVIRRFCEKQRPAAWKPPPPHLRELQALTRHLENLIETRQQQLNRLEGAKTKGVIKSLRKLVSYLDAEIARTEKQIQDHTDNHPDLKHQCQLLESIPGIGKRTAAKLLAEIEDIAGYQSARQVAAYAGLTPRNYRSGTIRGKTRLSKTGNARVRKALFLSAMTAKRYNPIVRSFCQRLASHGKNKMQILGAAMRKLIHIAFGVLKSGKRFDPNHELLLNSGA

SEQ ID NO: 159110 - protein, 456 aa, unidentified
MEEISEEPAELVERVAALDIGKATLVACVRVPHDAKPGRRRQEIRTFATTTRSLLGLADWLDCLGVTRVVMEATSTYWKPPFYLLEESCACWLVNAREVKHVPGRPKTDKQDAVWLAKLAERGMLRPSFVPPPWQRELRDLTRYRRTLIHERTRENQRVEKLLEDTQIKLSAVVSDRFGVSGRQMLEALIAGQRDPKVLAQLAHGRMRSKLGALAEALTGHFRAHHGYLLRMMLDRIDALGAQADQLTGRIEELLAPFADQVEQLDEIPGVGRIGAQELIAEIGVDMGRFPSAGHLVSWAKFAPTTQASAGKTKSSSTGKGNPWIGATIGEAAMGASKTKTFLGSRYRRIVQRRGKQRALVAVGNPGPHRRLPLAVGPAGPLRRPRRGLPRPPAPPTPNPSTDPRTRTPLRQAGHPPHGRLTTQTGVVTAASSRHEPGSAGRCRLPLTERFSIQSK

SEQ ID NO: 159111 - protein, 361 aa, unidentified
MEKASSQVGKINMPVDEVTMTQILSFVGVDIASTSFMGCAGTAPWKVTVKPAKFENVEDGFISFLGWLKEHNLMPETTVVCMEATGVYSEGLAYFLYASGYTVAVEPPLNIQRKFPVNGSKTDELDCQYIAEYACRYVDKLSFWKPRAEILEQVKLLLTTRQHFSVQLTGHKNALHAVNRKKVSSALAKQVHQNMIEQITKHIKSIDQEIRRLIESDPTFKQTLLLLLSVPGIGLQLAAHLLIVMQETLDPKTLAAFIGICPIKHESGTSVYSAPTSRHYGPSVLRKLLYLAACSVRTHKKQFQQYFFRKVAEGKHKKLVLNNIQNKILKIACAVVRSQKPFVPNYVSVNPLVFQKSLTVS

SEQ ID NO: 159112 - protein, 414 aa, unidentified
MEERLNFLYVGIDPHKHQHTAVALNLFHKKIDKAFTFDNRPSAFPQMIQQIKKIAVKGNFSSIIFGLEDTHNFGRNLTIFLKEQKYLVKEVNSKLSEAKRKSYATVKKSDAWDSECIAAVLIEEYDRLPVANPIDHYWAIKQLVSRRTSSMKGLAFSIRKLHSQLQHHYPTYRKFFSELDGKTSLGFFHRFPSPRHLEGVTLEELTHFLRKLSNYACSTKKAEQILTLVRTDGQFDSDFQDKRDFIVRSLVKEIRFHKREISESEDEIKPLMDQLGIRLDTLTGVELVTAASFIAEIGDVNRFASSNQLARFAGIAPIEVGSGGEVKHKKTSQGNRVLHELFFQLACRQLALSRRHKEPRNPIFLEYYNEKRSKGKTKGQAIVCIMRKLVNIVYKMMKNKTEYVRPVTQKENAV

SEQ ID NO: 159113 - protein, 339 aa, unidentified
MKYTPVGVDIAKHLIQVHFINEHTGEVVDKQLRSKDFLTFFSNREPCLIGMEACGGSQHWARELAKLGHKVRLLQARFVKAFVMGNKNDVMDARAIWMAVQQPGKEIAVKTEEQQSVLVLHHSRRQLVKFRTAQINALHGTFLEFGETIHKGRAAMDRELPAALERMRVKLPPYLIALLEGQYSRLSELDSLIDDIEKQLISVARQSETCKRLMEIPGVGPLIATAAVATMGEASAFKSGREFAAYIGLVPKQTGSGGKVRLLGISKRGDTYLRTLFIHGARAAALLAKEPGPWITELKKRRPTSVAIVAMANKLARTVWAIAAHDRKYDKNHVSIRPY

SEQ ID NO: 159114 - protein, 387 aa, unidentified
MEKKRGRVVGLDVHPDSFAGAVVEGSDPASAQVLSTSTRVELERLEQWALRHTRTEDTLVLEASGNAFSVAERLGAIGRKVEVLDSHCAGKVGKVYCANDRVDAVKIARIYLSALSPIVWQPDPKTLERREVFSAYQAVVKESTRAKQQLRSMLNEHCVRLEKGFRLCHPNALMRLLALREWTPARTMLLQQLHGSLVAARARRTLLRRHMAQEIVAEEALLRLTRLCGINLITLYGVVAAVGDVRRFSHSKKLVAYLGLNPSVSQSGNFEGSTALKRHGRGALRALLIQSGKKLLQVTNPMQKWGLAVAARRGRNKAAVAVARKLCVALWHVLMGHVIGALERLDTLETKLSKFATEMGPAALHAFGYNNKADFVKKKLYVLRSYP

SEQ ID NO: 159115 - protein, 400 aa, unidentified
MNAVGIDVSKGKSTIAVMRPFGEIVASPYDVSHTESELKELARFLKSLPGETRVLMEYTGRYYEPIARYLHDAGIFVSVVNAILAHDYSGNSIRKVKTDKIDAIKLANMAIDRWIQLQEYVPEDEIRQTLKICNRQYNQYNKLKTMLKNNLIALLDQTFPDVNKLFTSPSRKSDGHEKWADFALKFWHCECVCGISEKQFKDKYERWCKRNGYYYSAYKAEDIYAEACGNVGLLPKCESTKVLITQAITQLQTIEEALAAIKCEMHKLSSTLPEYDTVMALYGVGEVFGPQLIAEIGDVSRFKSKKSLIAFAGIDSPADQSGQVDNKSKAITKRGSASLRKTLFQVMTVILQNSPKDEPVYTYLNKKRAEGKPYRVYMIAAANKFLRIYYARAKECLVNT

SEQ ID NO: 159116 - protein, 341 aa, unidentified
MSSFNPNSCTGLEPAPSKEGSWRMTQTRTVVGIDVSKGTLDAAIRSAGVTAKFGNTAKGRQELLKWLTAHAVRKAVMEATGGYEIGCRKFLARAGLEVVIVDPKRVRHFARSAGQLAKNDPIDAQMIAWFAEVFDDLTGRPQDEQREQLEQLVAAHQALTRVQGHIANWGEHEHPKLVQKVHQAVLKAITAQLDKLDDAIAALLDSSPQFAERAEIIQSVPGLGDVSTAGIVAFLPELGRVDRQAAAALLGVAPFDADSGKHHGRRYIQGGRRKLRNLLYMPIVGAATRYNPVLKAHYQRLVARGKQPKVALMACLRKLIGILNTMLARGEKWDPTKHALA

SEQ ID NO: 159117 - protein, 346 aa, unidentified
MMIIGCDYHPSWQQICWLDTATWETGEKKLEHASGEAERFYRQLPAPALIGMESTGNCQWFIEMAAKLEHNLWIGDAAKIRACEVRAQKHDRRDAALILKLLREGRFPRIWIPSGEEKDLRQLLIHRYKLVRIRAQVKTELQHLAMNQGVTKKRKLWSKAGEQVLRELPLKPWASRRREDLFRVREMLHGQIDLLDQAVVEVAEKNEKARLLMTQPGVGPITSMAFVVTMGDVNRFQRGKQVASYLGLIPREYSSGGHQRFGSISKQGNWFLRMLLVEAAQGAVRYDPGFRNEYLHRCHTKAKGVAKVAAARKLAVRLYWMLRTNTGYPEIVRAESSSRVPLVSAS

SEQ ID NO: 159118 - protein, 374 aa, unidentified
MEEYDVYIGLDVHKDTITVAAAFPGRSQAEPRGMIANDKRSLRKLVKRMRFYGARLVFCYEAGPCGYEIYRWIKEWGHECQVVAPSLVPRKPGQRVKTDRRDAGKLAEFLRNGDLTVVWVPDEEQEAIRELTRARENMKHLERQLKQKLSAFLLRHGKKYGEGKSKWTQRYYRWLAEVKQESPVEQIVFEEYVDAVKQSEMRVASLEEEMRNALTSWSLSPVVESLMALRGVNLLTAMSVMAELGDISRFDSPRELMSFVGLVPSEHSSGQRRHLGAITKTGNTRVRRLMVESAWSYRFPARRSLDLQKKAEKATEEAKAIAWKAQKRLCRRYRALLNAGKIQKVATTAIARELIGFIWAIVCEVTGKAMDRAA

SEQ ID NO: 159119 - protein, 369 aa, unidentified
MKKDTTYVALDDSKKSIVVGILRPKVTEPELRQFPNEPKHLRRFFTRLQREGPVSACYEAGPSGYDLYRQLTALGAPCQVMAPALTPRKPGERIKTNRRDAAKLVRLFRAGELTPIRVPDEAQEAVRDLLRCREDLQEDLLRWRHRLLKFLARHGRVYREGRNWTQRHWAWLRDQRFADPVLARTCQEYRFTVEQLLARRADLEREIEAIAQQEPYRTPVGWLRCFRGFDTLSALGVLIEVGDFHRFPHPRELMAYLGLVPSESSTGEDTRRGSITKAGNTHARRVLVEAAWHYRHPPCLGKALTLRSQGQPPEVLAQAWRAQQRLHRRYRHLVGHGKRPPVAVVAIARELVGFLWAALTQGAPAAEVA

SEQ ID NO: 159120 - protein, 417 aa, unidentified
MKSARNTLPEAPAGNVTCGIDWARDDHAVSVIDARGREISRCTISHSAAGLRELVAVLARAGAGEAAIERPDGPVVDALLSAGITVVVISPNQVKNLRGRYGPAGNKDDRFDAFVLADTLRTDRARLRPLTPDSPATTALRRTCRARKDLVSHRAAVANQLRAHLRNVFPGAVGLFADIDSPVSLAFLARYDTQDRADWLTPRRLTAWLASIGYSGHTSPAVLHARLAAAPRGLTGPDADTQAPITRALHTVLTTLAGQVKALSAEISTQLAAHADSHVFTSLPRSGTVRAARLLAEIGDCRARFPTPESLACLAGAAPSTRQSGKIRAVTFRWSCDKQLRDAVTDFAGDSRRASPWAADLYDKARARGHDHPHAVRILARAWLFVIWHCWQDGVAYDPALHRALQRLLNQDQQETA

SEQ ID NO: 159121 - protein, 345 aa, unidentified
MEHYAGIDVSLEASSVCIVDASSKVVREAKVASEPEALIAWFSEFGLSLVRIGLEAGPLSQWLHAGLKGAGLKVELLETRHVRSAFRTMPVKTDRTDARGIAQLMRLGWFRPVWCKSLSAQETRALLAARRLLKAKLKSIELSLRGLLRNFGLKLGVVTAKAYEGRVRALAEGHLVLEAIAEAMLAARGALRRQFAALHRRVLVAARASLRARLLMTTPGVGAVIALDYASAVDEPSRFSSSRRVGAYFGLTQKRYQSGETDRTGRISKIGDKAVRASLYEAAHVMLTRVTKPSALRSWGLGLKARLGPRKAKVALARRLAVVMHHMLVDNAPFDPAKGSPAIAA

SEQ ID NO: 159122 - protein, 349 aa, unidentified
MIIIGVDFHPEFQQIAAVDTETGEFQERRLQHREEAESFYRELAARGVRVRVGMEASGHARWFERLLAELQMELWIGDAAEIRTKRVRKQKTDRQDAQLILKLMLKDDFPRIWVPSWENRDLRQLLWHRHRMVQARTRIMNQLQAVALNEGLRCKKRLWRTQRQRLESFPLAPWASRRRHELLELLDRLNPTIAELSQAVEQEVEKCPEAQRLATHPGVGPLTALAFVLIIGKAERFQCGKQVASYLGLVPLEDSSGNRRRLGHITKQGSSMLRFLLVEAAQVTVRSLPEWRSRYFHLMMRRGRKIAKVAMARRLAVGLYWMLRQGWDYQQWVKFGSHVGQPGNRHGVQ

SEQ ID NO: 159123 - protein, 336 aa, unidentified
MQCVGIDIAKGTFTACLCMYEFDQGCSTAPVVFNNDKTGFNQFIKWSRKEALRGYPLRYVMEPTGVYYEQLAAHLSKLGLDVCVVLPNKAREFAKYEGILTKTDDMDAYTLGMLGCLDKRLKPWTPPSPIYRELRQMTRFVADINKVKTELRNHLEAFAHSETAEKSIVKHYNKLIDEIDKQLVSNQKAIREKIKQEPGLFERIDRITTINGVGFMTVVTVVAETNGFALITNRKQLTRYAGLDVPAHQSGPVDPKRHISKQGNVHIRTALYFPAIVSTQCNPQMKDFYGRLCARNTQSKMIGVTATMRKLLLLIYSLWKSGEKYDPTRDKPACDK

SEQ ID NO: 159124 - protein, 408 aa, unidentified
MAYKIAGIDVHKRMLHVVVSDVQVDGEYDFTRRVFGSLPEALRSLAAWLVEQQVEEVVMESTAQYWKPVWGTLERHWKPICQKREGALATSGTLHLAQALSNRGRRGRKKDFRDAERLVKRLVAHELILSFVPDVEQRLWRTVVRTKYQLTRNRVQLQNRLEALLEEAHIKLSSLVSDLLGASARRMLEAIADGETNRETLAALADRGLRATQEQLQDALGVCQELNPVYRRIIKMMLDVRAHEDQVKRLAEVPGLGVDSAQQVIAEVGATAATFPSEKHLSSWVGACPGEEESAEVNYSRRSPQGNRHMRRILNQAANAAVKLKGSIFEILYRRYVPRLGHNQTIGIIAHKLCRLVWKILHRGIRYEERGPEVSKASKQKRTRKMIRQLRRLGYRIEPSPSQSAITA

SEQ ID NO: 159125 - protein, 339 aa, unidentified
MTIVIGLDVHREQITYDALDTATAEVWRGRLRPATRVSLRRFLAQFADQQVEAALEATTGWRFVVEELEAAGARVHLAEPADTRALRGPKRRAKTDCLDARHLRELCQQGRVPESWIPPAHIQDLRSRVRLRKALMDERVAWQQRIHAILLHHGLPQERDLLRAERRRRLDELELPRAARAYLDTALVLIDQLTAQVAPLDRELRAYASRQPGCRALMAHYGIGGLTSVTILAELGDAGRFSSSRHAVRFAGLDITVFASDDRRAPGKLSRQGSPLLRWAVFEAAQLAARPSSPDHRYYLAAKERLGANRAKLAIARKLVRRAHHTLRNLGDDALAPAA

SEQ ID NO: 159126 - protein, 336 aa, unidentified
MTITKNTADEAASLFKKRFRGDELSITCGYEAGCLGYKLFHDLEAHGVKCEILAPSTMEVPGGKRIKTDKRDAFLIAKCLAKGGFSAVHIPTQTDEAVRDYLRMRDDHKQSVKTYKQQINAFCLRHGYKYERTKWTQPHMKWLREIELGEIDRETLNSCLATYEQLTDAVERYDARIEELSYMDEYREKVQKLRCFVGIKTHTALSLIVETGDFSRFVKGSFYGSFVGLVPGEKSSGPHTNRCPITKAGNKHLRTLLTECAQAIGRSRPGYKSKELKSRPKGCPPEIVAYADKANDRLRRKFHKMIYRGKHKNVAATAVARELSCFVWGMMTDNIA

SEQ ID NO: 159127 - protein, 413 aa, unidentified
MVEVLYDRCCGLDVHQKTVVACLITPGRGGRPHKELRTFGTLTADLLALADWLRAADCTQVAMEATGVYWQPIWNLLEDAFTLLLVNARHIKAVPGRKTDVKDCEWLADLLRHGLVRASFVPARPQRELRELTRYRTALVRERTAEGNRLHKTLERANLKLGAVASKVLGLSGRQIVTALLAGTTDPAVLADLAQGKLRAKRPQLEQALVGTPGEHQRFLLARQLAHIDFLDETLAEVSAAIAERLRPFDATIERLDAIPGVGRYTAEVLLAEIGTEMSRFPTAAHLASWAGMCPGNYESAGKRQKGKTRKGNKWLRAALLEAGHAAARTQGTYLAAQYHRLVPRLGKKKAAVAVGHSILVAVYYLLQRGTTYAELGGNYFDARNREHVERRLVRRLEKLGFTVTLTPNDPAA

SEQ ID NO: 159128 - protein, 318 aa, unidentified
MRKHSIICAGIDTGKRKLDVALDGCPDEQLQVPNSEEGYQRLSAWLRQRKVKRVGIEASGGYEQAVVCRLRREGFSVVVFQPAQVRAYAKFHLQRAKNDKIDAALIAACTAAVRKLHAAPDPRLVRLAEHQTLIDQIVDQISRIKNYLESCRDPRLRRFWQDEIKRFRGLFKTELKALVAAIRRHRDLSERLDLIASVDGIALRTATAILVRLPEIGRISREQAAALAGLAPYDNDSGERDGARHIAGGRQRLRNSLYGAAFAASFHWNAELIELYKRLIAAGKEHKVALVACTRKLLIFANAVVARGTPWESRAATR

SEQ ID NO: 159129 - protein, 355 aa, unidentified
MMLIGVDPHKSTSTATVVEPESNREVASMRIEATLREYRRLLTWAGRWPERRWAIENAEGLGRHLASWLLARGERVVDVPTTATARVRQLSRGGGRKNDRIDAAAAACVAALQGDARPLEAEGTTDALGLLDERRANLSQARVRAVNQLHALFRALLAGGAPTGLSAGDAAALLRTVRPVGEVERVRKHIAGDLVAEIRALDARLKTNAEAMAELVKASGSTLTQTKGIGPITACRLIGRTGRPSRFPTAAAYATYSGVAPVEVASANKTRHRLSRSGDRQLNSAFHSIAITQIRTTGSLGNIYYHTKIAEGKTPREATRCLKRRLADHVWRTMITDEKRERAKTSSPPADSGAA

SEQ ID NO: 159130 - protein, 400 aa, unidentified
MAIAVGVDVAKQLHWAEIKVAETGAVLTSRGVENTPADIAELIGQIRVAEAEHGPARVGIDLLGGIASLLEAMLLDAGLAVVHVPGLAVNRARRGTVGGEHKSDPKDARVIADQVRMRDDLRVVERMRDDDIELRLLTSRRGEIVTDQTRRAARLRDLLSSIHPGLEQIVDVTTKTGMWLLTRYVTPGEIRRAGRRGLLAHLRKLHHVRDSDLAALAEAALAAAQAQHVTVPGEAVAADLARGLAREMLAGRDQLTQIDKNIAAVLDRHPDAALIRSLPGMGATLTAEFLAVTGGIGRFPSGDQLAAAAGLAPVLRQSGRVRYLRRPTAGDKALKRVFYQSAFVAVSCDPTSKAYYRRKRDEGKTHHQAVLALARRRVNVLHAIIRNRTPYQAPNAAVAA

SEQ ID NO: 159131 - protein, 342 aa, unidentified
MQDNIYDHYIAIDWSIKNMAIARMTKKSNKITAIDVPSDLEDLQAYLQNLRGTKILTIEETTTSQWLYTELREYVDRIIICDPNRNKLLNEGPKTDKIDATKLVHLLKAGLMKEVYHSTDRFLYLRRIVSGYEDLVKAGVRSKNQRYALLRAVGKKGFEKKDLKIGTSGEQFVLECLDRQIKAYEQEKELYEKEFRKLARKHPEIRHQKGLPGIGTINAVKIVARVVTPYRFSDKGHYLSYTGLVKLNKISGGRSYGKKNPRFCRQLKSVYKSGVLAAIGGNNPINDYYEYLIQEKGYPEHNARQMACRRLAILSLGVFKSGKKYQPFRWNHVKIREGASGL

SEQ ID NO: 159132 - protein, 468 aa, unidentified
MKPSGRRSNQHLEQASPGINLTLAPAGTTHCSPPCGEHAEETIGYRSLAPTVLEGSVNIVHEKCAGIDVGKDFVMCCALVGPAGGKTSSCIERFDTTTGAILKLADWLTEKGVTHVVMESTGVYWKPLYNLLEGQFVVWLVNAQHVKGVPGRKTDVEDCRWLADLMRHGLLKPSFIPPPEIRALRELTRYRRSMIQERSREANRVQKLLEDANIKLGSVASDVLGKSARKMLRALIAGSTDVADLAEMAHGRLRNKRDALKEALTGKVQDHHRFLLRELLDHVEYLERTTERLDGEIAEKMRPFEAEQKRLDAVPGLNVRNIQDLIAELGVDMTRFPSSAHCSSWAGICPANNESAGKRHRTRLRKGSVWLRTILVQAAWAAVAKKTTYYRAQFARLKGKRGPKKAIVAVAHSMLETVYALLKHKDMQYADLGVEYFLRRDKDQLKNKLVKRLGELGFDVTLSGKQPA

SEQ ID NO: 159133 - protein, 429 aa, unidentified
MKNSVANKLKQVPVGYLVIGIDPHKKKHAAVIMTQDFTTHSKFKFNNSKEGFEMALERIRMEMVRTVSRGAIFAIETGGHYWRNLAYFLDERGIPFRFINQFTLKRRREGKDLNRRKNDYRDSEVAAQLLCTGEFTDTKLSYGVYAELRAAHNAYRRLVKERTRIINLVKGLLDGLFPEFTQVFKDPCGLTALSVLSICPAPEGIAAMTEDEFVNTIRTGHRGLLMRKKLCALHYAAQTSIGVKADAQSVSYELSFLVEKLQLIKRHICRIDETLVRLVNETEEGKYLLSIIGLNYISVAGILAELGSFRSYKSAKQLIKMAGSNPTESESAGKRSSHTPMSKKGRPVLRYCAWIAVIPMLRFNPDFRAWAKKLRERPVHANPLSGREIVGAALNRLLRLAFVLVKNQTFYQVPEIESMPEPELLPVAN

SEQ ID NO: 159134 - protein, 455 aa, unidentified
MAKKSKKNQSTPENMPVLHPHAAGIDVGAEEHWVCVPAGRDAQPIQKFSAFTCALHRLADWLTTCRVTTVAMESTGVYWIPLFQILEARGFEVALVNARHVKNVPGRPKTDRFDCRWLQKLHTYGLLAPSFRPPEDICRLRSLLRHRDNLIQMTVKHIQHMQKSLDQMNLHLHHVISDVTGVTGMRIIRAMVAGERDPKLLATYRDYRIKSNQDTIAKALEGDYRPEHVFTLTQSLALYDFTQQHIADCDQEIERVLSTFETLVDPAIHPLPPPTTAHRQPQRNEPAFDLRTHLYRITGVDLTQVPGLQAPTIHIVLAEIGLNMHKWPTDKHFASWLGLCPDNQISGGKVLSTGSRRVQNRASRALRMAAHSLRTSPSYLGAFFRRMRSKLGPAKATTATAHKLAKIIYHMLKEKTPYRERGAEYYLHKDHERKIKQLRKQAKHLGFALVPQTSN

SEQ ID NO: 159135 - protein, 351 aa, unidentified
MPRTSTVQAVTTIGMDMGKNTLHMIGLDSHGAIVLREKVSRGRITSRLANLPSCLIGIEAGMATHYVARELTALGHDVKQVPPTYAKPFRQGHKNDFRDAQAVAEAVQRPTTRFVPAKTDEQLDLQALHRVRSRLVSERTAVINQIRGFLLERGIIVRQGLRFLRQALPDILAKRPDVLSPRMVRIVADLASDWRRLDERIQPVTDEIETLAKSDDGCRRVMTVPGIGPIISSAMVAAIGNGAAFARGRDFSAWIGLVPKQMSTGDRTILGRITKRGNGYLRTLFVQAARVILLRPASWPKHGFGVWLARAAQRLHRNVLAAALANKLARIAWTVLAQERSYEARIVKAAA

SEQ ID NO: 159136 - protein, 419 aa, unidentified
METKTDDIVAYLGIDWADQKHDLHLCSPSGKTLEYRQIEHAPEILNEWFVKLRQRFPQGRIAVCLEQSKGALLYHLMSYDFLALYPINPKALARYREAFTTSGAKDDKPDAEFLCELIRCHRDRLRPWLPEDEQTRNIAALAEARRKAVDERTRVANKLTSTLKSYFPQSLQLIGVNLHDPLSLAFLQRWPRLESIQGTSDTKIKKFYTSQGSRSEQRITERIQVIRSALPVTQDMAVITSAMITVQMLTDILTTLNITIQKYEQKLKELMASHPDNDIFSSFPGAGEALTPRLLAAWGTDRQRYEDAEAMQQYSGVAPIMKRSGKTTVVQRRLACPKFLLQTFHEYARCSLLYSTWAKAFYDMLRKRGKSHHSALRALGFKWIRIMHRCWRDRVCYDEGQYIQALQRAHSPVLAYMVQ

SEQ ID NO: 159137 - protein, 364 aa, unidentified
MRRKEPRDRGTGGAGRPRVIGMKSVSYYVGLDVHRQSVSYCIKRPEGTIVREGKISAQRQALLEWVQSLSSVSWCGGLEATICSHWIYHLLRPYAAELKMAHPSRLKALIASKRKTDCLDARTLADLLRCDLFPECYVLAPDYEQLRQQLRYRSLIVRTSVLFKNKTAGLLIENGVPYETSKLHGKKYFAALLQNADGMSEQLHSLLSFNRSQLETLARIDRTIIAILLQDPLLCDRVQQLRTVDGVGEITALTWVLETGDPARFSNAKQAVSYCGLCAAQRESAGVSKRGPISHQRNILLQTTLIEAAHLAPRFNPTLRAVYQAELAKGHRHRATLEVARRLVRYLLAIDRQYFQQHPSLAAA

SEQ ID NO: 159138 - protein, 347 aa, unidentified
MKMAMLSFCGIDVSKDRLDVVVLPEGWFFSVSNDTAGWAELVVRLRPLTVSAIGLEPSGGYERGIIRALLAAGMSVRRINPNKLRQFARARGVLAKNDRLDARLIAEYVAIMPTRVVQRDAAVERLAEIVTMRRQLCDEHVAAENQAAHLEDAMLRRLSKRRQTRLEADIRLLDKRLAEMVAANVALAQRYELLTSMPGVGPVLAFTLIALLPELGKMTRKQIAALVGLAPYDFDSGKLKGHRSIYGGRMPVRNVLYMAALSASRYSPALKAFHNRLADADKKSKVIIVAVMRKMTHSITSSASASSVGDNSKPSALAALRFTMSWYLVGCWNGRSPGFSPRRMRST

SEQ ID NO: 159139 - protein, 315 aa, unidentified
MICGVDVSQQSLEVRIEQDGPGASFPNTRAGIFQLAEFCRIHQVHLVAMEASGGYERLPLLLLSAEQIPVAIVNPRAVRKFAEAMGYLEKTDALDAGVIAHFARTRKSQPSSPGSAQLQHLRALVTRLRQLTDLQTAQRNQQLLVTDPTVQGLCQQLLEVVKTQIRSLEKAIAQLVDADPLWHQLNQSFRSIKGVASRTVSRLMAEMPEIGTLSHKKMAKLAGLAPLACDSGKARGKRVIAGGRRPIRDTLYMVAGIVARFHPDFIAFRQRLTAAGKAKKVVRVALAHKLLTRLNAKAREVRLKFAQTALLEQPS

SEQ ID NO: 159140 - protein, 335 aa, unidentified
MSLYCGIDLHSNNHVLVVIDKDDKRLIERRLDNDLSLTLSCLAPYKRRISRIAVESTPNWYWLVDGLEDHGYDVALVNTAAVKQYEGLKYSDDRHDAFWLAHLLRLDILPTGYIYPRPQRALRDLLRHRQDLVHQRTALLLKLHGMHWRYFGVQIKRNEIMANNCLVRFDNEHVQLAWDTDLRLAKCITREINALERKLADILKGTPDFENLLAVPGIGAITSLTIVLETGEISRFPKVGNYASYCRCVRSERLSNGKPKGKGNAKCGNKYLSWAYSEAAHFMIRYCPEAKRYYERKKRQTNAMIAIRATAHKIARAFYHVLRDHVAFDVQKAFA

SEQ ID NO: 159141 - protein, 341 aa, unidentified
MDIDILGIDLAKRVFQLHGADRRGHLLYSSKVMRTELLSVVRKLSPHIIAMEACSSAHHWGRCFQEMGIEVRLISPQYVSPFVKTNKNDANDAAAIVEAASRPTMRFVPVKSVEQQDMRAVHRVRELLLHQRTALINQVRGLLGERGVIIAQTPAAFKRALPEILAKCEGEMTRTCQAILTELLEQMRVLEERIARTNKWISAFMKSSALCQKIAAIDGVGPITATAMVAAVGEAKEFKNGRHLSAWLGLVPRQYSSGGKSRLQGISKRGDTYLRTLLIHGARTVLRYAIGKADSRSRWLQELIARRGHNRAAVALANKNARVIQALLSNSDSYRPPIVAC

SEQ ID NO: 159142 - protein, 340 aa, unidentified
MTADVCGIDIGKTVFHLIGLSKEGQIVTKKRFTRKQLITHTVNMPACLIGMEACPGAHFLAGVLRAQGHEVKLMPAEYVRPFVKSNKNDYVDAEAIAEAVQRPTMRFVPIKSEAQLDLQALHRVRDRWIGRRTAVINQIRGFLLEHGITVAVGPAHLKRQIPSILEDADNLLSSRMRALLVELRDEWKKLETQIEEIDREFAQAAKKEENCRRLLTIPGIGPLTATALTAAIGNGAAFRKSRDLAAWLGLVPRQHSTGGKARLLGISKRGNPYLRRLFIHGGRAVVARVKREDHTFGSWLDHIEARSPRNVVVVAMANKLARIAWAVLTRGQVYCATACP

SEQ ID NO: 159143 - protein, 369 aa, unidentified
MGKTTAYVGLDVHKDTIAVALAEVGLRGEVRVYGKIANTPAAVKTLATKLAGRHGELRFCYEAGPCGYGIQRQLSSLGHDCQVVAPSLIPRKPGDRIKTDRRDAAKLATLHRAGELTPVWVPDQAHEAMRDLVRARQAAVRSVRQARQQLSSFLLRHGHHYQRPAWTKAHRRWLSGLKFEQPVHYIVLEDAIAAVEAATARRDRLEAQIEAALPEWSLAPVVQALQALRGIRLVAAATLVAELGDLTRFTNPRQLMAYLGLVPSEHSSGNTRRQGGVTKAGNGMARQMLIEAAWSYRFPARLSREQLLRQEHLAKAIRDIAWKAQERLCRRYRKLMRDGKLPTVVTTAMARELAGFVWAIAQEVQVKAG

SEQ ID NO: 159144 - protein, 318 aa, unidentified
MTTACAGIDAGKSYLDVGLAPSRRHFRVANAREGIDYIVDRLRQAGIDKVVLEAIGPYAQPVVTRLVAAGFEVGLVNPRRIKAFREAEGRSAKTDRLDAALIARFAVKMTDALRPVPSADQQLLKALATRRRQLVEMIAMEKTRLKQAAEPFLCESHRMTIATLTTERRRIEADLEARLTADPRQLRQRAILQSLPGFGASVSTTLMTDMPELGTLDRRAAASLAGLAPHPSQSGTGPARNEIAGGRPCVRTALYMASLSAIRCDLRFKAEYQAMRQAGKPAKVAIIAIARKLIVLANALLKIDVLYDPERAIPTHDP

SEQ ID NO: 159145 - protein, 419 aa, unidentified
MTDCDITASAPVLAAIDISKERHEVLIEAPDKKRRHRVSVLNNLDEFDRLISLLRSYQRPVRVAFEATGNYHRALAYQLGSAGFEIKLISSIALARTREALHNSWDKNDPKDAQVILHMMTIGAEQFYHDPLMRGTNDIQELSKTHDMISRSKTELWHRILTHYLPLYFPEADRFHRSSRSDWFFDFLELFPSPHFIAAMSKEAFIEAAWDVVGRKVGKERLLADIYATSARSIGLPVAPDSDAICMFRMVLAQGRSLIAHRNQIEARAVAMLKDNPDYQLLCTIPGIGPINALTILAEAGDLRRFQHHRQFLKFCGMDLSTIQSGMFRGQTKLSKYGNARLRRTLWMAAQVAILQRANSFRDKFERYITKDRHNPHLRRKASTAIAAKMARTVHAVVKSGEPYRPFFEGTIHSGRTLL

SEQ ID NO: 159146 - protein, 347 aa, unidentified
MRFYTKEHLYYCGIDLHSRSMYVCILDQKGDVLVHENMDAEPQSFLRTIAPYREDIVVCVECMFTWYWLADLCSQASIPFVLGHALYMKAIHGGKTKNDRIDSRKIAGLLRSGMVPQAYVYPAEMRATRDLLRRRNYLMRRRADLLAHIQNTNSQYNLPEFGKKISRKVNREGVVERFEARDVQRSIEIDLELIDHYNRLLTNLESYITRTARCHNPHALYLLKTIRGVGKIIALVILYEIHDINRFPSVQDFVSYARLVKCARESAGKRYQSSGKKIGNAHLKWAFSEAAVLFLHNNPDGMAYKKRLEKKHGKSKALTILAHKLGRATYYMLKRERAFDINKFLAA

SEQ ID NO: 159147 - protein, 384 aa, unidentified
MKVVCGLDVHKDSVFCCILCANGEKIQHKFGVLTEELVTLRDLMVSEGVEECAMESTSIYWIPIWRVLEGSVKLHLVNPYFIKQLPGKKSDVNDAEWIATCLSKELIASSFVPDDKIQRLRQYDRRIFDLNASISRNLVKLDQCIQRCNIRISNYISTTDSKGYRSIVKLISQGVTDAEVLVKELHGRTINRHGRETLVKALTGVVSETDIDIIKQLVEEIELQQRHKDEAQQKMTALCMEWFPQEVENLQTIPGVKERSATSIIAEIGTDMTHFQTPKKLVSWVGLRPRNEESAGKIKARGITHGNRFVRKTMIECSWGAARMKESFFAEFSYRQCIERRKNKMKVQVAIARKILVAVWYVLSQGTQYIKPTDHYTAAHMTAV

SEQ ID NO: 159148 - protein, 345 aa, unidentified
MNYAGWDLHQQFSQVVVGTKDGKKRKSIKFHHFPGMFEHSHLREFLQPPIEVAVEASSGWYWVVDQLEKMGAKVHLVHPLKTKLIAESRVKTDKIDANVLFDLLRTGFLPEAYIPSGEVREKREIHRHRAALVKIRTSAKNRIHSILAKLGVFFKISDIFGIKGRKNLEKVIPNLKPVYKEEITRFLVLIDWLDKEIEKIEKKIRSLAKDNPLIKLLMTIPGISYYSALLILSEIGDINRFAHPKKLISFSGLNPGVNKSGKHFYNLPITKQGNTWLRWILIQIAPLAARSDERLKQIFQRIAKRKGNNTAKVAVAREILKAVYWVLKKRAPYCPKSVTPQLAMV

SEQ ID NO: 159149 - protein, 324 aa, unidentified
MTTTTAPVYVGVDVAKATLQVHLHGSQIQFNNTPQGRTQLCKKVQALAGAHVVCEATGGYERPMVEALHKTKTPVSVINPAQVRAAALAKGQRAKNDPIDAQGLTDYGQRYQPQPTPPVCKIQRQLNALVQWLQQLTQAKAIAKTQAEHHQEPFVRQQHQALIAHYESQIEMVEAKIQKLMDQDQALQQRVQCLDAIEGVGLRTAVLVLAHMPELGQLNRQQATALAGLAPWTRDSGKMKGLRCIGGGRPEVRTALYMASLSAIKSNPILKAFFQRLTGKGKLGKVALTAVMRKMLIHMNHRLKSLATKPTSAAQVENEKTSKK

SEQ ID NO: 159150 - protein, 410 aa, unidentified
MVKENFIYVGIDLHKETHTAVMIDCYNQKLGEITFPNRPTAFPKLVTKVKKCNTDGKEVVYGLENAYGYGRALAVWLIDKGYLVKDVNTAISHRQAKHRGAMYRKSDSDDAKAIALATLNMLDKLPDACPNDAYWSLGQLVHRRDNIMKQRTRLVNQLHEQLCIAYPSYKQFFNDISRPTALYFWEHYPSRKYLKGKSVEDLRAELVPVSHNKCSTKTCEKILDAVASDKVKNNAYQDARDMVTLSIVSDLQHYDSQLTEVDKMLEQMYKMLGCTLTTIPGVNVITAVKILAEIGDIKRFSNANKLAQFAGIAPLHLSSSGKGKDLATKQGNRRLQATIYFLAIQMVQISSKGTPRNPVVRAYYEKRKAEGKTSQQALICISRRLISIIYGMLKSGTEYRMPVVENAGEK

SEQ ID NO: 159151 - protein, 370 aa, unidentified
MHYLYYVGLDVSKETFDASLVAFEDANEMAHRKFANSRKGICSCLHWVEKRHGIRLDDVIFCAEDMGSYISEMAVCASDRTLNFNFSLISPLVIKYSMGIARGKTDRVDARRIAEYAITHYRKIALYLPAEKELCQLRTWLILRAHLAKQRVAKLVLLEKLDYKEKFADVSIQRSMLQEEIAYAETHMKTIEREMKELIAADSNICRNYKLLTSIKGVGPITAIVMLCSTLNFTKITDHRKFACYCGLAPFEHSSGTSVRGGCHTSSMANRDIKVQLNRSALIAIRCDPQLKAYYERKVAEGKHKFSVLNAVRAKIAARCFAVVRRGTPICSVADIIRHTYLPFDKILRSFKISKSYCRNSPSNWGRTYS

SEQ ID NO: 159152 - protein, 361 aa, unidentified
MKRVQSNKLDFSGQNIYVGIDVHLKSWSVAILSEYSALKRFSQSPEPEALHKYLVSNYPGANYFSVYEAGFCGFWIHEKLTGLGITNIVVHPADVPTMSKEKLRKTDAVDCNKLARELRSGSLEGIYVPKADVLEIRSLIRTRNMIVKDSTRTKNRIKSLLRFHGVDIPEEFTRSSIGRWSKRFLAWLHSIELSTEYGKKTLELHIEQFVRLRNMLLQETRAIREISRKAPFEKPMRLLTSVPGIGVTTAATLMVELDDIVRFKNADHLASFIGLVPMCHSSGESNGTGDITVRRHFMLRCLLVEAAWIAIRRDPAMTVAYTEYRRRMNPQKSIIKIARRLVNRIYYVLKHEKEYIPCVVE

SEQ ID NO: 159153 - protein, 345 aa, unidentified
MPIVGGLDIHRRQITFDYLDTVTGEVRRGQIAPADRVHLRAWLARFAGRDDVAFAVEGCAGWRYVAEELAAAGIAAHLAEPADTAFARGRKRHAKTDKTDARHLRMLLAEGRLPECWIPPARILECRALLELYNDLRRERTAWAQRIHAVLFHQGAPVLAEGALRTGQGVAGLRAAAAAHLSPAGQLQVATALEVIDALEARLHAVRHQLLDAARHLAGAKALAARLYGAGPVTALAITCWLAGAGRFSSSRQAVRFAGLDITVSSSDRKGPPGRLSRQGPPVLRWAVYEAGKTHARTSAPDHRYYAAVKDRKNSKRACLSEARKILRQAHHILAELGDDALAAA

SEQ ID NO: 159154 - protein, 366 aa, unidentified
MSKQQNQRKRAKGKKIQFKNIEELAQINLNAAGIDIGASEHWVSIPAGRDEEHVRCFSCFTSDLYALADWLKECGITTVAMESTGVYWIPVFQILETKGFEVKLVNAHFIKTVPGRKSDVLDCQWIQQLHTYGLLSGSFRPDDQVCVLRSYIRQRDNLIRSSSTHIQRMQKALSEMNLHLHQVLSDITGVTGLKIIQAIIAGERDPSVLATYRDRRVKSTQADIEAALTGDYRPEHIFILSQELYLYQTYLAQIEKCDLAIQKCFESFEDKNQDQPPLKITRKSQNKRRNAPNFDLRSHLYRISGVDFTSIDGLDVLTVQTIISEVGLDPKRFKSAKNFVSWLGLCPGSRISGGKALSSQTRKVSC

SEQ ID NO: 159155 - protein, 319 aa, unidentified
METPQVSFKQVVSHGCGLDVHKKTVVATIDGEGLKKQTREYDTVTSSLKELRDWLLENGITHVVMESTGVFWKPVYNVLEPAGITVWIVNAAHVKNVPGHKTDKKDSAWLCKLLLAGLLKPSYIPAKEQRELRDLTRYRTRLIQSNASNKNRIIRILEDANIKLSSVLSSTNGVVGTKLIDKICEGQAITLQDIDEVYHKKLEASKEEIYEACQGFITGHHVYMLQIIRQEIANTQRTIESLNQRIKEVLSPYENALELLKQVPGISSKSVEDLVAEIGLDMGVFPTEKHLASWAGMSPGNNESAGKKKADGQPGETNK

SEQ ID NO: 159156 - protein, 367 aa, unidentified
MGKRCYLGCDVHEKSTTVCLAWEEAGTIKRRDLGVVASTEAALQEAAAGWAAAWGTRLGELWPPVPVLETGGRSMLVHDALVPLADEVWVVDAAEVARLRGHRPKNDKEDAFLLAKLAAQGLVQPLWRPSLEVLGLRAVVRVRRGMVQRQTALANQLRALAQLGGNPIERGKTLSRANLGRLKEATWKTRDFAAAVELLVKEAEDLADALGLANAHLQERFVESQYAQWLDTLPRCGVVNSLELATEIGDIRRFRSAEALRSFAGLTPGHGESGGRRIGGGLSKHGNRHLRYAFMTLANQMSFLSADEEELAALYWRRFNQRRGMKGAGLRAQALVASRLCDIVYAMLRQGRGYEPRLAELQAGRAA

SEQ ID NO: 159157 - protein, 412 aa, unidentified
MPDDQSLPNLSNLSWEVYVAFKIFRKNCCGLDVHKTWIYACMGITDTNGRTEYKQARFSSFTKGLQKLADWLAKYDCNDVCMESTGKFWIPVFNILEKTCWVTLAYPKYTKPQKGNKTDHKDAKWICDLYMCDMVNPSFIPPPDIRQLRDLMRYRSKLTNIMTSEKNRALNCLTVSNLKLDDVFSDVFGKSSRSVIRYILEHPGETFQVAPFIDRRCKHPVEEIQAVIDGTISHQQAVKLRECLQHLDELEVHKTNVEKEILCLVQQYPYQLELLQTVLGFSGNIMTAIALISEIGADMSVFPSAKHLVSWAGCCPRNDQSSKKVKSTRISRAGVYLKPLLVQVAIQPFTANADKLSAAGALEIRCQICDGRFLSMWAALFIFLGCPLPPCPKDLHVHNGRIVILASVAWIF

SEQ ID NO: 159158 - protein, 340 aa, unidentified
MTDHNLVSVDLAKTVFQVCRFAEGNKVLSNKKLSRSKLSQEIAQLTPGTIVMEACYSAHYWGRTFEQYGHTVKLVPAQHVKPFVRGNKNDANDAVAIAEASLRPNMRFVPVKTVEQQDIQSLHKIRERFVTHRTRISNQTRGLLSEYGLVASPGFKALGILIHEALESDTLTEVFKEEISSIYEELLDLEQRLKRVNTKLKALADHHLFCRLLMTIPGIGVINATAIYAAIGDGKQFATARDFAVWLGLTPRQYASGTKCYTGKITKRGNRYLRKQLVHGARALMNRAKGKKDKLNVWINEIKERRGVHKACVALAHKLARIIWAVLSRGEQFRLPMVAV

SEQ ID NO: 159159 - protein, 422 aa, unidentified
MSYCPVAGIDVSKRFSDMCILSPDNKIFAQEKIYHDETSINRANALLQKAERLFFSKPVIVMESTSHYHLILFQFFSEHGYDVIVVNPLQSNSMKDFSIRKRKTDRVDAFKLAMMYRTKTLRPSQIPQTATRALRQLCRHRAELLNDVSSYKNRLTALLDQTFPGYDKVFSDVGGVTSCAVLARFPTPTILLVEEESELVEVIAAASKSGYSFAKKKAGLLISAAQKAQTLGIHSCADETLIACTIQMLRTLSESVLQIETAIDNLLAQIKEMRNNVSLLQSIPGIGSHSAALLLGEIGDISLFKKPKQLAAYFGLDPTERQSGSFRGTKNKLSKRGSSYARAALHMGVVNSICKRGKDSAANPVLLSYYEKKCKNKPAKVAQAASMHKLVFIVFAVLRDQKPFELKTPEQHAVEQGFVKAA

SEQ ID NO: 159160 - protein, 342 aa, unidentified
MMIIGCDYHPGMQQIAWFDDESGECGELRLEHGTGEAEKFYRELKRRGVRVRVGIEASGHTRWFERLLAELEMELWIGNPAKIAAQRVRKQKTDRGDAQLLLQLLRENRFPRVWVPSPENRDVRQLLWHRHRLVQMRTRIKNQLHAIALNEGVQRRSRLWSKAGRAQLESFALDRWTARRRHDLLALFDRLTPQIAELSQAVEQEAERRPEVQRLMTHPGVGPITALAFVLVLGTPHRFRCGKQVGSYLGLIPCEDSSAGKQRMGHLSKQGNTLLRYLLVEAAQAAVRCDPQWRRRFVHLAMRRQRNVAIAAMARKLAVSLYWLWRNAEDPPAAPQSGSHVG

SEQ ID NO: 159161 - protein, 344 aa, unidentified
MEGYAGQQFVGIDLHRRRSVIVRTTDRGDPLETVRISNDVDSLEKVMARAGEAPEVVLEATYGWYWAADALADVGAVVHLAHPLGVKAFSYRRVKNDVRDATDLADLLRMGRLPEAWIAPPATRELRELVRHRAKLVALRSGCKCEVHAVLAKCGVQVLMSDLFAPTGIGLLERLDAPAPYLARVGSLRRLIDDLDVEIDLFARLIRGRLVADPGYRAVQTIPGIGPVLAAVFVAEIGDVHRFPGPAQLASWAGLTPKHHESDTHVHRGRITKQGSRLVRWAAIESVQALGPGTGAGRLKRRVGDRRGRNIGKTAAARQQVGYVYYALRDGHVRALTQRPRVAA

SEQ ID NO: 159162 - protein, 365 aa, unidentified
MQGREPMNSLLFLTLADKNNMPNIQPNKNNNEAKPLHHAGIDVGAEELVLVIRKNGKPLNPQKFNNTPADRARLVKKLAKLPGLIACMEATGIYHFDLAIALHDAGVLLMVVNPKAAHNFAKVLMRNSKTDAVDADTLAEYAERMDFVAWTRPSNEKIGIRSFSRRINALTGQKAAAKNQLHALAATQETPKAVLRDAKLSIDQLQKRIDRLTAEALALIARHPELKRVLQLLTGITGIAETSAIALMGELLLLPPGLSHREWVKFAGLDPRAFDSGKSVHKKTRLSKAGNRYIRAALYMPALSAFQHDPHVSAYFQHLVMDNGKEKMQALCAVMRKLLHAIHGMLKHDKPFDNTRFYAIPASGG

SEQ ID NO: 159163 - protein, 393 aa, unidentified
MHKNMHCAVILDCWMNKLGEVNFENRPSKFPAFVEDVRKICGTKEFVFGLEDTRGFGRNLAAYLVGRRFEVKHVNPAYTSAVRLSNPIIYKDDSYDGYCVARVLRDMVDTLQDAKHEDIFWTIRQIVKRRDLIVKSNVMNKNQLHSQLSYSYPSYRKFFALIDAKSAMCFWENYPSPEHVKATTPEKIYETIKPVHQALKIQRIHEIIAMIEKDGNTRKDYQPERDFIVRNIVKEIRHNKELIVEIDDELRKLLPLTGYKLQTMPGIDLVTEAQLVSEIGDINRFPDSDKLARFMGLAPVQFSSAGKGKDQRCRNGNRALNAIFHFLAIQMVAISASGKPRHPVFREYFEQKVKGKNKPQALVCVARRLVRIIYGMMKTKTEYRPFEKADREN

SEQ ID NO: 159164 - protein, 375 aa, unidentified
MLKIVYPICCGMDVHKSFVVACIATTNDHGVTNYKSKRFSTFTGDLRRCADWLSENNCKDVCMESTGKYWIPIYNILEHTCNIVLAHPKYVKAIRGKKTDKRDAKWIADIFKHDLVSGSFIPPADIRQLRDLVRYHWKLTNFNVGEKNRAQNCLTVSNIKLDDVFSDVFGKAASAITTRLLESNEPFDVKPYLTKNIKKPIEQIQAAVDGEMCAEQAEKLRIIRSHMDSLELCKLNLESLILSTAEKYIPQLNLVMTAPGIQSFAAIGIISEIGVDMSVFPTSKHLCSWAGLTPQNNESAGKKKTTRISRAGAYIKPLLVQCALCAIRTKQFPEVRNRYLALKKRRGHKKAIIAIARMLLTAIYNILKWNEVVQF

SEQ ID NO: 159165 - protein, 371 aa, unidentified
MRGWQTRPLPNDEQALRALFGQLAGQGVPVVVVDQPASIGALPVAVAQAMGLDTAYLPGLAMRRIADLHPGEAKTDARDAFVIADAARTLPHTLRSVDIAGPALADLAVLVGYDDDLRDQVTAGTNRIRNLLLGIHPALERALGTDLAHPAVLALLARYGGPSGLHRAGKARIDAVLAKKAPRMHAQLADRIWTALGEQSVVVAGTAAVETILPRQADALAGLLDQRKVIAAEVEKVLDDHPLAEVLTSMPGVGVRTAARILVEIGDASSFPSAGHLAAYAGLAPVTRRSGSSIKGEHPSRSGNKRLKNALFLSAFAAPHDPHSRAYYDRKRSQGKKHNAALICLARRRTDVIYAMLRDGTHYSSRTPKAA

SEQ ID NO: 159166 - protein, 435 aa, unidentified
MFSPAHPYDLVIGLDRSDKKADLCLIDTHTGEHTPQTIDTSPEALQDWLVQLRQHYPRARVALVLEEPALNLLAFLEPVDWITLYAINPITLQKYREAFVTSRAKDDTKDAYYRAELLLTHYAKLKVWVPEDPQTRLLQQLVSHRRAVVDERTGLTNRLQALLKQYYPQALTLCGDELWRPLATDFLLKWPTLQKVQKTKPETLKQFYYLHGSRSQKRVERRLALVARAVPLTREPALVETFALRIKLVCKELRMVVASIKDYDRQIAQTFAAHPDHRLFHSLPGAGPVLAPRLLASVGSRRERFPASHHLQHYSGIAPVTKQSGGKRHVHRRYLCSKFRRQSSHEYAKESILWCRWAAAFYWQQREKGCPHHTAVRALAYKWHRIIWRCWQDRTPYDDQRYEATLRKRNSPLVKRFDQIEVGKSPWKSAQKNLK

SEQ ID NO: 159167 - protein, 425 aa, unidentified
MDFIQNQKINQVTEKTLVVGIDIAKRTHFACFVDDRGRVLQKSFSVSQSRDGFEVFYKRILTAMKEYEKTEVIVGIEPTGHYWLNLAYFLEERGIPLVMTNPMHVKRSKELDDNLQSKHDRKDALVIARLLKDGRFSYPRILKEVEAELRVGSTFRGKLTEELGAVKNMMIRWLDRYFPEFTQVFPKFGKMALAVLECTPFPGDLYQKQPDEVLVMYRKVEGMKSPQKPKATRLIEVAANSIGVTEGREMARFEIATLVRRYHQLEQEIESITQRLVELVKTSVEYEWLSTVEGLGDTTIVDLLAEIGSFSHYENPRQLIKLAGLTLRENSSGLHKGQKRISKRGRRKLRALLFRVMMPMIRHNEAFKKLHEYYTNRQVNPLRKKQSIVVLCGKLLKVLHGICTKHKAFDAQRMMRDIPGLEEAA

SEQ ID NO: 159168 - protein, 470 aa, unidentified
MNVDEKDVLLMSLTGLVSLDSQEDVVVKGIGLSRGDKRRNGRLARLRVLVPAENAILGIDLADTKQAVVVTDHDSQVLARGPVTAKAWELGPVLDWARKVAHAHGFADVTVGCEPTGHRWRVLDQLAAQHDMALVCVQPLLTGQARQAEDYTSDKRDDKDAVLIARLVAQLHCYAPERAEETWAQLRQLGARRDELVTQAIRCVQQLRDLLECAWPAVLGAAGSPFDSTSWCAAVAVVLERCDGGPRRLARRGPEGFTAAVRRELPRWGGQRLWRGIVGAVFTTLTDPAGVIAQRRGALQRAGWVLDDWRLIKIRLAEVETQMAAILDELDLTKLVTSIPGVSAVGAAAILAETGDPTRFDSPRALVKHAGLCPRENTSGTYTGRSRISGRGRPRLRSAAWRAVWGALPSNPVMITRYRHLTTRKANPLKDGQARAAIAAALLRWIHVIVTKGVTWDAALAGASELATAA

SEQ ID NO: 159169 - protein, 458 aa, unidentified
MSNRKKSRSKGKADSFSGLAPLNLNAAGIDVGNAEHWVAVPADRDQKPVHKFESFTADLHRMADWLQACRIDTVVMESTGVYWIPLYQVLEARGMEVKLVNARHVKCLPGRKSDILDCQWLQKLHSFGLLNNSFRPADEVCVLRSYLRQRESMVSAASTCIQHMQKAMTEMNVQLANVISDISGLTGLSIIRSILGGERNPQTLAELRDRRIKASKQEIAKSLEGNWRDELLFVLRQSMDLYEVYQNKISDCDRKIEAHLQEFDSKVDPIRQPLAAPKRGKKAHSNAPGFDLRTELYRISGTDLTRIDGIDVSSAQTVISEIGLDMSRWPTEKNFSSWLGLSPDHRITGGKIVKRGTQPVVNRAADALRLSALSLQNSQSSLGANYRRLRARLGAPKAITAMAHKLARLVYRMLRYGQQYVDKGMQHYEERFRRQRMRWLEKQAKDLNLQLVPVRLTS

SEQ ID NO: 159170 - protein, 343 aa, unidentified
MQIRSVGIDLGKTTFHLVALGDNGRVLLKKKFTQKHLIAFTANMQTSLIGMEACSGSHFLGRALRAQGHDVKLIPAQFVKPFVKSNKNDFIDAEAIAEAVDRQNMRFVPIKTDDQLDLQALHRVRDRLMERRTALINQIRAFLLERGMVFAKSPIRLREALPEVLENANENLTPGMRNLVAMLWNEWKDLELQIVEMNDEVQRIASSDVACMRLQQIPGIGPLVATAIVASIGNGAAFRKGREFAAWMGLVPKQYSTGGKAKLYGISKRGNNYLRKILVHGARAVVLRSKRERIAIGAWMTSLETRAPRNVLIVATANKLARIAWAVLSTGQNYRAVPEGLAV

SEQ ID NO: 159171 - protein, 426 aa, unidentified
MKENIDYLSTLFVGIDIASRIHVISALDFNQDFFIKMKPFENTKEGAGIVEKMIADVLADNHQFKYVVIGMESTGFYGVHLANYLSTSELLAPFSVRVYCLNPKEVKNYKKSFNDIGKNDGIDSFVIADFARVGRIAIKPWRGSQYLALQRLTRHRMHITECITREKTYMLNNIYLKFSEYALLRNGEHPFSNKYGATAEAILTEFTTNEDIVNSSIEELVEFINSKSKGRIADPEETAKIVQAAARNSYRLDKCLYEPLTISIASSFNCISSFEKELKAIDKAILQTVQGLNPEEYTVLNSIPGIGKVYSAGILAEIGSIKAFQNANQLAKYCGIVWNDNDSGDFESEDSRMSKAGNRYLRYYIIEATGSVISHCPEYKAFYQKKYAETRNHQHKRALALTSRKFIRLLFGLLDKGQLYSPEKGR

SEQ ID NO: 159172 - protein, 450 aa, unidentified
MAPRDRELSPKSRQALSLTHPNAAGIDIGSASHFVAVPPDRDMEPVREFKSFTADLHALADWLSACGVDTVAMESTGVYWIPLYELLDRRGFKVLLVNARHVKNVSGRKSDVLDCQWLQQLMSYGLLHGAFRPADAVCALRSLSRQREMLLKGQARHVQHMQKALTQMNIQLANVISDVAGETGQKILRAIVAGERDGHVLAAMKNVRIRASADEIAKSLEGNWRAEHLFALKQALALFDFHATQLAECDQEIEAQMASLAVHEDAPQKGKKRGRARNAPKFDLRQRLFQMCGVDLTRIDGIDVTTALAVVSEVGTDMSRFPSAKAFASWLGLCPGTKITGGKVMSGKTKRCANRAAQALRLAAAALRTSQSALGAYFRRMCSRMDKPKAVTAAAHKLARLIYSMLTKGEEYTDQGQDYFEERYRQRVMRQLAIRAEKFGMKLVAYEQPA

SEQ ID NO: 159173 - protein, 421 aa, unidentified
MNQLLGEPYTAYIGIDWASSKHDICLQLADGEERVFERIKHTPEAIEEWAQALYQRLGGPIAVALELSEGPIVSALQKYDFLVLFPIDPKRLAKYREAFVPSGAKDDPTDAEFAMDYLMRHPEKLKPLKPESAPMRKLRYLVEARDRIRGDQSRCVNRLIQALKQYYPQAVDWFNDHNTLVFCDFLKQWPTLATVQRARKARLERFFKEHNVRFARLIEERIQAIKAATPLTHDDAVIEAHRLQVEILVEQLRLTIQAMKCFDEEIKTIATQFPDYGHLFTPLPGAGKVIAPRLLAAFGEDRDRYNCAAQLQKRSGIAPITKRSGNSTWVHWRFQCPKFLRQTFIDFAAQSINKSAWAGAYYRQQRDKGASHNIAVRALAYKWIRVLYRCWQERTPYDESKYLETLRRRGSPLLKQLAEAA

SEQ ID NO: 159174 - protein, 397 aa, unidentified
MSAERANDVALELSQRTWLIDYLLPGADTVQTTAVAGGNAEALLSALGRIESLARARSHAGCALGSMRVCFEAGYDGFWLARFLIDRDIDTTILDPSSFLVSRRGRRVKTDRVDVEAMVFTLRAYLLGDRSVCRPVWLPSVAEEDAKRLSRERTQLKKERTRHVNRIRALLVLHGIRSVPGLWGGRWKEALSNIRTGDGRELGRFIFRELYRQFERLDLVHSQLKSLEKERIQACETEGVINGNAKIRVLKQLDGIGEVGATQLVVEVFHSTFKNRKHLASYLGLSPSPYSSGDVHRDQGISIAGNKQARVMLVELAWCWLKYQPQSQLTRWYRSRFSGHGSRSGKIGIVALARKLAIALWRFIEDGEVPEGATLAVAAKLNLTADGQLNQKRGYCA

SEQ ID NO: 159175 - protein, 312 aa, unidentified
MHTTTPDPIEYVAIDVSKATLQVQNENCSLVVGNDPPGHRKLLKHLKCSKNPLVVFEASGGYERGLSAFLAKSSIAMAMVNPARVRDYARSEGVRAKTDPIDGRMILAFAKSKAVKAMTPPSEASVKLSALLDRRGHLVEQLAREKNRLQNSEAFIHGSIRKMIRILEKEILSLEKLIEGFVLADKELQPRSQIIQSVQGVGKVTAWTLLAFLTEMEHLNRNRLVALAGIAPFNRDSGKFSGKRSIIGGRAKVRKCLYMSAHTAASCNPVIAPYVQGLRDRGKPYKCAIVAAMRKLLIHIQSLLKNAHLQPA

SEQ ID NO: 159176 - protein, 344 aa, unidentified
MDHFAGLDVSVKETSICIVDDTGRIVREVKVASEPEALLKVLGNPAYHFKRIGLEAGPLSQWLFSALAEAGLPVICVETRHMQAVLKAQINKTDRNDARGIAQMMRAGLYRPVHVKTLRSQKLRMLLTHRKLLQSKAIAIENDLRGTLRNFGLKVGMVGKVRFEARIQELVENIPDMAVLVESLLIVRRALREQIVILHRRLLAIVRDDEVCRRLMTIPGVGPVVALTYRATVDVPARFRKSKAVGAVFGLTCARYQSGEIDWSGKISRCGDEMMRAMLYEAAQSMLRSKKWSWLKAWAMQIARRRGMKKAIVALARRLAVIMHRIWVDGTEFRWTREQAAAAA

SEQ ID NO: 159177 - protein, 351 aa, unidentified
MDKITTVGLDLAKQLIAMHAVDARGQVVLRKVLRRDALLRWSATLPPCEIAMEACGGAHHWARELTQQGHSVRIIAAEFVRPFRKSGKNDANDAEAKCTAMRQANMRFVSIKSVEQQAALCVHRLRQGLVEERTALINCMRGLLTEFGVVAPLSPDKLRRELRLCLDEEKTHVPLMVRQLVTDELAALDALEQRIADYAAQIAAQVRDNVSAQRLQGIAGVGALTAAAMVATVGQPQEFRNGRQFAAWLGLVPRQHSTGGKSRLGRITRRGDAYLRTLLILGAKSALQAALRKPPPLRHRLRRWMVDVFTRIGYHKTLVAIANKHARIIWALLVKGEDFDVQRLTLTAVAA

SEQ ID NO: 159178 - protein, 350 aa, unidentified
MEASDAALLGLDVSLKQTAVCVVDQAGKIRREGMVASEPKAIADFIATNAPQVIRIGFESGATSTWLWTELTKFGLPAICIDARHAKAALKMQINKSDRNDAVGIARIMQCGWYKEVRVKDLDSHAIRALLGSRALLVELKRDLENQIRGLLKNLGLVIGRCKLNTFTARATELIDGKPALAAAVEPLLKAREAIGQQIADLDRKVLRLARSTPQVRRFMTVPGVGPITALCYLATIDDPTRFKKSRSVGAYVGLTTRRYASGETDRTGRISKCGDGMLRSYLYEAANVLLTRVAKWSALKAWGMRIARRRSLSKARVAVARKLAVILHRMWIDGTEFSWSSEETAMQPA

SEQ ID NO: 159179 - protein, 356 aa, unidentified
MISSTKYSGMDVHKESVSIAVRNAAGKIVMECVIETKANTILQFFDGLRGDVQVTFEEGTWAAWLYDLLKPYVAKLVVCDPRRNALLQDGNQNDRVDARKLSDLLYMNKLNAVYHGDHGLRTLKELGRSYLTMTKDQSRVMSRIKAIYRSWAIPCSGKQVYCSQHRAEWLGKIAEPGVHRRAELYYQQLDALRTLRQEVRRDLLAESKKHKIWKRLCAIPSIGPIRAAELLAILQTPHRFRTKRQLWTYCGLAVVTSSSADHEVDNGQLRRRKKRKETRGLNENCNHDLKDLFKGAAVVASIKPGPFAEFYSALLAKGMRPEMARLTLARKIATIVLIVWKRGVCFDADHLKPQTA

SEQ ID NO: 159180 - protein, 375 aa, unidentified
MQNTTKYVGLDVSKELIAVAVADEGGDPRFLGNIRNTPEAVRKTLTKIGESACLEVCYEAGPTGYGLYRQLKQLGISCLVAAPSLIPRRPGDRVKTDRRDALRLAQLLRAKELTAVWVPTEDDEALRDLVRARQDAKEDLLAARHRLSKFLLRNNIMPPMGVRSWSTKHRQWLGSLKWDRRAQQITFQEYWHAIDEIEERIKRLESEIHAQATDSGHAPVIQALQTLRGVAEVTAVSLVAEVGQFSRFRSPKQLMAYAGLVPREYSTGGSRWQGGITKTGNTHLRFAITESAWSYRYKPALKGEIRKRQEGKSPQAQSVAWKAQDRLHRKYSKMLSRGKNSGVAITAVARELLGFVWAIACEVEHRAKESEQTSA

SEQ ID NO: 159181 - protein, 340 aa, unidentified
MSEYMRIAVDTSKHVFTLHGIDREGHVALRRNVRRAAFVEFFAKLSATLVVLEACGASHHWGRALQAVGHEVMLIPPQYVKPFVKRGKNDRNDAEAICTAAGQPGMARVPVKPAETQAAAVLLSVREMLTRQRTQLVNALRGHAAEFGLVAAKGDAGVQEVLSKAAEPGSLPAPAAAALAMLGSEIGRVECALKQADKKLMAQHKSADSVGAMSRLLAAIPGVGWLTALTFSLRIDATQFTSGRHLAAWLGLVPREHSTGGKQRLGGISRAGDERLRSLLVLGATAVIRHAKEGKSSPWLLSLLARKPRKLAAVAMANKIARVVWAMMTSGERYRQTKAA

SEQ ID NO: 159182 - protein, 356 aa, unidentified
MSKRITTKGPLTIGLDLGDKHTEACVLDGSGEVVETFRVRTTEPALDRALSRFETSRVVLEVGTHSPWVSRRVTAVGHEVVVANPRRVRLIAENDSKSDQFDAELLARLGRLDPSLLSPIVHRGEEAQRDLVLIRARAGLVRARSQLINQVRGFAKSLGSRCPSSSAEAFPRRVRATLAEDLFPGLSTMLAMIEQLTTEVRSMDRAVECLCRERYPETAVLRQVKGVGPITALCFVLTLEDPHRFAKSRSVGAYLGLRSRQRDSGEQRPQLRITKAGDALLRRLLVTAAHYILGPFGPDTELRRFGLRLAERGGKAAKKRAVVAVARRLAVLLHRLWVTSEVYQPLGYDGSVAQAA

SEQ ID NO: 159183 - protein, 346 aa, unidentified
MKTKVSVLGIDIGKNICSLVGFDAAGTVVMRRRATRETLIGLAAKLPACVVAMEACCGAHHLGRVFAAHGHEVRLMSPEYVRPYVKAQKNDDRDAEGIAEAATRPTMRFVELKTQDQLDIQTLHRSRDRLVGERTALINQLRAILLERGIVVPKGKRHLADYLAVMLDEGGRHTLSDRMYRLVDDARTQWRELDKRIAAFDAEFTAFAKENEDARRLATIPGVGALIASALLAAIGKAETFEHGRDLAAWLGLVPRQATTGGKPKLLGISKRGNRYLRRQLIHGARAALPHVAKRDTSLGRWLTTLLARVHQNVAVVAFANKLARISWAVLRRGETFADKEAILAA

SEQ ID NO: 159184 - protein, 312 aa, unidentified
MKIICGVDVSKARLDACIEPGAIFASFDNDAAGVAELAAFCRQHQAGLAVMEATGGYERSAFLLLWEAGMPCAMTNPRSVRRYAEAMGVLEKTDRLDASVIARFAHAKNLQPTPAPTPAQQRLKALVARLRQVTDDLTVQKQRRASLLDNAEMLASINEVIALLKRQSRTLEGEIASMMDDDPLWEKLAEAWRSVKGVAGRTVARLMADLPEIGTYSNKAIAKLAGLAPIADDSGKRKGKRSIRGGRASVRSILFLVARTAAKYDKSLAAFRDRLLAAGKHKMTVRIALAHKLLVRLNAKARDARAQYANAT

SEQ ID NO: 159185 - protein, 371 aa, unidentified
MFIVGCDFHPSWQQIAVCDSETGEVNEYKLSNGEGEAERFYRQLPAPARVGLEACGNSQWFVQLLQQLGHEVWIGDAAQIRARYVRKQKRDKRDALHILKLLLENRFPRLWTPSAEIRNQRQLLVHRHKRVRLRAQVKNELQHLAMNQGVQKKARLWSQAGQKLLRELPLAGWAASRRANLLELMKLMDRQMADLDRALQQAAEENRQARLLMTQPGVGPVTALAFVLTIGDVSRFPRGKQVASYLGLIPRAHSSGGRQRLGAISQQGNRFLRQTLVEAAHSVVRLDEGFRKPYQHRCHRKPKGVAKVAAARKLAVRLYWMLRTKIGYPEIVHIESSPRVPLIDHGQTETLNERSRIQTGAKDGPAGLGKR

SEQ ID NO: 159186 - protein, 426 aa, unidentified
MKNTQNEKISQIKFSTLVVGIDIAKETHYARAFDFRGIELGKLLKFSNTAEGYERLEQWMQNICQQHGKTDIIVGFEPTGHYWFTLGDYLKSQGHRLAIVSPFHVKRTKELDDNSPSKSDSKDPKTIAMLVKDGRYREVYIPEDVYQELREAVSERDRLVQRMISISNQVTRWLDIHFPEFHTVFKDWRRQAALLTLRHFPTPEKIVAAGRIKIEETWKASMKRTAGLKRAQELVKAAGTSIGRKTGLLAAEASLQNLINEYDLYSQQYQQLEQLMMDLLMQVPNAEKLLDIKGVGLITAATFVGEVGDIRRFQDPRQIQKLAGFNLVENSSGKHKGKTRISRRGRKRLRHGLFMAMITILATNPEFRMMHKKNISRENNPLNKMQSIVALCGKLIRVFYALLKTGTDYNAEKMLGDIELGMKAAA

SEQ ID NO: 159187 - protein, 377 aa, unidentified
MNYSTSYSTVYIGIDAHKESFSLCSYTNEKEQAEYPQRVDAHYSKVINYIEAMRFHYGEDALFVCGYEAGCLGYTLYHELEAHNVKCVILAPSTMPVPKGKKRIKTDKRDAALIARCLAHHDYSAVHVPTEKDEQTKEYIRMRDDHKLQLKKVKQQILSFCLRHGCIYDGTKNHWTQTHINWLRKLNLDGMHQEILDEYLLTYDYLTSRLSLIGKRIEELANDKDYAENVHKAECFIGVKSQTALAVIAETGDFNRFPDAQHYASFLGLVPGEDSSGDDKNRLGITKAGNRHIRTLLIEAAQSYGRGKVGYKSAALKARQAGNSSAVIAYADKANERMRRKYYHMVLKQGKKTNVAKTAIARELACFLWGMMTGHIV

SEQ ID NO: 159188 - protein, 346 aa, unidentified
MMIIGCDCHPSWQQVSWLDTETGETGERKLVQASGDAERFYRQLPAPALIGMEATGNCHWLVDLLAELGHELWVGDAAQIRASCVRQQKTDRRDAEHIRILLQEGRFPRIWMPSSEVRDLRQLLLHRYKLVTIRARVKNELQHLCLNQGVQRQHKLWTKTGQQVLRELPLKPWAARRREDLLGLLIMLDQQIDPLDRAVKEEAQRDKMALLLQTQPGVGAVTALAYVLTMGDVSRFQRGKQVASYLGLIPREHSSGGHQKLGAITKQGNRMLRMLLVEAAQTAVRLDPGLRKEYQHRCHQKPKAVAKVATARKLAVRLYWMLRTQKPYPEVVRIESSPRVPLVGAS

SEQ ID NO: 159189 - protein, 340 aa, unidentified
MAIVGGLDVHRRQITFDYLDTETGQVRRGRIAPADRQLLRRWLMSVTGRPAAFAVEACTGWRFVVEELCRAGIQAHLAEPAETAAARGPKRRAKTDRADARQLRELLATGRLPESWIAPEQVLEIRGLLQLFKDLRDEHTGWVQRIHAVLFHHGVAAAVGDLLGGDSRQRLQAGTGLSPAGHQAVLAALRVVDMLEAELGPLRKQIATFARRQPACKALQAQYGVGPVTAAVIWAELGDCRRFSASRKAVRHTGLDVTVYSSDDKRAPGRLSRQGSPLLRWALYEAAKCAARSSSPDYAYYSRIKERIGGNRAALSVARKIVRRSHHILRSLGDQALTAV

SEQ ID NO: 159190 - protein, 364 aa, unidentified
MRLYAGIDLHATNHYLGIIDEQNKVYFKYKIPNDLRKTLSYLEPFRKEIEGVVVESTFNWYWLVDGLMDQGYRVHLANPAAIRQYEGLKHSDDEREALWLANLLRLGILPEGYIYPKEERPLRDLLRKRLQLVRHRTSHILSIQNIMSRSLGLKMRAQEVKKLDDDGLRGLFKEEHLYLAAHTSVGVMKYLGEKIKRIEGVVKNRVKLQKEFEGLLSLPGVGEILGLTIMLEVGDIGRFPEVGNYASYCRCVRSTRLSNGKSKGEGNRKNGNKYLAWAYVEAANYALRFYPEVSRYYHRKAAETNSIVAIKAISHKLARASYYIMRDQVVYDSRKLFAEGGGRETGCGVGSKPQSLIGQLLPPS

SEQ ID NO: 159191 - protein, 352 aa, unidentified
MGERTTVFVGCDVGDKFTDICVLDGDGAVLETTRVRTTRSSLEGHLKGYERARVVLEVGTHSRWIAAALGEKGHEVIVANPRQVQLIWKRPRKTDRTDALLLARLGRMDVELLAPVHHRSREAHVDLACLRARDQLVGSRTKLVNHVRGALKPFGLRVADCSTDTFADRAQEVVPPELVPALGPMLDVIRLLTTQIGAHDKQVEQLAKTVYPEAKRCSQVFGVGTLTALAFQLTLDDPSRFKKSRFVAAFLGLTPGQDQSGDSDPQQHITKAGDRFTRKLLVECANRILSPRASHDSDLRTWGLKLAERGGKNGRKRAVVAVARKLAVLLHRLWLTGREYQPTGYNPRSLAA

SEQ ID NO: 159192 - protein, 375 aa, unidentified
MKDVQKFVGLDVSKDTIAVAIADSGRGEPRFHSTIQNKPETIRKLMKKLGDPENLLVCYEAGSTGYGIYRLLLSMDIECMVVAPTLIPKRSGDRVKTDKRDSIRLAQLLRAGELTSVWVPDEDHEALRDLIRARHDAREDLQSSRQRLVHFLLRHEIRPPQGVRNWSVKHREWLKRLTFERASQRIVFQEYLHAIHEVEDRMKRIEAQIHEEALQSEHAPVIQALQTLRGVAEVTAVTLVAEIGQFSRFSSPRQLMSYAGLVPKEYSSGANRWQGSITKTGNSQIRRSIVEICWSYRHRPSLKGELLKRQEGQDPEAQRIAWKAQHRLHMKYHRITAKGKGGKLAVVAVARELLGFIWAIGCAIESKQVSESTVA

SEQ ID NO: 159193 - protein, 338 aa, unidentified
MQLYAGIDLHSNNSVVFVLDEQDRTVFAKRLPNDLQTIVAALHSCAGRLREVAVESTYNWYWLVDGLQDAGFTVQLVNTAAVKQYDGLKHSGDFQDARHLAHLLRLGILPTGYIYPREQRAVRDLLRKRSQLVRQRTTQILSMQNLVARNLGTQASGNLIKRWQAEDIEAMALLEEQKLALKANLAVMTCLDDQIDQLERSILAKAKLREDYQALKTVSGIGVVLALTIALETGDIGRFEGAGNFASYARTVSSRRESNGKKKGEGNAKCGNKHLAWAFIEAAHFAVRYDEAIKRWYHKKCASTLAVVAIKAVAHKLARACYHVMKDGKPFEVSKAFG

SEQ ID NO: 159194 - protein, 343 aa, unidentified
MERIIRIGMDTSKHVFQLHGVNAAEEPVLRKTLRRNELIKFFEKLPPTMIGIEACGGSHYWGRLLQSFGHDVKLLPPQYVKPYVKRGKNDASDAEALCEAMSRPTMRFVPVKTADQQAALMLVGLRERLIRYRTQLANAIRGYVAEFGLSAARGVSKIEPLLDRIATDQTLPALARDLLVLQGEEYARLQAQLKDVEARLLAWHRADRRSRCLAQIPGVGPIGASMLVMKTPDPDRFRSARHFAAWLGLTPRDHSTAGKVRLGGITRAGDEALRSVLVLGATAVLRHVRNGRGFASPWLIQMLKRKPPKVVAVALANKIARIAWKLMVTGEVYRRESVLLAMR

SEQ ID NO: 159195 - protein, 324 aa, unidentified
MTSLPKLGIDVAKKTFRVALHHNGKVRHKQFPNMPAGFTELAQWLEKQGVPHVHACLEATGSYSDALSRFLYEAGHTVSLVNPARIKAFAQSRLIRTKNDKLDADLIARYCEEAKPEAWTPPQPAVVELQALVRHLESLIETRQQLRNRLTDGPQIEPVLASLRKLIEQIDAEIGEVEQQIEQHINQNPNLKQQADLIDSIIGLGPKTAAKLLGEIPQLTTYKRVEQLVAYAGLNPKERQSGTSIKGQSRISKTGNSRVRKALYMPAVVAMKHNPIIRNFAEKLEARGLCKLAIVTAVMRKLLHIVFGVLKTGKIFDPDYGVTA

SEQ ID NO: 159196 - protein, 430 aa, unidentified
MEASITTPGAVAAYIGIDWADQKHAIALRSAAEPNKIEHQLIDQKPEALMDWIGQLEQRFCNQGKVLVCLEQSRGALIFHLMGYEFFELYPVNPLQLARYRETFSPGGAKDDRPDAELLNELLYCHRDRLRALKPDSELGRKLSFFNQGRREAVDQRTRLSHAIKSQLKVYFPLALELLDQDTSRALAADLLLRWPTLEAIQKQNTHALRKFFYGHNCRGEQRMLQRLELIQKAKALTKDSAVIEPAALRVQMLARQLKNLLPDILRYDNKIAELFAAHPDRFLFENLPGAGEALAPRLVSAFGSDPGRWESALELTTLSGIAPVRRASGLKSGKKGERKASVHFRQACPKFLRQSFHEFAGCSIRYCSWAKTHYDAQRARGKGHHAAVRSVAFKWIRILFACWKQRTPYDPQHYLKALQHRGSPLANAC

SEQ ID NO: 159197 - protein, 358 aa, unidentified
MNEDRRTTTQEAVVGGVDTHKDAHVAAVLGSTGALLGTSEFPATLAGHADLLRWMVSFGDVSCVGVEGTGNYGAGLTRFLLAEGARVVEIVRPDRRARRFNGKSDTLDAENAARAVLAGDRTSAPKHRDGAVESLRALRVARTSATKARRAALQLLRNTIVSAPDGLRESVSGLTRTVLVRTCAAWRPNREVAHEPTTATRIALRSLARRILHLEEEIADLDGLVASLVARINPRLMEASCVGTEIAAQLLVTAGENPERMRSEAAFAMLCGVAPLPASSGKTRRYRLNRGGDRAANCALHMAAISRLRVDPRTRDYAARRAAEGLSKKEILRCLKRYLARELYKLLLPLPPDAPRMA

SEQ ID NO: 159198 - protein, 357 aa, unidentified
MLAELIDAVVGVDTQRDTHQVEIAYPTGAPIATTAISNDSTGYAELLAWIFDHTPGPRLAVSIEGTRSYGVGLARAVAAAGLLVIECEQPNRKARRGRGKSDPIDAHLAVLTALRCDTERLPTPRADGDREALRILLAARHDLTNANTAQTNRLRALLLGGDDTDRQTARGALTDTVLATLIRRRSPRDGNRAQAVRQGEVRRLAIAVRDNGRELQANRAQLQATVDDLAPGLTDRRGIGPVSAAQAIVSFSHPGRCRSDAAFAALAGTSPLEASSGQTVRHRLNRGGDRNLNHAVHTIALTRMRCCERTRTYVARRTAEGKTTREIRRCLKRYITRELFRTLTATMTATDEPCATS

SEQ ID NO: 159199 - protein, 349 aa, unidentified
MADQRLTYSGRIVYVGIDVHKDTYAVTCVCDKKIVKTATVQADPVGLAASLQRWFPDAMLSTVYEAGFSAFVLHRALIKAGIPNIVVNPASVAVAANDKVKTDRRDAKKLAIDLADGRLRGIYVPTAAEELARLLPRTRAQIVEHRATIARQIKAKLHQFGLIAPSSRRLIRHRYWREIAAWPLPSELGVSLSWLAEQWRFATRQLIEMRRLLRAQAQAQAPIEKVYRSVPGIGEVVARTLATELGDMTRFANERALFSSTGLTPSEPSSGASVRRGHISRQGSSRIRQWLVETAWRALPRDPVLKESFDRIAATRGKKRAIVAIARRLTGRIRACFRQGTTYAVGTYA

SEQ ID NO: 159200 - protein, 400 aa, unidentified
MRVVFGIDVSKASSEVAILVNGEKVHGYTISNDAIGFARLLGDLRTVHKPEIIFEATGVYSRRLQTFLDDNGYAYTRLNPLETKKQLDSLRVRKTDQIDAEKLAQSQFVLNRKPTYVQEEVYQNLRDLSRFYQNLTEDIVRAKNRLHKVLQVTFPELENILSTPSGEQYWNLVIAFPCKDFVLDLSKNELSKSIRQSTSKRISDKRVAYLAEKLTALANQSYCAVKKTSPILEEVHYYAKELLRLSEQRQAVLDQMVELAQPLPEYDILLSIPGIAETTATSIIGELGDIRRFQSANQINAFIGIDLRHYESGNFLAKEHITKRGNPYARKILFKCIHNIASASHTNPCHIADFYEKRKRQSQTTSTKPHTIASIHRLIRTMYYLIMHNKLYDYASTQNR

SEQ ID NO: 159201 - protein, 406 aa, unidentified
MEIVYRCCCGVDVHKTFVMACLRRAGQAPEIQRFGTMTADLEALAAWLAAARCEAVAMESTGVYWKPVYHVLEGTCALLLVNAQHLRMVPGRKTDVQDAEWIADLLAHGLLRGSVIPPAWQRELRDLTRFRATLVQERARLINRLQKILEDANLKLGDVATDVAGVSGRAILHAIAAGESDPARLADLAKGRLRAQRARLVAALTGRISAHHRFLLQEHLAHLEALDARVDRVSAAIAERTSPFDDLVALVDTIPGLNRRGTENLLAEIGTDMQRYVSAAHLASWAGMCPGQDESAGKRRSGRTRAGNRWLRHTLVEAAHGASFKRDSYLRAYVQRLRRRRGHKRALVALGHTLLVIVYHVLRTRTPYRDLGANYFDDHDRQHVQRALVRRLERLGYAVTLQPAAA

SEQ ID NO: 159202 - protein, 362 aa, unidentified
MNTINLGVDLAKTVFSVCEMDGSGYVVRRQDLKRDAFAVWLAQVPAGTVVAMEACSGAHHWARRCLEYGLEPRIIAAQFVKPFRKGPKTKNDRADAEAIATAARQGNMRFVPVKSIDQQVRLSWHRVREGYKVESLAIGNRLRGLLAEFGVIVTNSDVALRRLLGDLDAQLGLPPELKELLRDLADHWRQLRVHLDACDARIEAHAREDEQCVRLRAVTGIGALTADAAVATVGNAREFKQGRQMAAWLGLVPTQHSSGGHVRLGEISCRGDAYLRTLLIQGARSSLQRAKAVATEKATPEQLWIRALDGRMPFGKVIVAIANKHARQIWAMLAHDVDYDPHACLKHPMHQQTPTEQAAHTA

SEQ ID NO: 159203 - protein, 310 aa, unidentified
MDACFVGVDVSKDRLDVHVLPSGEFFHVTRDGAGIETLSARLSLLSISHIGVEATGGFETIVAAGLVGAGLPVVVINPAQIRHFAKALGERAKTDPVDARVIAQFVAATRPEIRMLADEATQRLSDLVARRRQIVEMRVSEGQRLKRARDQRLIKSIGRLVKALEIELAEIDKDIDDSVRGSPAWRDLEDLLTTVKGVGQVTARTLMAEFPELGRLTGGQAAALAGLAPFTRQSGQWKGKACIGGGRAVVRTILFTSAQIAKRHNPVLKAFYDRLIAAGKPKMVATIAVARKLIVILNGIAKSRKPWQFA

SEQ ID NO: 159204 - protein, 312 aa, unidentified
MIEQCFGGIDVSQDRLDVLLLPQGTGFSVANDEAGWSTLIGRLRGLPVAAIGLEPSGGYERGVLRALLAAGLSVRRINPNRLRQFARARGALAKNDRIDARLIAEYVATMPTHVVRHDPAAARIAEIVTMRRQLCDEHVAIENQAAQLEDAMLRRLAKRRLARIETDIRLLEKRLTETIAAEADLARRYARLTSMPGVGPVLAFTLIALLPELGRMSRKQIAALVGLAPYDFDSGKLRGHRSIYGGRMPVRNVLYMAALSACRYNPALRTFHKRLAAAGKKPKVILVAVMRKMITTLNAMLRDGASWQPQAA

SEQ ID NO: 159205 - protein, 345 aa, unidentified
MKLYGGIDLHSNNSVIAIINEQGETLSCKRLNNDISVILSFLAPYKDKLTGLVVESTFNWYWLVDALMDAEFKLHLANPAAIQQYSGLKHADDHSDARWLAEMLRLNILPEGYIYPRELRAVRDLMRKRMDIVQQSTKNLLSVQSCYMRHLGYKLSSNKIKQMAAIRKGVNTEQVHADFSSMNTALSVISNLSLIRCVQQQINAIEGAILKQTSLSPEFINLSSIDGIGNTLALTIMLETGTIKRFDSPGNFSSYCRCVKGARYSNGKKKGATNQKNGNRYLAWAFTEAANFAIRYNPTVKKYYQRKLAKTNKVVAIKTVAHKFARACYHVLKDNVPFDEHKAFA

SEQ ID NO: 159206 - protein, 381 aa, unidentified
MTTTATHNAHDTTPGRALFVAFELSEKTWKLGFTTGHGQKPRERSIAARNQTRVLQEVAQAKRRFGLPETAPVFSCYEAGREGFWLHRFLEAQGIPNHVVDSSSIEVNRRKRRAKSDALDVRKLLSMLMRYAHGERDVWRVVRVPSVEAEDQRHLHRDLETLKQERASTTTRIKGLLSSQGGRLTSVNKLPEQLEALRLWDGSPLPSGLRRRVLRVYAHHQFLSEQIAALEAERRARLQSAHDASIEKVHQLMQLRGIGINGAWLLVMEFFGWRELKTRREVGGLAGLTPTPYQSGESAREQGITKSGNRHVRWMTTELAWSWLRYQPESALSCWFRERFGGGGKRMRRIGIVAVARKLLIALWRFLETGVIPQGAELKAA

SEQ ID NO: 159207 - protein, 365 aa, unidentified
MTDVSKTERRRTTAGLDLGDKHSHLCLIDTESGEVIEESRLRTTPEAFERRFGSEEPLKIAVEVGTHSPWVSRLLKHLGHEVLVANARKVRLIYAEGRKTDRIDAEKLARLLRLDPSLLYPIEHRDEDCQAHLALIHSREALVRARTQLVNHVRGTVKSFGHRLPKCSAGSFHYKVADALPAELMEALGPVMEIIASLTEKIKDHNRKIETLAEERYPETRLLKQVPGVGVLTALTFVLTLEEPDRFAKSRRVGPYLGLVPSNAQSGQYNPQRRISGKGDELLRRLLVGSAHYILGPFAPDTDLRRHGEKIAGRGGKGAKKRAVVAVARKLSVVLHRLWATGEIYDPLRNSDDRSSEAQAAEEVA

SEQ ID NO: 159208 - protein, 445 aa, unidentified
MIINPKKKPVTQGFQLDDTFDGHKALYNIVARFVSNHPDSRLFAGMESTGGYENNWYNSLVAFQGSLNILTARLNPLGVKHNSQAGLKKNTTDKISAQNVAEYLVAHPEKVNYQQQDQLAGLRKQWGFIQMLTKQRTQFINQFKGLLYSSNPELLRYCQTETPAWILKVAVTYPSAARLKRAKAKTITKIPYVTLKKAQQIVSDAQRSVASATDTTTEQLIVATAQQVIHSNKTIDAQTRRMIEACAMPEVELLKTFAGISNKSAIGLMIEIQTVERFANAKKLASFFGVHPVYKKSGDGVGGIKMSKQGRKAPRHILYMSTLAAIKCNPLIKQTYEKHQKNGKHNMSAMGVCMHKILRIIYGMLKHQKAFEPQIDIANQHRSVNGRNAAPRKNETRRFQAYDNKAPVSRRQTIKRLERDRSHSVLDTKSGITEPIPVGDSIAKM

SEQ ID NO: 159209 - protein, 347 aa, unidentified
MFTLAGMAVQLRRNTQKHLFQLHGVDQQGKTVLKRQLKRDQMLSFFSNLPPSLIGMEACGSAHYWANKLQGMGHTVKLMAPQFVKPYVKTNKNDAADAEAICEAVTRPNMRFVPIKNGEQLAVLSLHRARQGFVKARTAQANQIRGMLAEHGIIVPKGIAYINPRLPEILEDAENDLPGTFRQLIERLGEHLKELTKQVNELEEQIWSWHKENSASQKLAKMPGIGPLTASALVASIGDAKQFENSRQLAAWLGLVPKQHSSGGKPTLLGISKRGDIYLRTLLIHGARAVLRVAERKTEYAGSWLAGVMERRNHNVTVVALANKNARIIWALLAHEREYDADHAVAA

SEQ ID NO: 159210 - protein, 414 aa, unidentified
MRIVYQNVAGLDVHKKVVVAAIIVQQADGSWRQEKRNFGTMTADLLALLDWLLAQGVTHVAMESTGEYWKPVFNILEDNLEVLVVNAQHISKVPGRKTDQSDAEWIAELLQYGLLKASFIPPKGQRELRELTRYRTSFIRERANLINRVQKVLESANIKLASVATDVLGGSGRAMLEALVSGQASPEEMAELAKGRMRDKREQLAKALEGRVQAHHRFVLTELLTQIDSLDETIARFNQEIEDYCRPFEEAVVLLDTIPGIARESAEIIVSEIGTDMSRFPTAQHLASWAGVAPGNHESAGKRRSGKPAKGNQPLNAALTQAAQAASHTRDTYLAAQYHRLASRRGKKKAIRAVAHSILVIAYHLIQRKEPYRDLGGDYFDKRRPETTKKRLVKRLEKLGFQVSLSPLPVPAAA

SEQ ID NO: 159211 - protein, 350 aa, unidentified
MKIRNTVGMDMGDKVHSICILDASGTVRECAEVSNTRAGIYKFFAKMEPSLIALETGTHSSWVSRILEELGHEVLVGHARKLRMIWNNPQKNDMRDAEMLARIARFDRKLLHPIQPRSMKAQCDLAAIKARNQLVKVRSSLIAHVRGLVKSVGARLPTCSPECFAKRAAEAVPEELALALEPVIVSIAELTVRIRHCDQLVQKLADEEYPATKRLQEIPGVGPITSLAFVLTLEDPKRFARSRDVGPFLGMTPRRNQSGQVDQQLPITKAGNAYMRRLLVQCAQYILGHYGPDCDLRRFGLKLAERGGKNAKRRATVAVARKLAVLLHSLWKTGEEYEPNRCRRQHRKTA

SEQ ID NO: 159212 - protein, 371 aa, unidentified
MKKPTRWVGLDVHAATIAVAVAESDGSVRSLGTIPNTPDAVAKLMRKLGEKAAIRACYEAGPCGYVLYWQLTKLGAACDVIAPTLIPMKAGDRVKTDRRDAERLARLHRSGDLTAVWVPDAAHEALRDLVRAREAAKKDQLRARHRLGKFLLRRGLRRPEGSNAWGSRHRQWLQSVHLEHQADQDTFVDYRTEVEHAAARIERLDLAIDAAVEKAPGETREVIDALQSLRGIAKITAVTLVVEVGKLSRFERPKQLMGYSGMVSSEASSGEKTRRGAITKTGNSHLRRVLVEAAWMYRFTPNLYPALRKRQEKQPEAVKAIAWKAQHRLNGRFRKLAARGKPQPQVLTAVARELLGFIWAIGVHVEQRCAA

SEQ ID NO: 159213 - protein, 412 aa, unidentified
MKRIRDRVAGLDVHRDTVVACCRIVEPDGSVEVTKQSFATTRKGLTELAKFLSDHAVQTVVMEATGVYWKSPYYVLEALFPELWLCNAQHVKNVPGRKSDLADAEWLADVAAHGMVRPSFVPPPEIRELRELTRYRATQVDARAKEIQRLEKVLQDAGVKLTSVASAVWSMSSREMIEALIAGERDPAVLAQMAKGRMRAKIAQLEEALPGHFGAHHAIVCRQVIDHIDFLDQAIATLTLAITERLVPFEAAVAVVVSLPGISRRTAEVIVAETGADMSRFRTPGQLCAWAGVAPASYESAGKRRPAGTRHGSRWLRHALIEAARAAVHTKNSYYGAQYARIARRRGPNKAVVAVANSMLSTIWHLLSNGTFFEDPGGDYFERRHDPAVEAKRLARRIEALGFDVSLTQKAA

SEQ ID NO: 159214 - protein, 336 aa, unidentified
MVQIYGIDLGMSSFDVSFLSESGSVRHLSGVKNTVHGISKFLLSLPSSAVLCAEHTGVYGDLLLRLCTLNRICLCFVPGYQIKHSLGLQRGKSDPLDACRIREYAERFYDLLRPCFYPGEEMSEHQELYRTRSLLVESRKRLDTLSIGDNCKSSVSLAADHARRAVLAELNTQISGLDHEIEALIQNSSEFSRNYQILTSIVGVGPVTSCELIIKTENFRKLDTAKKCAAYAGIAPYPKESGKMKCGHKISPMGDKQLKTLLFLCARSAKEHNKEIRLYFLKKHKVEKKHFFVAMNNIANKLLRLIYSLIQKQQTYDRDYIQRDPRCVVISDTHKC

SEQ ID NO: 159215 - protein, 334 aa, unidentified
MSKQVLAGLEVSKDTLVVAYSVDGRKPIISRFQNNPEGHARLITRLTKNKRHTRICLESTGVYGLDVALALDASPAIEVMHANPRAVRDFARALMRRQKTDEVDALVLLEFARRMEFRPWHRPSDAALALRSTSRRIETLISTLVCEKNRLHALTQSESVPPVLVDTTKTLIAQIEQAIVELRTHARSIIRSDTGLQRRFEILVSIHGIGERSGITILGELAVLSPELDARQWVAFAGLAPRIAQSGSSVNKKRGVGKAGNRYLKKALFMPAMTAIRDVDEAAQTRERLVSRGLRPIQATVAVMRKLLHLIYALFRDDRLYQRHYRTFKTPKVA

SEQ ID NO: 159216 - protein, 421 aa, unidentified
MQYALPLVLPDVPVGGVCAGIDWATADHVVCVVDMAGRVTDRFSAAHDKAGISAMITRLRRGKVTEVAIERGDGPLVDALLAAGLTVVVITSRQVKNLRSRFGAAGAKDDRFDAFVLADTLRTDRARLRPLVPDTPATISLRMAVRARRDLVRHRVAVCNQLRAHLAVAFPAGSTLFHDLDSPISLAFLARFGSQDAAAGLDEQAIGAWLATIAVRGRPAPAGVLCARLQAAPPGATGADGAAQAGVTAALTATLTALSAQIKALETQIAGQLAAHPDGPIFTSLPRPGTVRAARLLAEIGDCRSRFPDPESLAGLAGVAPVTRRSGTRIAHGFRWSVNRQLRDALCDFAADSRHGSSWAAAIYDSARARGKDHPLAVRITARAWAYVIWRCWHDSAAYDPAKHNALQAILARRAAQQEDQ

SEQ ID NO: 159217 - protein, 330 aa, unidentified
MEVIGIDVSKEHLDVAMLDPACKVLLEQRVANDGKALGRLLRSMLRKKVLREDALVCLEATGHYGYRAIMTCMEMGLHVWVAHPVDIQLSLGMQRGKSDKVDAMRIANYALKHPEKALVIDGNYLRFEELKALLASREFFVRERAKCRGQLTDNLRFMPAGAAPIIERELKRQIRALDKSLAELDAAIDAFIKADGQLSAKRDLLLSVSGVGPAVANEIVAVTRGFTRLINPRKLACYAGLAPFEHSSGKSIRGRTRVSHRANKRLKSLLHLAAMASVRVHGSIRDFYRRKLAEGKKPISAINAVRGKIVHHLCAVLRSGNPYQPYLQEP

SEQ ID NO: 159218 - protein, 337 aa, unidentified
MKYCGIDLHGNNNWVVIIDEQDRVLYSRRHANDLPRLLAMLAAHRSELCGIVVESTFNWYWLVDGLQEAGYRVLLANTAAIKQYDGLKHRGDESDARQLAHLLRLGLLPEGHIMPKAARAVRDLARKRMQLVQQRTAQILSIESSLSRHSGWKLSSNRIKCLRQADLDELRLGEMPMLGLKANVAVMQTLQTQIDGLEKVLADYCRTEPGYRLLRTVTGIGEVLATVILLETGGIERFADAGNYASYCRCVGSAHLSNGKKKGQGNTKNGNRYLAWAFVEAANFAVRSCEAARRFYQRKKAARNNAVAIKAVAHKLARACYHMLKTQQPFCVERCFA

SEQ ID NO: 159219 - protein, 344 aa, unidentified
MAFHTALDVSLRSVSICIVDDDGAIEFEGKAASDVADIVACLKRFDPAIQSVGFEAGALTQYLTYGLQAAGYEVICLEARQVSAALSAMRNKTDKNDARGIAQILRTGWYSRVHVKSMESHLIRALLSSRKTVLKKCVDLENEIRGLIRLLGIRLPSPLKHGAFDASVRQPIEQNATLANSLIPLLDARLVLYQTYLKLDNQAKALVREDPVCQRLMTVPGVGAITALTFKAGVDDPARFKRSRTVAAHFGLTPRRFQSGEMDNPGRISKAGDPDVRSALYVAAHSLVVRSAEWSSLKVWGLRLAKTKGHRRAVTAVARKLAVILHKMWLDGSDFRYGSTEATS

SEQ ID NO: 159220 - protein, 458 aa, unidentified
MYRELQPFREALSHELKASLFPAAAGVDPNKLLETYLDRLTMYVGVDVADQTFTVLALDAGKEILGSLEGCSNDPHGFEHLIAWARDLRDQHGLRIIAIAGETTGIYYWALWDFLGEQPDVARVLYNPRTTEHMGEVLSKKVRNELVDALLLAEQLRLGSTPEVLLQEDADLLTARYYSRAARDLAQQINRKKNQLRALLRAYCPPLSQVFPGGKLHHPAVYALLHENLFPDEFVQAGAEALATTLVAHCKTAFGLAEAQRLVEMCRQTLIRPIGRDVIRQLAHAHIQDITTFQQRKAFYLKTGYALIEHRQETQLLRTVKGAGISNTLALVSEIGDVQSFPSGEHLASFLGLTTSKHISGATLFRAKRITKQGSPNGRYAAVNVAQHLSHRVPRYQAMYQRIKGRKPARKGHFIALVAIARDFVSNVLYDMWRHQRPFFLEVSDYRDYRRKNQHTDD

SEQ ID NO: 159221 - protein, 356 aa, unidentified
MFNNSTFFIGLDLGDKQSHIFVLDPKGELIEESRLPTNPTSLQRKFASLPRSRVAMEVGAHSRWASQLLKDLGHEVLVANARKLRAIYSNPRKGDRADAETLARLARLDPNLLSPIHHRSPQAQAVLRSRDALVRSRTLLINHVRSVAKSFGARLPSCSADSFSNKAAASIPQPLCPALLPLLETIASLTQQIHAYDHRITTLGETRYPETQPLRRIDGVGPITALAFVLTLEDPSRFQKSREVGPAIGLVPRTDQSGDRDPQLRITKTGNSYLRRLLVNSAQYMLGPFGPECELRTWGLMLAERGGKNAKKRAVVAVARKLAILLHRLWKNGEIYDPFYRSRSNAGQPVIASAAA

SEQ ID NO: 159222 - protein, 452 aa, unidentified
MEKPQEVEDEEYERVWERVAAVDVAKASGVACTRVPDEDRPGRRRTHVWTVTATVSAVTELADHLRCQGIQIVTLESTSDYWRIWWVVLEAAGLKVQLVNARAVRNVPGRAKTDKKDAVWLAKLTERGMLRPSFVPPPEIRRLRDFTRLRAELVHERTRYWARLEKLLERALIKISSVASTLDTDSTRAMIEALIAGQRNPKALAELAIGKMRPKRAQLAEALDGKFEPHHGELARIILDQIDALTARIDQLSDRVTELIDQIPAAQGVDADGTTGPGAGTGPGAPVLPAVARLDEITGCGVIAAQAVIAEIGLDMTVFGTPGRLVSWAKRCPQTRQSGKKTTSGKAGKGNPYLNGILGEVAASASRTASFLGERYRRLARRRGKRKALAAIARSILVIIFHLLADPEARFHDLGPDFYDNRISRERKIRNHVRQLEALGLTVTLAPKEEAA

SEQ ID NO: 159223 - protein, 295 aa, unidentified
MAIVGGFDVHRAQITFDYLDTDSGQVTAGQIRPATRPALRNWLERFAGRNDVAFAVEGCTGWRFVVEELVRAGGEPHLAEPADTATQRGRKKRAKTDRADARLLRELLTQRRLPESWAPPSHVLEVRTLGRLYVALMDERRAWQQRIHAQLFHQGVPSVRGLLTSDGRVAVAKAELSSAGLQVVQTAMAAVDSLVLQIGPLRAQLQTIGATQPAVLALTQQYGIGLLCGTIIWAELGVCRRFSNADQAVRFAGLDVTVWSSDTKRSAGRLARQGSPELGTLRSCQVRRSTNFARP

SEQ ID NO: 159224 - protein, 343 aa, unidentified
MNGTQIGVDLAKAVCEIAVSHTPGRVQERRRLSRATVMNFFAERAPAQVVMEACSSAHHWGREFQRLGHSVLLLHPSDAARYRDGNKTDRADAKALLEAVRNEALDPVPVKSLEQQAVGALHRLRQGYLQTRTARINAVRGHLREFGCVIPIGARHVLPQAYAALESGAIPQLLRPALTTVLDEIAALEAKADAVRHELTQLAEQMPEAQLLLTVPGVGVLTATALVALVGNIQRFPSGRDFAAYLGLTPREHSTGQARRLGAITKRGNSYIRMLLVHGARSALRAGTVVQQPDDLRTWARTIALRKGHNVAAVALANKLARVCWRVWRDGRPFERREAAERR

SEQ ID NO: 159225 - protein, 370 aa, unidentified
MQPTRFIGLDVHKERISVSVAESGRQGAVEYLGEIDNDAALIAQLCRRLARPGTALSFCYEAGPCGYGLYRQLIGLGHRCEVVAPSLIPRKPGERVKTDRRDASMLARLHRAGELTAVWVPDAGHEAMRDLVRLRGVVRHVVTRARQHLQGFLLRHGRRHGRGTAWKMAYRRWLSTLAFEHPAQQIAFQDYVDAVTDAERRLQRVEEQIDALLPEWSLPPVVDALQATRGVSIINAVVLVAEIGDFTRFSNPRQLMAYLGLVPGEHSSGEKVRRGAITKTGNHYARRALIEGAWAYRMKPRIGRHKVDRIEALPKAVRDIGWKAQVRLCARYRRLSLLGKNANMVIVAIAREMVGFIWSIACLIQTPKAA

SEQ ID NO: 159226 - protein, 312 aa, unidentified
MAEIIVGIDIAKKHLDVHLAPAGESFRLANDAPGHRTLVARLQGYQVRQVVLESTGGYEAAVVGELHQAGLPVAVVNPRQVRDFARATGRLAKTDRVDAEVLARFGQALQPSNQAVPDEITAQIKALVRRRRQLLQLHQAEANHLEHVTDREILRSIAGVRKVLEKELAWVDRQLHRIIQSSPLWQAKAQILTSTPGISDTTAASLLANLPELGSLNRRQVAALVGVAPINRDSGTLRGKRMTGGGRACVRRALFMPTLVAIRHNPRLRAFYQHLLANGKPKMTAVIACMRKLLISLNAMIRDQREWTPICA

SEQ ID NO: 159227 - protein, 338 aa, unidentified
MFVIGIDPHRGSHTAAVLDGVEELLAEYRVVADRRQRQRLLEWAAPFTPRVWAVEGATGTGALLAQQLVAAGEHVLDVPPKLSARVRLLDSGRSDKTDSHDARAAAVVALRHRALRRVRGEDHVAVLRLLAKRHHDLVAARTRAVCRLHTTLCHLAEGHFPKRMKASQAAAILARIRSGNPVSVERKALARDLLTEIRRIDRDLAALVARITTAVTASGTTVTDVFGVGPVVAAYLIGHSGDIVRFPTAGHYARYNGTAPIEASSGPTSRHRLNPGGNRQLNHAIHMAAVTQVRNDTPGRAYYLRKQAEGKSKKDAMRALKRRISDVVYRHLLADSRR

SEQ ID NO: 159228 - protein, 350 aa, unidentified
MNVYVGMDVHRKRSQVAVLDDDGVQQRNRNVPNDPAQLAPILGGLPPGTPVAFEAAYGWGWLVDLLEELELEPHLVHPSRCKAIASARLKDDKVDARTLAQLLRADLLPEAWIAPQQVRDLRALLRHRASLVRLSTTAKNRIHAVLADRGIQQQTGLWTGTGRVWLAGLPLPPTPRAIVEDYLALLDGLAEPIARLEHQIHALAKPDPRVQALMALPGVGRLTAMTLVAEIGDIARFPTARKLCAWAGLTPAVRNSDRKVRHGHITKQGSVWVRWILQEAAQTAKRSPMFATTYAQLARRRGKQIATVAIARRLLARCFHILNQLEAATTGEGQTTGCARNNRMRLQHGR

SEQ ID NO: 159229 - protein, 356 aa, unidentified
MKKGNTKTARPDRAVVTIGIDLGDRFSHYAVLSEDGELIEEGRVKMTPEAVERKFGDWNYARVAIEVGTHSPWMRRKLCEMGLEVIVANARDLRAITGSNNKNDREDARKLARLAQSSLDLLAPVRHRSETAQRDLLPIRSRALLVEERTRLVNGVRGLVKGFGYRLPLCATKNLPGKAEGRLPDWLEEPLRPLLVMIEVLSELIRQANVKIEAMVGERYAEAQVLLTVPRVGALTALTYVLTLDDPRRFPKSRDVGCYLGLRPRRSQSGGSDPQLGITKAGDAYLRKLLVQSAHQILSRWGPESALRSWGLRLCERGGKNARKKAVVAVARKLAVLLHKLWVTQQPWEAFPAAAD

SEQ ID NO: 159230 - protein, 343 aa, unidentified
MKLSRVGVDLAKNVYQLHGVDRTGKTMLKRRLKRHQWFKVLLDKTEPDCVIGMEACAGAHHWGRELQSRGYTVKLIPPQFVKPYIKSNKSDAKDAEAICEAMSRPNMRFVTVKRVEQQDIQATHRIRAELMTQRTAKANQIRGLVAEYGLVAPKHLSSLRAAIPCWLEDAENGLTGDFRALLQGVWEDLRLLDDRVCEMDKLIKRLAENNEDCVRLQQLRGVGPMTSTAMVATVGDARQYQKSRQMAAAIGITPKQHSSGDRDRLLGISKRGDVYLRTLMIHGARAVVARAKHKDDRLSRWVTNIANKKHPNVAAVALANKTARMAWAMLRNETDYDPDFALR

SEQ ID NO: 159231 - protein, 414 aa, unidentified
MKSARNTLPTEPVNGLTCGIDWARDDHALSIVNAKGRETTRKAISHDAAGLRDLITMLDQAGAREVAIERPDGPVVAALLEAGITVVVISPNQLKNLRGRYGSAGNKDDRFDAFVLADTLRTDRARLHPLLPDSPATVALRQICRARKDLVAHRVAVANQLRAHLMIVFPGVVGLFAEIDSPINLAFLTRFDCQERADWLSVTRWANWLASVGYSGRTHPRELHRRLTSATRGATGISGTTITAAYVATLTTLNDEIKTLDDSIAEQLSTHADAHIFTSLPRSGTFRAARLLAEIGDCRARFPTPESLACLAGVAPSTRQSGKVKHVGFRWAADKQLRDAVCDFAGDSRRANPWAADLYNKARARGHDHPHAVRILARAWLYIIWHCWQDNATYDPAHQRALQQLLNRPQPGAA

SEQ ID NO: 159232 - protein, 372 aa, unidentified
MANTMLHLGMDVHKESITLAVLPGDASAPTHVDRLPNDLAKLRKYVVRHAPDPATTRVCYEASGAGYVLQRALTEWGYHCDVIAPSLIPKRPGVQRKHDRRDAIELARLYRAEELVTIRIPSAAEERVRDLVRCRETFQREILKSRHYVLKFLARRGVVYRAGRHWTSAHDRWLRQVLATSSELGVEDRLVLGEYLALLDYKVQRRQELDRQLEQLVLAPAMATAVAWLQCFRGIQRQSALVLATEIVDWRRFENPRQLMAYLGLVPREHSSGDRERRGAITKAGNTHCRHVLVQAAWAYRFRPLVSQHVKRRQEGQPALVVAQAWKAQHRLHKVYTKLAVRRRPQIAVVAVARELAGFLWAALREIDPIAA

SEQ ID NO: 159233 - protein, 390 aa, unidentified
MEVLYQSCAGIDVHQANIVVCILHGPLTSTRPKREMATFDTTTKGLRACHDFLSQFHVEAVGMESTGVYWRPVWHALCDDFELILAQPAHMKAIPGQKTDKKDAHWIAKLTRIGLLPRSFVPDETIQELRELTRQRKHYVESRNRETNRIHKFLQSGGIKLTTYIEDIMGLSGRNLLQLLVDGTPITPRIVHQSVYTSLKKKVPQLLEALDGYFSDHHRFMLKQSLEIYDFYQKQIELLEERITVYLSQYENHVETLDSIPGIDVITASVIISEVGVDMSQFPTSGHLASWAGLCPGNNESAGKKRSTKIRHGNSYLKKCLCQAAFAVKRQKGSPLAERYYQIQSRRGSQKATIALAHQLLKIAYILLKEQMTYPEFLAQKKTTRDELVA

SEQ ID NO: 159234 - protein, 539 aa, unidentified
MLSETDAIQPADLHPVSRKHFNRLPNNNCSTNFQGEFYHMTRSITSIKSSAKSTQKRRSTKNPPAPPQATHEPPDTPVSVQDSTSNAALPATRFVGLDVHKKQITYCILDGAGAIIREGEIVLTRERLADFASKVLQPADHIALESTTNCWAVVEILQQHVPHVVVSNPMATKAIAHSKIKTDKVDAKVLAQLLRCDFLPTVWQPDADTRLRRQVSGRRASLVGQRTQLQNRIHSVLAMRLIIPPAGIALFGTHGLAWLKTLTNDTIDVDGLMMIESDLRLLQSVQLEIDKFDKRLADLAWEDDRVKLLMTIPGVSVVVAQALVAAFGDITRFKSGDAAASYLGLTPSTRQSATSVYHGPITKHGNSTARYMLVQAAQQYSRQSGPLGHFFQRIKRRKNHNVAVVATARKLAVIAWRILTTGEPYRYAQPAATATKLASLRIAAGGEKRRGGSPRGVKAAAKLPGGSKTIRSLDDTYQNEGLPTRSPLPPGELRHLANTNTLQFAEKISGSQVIPRKPKASDQTHKNTGRQPEISQSEK

SEQ ID NO: 159235 - protein, 340 aa, unidentified
MQTPRHIGIDLHRNQFTCCVRLENGRNYLTEWKLEDLPRFVKKLRPADQIAVEVTGNTRLFYEAVAPSVARVVAVDPNQFQVISHSVKKTDPNDARNLALYLEKDLLPEVRMKDKTQAQLASLTQTRDTLVKLRTALKNKVNNILSAHGINLEREALSSEKKLNEVLAMRFDPMVKIELEVIIEEIRSLNQRVAKLEKTIAEEGSKLEGHKNLTSIKGIGPLTGSILLSVIGAIHDFADEGKLAAYFGIVPRVSNSNETERSGRITKRGSKLGRTALVQCALIAQRYSPYLKRYYEKIKARRGTGKAIIALARKLLGIIYRTLKNKWVFQDFPNFVLAEV

SEQ ID NO: 159236 - protein, 345 aa, unidentified
MSTIMIGIDPHKASHTAVAVDEFETVVDEIRIRSCPTQAVLLREWADGFRDTRVWAVESAQGLGYLLSQQLISAGETVIDVPAVRASRVRTLSTGRSQKNDPNDARSVAIAALRANDLAEVLPDDHTRILRLLAKRHRDIGRAKNRECCRLHSLLLEMFPGGAEFKMSSMTRVNAMLDTFTPVDSMGRQRLEIAQDFVDGIDELTGRLKTSKRRITAAVKASGTSLTEICGLGPITAAIIIGNTGNIDRFATKARFASYNGTAPIDASSGPKVRHRLNPRGNRQLNWAIHVVAISQLRHDTIGRAFYDRKIEEGKTPKEAIRALKRRLSDVVYRHLVNDARHLGG

SEQ ID NO: 159237 - protein, 346 aa, unidentified
MKEASVGQVSTIGLDIAKHVFQAHGADASGHVVFRKKITRAKLIEFMASQPPCLVALEACGGAHYWAREITQLGHTVRLIPPAYVKPFVKRHKNDAADAEAICEAAQRPNMRYVAVKDEEQQARTVVFRARDLLVQQRTQLINALRGHLTEYGWIVPKGPAHVARLIAWIEDPASQLPESARAVFKVLIDSLKVVDTQIAGLDAEIARRSREDPVARRLMTIPGIGPLTATAITALAPPPETFRKGRDFAAWLGLTPLQKSTGGKQRLGAISKMGERTLRRLLIIGSSAVVHQACKRGAPAGSWLAQMLARKPRMLVTVALANKIARVVWALLAKGEVYRAPVAAA

SEQ ID NO: 159238 - protein, 347 aa, unidentified
MSITMIGLDTAKSVFQIHAVDGTGKTLIRRKLRRTELIPFFKKQEACTVVMEACGASHHWARLLGSLGHHVKLIAPEAVRPFVKKGKKNDAADAAALCEAASRPEMKFVPMKTAEQQAILALHSARSLLVKQQTMLVNAMRGLATEFGLTVPKGINRLDELTALVDADEAFPETARGVFRELREQCNSLSVSIEEVETKIVAHARGDETARRLATIPGIGPITASLIAATVADIGMFKSARHFAAWLGLVPRQYSTGGKTRLGRITKAGNREIRKLLVLGATSMVYRAEQWNSAVGAWTRGVLERRPVRLVTVALANKMARIAWALMTRKEVYQAKGRIAAVAEVAA

SEQ ID NO: 159239 - protein, 362 aa, unidentified
MTALARWPRELREQARGRARSGAAIVESLSKPERLEGSESRIERKEGSNNMEQQFVGIDVSKAWLDTEAIPQSQSMRYGNDAAGIVALVEAMQAATPALIVVEATGGYETAVASALSAAGLPVVVVNPKQVRDFAKAMGILAKNDRIDARVLALFGQRIRPQLRPLPGVEQRELAELLDRRSQLVVMRAQERARLATALPVAKASLVEHIHWLDERLRQLDIELTARLRTSAAWKVKVDLLKGVPGIGKVTIFTLLARLPELGQLNRGTIAALAGVAPFDDDSGKRRGQRFIRGGRAEVRNVLYMATLSASQHNAVIKAFFARLTAAGKPFKVAITACMRKLLTILNAMLKNNESWHCPVTT

SEQ ID NO: 159240 - protein, 446 aa, unidentified
MAPATIERYSLQTPNLKKKEPSQMENIAARKLKQVPEGYLIIGVDPHKKRHAAVAITQDFTTRDKFKLDNTREGLEIMLRRARMEMVKSDCRGVMFAIETGGHYWRNVAYFLDEQGIPFRFINQFTLKRRREGKDLNRRKNDYRDSEVAAQLLCTGEFTESKVPQGVYAELRTAHNAYRRLVKERTRITNLIKGLLDALFPEFTQVFKDPCGLTALSVLSTCPIPSVIAGMTEEEFVATIEAKHQGRLMRKKLRALHHMARASIGIAAGARSVSSEISFLVEKLELIRGHIYIIERTLVSLVDETEEGKYLLSIRGLNYIAVAGLLAELGCFKSYRTAKQMIKMAGSNPTESESAGKRDTHTPMSKQGRPVLRYCAWTSVIPMLRLNSDFRAWAKQMRERPAHANPLNGREIVGAALNRLLRLAFALVKNQTYYQVSKPELTLVAV

SEQ ID NO: 159241 - protein, 346 aa, unidentified
MRFYTKQHKFYCGIDLHAKTMYLCILNQEGRIVLHRDIKTNPDIFLKTIAPYRDDIVVAVECIFTWYWIADLCSEENIPFVLGHALYMKAIHGGKAKNDKVDAYKIATLLRGGMMPMAYVYPPEMRSTRDLLRRRNHLVRKRAELLAHIQNTNHQYNLPDTGKLAYKSKRKGVSERFQDISVQKNIELDLSLLDHYDKLLLHLEHELSLIAKVHDADSYFRLRSIPGIGRILGLVILYEIHDIHRFPRVQDFVSYCRLVKCAKESAGKILGSSGKKIGNAHLKWAFSEAAVLFLRRNPEAVKYRNKLARMHGNAKSLTIVAHKLARAVYHILKRKEVFHPEVFFAK

SEQ ID NO: 159242 - protein, 345 aa, unidentified
MNRSPVYHCFVGIDIAAKTFVAAYAEPGHAASSPRTFDQTEAGFAAFQAYLPATILPTQILIAMEATGSYWIRLAVTLHQAGYAVAVINPKHIHNFAKSLPRRAKTDALDADVLLRFATERQPSCWTPPPTVYHELRQRLLARDALLAMRTQARNQQHALSQWPVVVAEVTAHFNTVLAALDTQLAMLEREITTTMQLGDWAASATLLLSIPGIGLHATAWLLVSTLNFTLCATPEAAVAYAGLNPLARESGTSIRGRPRVGRGGNARLRTVLYMATLSASRYNPPIQALYTRLRERGKAVKVARCAAARKLIHLAWAIVKTGQPFDPGYQQKLREHRVMVAITD

SEQ ID NO: 159243 - protein, 483 aa, unidentified
MKPKQEEKTKKATCRPTQRNWQQMNRKQRREMTRKIQSEELSLSVVHPDAAGIDIGNESHYVAVPPTRDSEPVRRFGCTTAEVKEMAVWLKQCTIRTIAMQSTGVYWIAVYDILEEAGFEVYLVNARETKNLPGRKSDVQESQWLMKLHTYGLLRNSFRPSQEVRTMRTYWRQRNDLVRTAGRHIQRIQKAMTQMNIQLANVLSDVSGMTGQAIIKAILAGERDPHVLAGLRDWRVKASEEEIARSLEGNWQEDLLFVLKQEQDGYEFCQQQIAQCDQRLQQYLQQREDRSQGASLPEEKRKERLRKKKKGNAPQFDLRTELFRMTGADLTQIDGIDVTTAMTILSEAGCEMTKWKTENHFVSWLRLCPDNRISGDKIIGKGRLPTKSRASVALRMAASTLRLSNTYLGAQFRRLRTKLGAPIAIKAMAAKLARLVYRMLRYGMQFVDQGAEFYDAQHRKLQINYLKWKAAKLGFQIIEAPAA

SEQ ID NO: 159244 - protein, 357 aa, unidentified
MTTAKTTTTADTILAIDLGKYKSVACAYDRATAQARFDTIPTGKDELRKLLARHRPAVVVIEACTLAGWVHDLCAEEGLTCKVANTASEAWKFKHTKRKTDKDDALRLAQLEALGQLPTVPVPPQPTRQWRALIAYRQGLVGRRVAAQNRIRAILLGQGLPAPRGHRAWTETGLRGIAEHARPLPACGPDELWRGLLDLALTEYRQVQKLLAPVEAKLDERAQADPAVRLLETIPGVGPRTAEAVAAHLHDPGRFASGKQVSAYAGLVPRQYQSGECDHRGRITKRGPALLRKLLVECAWAMLRYNAGARAVYARLSRGKARKKQAIVALARKLLVRCWAMLRDRVPWRDDPPAVPA

SEQ ID NO: 159245 - protein, 427 aa, unidentified
MSEPKYKPTLCVGADVHLDEIVLRAVDKALGHEVLERFRVPNNLPGAQAAASTLAQAATELDYTRIEIGWESTGMLWIPFHRYLSTEPLLHPFELELICFNPKLVAKFKDGLVLRSPKNDDRDAFDIAARIRFGELPVTFVPGDFWQGLRRLTRYRYRLSKALSQEKMRFQSYAFLKASDWKRVKPFSNVLGATSAALLTEFTVAELQEMTHDQLVDLIKRRGRGRFTDPTTTARAVRQALRTSFPIAPRMDEIVTDSLAAIWDHIRYLDRSMKRLDKSIARYIDPIPNPIITVKGLGAVITAGILAEIVDVLRFEEQKHLAQYMGLTWRKSSSGGFVSQNTRLSKVGNVYLRYYFILGANLLRQHNLEYKAYYWRKHQEVSKYQHKRALVLTARKLVRLVHALLTKNVPYVRPRTTDPDQEDDGLQ

SEQ ID NO: 159246 - protein, 318 aa, unidentified
MEQSRQPPIIGLDVSKAWLDGYLPGAVRPLRVGNDAAGIRALVRSLGDHAGCLVVMEASGGYERTAHRELVARGVLAAIVNSKRVRDFARGMGLEAKTDRVDARLIARYGATMRPAATPVPDPARAELREILACRRRLVDEIAVRKQQLEHLHSPLVRARLERALAFLRQEVKELLTLLRERIAADQVLAADCALLTSMPGCGPILAATLLAELPELGALDRRKVAALAGLAPVARDSGLREHRRVIKGGRGQVRRALYMAAVASLKTDKSPLKARYARLTARGKPPKLALTALMRTMLVTLNAMLKAKSARQDPRQS

SEQ ID NO: 159247 - protein, 468 aa, unidentified
MEPAYRRCCGIDVHKKSISVCVLPPAGNCSLPVREEKFRTFTRDLKRLRKWLLNLRVTDIVMESTGQYWRPVWNILEDAFPKMILVNPLHVKALQGHKTDRLDARWLATRLERDDLKGSFIPPRDIRELRDLTRLRVHWLEDLNRIKNRIGQLCEAGNIKVSSVATDLFGMSGRRMLAALVEGKRDAGWMADYARGALRGKKPQLELSLEGTFTAHQRSLLASMLKQMSALEAQIAELTREIEQRVACYEDVIRRLDTIPGIDRITAWTVLAETGTDMSVFGDARHLASWAALCPGNRESGGKRISGKTRKGNRYIRRALCQSAWAASHVRDSHLAGLFRRVRARRGEQKAIMAVAHQLLTIVFHVIRDGSVYKELGAAYYDRQNKPKVMRKLVERLQKLGYYVTLQPIEEPVETPSPAIPTPQPRRRGRPCKCAERGIECKHGRASTTAINPLQNSSHSEGAEAVCS

SEQ ID NO: 159248 - protein, 289 aa, unidentified
MTNDTIGVDISKDHLDAHRMSDGASRRFTNDRTGHTAFVGWAGPCGDRIVYEPTGPYHRAFERRLAGACFALVKVNPRQARRFAEATGRLAKTDRLDAAMLARMGALLDLEARPVRSPILNDLKDLHMAREALVKNRTAAKNRAKNLTLPLLRRHNAEQLRQIERQIVAIEAEIMALIKTNPDLAQRFAILVSIPGVAAITAFVLIIEMPELGTLENGQAASLAGLAPVARQSGQWTGRAFIRGGRANIRQALYMPALVALRFNPHLKAKYEQVVAVGKPPKKAITAIM

SEQ ID NO: 159249 - protein, 427 aa, unidentified
MGFTKPIEHFNLQRKKVITMNTLYVGIDVSSKSNVIYLMLPNGDKHSNFSVANSHEGSTQLVKRILSALTSHSLDTVLIGLEATSVYGDNLVYFLREDATLAPFNRKIHVLNPKQVKKFHDAYNDLPKNDYVDSFVIADCLRFGRINKEVYMGEYRYKALQNLTRARFFAVQNLVKEKQRFMNVLFKKYSTMTQEKVFSDAFSTTALAVYDEFESAEALANMDLHELTDFIIEKGKNRFPDPDAVAKAIQKAARSSYRLPKTVNDSVNQVLSISITSMKALESQIKEFDKAIKAQMELLPNVLISIPGIGPVYSAGIMAEIGDINRFNSQAALAKYAGLAWKQHQSGGFESEVTRLIPSGNRFLKYYLCEAAFSLVRCDKEYSDFYHLKYKEVNRCQHKRALALTARKFVRLVFRLLKDNRLYCPAK

SEQ ID NO: 159250 - protein, 422 aa, unidentified
MLEETQDTEELIERVAALDIGKAELVCCIRVPGEGKRGRRLQEVRTYTTMTRSLLVLADRLGELGVTRVVMEATSDYWKAPFYLLEAQGFEVWLVNAKDVKHLPGRPKTDRLDAVWLAKVAERQMLRPSFVPPPAIRRLRDVARYRADLVGVRTAEKQRVEKLLEDAHIKLSVVASDIFGVSGRAMLAALIAGERDPKVLAELARGRMRAKRSVLEEAFTGVFTDHHGFLLARMLGRVDGLDADIAELDHKLEELIIPFTAAADRLDEITGVGRTAACAIIAEVGVDMGRFPTPGHLASWARFAPGVKQSAGKTKGKSSTGHGNPYLARVLGEAAAAAGRTDTFLGERYRRIARRRGAKRAIVAVGRSILIIIWHLLADPDARFHDLGAGFYHTRINPERAKRNHIRQLEALGYKVTLQPAA

SEQ ID NO: 159251 - protein, 368 aa, unidentified
MRMSVGVDLHKSQFTVFWRSDDGITGKHERYPTTDDGYRRFEVALQSVIETGTPVEVAVESTGNTRYFKQRVERCGVPVRVVNTAKFKVVTESVKKTDRHDAATLAEFLEKDMLPEAHLCSPESEELRRVIKTRKTLVETIVTVKNQLHGLLLSLGIESKRGQLQSAKERRRVKSVLAAHHIAGDAVDPLFETIDRLSAEVKKLDRVIAEMTKDDEAVQLIMTIPGAGLITAATIRAFTDDIRRYPTAGKYAAYAGLVPWVQNSNETVHHGRITKRGPVELRTALVQVVLGMVRNRRPTGTYRILERYDRLKREKGSGRSIIATARQLSEIIYRMLTDRVPFDEIKMVDPMIRRKVMEMRAAAWDAAS

SEQ ID NO: 159252 - protein, 369 aa, unidentified
MSKSNKAFVGMDVHKESIDWAIAELDGEVRSFGRTGGDLMAVARTVRKLVASGKTFVFVYEAGPCGFGIHRWLKAQGHECWVVSPSLTPKKPGERIKTDTRDAVKLARLARAGELTAIYVPEPADEALRDLVRAREDTVAMQRQARHRLQALLLRNDIRYVGKSAWTPAHQRWISRLKLPHATQQIAFEEYVQAVQEATTRIQRLTGAIEQAVGTWRWQPVVAALQAMRGVQLIHAVRIVAELGDLTRFATPRAMMGFLGLVPSEHSSGSQRAQGAITKAGNSSARRAMVEAAWAYQHPARITPIIARRQDGLPKTVLDIAWKAQLRLCARFRKLAVRGVNRNKLVVAVARELAGFVWAIATEQPLRST

SEQ ID NO: 159253 - protein, 333 aa, unidentified
MKPSPPLGIGIDVSKNTLDVVFLLPETSLHFVVPNNKSGIKILIKKCSFSSSSSFPKIVMESTGRYHLLCALLLSSARLDVRVINPLLARRYLSSAVRKVKTDKADALVLAQVAQFEKRLPKPFSATKTDILIRQKMGLLTSLEKQIQTFQAVLRNYSDFQDTLELSRSMTEQTLLDSLKTIQKQREHLEGEISQLIAQQKGFSHSQKILQSIPGISAFTASLLLFLLDTSCQNPKQWVAFCGLDISVRQSGTWKGRGKLTKRGNSYVRKRLFHSAWGAMMTNPDFRSYYDSLRQAGHSYVESLLIISRKLLRISFALLQKNIPFDSSFSLFS

SEQ ID NO: 159254 - protein, 426 aa, unidentified
MRFIGLDVHKDFCEVAVIEGDACRSGPRVRSTPEDLEVFAQSLGPKDQVVLEATGGALAIARILEPHVGRVVMANPMAVRAIASAKAKTDRLDARTLAKLLAAGFLPAVWMGDERTRLLRRLVSRHAQLVRQRTRAKNQIHAVLQRTLRGRPPASDLFGKRGRAWLDDQHLPADERETVQASLRHVEFLDGELNLVDRTIAQQVLDWPEVRRIMTIPGMGATAAAGVMAAIGDISRFPSPRHLVGYFGLDARVRQSGSLPARHGAISKQGSSEARHLLVEAAWAAIRTPGPLRAFGERIRARRGANIATVAVARKLAVLCWHLLTREEDYAFARPSLLREKVRRLELAAGAVRRIGYRNPVRVFATPAQHRLEREVGAQAEKAYRRFVKDFRATGKKGAGAATGARISSARKGQAARQGQAPNPAL

SEQ ID NO: 159255 - protein, 343 aa, unidentified
MESIHYVGLDVHKKTIAYCIKTVSGKTVRQGVVGAERKALRQWLTELPGPWMGALEATIFTGWIYDFLKPHAVELKVAHPQMLKAITAAKKKNDRADAEKLADLLRVDLLPECTMLTEELRELRRILRYRNLVVRTATKMKNKMSGLLMEVGATYDKRRLHGRKYFSELLERVEDVPESVKELLRLSRGNLELFTAVQKKLTRTLRDNDLIRARVQCLMSIAGVGEIMALTWVLEIGDPGRFSSSRQAISYCGLCSAQRESAGKEHRGPISKKRNKHLQTMLIEAAKLAPYWNPQLAALHEKELAKGNRNRATLAVARKLVEYLLAVDRRGTPFVAETPPQVA

SEQ ID NO: 159256 - protein, 388 aa, unidentified
MNITTDQPEAPTAIRTDLGAIFVSLELSRSSWLITSLSPGGGEKMSKHAVRGGDVSRLLERFSQLREKAQARTGKVFPLIVIQEAGLDGFWIDRVLQNEGIESHVVDPASIATSRRRRRAKTDKIDGETLVRSLLAYKRGEPRVCSMVKAPTPEEEDQRRLCRERKVLTAERVLHVNRIKGLLFCQGICGYEPLRRDRRDRLEELQTGDGRPLPPHLKAQVERELDRLELLLKQIKTVEGERDALLAVAITSMPAPAAMLLDIKGIGPEFAAVLWSEGLFRHFDNRRQVAAYAGLAPTPWQSGAIDREQGVSKAGNPRLRTTLIQLAWLWLRNQPQSALTIWFHERVLRNGGRLRKTTIVALARKLLVALWKYVTTGVVIEGATMKAA

SEQ ID NO: 159257 - protein, 462 aa, unidentified
MPKPKAKSNSALSLTTLHPNAAGADIGAREIYVAVPPDRSTPSVRCFGTFTDQLRALVTWLRECRIDTVAMEATSVYWIPLAELLEDAKIEVCLVNPRHVKNVPGRKTDVQDSQWLQYLHSVGLLRGAYRPPAEVRPIRVLWRHRDALVRQSTWQIQHIHKAFDQMNVQVHHVIADITGATGTAIVEAIIAGQRDPAQLAALRDKRLRADVPTLTRALTGDYRAEHLFCLQQAYDGYKFVRTQIVAVETEVHRLQAALCPPAAAVPVAAAPAVQPAATPERKGRRVGGKNAPGFPVTALLRQLCGVDLTTIPGLSAPTLQGLWSELGHSLASFPTAKHFVSWLSLCPDNRISGGRTLSVGTRATANRVARLLRVAAQGVGHAHNEIGDFHRRMRARLGGAAAITATAHKLARIFYACLRSKQPYDPAQHDLNTPQRRATTIGKLRAKAQKLGFQLVELQPAI

SEQ ID NO: 159258 - protein, 365 aa, unidentified
MMETVYCGVDFHARMQTIAYCDSANGEIQLAQLDHRKDDVRGFYSQFTGQVIVGMESGGYSSWFEAMLEELGHTVWIGHATEIRRRANWRQKNDRRDAELVLEIMLRGDFPRIHSHSRESVEVLRMLRYRARLIKMRTMICNNLQAIAMSCGLSERSRMLSRAGQERLKSARMTPVIKQQSEELLTLLVPINERIGRVDRWLKQQASTNDRVKLLMTHPGVGVLTALGVVHTLEPFNRFSKQRSVVAYVGLEPMERSSAERKRYIGISKAGSRLLRFLLGEAAHIAVRFDPELKQFHERIGKRRGKAKATVAVARKLLIRCWIMLRENIDYAEFRSRGVEARLARLGHRPTMPEVVIERPASSDR

SEQ ID NO: 159259 - protein, 386 aa, unidentified
MIEAVIERCAGIDVGKKFLVACVMTGPLEAEPKIEIRKFGTIVAELELLRDWLIHEGCSHAVMESTGSYWKPVFNILEESVEVVLANAYDVQNRRGHKTDPNDSRWLAHLLRHGMIRPSFIPERAVRELRDLTRRRRQLVGERARERNRIQKTLEDANIKLGDVLSDVLGLSGRLMINALLEGVKQVEDIAQFAQRKAKQKIPDLIAALQRNRLTDHHRFLLRHAFRHLDFLGVEIETLNLEIRSRLSSEQFRKPHALLQSIPGIKEESSAAILAEVGPNMAQFPSGAHLASWAGLCPGNHESAGVRKTGRTNRGNNWLRSVLTQCAWAASNRKNSMLQSFYSRLSPRCGRKRAIVALGHRLLRVIYYVLLRSQPYQDSNATPISA

SEQ ID NO: 159260 - protein, 375 aa, unidentified
MTASLQANDNQAGAVLYMAFELSDKKWRLAFGDGTRQRQVVVPAGALDELREQLEKVKAKWGLGEDTRVLSCYEAGRDGFWLHRQLQAWGLVNHVVDAASIEVSRRSRRAKTDRLDARALLEKLIRYAHGERRVWRVVRVPEPQWEDLRQLHRERGQLKKECTAARNRITSKLVAHGLRLKPGKDFLERLEGLRLFDGSPLPAQLKAGLRREYERLQLTEGQLRSIEREIRTLIESAAGLEQVRALMLLPGIGWVGAWTLVLEIFGWRAIRNRRELAALVGLVPVPYNSGAMAREQGISKAGNRRVRALLIQLAWLWLRYQPNSKHSRWFQERFGGGSKRQRRIGIVALARRLVIDLWRFAESGVVPEGTRLKVA

SEQ ID NO: 159261 - protein, 310 aa, unidentified
METTIVGIDVSKDRLDVHLHPVGERFVVSRNAEGLDALIARIVPLGVQAVAVEATGGFETVVAASLGAAGLPVIVVNPARVRAFAQSLGKRAKTDPIDAAIIARFVEGTKPQIRPLPDADTRLLADLVARRRQIIQMLVAERQRERQLPTRYLKKSAARLIKALEKELNVLDEGIDESVRGSPVWCEKEDLLKSVPGVGSVVARTLLAEMPELGTLNRHEIASLAGLAPWTRQSGMWKGKSFTGGGRTTARTALFMAALVATRHNPLLKAFYQRLTAAGKPKMVAIIAVARKLVTILNAILRDNTPWQTA

SEQ ID NO: 159262 - protein, 313 aa, unidentified
MAQMVATVGIDVSKDRLDVAVHPTDGEFSVTNDAMGWRLLVRRLKPLMARAIGIEASGGYERGAISALLEAGLPVRSVNPWKLRLFAKAAGVLAKNDRLDAGVIARFVATMPSREVRRDLAVEHLAELVTARRQLVDAVQQTTNQTEHLRDPSLRRLQARRVRQLERDVAQLDQLIAEAIAASPLLSARRDLLCSMPGVGPVLAATLLALLPELGSLPNRSIAALVGVVPYDFDSGRMRGRRHIFGGRAAVRRVLFMATQVAGRFNPTLKAFRQRLLATGKKPKVAIIAAMRKLIVTLNAMLRDNLPWRSVAA

SEQ ID NO: 159263 - protein, 347 aa, unidentified
MLYAGLDLSRQRLDVHVLDEDGRTVEVTAATPEVFGLRELVARISRHGQEVSATIESMNGARFVHDQLELAGWDVEIADAVKVKGLAPLAAKTDKIDAWVLAELGRRDLVPAIWLPDPTVRAERERARFRLHLVRHRTALKNRIHATLIAFGHPVPVSDLFGTKGRELLAGLAVPEPWATTLARSLRIVDELEAEIERCTADLQAAGADHPYVPLLMSVPGIAWVLGYTIAAELGDIGRFASPKKLAGYTGLCPIVRQSGRRDDRGPLAKNGPKYLRWALIEAATHAARHPAYRDRYEHTKKRLGRQRGSKVARVEIARELATAIWHMLVKNEPFNPGRSPARPLVA

SEQ ID NO: 159264 - protein, 432 aa, unidentified
MKSKAYRAIAVNQIHLDRLLQRQEALVHAGLDVGKDYILCVLRWAGHDFERPWRCRNPADLACLAQTLQRLAQGRRLVVALEPTGTYGDALRQALQRAGLMVHRVSPKAAADYAEIFDGVPSQHDGKDAAVVAELAAQGRSWPWPLVLPSETEQELAYQVEWLEGQRRQTQLWYGRLEALLSRHWPEATALLPLTSGVLRRCLVRYGGPRGLAEDGRAAERLFRWGKGLLSRDKAEALVASARQTAGVLSGRWDEERLRRYAQQVQDALQQHRQARRRLRQLASTQPIIQAMGMVVGPVTACVLWVELGNPQDYHCGAAYRKAMGLNLKERSSGRWQGQLKISKRGSSVVRRWLYLAALRGVRQEPVRSWYVRQKTQRRGVAKPALVGVMRKLALALYRVGGRGEPFDRAQLFPSLTAGSTASVDAGVGKKS

SEQ ID NO: 159265 - protein, 400 aa, unidentified
MTAVWAGIDSGKRAHHCVVIDTTGRLLLSRRVVNDEAALLELIAAVLAVADGDPAVWATDLNAGGAALLIALLTERGQQLLYIPGRIVHHAAQTYRGDGKTDAKDARIIADQARMRTDLQPVRGADQISTDLRMLTSRRTDLVYDRVRTINRLRATLLEFFPSLEAAFDYSKKAPLILLSGYQTPEAIRRIGAVRLAAWLKKRGCRGSTSVSAKALAAANAQHTVLRTQAMGAQLVAQLAHQIGVIDAAIAALDEQICERFDQHPDAPILLSMPGFGTVLGATFIANTGGDLRAFETVDRLASVAGLAPAPRDSGRISGNHHRPRRFNRRLMRTCYLAALSSLKNSPASRAFYDRKRAEGKNHKQALIALARRRITTLWAMLRDRTTYQEPPRPALAPAA

SEQ ID NO: 159266 - protein, 331 aa, unidentified
MTNAAVSPPVGELTDDLIGIDVAKAKFDWNVHGSSVSHSASNDPAGFDALWLDLRERRIKLIVVEATGGLEQPLIGFLVGQGLPVARVNPRAARDFARSQGHLAKTDAIDAKALSHYAHTLAHKADQTGVRFEPVSEQIEALQVLVVRRRQLLDMRTAELNRRAGAMRVLRKSIDAVILTLNEQISALNDDIGRHLKEHFKELDGRLESIQGVGQNTCAAMIAFMPELGQVNNRRAAKLAGLAPLNNDSGKQRGKRSIWGGRSLVRCALYMATLTAIQHNAVIKAFYARLVSAGKPKKVAMTACAHKLLRILNAMARTGQTWNPEIHGLPA

SEQ ID NO: 159267 - protein, 318 aa, unidentified
MHYIGIDISKAKLDCCWLRDAEKNKFKTKVFKNNAADSKALDIWLTSLTKADPSEITVLMEATGIYHENLAHYLFERGYQICVVNPARTKEFASSLGNTHKTDAKDSQILALYCHRMHPELWQPERPEILELKALLARLESLETDLNRETNRLEKAEFNCSSERVIGSLNLMIEQLKAEKRRLEDDIDNHIGRYPQLRKDRQLMESIPGVGPIVSRLMLSLLHSRSFRTAGQVAAFLGLVPRIQQSGQWKGRSRLSKQGPANVRAKLYMAAVVCLRYNPDIQVQYQRLMENGKSKMQALGAGVNASLKLTHLSALSPK

SEQ ID NO: 159268 - protein, 350 aa, unidentified
MLIIGCDYHPGFQQIACVDTETGEVVERRLTHREEAEQFYQELKQRNASVRVGMEASGHARWFERLLRELQFELWIGDAAEIRTKRVRKQKTDRQDAQLLLRLMMEDRFPRIWVPDAANRDLRQLLWHRHRLVQMRTRVMNQLHVVALNEGLRRKKALWRPAGRNELESLKLAPWASRRRQDLLDLLDQLTPKIQDLTRQLEQEVERRPVTRRLMTHPGVGPLTALVYELVIGTPERFHCGKQVASYVGLVPSEESSGDRRRLGHISKQGNALLRFLLVEAAQVTVRSQPQWRSTFFHLALRRGRKIAKVAMARKLAVHLYWMWRQGLDYGQRNKLGSHAGAPGNRHGAQ

SEQ ID NO: 159269 - protein, 410 aa, unidentified
MQILYPRCCALDVHKQTVVACLRLAVDGKVSKEVRTFQTTTASLIALSDWLAENKCTHIAMEATGVYWKPVWHVLADGEFQLVLANAAHVKNVPGRKTDVSDAEWLVDLLAHGLIRASFVPDTPTQELRALLRTRKQLVREQSSHVLRVQKTLEDANIKLDSVISELMGKSGRAMIEALIAGERDPAKLARLADGRLKASPTQLREALRGRVTKNHRFLLRLHLKQIDALDAAIVTIDRQVEADLAPFRTAVKQLISAPGIKALNAQVVLSEIGLDMSRFPSDRHLISWAGICPRNDESAGKRRSNRLRKGAPWLKTALVQSAWAAVRKKDSYLRAQFHRIKARRGAKKAIMAVAASLLTAIYHMLKNGTTYQDLGPNHFDRRSKEQQTHRLVKRLADLGYAVALAPLAN

SEQ ID NO: 159270 - protein, 414 aa, unidentified
MQEVSTHSTMVPSLCELANRLVGLGVQRVVMEATSDYWRPPFYLFEAHGLEPWLVNAKDVKHLPGRPKTDRLDAVWLCKVAERQMLRPSFVPPGDIRRLRDLTRYRADLVGVRNAEKNRVDKLLEDACLKLSVVASDIFGVSGRAMMAALIAGERDPKALAELAQTRMRTKIGRLEEAFAGLRLGTFDDHHRFLLARMLARVDAVDLDIAAVDTQIGQHLAPFADAAARLDEIPGIGPTAAAIIIAEIGLDMTRFPTPAHLASWAKFAPGINASAGKTKGNGSTGHGNRYLARILGEAVVCASRTNTFLGARYRRLTRRRGKKKAIVGRPLHAGDHLALARRPRHPLPRARRRPPRPPRQHPRQTTQPRPPTRSTRLPRHPRTRGLTDPPAETRNVKSHFRTSYSRCNVTSRLR

SEQ ID NO: 159271 - protein, 344 aa, unidentified
MDHFAGLDVSVKETSICIVDDAGKIVREVKVASEPEALLAVLKNPAYHFKRIGLEAGPLSQWLFSALAEAGLPVICVETRHMQAVLKAQINKTDRNDARGIAQMMRAGLYRPVHVKTLRSQKLRMLLTHRKLLQSKAIAIENDLRGTLRNFGLKVGMVGKVKFEARIKELVENLPDLAVLVEPMLIVRRTLREQIVILHRRLLAIVRDDEVCRRLMTTPGVGPVVALTYRATVDVPARFRKSKAVGAVFGLTCAKYQSGEVDRNGRISRCGDEMMRVMLYEAAQSMLRSKKWSWLKAWAMQIARRRGMKKAIVALARRLAVIMHRIWVDGTEFRWTREQATAAA

SEQ ID NO: 159272 - protein, 424 aa, unidentified
MSKKKSSLAGLQALYARVCGLDVHKKLVVACVRILDSKDGTVQSTLRKFGTMTADLMELRGWLAEHKVTHVAMESTGVYWQPVFNLLEGHFQTWVVNAQHIKKVPGRKTDMKDAEWIAQLLQCGLLRPSFVPDRQQRELRDLTRQQTKLVQQRNAVDNRIQKVLETANIKLGSVASDVLGVSGRKMIEALIAGEKDVSVLADLAQRQLRGKIPELQRALEGELTEHHCFLLRQLLGQYDFLEKEIARVSERLGAVAPPSFRAAVEQLDAMAGVGERGARALLAETGTDMSRFPTHKHFASWAGRCPGNHESAGKRRSGKTPAANRHLDAVLTEMAHAAVRTKNSYFKSQYHRLAGRRGKKRAIGAVKHSLLVTVYFMLRDNKPYKDLGVDYFDKLNPQQRIRYHVRRLQELGQEVELSPMADAA

SEQ ID NO: 159273 - protein, 395 aa, unidentified
MFIVGIDVAKRSHEVCMITSDGQTVQRPFSIRNNCTGYNLMLEKIRKHTNIKSQIVFAMESTAHYWLALFTRLRKDGYHVILLNPIQTSAMRDMFIRKIKTDAKDSFIIAELIRFGRYAESNVAQDRLLALKELCRNRFYLVDMAGDLKRKLIALIDRVFPEYEAQFDTIFCKSSVALLKKYPTPQKLSNAHLDKLTELLWNSSNGHFGEWKARELRELARNSFGVEDCDGAYSTLILLMLDQIQSLSGKADALEKEISRLFQSFDTTVTTIPGVGPIIGAVILSEVGDISRFSSADKLAAYIGVDPSVNQSGEFQAVHAHMSKRGSPYLRRCIWMASQVAVQRDPMFRAYYEKKAAEWLKYMTIIGHVTRKMTAVVFAILRDHKVYEPVLPTAA

SEQ ID NO: 159274 - protein, 322 aa, unidentified
MEAQAKFVGIDVSKARLDVGVWPGAESFSLSNDERGIAQLVERVRRLAPQAVVLEATGGLESVAAGELLAAELKVAVVNPRQVREFARSLGRLAKTDRLDALVLAQFAQSADSNGRLASMRTLDPAQAELKALVARRRQLMQMLVAETNRRERAPKIIRKSVVQSIKGLKRAIAVVEQQVAEVIANSPVQRAKAKLLRAVPGVGPELTAGLLADLPELGELGRRAIASLVGVAPHAHESGSFHGRRMIWGGRAHVRTKLYMAALSAVRFNPLLRAHYDALLERGKARKLALVACMRKLLLILNAMLRDQQPWRPPLELQHSR

SEQ ID NO: 159275 - protein, 355 aa, unidentified
MLYLGIDQHARQITISLRDENGDVLMARQVSTKPEKIHEFFMKLTRERLQKGESFMAVLEVCGFNDWLIRMLRDYRCHKVILIQPYDRSNRKTDRRDAAALSELLWVNRSRLAEGKPVRGLRQVDIASTTDQENRRLTTLRRDAGRVRTGIINTIRHVLRRHNLQWEMPTKTFPTKPAIAWLKKLVLPEIDRLEMDHLLADLESIQQRLADLEQHIATRCASSDDAVLLSTIPGAGAFIATSLACRIGRVQRFPRAHSLANYWGLTPGCRNSGEHNQRLGSITKAGSTMARWLLAQMTYNVLRKDPRLREWFKRIKRRRGAKIARVAVMRKLATIMWHMLMERKTFAECRALAVT

SEQ ID NO: 159276 - protein, 346 aa, unidentified
MNNSLSSFDPCGIEVSARTLLVALGPQGRAASPREFPNTAEGHQAVLRFLEHSKRPARIVMESTGLYGLDLALCLDRAGLALMVANPRAARHFAQAMMKRSKTDRLDAEVLRQFAARMPFVAWRPPSAAAFKLVAVARRLEALTEMLAAEKNRLHAASLSEALPAIIRRDIQRSIQTQQRAIERLTRAAQEFVISDPELGRRYQLLLSIPGFATTSALHTLAELALLPAGMDVRQWVAYAGLDPRQHSSGSSVEKKPRISKAGNKHLRRALYMPALVAIVHEPRLRAFYDHLLARGKAKMQALVAVMRKLLHAIFGMFKHDQIFDGSKVYALVPATTPPLATQEVA

SEQ ID NO: 159277 - protein, 346 aa, unidentified
MTTLERARRVTGGVDTHLDVHVAAVLDDIGGLLGVEPFAASRAGYGQLLQWMNSFGIPARVGVEGTGAYGAGLARYLQAAGVEVIEVDRPNRQARRHHGKSDPADAVEAARAAHNGRVQAVAKSRNGKVEAIRTLVVAKRSARQARIKALNQIRHLSFTGPDELRARLAGLATARLAEQTAALRPRPGAEVVAYATRVALRTLGRRILALDEELAALNELLAELVAAAAPQLLAVHGVGVDTAAALLVAAGDNPERLRSEAAWAHLCGVAPLQASSGKVTRYRLDRGGDRQANQALWRIVMVRMSTDDRTRAYVERRTKDGRSKREIIRVLKRYVAREVYRLLSRP

SEQ ID NO: 159278 - protein, 252 aa, unidentified
MTSYIGVDVGKKSLHIYLPIADKSIEITNNQQGLAKLLSCCAEYYQHLSDIIIAFEPTGGYERELKEFLKLNKVNFVTVHPNKVRSYAKAKGWLAKTDIIDSKLLSEYSTVFSLPVKQDYNCKSQEDLHCFIQRREQLIAFKNQEIARLENHYNKVVIKSIKSHINQLDKQLIQVQKSIEELCNNDLAIKDKVSKLTSIPGVGIVAATTAICEIPQLGNIEFSQLTALVGIAPYARESGGYKGKRSIFAGPW

SEQ ID NO: 159279 - protein, 482 aa, unidentified
MKKRNIYQNQSQELLSLFEQAANNAKVMCVPIDYAKKDHVVMFCNGYGDILRKPFSVKNSPQGVDYLTDQVIRSCRQRAISEKHVFFGGEDVGSFADNFVSTLRCQGWLVAGVNAHEAKTQRENLQASTDRLDLMGIAKSLLNRRANCSPAQSGIYLNMRTVVRHRRKLVDIKTEVRNRIHTVVDRLFPGFLDESKSGITPFSKSSLWLMKERFSAGQIRRRRRSTFIEALRRLGTKKPECTADQLQQYATQVLKPPQDYVHMLQLSLAQHVKHFCCLQESIGQLEKEIALNLAQTQGAFLTSVRGIGIVLAAGVSAEIGNPYEQKPLNNLVSYCGIIPRVKQTGGPQGETKTGKVAKRCNRILKDYVVQSASHLGLHGPADLMSDYKRRDAAGQHADFGMARRYLRMAMCLMRTSQIYLPNGLRKAQAQMDERADYYLMNWPYLRDKWQKLGALETAFKADHPLGQWRKIVQQFYRIKLTL

SEQ ID NO: 159280 - protein, 415 aa, unidentified
MEVVVERCAGLDVHKDTVMACVRRPAGGSKRGHEVREFRTYTATLRELRVWLAAEGVTAVAMEATGVYWRPVWSALEDLDGVELLLVNAHHVKNLPGRKTDVNDAVWLAQLLECGLLRGSFVPSPVIARLRDLTRYRKKLIEDRAREVQRVQKALEIAGVKLDSVVSDVMGKAARRMLDALIVGERDVEVIAEMALTRMRPKIPELQLALESRFDDHNALMVSMHFAHIDHLSAAIERLDQEVERELSPFVEQLQRLCTMPGIGQRTAEVVIAEIGVDMSRFPTAGHLASWAGLCPGHHESAGKQRSGKARKGDATLRTALCEAAWSAAKTRDTYLAAQFRRFSRRFGKKSEGKAIFAVAHTMIVGIWWMLTNGVDYLELGGDYFEQRTDQAAQTRRLVRQLERLGHQVSLTPAA

SEQ ID NO: 159281 - protein, 356 aa, unidentified
MSRILAIDLGKFKSVSCLLDTKTNDTEFWTLSTDRQYLETLLKAYKPDLVVIESCAIAGWVHDVCKSKGYEVLICNPNQEAWKWKHVRRKTDRDDALKLAKLAALDQLIPVYMPCERQREFRRLVKYRTVITSRITRVKNNIRAIFNRRGMAMMSGSAAWALKALDQITQHRKPLGKCSRDELWRGELDLELSELERLGKQHAEVEKRLRRLATKDKRVQLLETIPGVGRKTAEVVVACLDDPHRFKNARQVSSYAGLVPRRYQSGLMDRQGKIHKRGSRLLRTALVEAAWIMQRYNPWAKSVYQRICANQKNRKKKAIVALARKLLVRCWAMLLHETPWNGELATAPTDATSGGK

SEQ ID NO: 159282 - protein, 437 aa, unidentified
MQENQQHSSVDVFVGVDVGKGHHHAVALDRRGKRLYNKALPNDEAKLRALITELKTHGQLLFVVDQPATIGALPVAVARDEGVLVAYLPGLAMRRIADLHAGEAKTDARDAAIIAEAARSMPHTLRSLRLADEPLAELTMLCGFDDDLAAQITQTSNRIRGLLTQIHPALERVLGPRLDHPAVLDLLERYPSPAELASASEKTLANRLTKLAPRMGKSLAADIVQALSEQAVIVPGTQAATIVMPRLAQQLASLRKQREEVASEVERLVHAHPLWPVLTSMPGVGVRTAARLLTEVAHKAFASAAHLAAYAGLAPVTRRSGSSIRGEHPSRRGNKVLKRALFLSAFAALRDPISRDYYARKVQQGKRHNQALIALARRRCDVLFAMLRDGTLYGSVAVRHCGRIRPPLQLHEDRNVEVEDVVAARNRQGTQAPSLSA

SEQ ID NO: 159283 - protein, 356 aa, unidentified
MVVIGTDVHKRSHTFVAVDAVGKQIGQLTVPATGKGHDKALRWAVHEFGTDLTWAIEDCRQLSARLERDLLTAGQRVVRVPPKMMAGQRRRARTRGKSDPIDAAAVARAFQSEPDLPVASHDDVSRELKLLVDRRETLIRQRTATINTLRWRLHELDPELELKNLDRGKSHRAAAAFLAGQRGIVAELARDELADVIALTERINTFQTRLERLTAQVAPELLKLPGCGPLSAAKLVGEAAGITRFATEARFARHAGIAPIPVWSGATEGRVRLTRSGNRQLNAAIHRIALTQIRQTTSTGGAYYQKKRDERMTKREALRCLKRHLARTVYQLMLTDHHNRTQPTTTTKTPEIKAAA

SEQ ID NO: 159284 - protein, 350 aa, unidentified
MGKLYHIGVDLHKKNLQVAVLNNAGEILDMRRLGNNDKEGLKEYFSSFPEETPVVVEATTGWEWLSDLLEEEELAVKLANPHKVKLIAEATIKTDKIDARTLAQLERANFLPLSYLAPREVRERRELLRHRMILVKLRTSLKSRIHSILNKKGIIVEERTDLFGKKGREILKEVELPEIYREETDTYLDLIDRLDEHIKEKEKQISKIVSEEELARLLMSIPGISYFSGLLILSEIGDIKRFNSAKKLCSYAGLAPTTSQSDEAVYHGQLKKDSNKYIKWVLIEAVEHIIKKDPQLAYKYEKVLSKKGKNKARVAVAQKLCISIYCMLKNRQPYKTRERKRNRILFRVSP

SEQ ID NO: 159285 - protein, 401 aa, unidentified
MGIDVAKSKHSAFFGTATGKTLRRGLVVENSESGFEHLMAHVQFYMGRDGFERVVFGVEPTLVYHKPLAKFLIKQDFMVVYVTNEAIKKNRSLLDGRWDKNDTKDAANVADLISQGKCHYYDFSDIALRDVRSLLALRRRLKKQEHGTRIRIRNNLVAQYFPELDRSWNKSETENLAIVRWCLAPEKIHRLEFENFFQMVTTRYRGNSQYQRLMKIWHMAPYSIGCEAGKALDVEAKILVEGLKHIREQIAEVEKTIENICSSFAEYGLLLTIPGFGPYISAVVLAAIGNPERFENASQGLRLAGLDLCANRSGKKSQAAVPVVSKKGKADLRYALYQAGLIASARNTRFMLYYQRVLKGREREKGIRTKMRVKLAAKLLVIAWTLMKKKVAFDQNYLIID

SEQ ID NO: 159286 - protein, 336 aa, unidentified
MKYKRIAIDTSKHVFTLHGVDELDRPILRRNLKRAEMEAFFGKLAPTEVVMEACGGAHHWARLLNHLGHQVRLIPAQYVRPFVKRAKNDRTDAAAINDAASRPDMPAVPVKSADQQANRMIFKHRELLIGQRTAAINALRGHATEFGIIAAKGVVQVTALLDKLASEEALPTAAKNMFAQMGEHISALDQQIDALDAELLALHKADPMSQLLAEVPGIGPISAITLALTIEPQHFASARHFAAWLGLTPKEHSTGGKPRLGKISKAGNERLRSLLVVGATAVIRHIKPGKSSAWLLALCARKPRKLAAVALANKTARIVWAMMVRGEAYRRQPIAA

SEQ ID NO: 159287 - protein, 420 aa, unidentified
MDVLLERCAGVDIGKDEVVACVRTPGPGGRGRRKETRTFLSFTGELEAMADWFAAEGVTDVVMEATGSYWKPVWYVLEERAFELKLVNAQHVKILPGRKSDVLDAEWLAELLEHGLLRGSFVPPAAIRELRDLTRYRKRLIQAHTSECQRIQKTLEDAGIKLDSVASDVLGVSGRAMLHALVVGERDPEVLAELAKGRLRKKIPELRQALRGRFRDHHALLIGLCLEHTAHLESAIATLDERVDGLFAINTSEGGVPFERARDRLDTIPGVGKRAAECIIAEIGVDMSRFPTAAHLASWSGMAPGNNITGGKRGSGKTTKGDVWLRDILTQCAWAAARTRDTYLSAQFWRLARRIGKKKAAIAVGHSILVISWHLLSNDCDYDDLGGDYFTRRNNPDKQRDRLIAQLQDLGYHVTLKKPA

SEQ ID NO: 159288 - protein, 403 aa, unidentified
MNMNAVGIDVSKGKSMVAILRPFGEIVSTPFEVKHTVSGIRSLIEHIKAIDGESRIVMEHTGRYYEPLVRELSQADLFVSAVNPKLIKDFGDNSLRKVKSDKADAVKIARYTLDSWTELRQYSLMDEIRNQLKTMNRQFDFYMKHKTAMKNNLIGVLDQTYPGANTYFDSPAREDGSQKWVDFASTYWHVDCVRKMSLNAFTCHYQNWCKRKKYNFSQSKAEEIYGKAKELVPVLPKDDLTKLIIRQAVDQLNSASTTVESLRTLMNETASKLPEYPIVMDMKGVGPSLGPQLMAEIGDVSRFTHKGAITAFAGVDPGVNESGSYEQKSVPTSKRGSGTLRKTLFQVMDALIKTKPQDDPVYLFMDKKRSQGKPYYVYMTAGANKFLRIYYGRVKEYLSSLPK

SEQ ID NO: 159289 - protein, 322 aa, unidentified
MQGKMTSVRATLAVYAGIDVCKAQLDVYLHPTGQSFRVPNSMEGLKRLALELTSANAVLIVMEATGKLHRLAHRKLSAAGFAVAIVNPYRSRKLADAFGQLAKTDAIDARMLALYGEAIGPGATPVPAKTLAELQELVLARQAAKAGETALKNQYGAAESPALKRLLKAQLDAQARLIQGLKAAIEAILSKDAALKRRFEILASIKGIGPIVAATLVACLSELGVLSGGKIALLAGVAPINCDSGEMRGQRHIKGGRAHVRSALYMAAVSAIRCNPDLKAFNSRLRAAGKAPKVALTAVMRKLVRLANTLIREDRLWTPKHA

SEQ ID NO: 159290 - protein, 373 aa, unidentified
MNYSTVYVGMDVHKETFSLCCYTNEKEQAEYPQKVDGHYSKVINYIEAMRFHYGNEALFICGYEAGCLGFTLYHQLTDHNVKCVILAPTTMLQQRGKKKVKTDKRDAALIARCLAHHDYSPVHIPTDEDEQTKEYIRMRDDHKLALKKVKQQILSFCLRHNYRFTGTGSHWTQAHLKWLRALEPEGLYKEILQEYLLTYDQLTDKIDRLDQRIEELASGNSYKENVRKLSCFLGVKTITALGVLTEVGDFKRFSSAQHFASYIGLTPGEDSSGDDQHRLGITKAGNRHVRSLLVEAAQCYTRGQVGFKSKELKRRQSGNSPEVIAYADKANERLRRRYYRMVLRNNKKTNVAKTAIARELACFMWGMITGNVA

SEQ ID NO: 159291 - protein, 352 aa, unidentified
MLVVGIDPHKHVHVAVAVDARGVRVGKPLTVKNDASQVAALLVWIRKVADDRLVTWAIEDGRGHARRLADGLLLAGQQVVWVPARLAAAHRRLHAATGAKSDPIDAAAVAHAAIAAPGLERHRIDERVRELRVLVDYRADLIKRRTMVINQLKAQVHIWLGLTPGDLTRPRNLNLLMAVISTAKLPGHVRQALTDMTSETVGLSQRVRQLDATIAELVSPLAPNLLQITGISYISAAVLIAEIGDITRFASSAKLARYAGCAPIPVYSADKQRHRLHRGGNRRVNSVLYTAAIVQKRFSPEAQDLLARHEPAKGARGARRILQRHLADVLYRAMTQDRACWQHEIIQNPTAA

SEQ ID NO: 159292 - protein, 457 aa, unidentified
MSQGKRSSRKRAMPPVHPHAAAIDIGATLHVAAVGPDRAPEPVRSFGTFTADLHRLADWFERCGVRTVAMESTGVYWIPAYEVLEQRGFAVVLVNARDAKHVPGRKTDVSDAEWLQRLHEHGLLRASFRPEARIAALRDYLRQRERLLDYAAAHIQHMQKALTQMNLQLQHVVADITGASGLRIIRAIVAGERDPAVLAALRDHRCKASEATIRQALVGNDREEHVFALAQALDLYDVYQAKVAACDARIAAVLDRLQADCPAPAAPLPAPRHQAQTANALAFPAREALHRILGVDLTRIHGLGPYLALKLVGECGTSLAAWPSAKHFTSWLCLAPSNKISGGKVLSSKTRRSNNRAAALLRLAAVAVGRTETALGAFYRRLSGRVGKAKAVTATARKIAVLFYNALRHGMAYADPGASYYEERYKRRVLANLRRRAKSLGYALQLTGSTPPVAEVS

SEQ ID NO: 159293 - protein, 370 aa, unidentified
MKDYSEVFVAFDVAKLKNAVAIAQDGRNGEVRYLGEIKSTEAATRKLVATLAAKHAKLTFCYEAGPTGYGLYRLIKSLGHDCIVVAPSLTPSKPGDRVKTNRRDAVGMARLLRAGELTAVWVPDERHEAMRELARARAVAQKDLRSKRQQISGSLLRMGRHYPGKKTWGRAHLNWLTSFKLEHLEQRIAFEELMEAMRQAKERSERLEQAIREVIPDWSLAQQVVALQAMRGIDLITAVGVLAEIGDLSRFESPRQLMAYLGLVPSERSTGDRVRRGSITKAGNTRARRLLIESAWSYRHPARVSKDKQAKVEAAPRAVREIAWKAQTRLCGRFRSLTRNGKKSTIVATAIARELSAFIWAINREVAATQ

SEQ ID NO: 159294 - protein, 342 aa, unidentified
MNLPIRIGMDTSKSVFQLHGVDENEVVIVRRQFRRAEMIRYFERLPPVLVAIESCGSSHHWARLLQSFGHEVKLIPPQYVKAYVKRGKNDAADAEALCEAVTRPSMRFVPVKSKERQAACMLMTVRERLVSVKSQLSNAFRSYAAEFGIVGPAGRQNVTALIKRVLEDESLPEMARDLFRLQAEEYAAVQARLAKIEAKLMKWHREDDISRRIATIPGIGPIGSSMLSMKAPPPETFRSGRDFAAWLGLTPKDHSTGGRQRLGGITKAGDSVLRSTLIVGATALLRHVRKGRHKPTPWLASLLERKPPKLVAVALANKFARIAWRLMISGGVYNQPVAAMPT

SEQ ID NO: 159295 - protein, 359 aa, unidentified
MTATMTYVGLDVHARSTHAAALDVVSGELRRGRFGGSSEEVIGWLQALPQPVRGCYEAGPSGFALYRAAAASGLRLDVVAPSKTPRAPGDRIKSDRKDAELLARLLLAGQLKPIAVPPAAFEAARHLARAREQVRLDLMRCRHRVSKLLLLHGRVYERSAWTKTHRRWLEQQRFDEPASELAYLDCLAAVDGLAARKAALEERLSRLAREGEWWPTVARLRCFRGIDTLSAFVLCLEIGDWRRFPRPAKLVGWLGLVPSLDQSGESRRQGAITKSGSGYARRLLVEAAWHYLARPSVGVALAERRAGQPEHVLQIALRAQRRLHRLQMRLRARGKPANVSTVAVARELACFLWAAAVAD

SEQ ID NO: 159296 - protein, 343 aa, unidentified
MQEVTTIGLDIAKSVFQVHGVDAAGNVIIRRQLKRRYVVAFFEKLPPCLVGIEACATSHHWSRELQALGHRVRLMPPAYVKPYVKRQKNDAADAEAICEAVTRANMRFVETKTSEQQSCLMLHRTRHLFIRQQTAVINSIRAHLAEFGIVARVGRNGVEDLLDVVADSGDQRVPELARACLTVLGAQLRMLKAQILEFDRRIMAWHRSNATSKRLDEIPGVGPALATALVGSVADPTAFRSARHFSAWVGLVPRQHSSGGKDKLGSISKQGDRYLRSLFTTGALAVIRYAKIHGTKHRPWLAALLARRPTKVAAIALANKIARMAWAMMIKGERYKEPAALAA

SEQ ID NO: 159297 - protein, 403 aa, unidentified
MQLFAGCDWGGEAHAVSVIDEGGAVRWKGTVGHDAEGLAKMVRQLAKLGTPADLPIAIERPTGLLVDTLVEAGHPIVPLHPNVVKACRPRYRAAGGKDDLGDSYMLADILRTDGHRFARLLPQSDAIRALRALVRTRDDLVGERVAMANQLSALLESCWPGAVAIFADIDSPIALAFVRRYPTAASAERLGEKRLASFLAQHSYCGRRTAAELLQRLRAAPLPRIGELEAEAKGQLAAMLASILEQLVAKLLELTARVEHEVAELPEGRIVMSLPRSGRVNAAQILAELGDQRARFDSAEHLAAEAGVVPVTYASGKQRGVVFRWACNHRLRSAITTFADNSRHASPWAAGVYRRARARGCDHPHASRVLARAWVRVLFRMWQAAEPYDPARHPAAAALAATA

SEQ ID NO: 159298 - protein, 315 aa, unidentified
MQVGKLIVGADVAKAELVIHHDDRDEIIKVKNTKPEIKKWLKQQPLNTAIAVEATNVYHLDLVELAHSLGFEVYVIDGFQLSNYRKSVGVRVKTDPTDARLLSRFLKNEGEDLRPWTPPPAVYGKLQSLLRRRAALVTARTAMTQSWANEALLKAAFTAFVKSIDRLDLLIQKKIKEVLREAGLHEQVARCQAVEGIGFLTATALVMAFMRGEFKSSDSYIAFLGMDLRVIDSGQKNGRRRLTKRGCSEIRRLLHNAAMSASRTATWKGIYEQHRNAGKATTQALVILARKLARVAFALMKNQDEYASKGGKPAC

SEQ ID NO: 159299 - protein, 369 aa, unidentified
MSESTMYVGLDVHKESIEIALAPYDGGEVRHYGRIAGDLEAVDKVILRLRKSHSKLDFVYEAGPCGYALHRHLTRKGYACAVVAPSMIPKCSGDRIKTDRRDAIMLARLHRAGELTAVFVPRAEDEAVRDLTRSREDAVANHRRARQQLGALLLRQNIRYTGKSAWTKAHQRWLSEVVMPQPTQQIVFQEYLNATRETDERVERINTQLKAAVEGWRMAPVVTAMQALRGVSLNVAATTVAELGDIARFDNPRQLMAFLGLVPSQYSSGPRVKMGHITKTGNGHARRMLVEAAWAYHFPAKVARTLQLRQEDQPQAVREIAWKAQLRLCRRYQRLTAKGKTRQVVITAIARELVGFMWAIAREVKPTAA

SEQ ID NO: 159300 - protein, 340 aa, unidentified
MDVMIGIDPHKATHTAVAVGDGEIELDRVQIRSGRGQLDRLLAWAEPYAPRRWAIEGAEGLGFLLAQQLVAADQLVVDVPATLAARTRLLGNGRTNKNDPNDALSVAMTALRHRELRTVTTAGYSELLRLLAKRHIDLSNQRSRLVARLHALATELSPGGIAKRLNSTDAAKFLADITPTDAVAQLRWDLIAELADDIARIEAQSKRSERRIRDAVAASHTTVTDIYGIGPVIAAMLIGNTGDIARFANRDRYAAYNGTAPVEFSSGGRIVHRVSERGNRTLNHALHLAAMCQLRQRHSEGRAYFDRRVAEGKTNKEAIRALKRQISNIVYRHLTNDAAH

SEQ ID NO: 159301 - protein, 361 aa, unidentified
MKKPTQHLIAEVPRRSSKVGMTIGIDLGDVWSHYCTLNEDGEVVDRGRFRTSPSGVEKWFTDLPPVRIAMEAGTHSIWVSEQLQELGHEVIVANVRELRAISHSDRKSDQVDAEKLARYARLDPKILRPIAHRTVAQQEALTLIRARNLIVRLRTAAVNAVRGLAKPCGYRLPASSTLCFAKRCVAVLPPGLAQALGPVLEQIAEMTKKIKHYDRLIKRLTETEYPETQALIQVYGVGQLTALTYVLTLGSKERFQRSRDVGCYLGLRPKRSQSGDRDPQLGITKAGNIYLRTLLVECANHVLGPHGRDSTLRQWGLHLASRGGKQSRNRAIVAVARKLAVLLHRIWITQEPYIPFYQVAA

SEQ ID NO: 159302 - protein, 341 aa, unidentified
MGVDTHKDTHVAAVVSVRGALLEHRSFPTTGTGYRQLLAWAQSFGVLRRAGVEGTSSYGTALTRHLQAAGIQVIEVNQPDKADRRRRGKTDAIDAEAAARAVLSGRATALAKTGDGPVEMVRMFKMAKDSAVKSRTQAINQLKAVLVRADPALRESLTGLSNPRLIRRCADLDPSGNTTSTRSAAAYTLRTLARRILCLAEEIDDLNNQITSTITTCCPALLDCYGVGPDTAATLLITAGDNPKRLHNEASFAALCGSSPIDASSEKTQRHRLNRGGDRQANSALYTIVIARLRWNTRTQNYIARRQTEGKTRREAIRCLKRYVAREIFNIITRASSPTTA

SEQ ID NO: 159303 - protein, 397 aa, unidentified
MMDTAVYLGVDIGKSGHYALAVDAAGKPIYQTAVPNDEAALHKLVKWAHQHQAGLVVDQPGGAAALLLRLCWQSEVRIGYLHGLAMARARDFYAGESKTDPKDAFVLADVARAHPNRIVWLESSSEALAHLELLCGYDADLRGDANRLTNRLRALLVTHWPALERAFGERLDSHGVLAVLQQYPSGPAVRDAGVEQLTAALKAQRVRRPETFAKQLHRAALAQTVTITGSQTAARLISELAGQLTAILARRAELEKDIEQGFFALPEAAILRSLPGIGPRLGARIAVEIGSICRFRTPGHLAAYAGLGPTPWKSGTSINANRPSRFGNHRLKNALFLAAFASLRHEPSRTYYDRKRAQGKRHNQAILCLARRRVDVLHAMLSRGEHYRAPTPLPTAA

SEQ ID NO: 159304 - protein, 390 aa, unidentified
MLLLGIDIAKLNHVASLVDSSSGELIFSNFKFQNNILGFSSLLEKISKFSINEIVIGLESTGHYGENFINFFFQKGFRIAVINPLQTSHLRKANIRDSKNDRLDSINIARALLFGEHRYISQKNLTNFALKKLTRFRKSLIKQKTKTKIQLVSLLDIIFPELQYFFKSGVHSNAVYTLLKKYPSTEKIAALREKSLFSILNKASKGHYKEEHALQLKSLAKSSVGIKDTSVSMHIPQLIELIEMLDSQIKSIEKEINSSVGEESPILTIPGINTVAAASILGEINDIDNFDSSSKLLAFSGLDPKIRQSGNFSASSCRMSKKGSSYLRYALIFTAWNLVRNSETFNRYYLSKRAQGKSHYNALGHTAHKLVRVVYTLLKKNISYQENLIV

SEQ ID NO: 159305 - protein, 425 aa, unidentified
MRVTQNDKIMQMKIDTMIVGIDVGKETHYAKAIDIRGVELGRLLRFSNDAEGYASLDKWMNEIMKRTEKTEAIVGFEPTGHYWFTLADHLKGRGHKLAIVNPYHVKCTKELDDNSPTKNDLKDPKTIAMLVKDGRYRDVYIPEELYQELREAVWEYERLKRRKKDIKNQVTRWLDIRFPEFEKVFSAWDGKAARIILKKCPTPARVVEAGTEGIMNIWLEQGVKGASRKKANGIVEAAQKSIGRTIGLVAAEKSLRNMLTEYEMIEKQLEEQEKQMGELLRQVPNTEYLLGMKGMGMVSTAIIVSEIGDIRRFQAARQIIKMSGLNLSENSSGKHKGQTKISKRGRKRLRTALFRIVIPLIANNEEFRMLHHRYVSREKNPLKKMQSIIALCCKLIRIIYAILTKGIEYDRNEVLRGIKPRVKAA

SEQ ID NO: 159306 - protein, 391 aa, unidentified
MVCVGIDVAKDKHDCCILDSDGMVRAECFTIPNNMDGFKQLLQTIRNCTKKSDKIKVGLEATGHYSYNILGFLLDNGLPTYVINPLHTNLYRKSLSLRKTKTDRVDARTIATMLLSDVDLKSYTDIAYHNEELKSLTRYRFDKVQERAKLKQSVSRLATILFPELEGLVSSIHGTSIYALLSEYPGTKQISEVHLTKLTNLLTTASKGRYGKEKAIQIREAARASIGSVMPAKSLELKHTIKLIQELASEINEIEDSIQKIIDELNPPILSIPGMGVNSAAVILAEIGDFSNFSSPDKILAYAGCSPSTYQSGKLTNCYAHMEKRGSRYLRHALYNATKYVCYWNPVFAEYLAKKRAEGKHYNVALSHAMKKLVRLIYALQKSGKAYLAAA

SEQ ID NO: 159307 - protein, 344 aa, unidentified
MSTFAALDVSQEATAVCVVDENGRILAERKIPTCPAALSSFLARHAPGLERAGIETGPLAVWLWNELHDRGLPIICIDARHANAALKLRPNKTDRNDAAGLAQIVRTGWFKQVRIKSRISYELRSLLTAREVLVRSRVKIENEIRGLLRTFGVLFGKASKGFASRVDQIVASELDASPMMRTIIGSLAKARAALLDNIKELDRQVLHTARGDATARLFMSVPGVGPITALSVASVFDDASRFKRSSSAGAYLGLTPRRYESGEMSLSGRISKQGNKMTRKHLYEAATTMLTRTTSFCTLKAWGLRLAKRVGLKKARVGLARKLAVVLHAMWKTNAPFRWGAVAA

SEQ ID NO: 159308 - protein, 418 aa, unidentified
MGIDWGSQQHQLCVLDDVGQVVRECAVPHRAAGLRQLVDWLRELTAGDLRRVAVAIETPRGAVVEALVDAGAHVYHLNPKQLDRFRDRHSVAGAKDDRRDAFVLACSLRTDLPCFRRIDPEDPLIVELREASRLDSRLLAQHTALANQLGAQLHRYWPQLLELAPGADEPWLWDLLARAAHPYSARRLTQAKLAKLLREHRIRRFDAEQLVAVLRQPPLPVAAGTLEAATMNIELLVPQLQLICRQRRQTAARLKRLLAQLSAAATADPEQPPQHRDAEILLSMPGVGKLVAATVLGEAAGPIARRDYQLLRALTGIAPVTRASGKSRHVAMRRACNQRLRNAVYHWALNSLQNDDASHLRYQALRHRGKTHGHALRLLADGHLRTLTAMLRDGTLHRSRNLVAPPSPTATQDEHVAA

SEQ ID NO: 159309 - protein, 394 aa, unidentified
MKRIVAHVFGDRSRKILDKLRTLLSPFKVRFYCTNDYAVYDCLSEEEHLTGKMFTQRIERTNLTHRTRLKRLNRKTIGYSKSEEIMGWTPHLSGISVPKWKCIQHSQLITGASTMRITTVGIDLAKNVFQVHGVDAQGKTVLKKPLPRAKMLTFFVNLPPCLIGLEACGGAHYWARKLQGFGHEVKLIAPQFVKPYVKTNKNDAADAEAICEAVTRPNMRFVPIKTEEQQSILSVHRAREGFVKARTAQANAIRGFLGEFGIVIAQGIKQIAVRLPEILEDASHCLPETFRQLLQRLGEHLKELDRQVAELEQEIQRWHRGNADSRRLLAIPGIGPITASALVASIGDARHFANGRQLAAWLGLVPRQSRSDGKTGRTVIRKLWCHASAYSASK

SEQ ID NO: 159310 - protein, 582 aa, unidentified
MPSIEVQPNVSPAVPVAVGIDTARYGHSAHFLREDRQPAIKPLDFTESSEGYAKLRAAFEKIVAREPRAHFHIRVDAAGQYATNLERFLRGLPWPKTLSIGEPERNKRYRQALFPKRKADATDSLANARFAIAERPPETPDVPAEFYQLREVVSRLEAQVRQTTRVVNQLHNLLSRVFPELATIVSDLAAGYVLTLVDKYPTAQKIAQAKPASLTAIPHLTAKKADEIQKAAKDSVASLRGSVPEALVTQLVAQIKASLAAEKSLEKLTLQAYQALPPGPHRQVETIKGIGPATAAVIVAKVVSIDRFETAADLVGYFGVFPEESSSGVDKRGKPCAPGTMEMSRRGNDLVRRYLYMACWSACKFNPAIRPLYARQMAHGKRGDVALGHCMRKMLHLVFAVWKTDRPFDPNHYPWEKAGTQEKKDENAAGHNRDMPEKQVVTAADSKVDEAQPAVNAPLTNEAPSCRAAPVQKDERVDFKALRQHVTMEQILSHLDCLADLRGAAAQRRGRCPIHADAGDRRRSFSVNLEKNVFQCFDPACGMKGNVLDLWAAVHRMPLHEAALHLAKTFQLDKGTEEKRNP

SEQ ID NO: 159311 - protein, 346 aa, unidentified
MKINRVGVDLAKNVFQLHGADYKGKTVWKRQLSRSKWLPVLCDTVEPGTEIGMEACAGAHHWARQLMQRGYPVKIIPPQFVKPFIKSNKNDANDAQAICEAMGRPNMHPVKVKTVAQQDLQAMHRIRDEIKSHRIAKANQIRGLVTEYGLVAPQQLPALRKAIPDWLEDAENGLSFLFRQLLQGLWGDLYALDQRMTELDKQIAVIAQEDPTARRLQQLRGVGPLIATALVATVGDARQYRKGRDMAAALGLTPRQHSSGGKDRLLGISKRGDAYLRCLLVHGARSAVRTAKDKDDRLSRWITNLQARRHSNVVAVALANKMARMAWAMMTSGVDYDPDLAAASVN

SEQ ID NO: 159312 - protein, 434 aa, unidentified
MLRPKDKACGADIHKKTVVATILSADGTKVEGEFGTTVPELIRFKEWLKENDCNSVAVESTGTFWQPIYSVLEGSVEVIVANPYMIKHMPGRKTDKVDSNWIAQLCLKGMIEPSRIFPKADRELRRLTRARESLGKIRTQFKNSIHKDLDSSHIKLSSVISDIFGKSGMHIIRGLLDGQSLGAIIEGIPSGRVRKKADQIKEAVHNNLELTQVILIESSLSLIRSVEQQIDMIESEVASRIVSRQEDLEIARSIPGIDFISGATVLAEIGNYRDFSSPEKMAAYFGIVPSVSQSAGTLHTGRITKHGSKHMRWILVQIANAASKKIGSKLRRFYLRIKAKSGHNVAIVALARKILCLLHHLLMNREKYVEDDGSKKSKSKKNYRTSSPRVMDIQEMIDVIRQSGYEVQKVDTSGGAGLKRRRNSERNLKRGACG

SEQ ID NO: 159313 - protein, 331 aa, unidentified
MFPVGIDVSKNTLDLCILYDGIKGRIKTRNIQNNRHSVENILRWLRLQHCGPEDVHVVMEATGVYHERLATELHDAGFRVSLANPHRSREFARGMGIMTKTDKVDAYMLACYAFLKKPHHWEPPSPEIRYLAALLRRRDVLLGDALREENRLEKYLSTDTPADIISSCRRMAQLLREEVSNIERQIKAHIKASPALRRDYTLLNSIKSVGPQLGMHMLVELRSHNFASAEQAAAFLGVVPIEKRSGTSVRSRPRMSKIGPPQLRARLYMSALCGKIYNKRMRNIYDEMCLRGKPKMVAIGALMRKLVHWCYGVLKTGTVFNDEDLKPVLST

SEQ ID NO: 159314 - protein, 339 aa, unidentified
MNLVMGCDPHLDTITVAVIHPSGRPLLQAAVPNSKAGWSQTLRWALTHRVATVGIEAASGYGQNLARTLTQAGISVVEIPTRVTVTWRHTEGDHKTDPGDARAIARATSAGRGHQWADTPQLEALRAVVAHRRSLTQTQNRETNQLRALLTELDPQRAATLNRLRTIRSLTPFTRIRYQTSIRTQTISHLIRQLATTLITRRRNIDQLTRSLHHLLPPQAHQLIAHTNGLGTIGAATLFAELAGTAGFTTDARFAAWAGVAPLDASSGRQQRHRLNRGGNRQVNAVIHTIVITQLRHHGPAATYITRRLTEGKTRKEAIRACKRHIARTLWKQLNNPTN

SEQ ID NO: 159315 - protein, 348 aa, unidentified
MRFYTKQHKYYCGIDLHARSMYVCILDGGGNNLLHRQLKCSPDAFLGAIAPYREGIVVAVECIFTWYWLADLCAREGIPFVLGHALYMKAIHGGKTKNDRIDSHKIAVLLRGGMLPMAYVYPQEMRATRDLLRRRMYFMRSRSELLAHIQNTNSQYNLPEFGKKIAYRANRTGVAEAFADPHVQKTIAVDLQSLDFYDQLLTDLELHIAKTAKEHDPHSFYLLRSIPGVGKILALVLLYEIHDIARFPRVQDFVSYARLVRCPKESAGKRTGSGNKKIGNVHLKWAFSEAACLFLRNNEPAQRYHARLVSKHGKAKALGIIAHKLGRAVYYMLRRREAFDPTRALCPA

SEQ ID NO: 159316 - protein, 343 aa, unidentified
MDHFAGLDVSVKETSVCIVDDTGKIVREVKVASEPEALLAVLTNPACHFKRIGLEAGPLSQWLFSALAEAGLAVICVETRHMRAVLKAQINKTDRNDARGISQMMRVGLYRPVHVKTLRSQKLRMLLTHRKLLQSKAIAIENDLRATLRNFGLKVGVVGTVKFEARIKELVEDLPDLVVLVEPLLIVRRVLREQIGILHRRLLAIVRDDDVCRRLMTVPGVGPVVALTYRATVDVPSRFRNSKAVGAVFGLTPSKHQSGESNRTGGISRCGDEMMRMMLYEAAHVMLVRSTKWSWLKAWAMQIARRRGVKKAIVALARRLAVIMHRIWVDGTEFRWTREGAAA

SEQ ID NO: 159317 - protein, 391 aa, unidentified
MVCVGIDVAKDKHDCCILDSDGTVRADCFTIPNNMDGFKQLLQTIRDCTKKSDKIKVGLEATGHYSYNILGFLLDNGLPTYVINPLHTNLYRKSLSLRKTKTDRVDARTIATMLLSDVDLKSYTDIAYHNEDLKSLTRYRFDKVQERAKLKQSVSRLATILFPELEQLVSSIHGTSIYALLGEYPGAKQISEVHLTKLTNLLTTASKGRYGKEKAIRIREAARTSIGSVMPAKSLELKHTIKLIQELASEINEIEDSIQKIIDELNPPILSIPGMGVNSAAVILAEIGDFSNFSSPDKILAYAGCSPSTYQSGKLTNCYAHMEKRGSRYLRHALYNATKYVCYWNPVFAEYLAKKRAEGKHYNVALSHAMKKLVRLIYALQKSGKAYLAAA

SEQ ID NO: 159318 - protein, 344 aa, unidentified
MNQIIRIGMDTSKHIFQLHGVDAAEQVGLRRKLRRHQMLEFFAKLPPTVIGIEACGAAHYWARELRKLGHEVKLIAPQHVKAYVKRNKNDGRDAEGLCEAMSRPTMQFVPVKTEEQQAVLMLAGVRQQLIVRRTQLGNAIRGYAAEFGLITAKGLDKIEPLLARIAQDNTAPAMARELLAFQGRDYARLQTELKAIEARLMAWHRANATSRRLAQIPGVGPIGATALVMKAPNPRLFRSGRHFAAWIGLTPKDHSTAGKTRLGKITRAGDEMLRSVLVAGATAVIQQAMRGRGHPSPWLIALLKRKPPKLAAVALANKIARIAWKLMVTGESYDGARMLGAIAA

SEQ ID NO: 159319 - protein, 340 aa, unidentified
MNSRTIGLDIAKTIFHQVCLDQHGKQVSRKKLRRGQLLAYFANLSACTIAMEGCASSYYWQRELTILGHRVKLLPAQHVKAHLRGNKNDYNDALAIAEASRVPGLREVTPKTIEQQSMQALHRLRESTIGDRTALSNQLRGLLAEFGIIFNQGIATLRKSLPAVLEDAENGLTPTFRDALALKYRQLCELEQQKKDLGKLIDQASEPHKEIELLHSIPGYGPILSSSYYSVVGDGKAFAKGRHVASSVGVVPRQHSTGGKVVLLGISKRGDPYLRKMLINGARSVVNHAHKKDDALNVWVTRLVEKKGKNKATVALANKLARIAWAVIVSGKPYEENHAV

SEQ ID NO: 159320 - protein, 386 aa, unidentified
MHASNARTPITGHNGTIFVSIELSQKGWLVTVHSPDRDRMSRYKVEAGDHAGLLSLISRVRDRAARVLGATPSVVSCYEAGYDGFWLHRFLQAHGIENYVFDPASIAVEQRSRRAKSDRIDGEQLVRTLMAYLRGEPRVVRIVRVPSPDQEDARRVSRERDRLIGEQTGHTNRIGSLLKLHGFEVGNPRRRDWLKRLAEQRDWQGQPLPPQILAEIEREHTRLMLVREQLAALEKAPAQVPTTPAAVEIGRRQETLFRLKSLGPAFTTSLTCEVFYKDFTNGRQVGSYVGLAPSPWKSGGIDREQGISKAGNPRARRKAIELAWLWVRHQPDSALTLWFRERTRNANKRNKRTAIVALARKLMVALWRFVTTGLVPTGAKLKPVTA

SEQ ID NO: 159321 - protein, 407 aa, unidentified
MELSALYKCVIGLDVHQAQITACALIQQPDGSTRIEQRQFGGFARDRRELADWAASLHPDEVVMESTGIYWKSPYAALEAVGIRAKVVNARHVKHVPGRKTDVGDAHWLAMLARAGLLRASFVPPAALRELRLIARQRQKLVGQLASEKNRLHKVLTDSGIRLGVVVSDLHGQSARAMVKAIIAGQAPQQVINLASRRLKASREEIFDALQGDLTASHRFVLDELMQHIEEIEARIDRFDVRLLAGLESERGTLALLQTIPGVDLIGAAMLLVEIGSDMGAFGSADRLASWVGVCPGNNESAGKRKSGHTRKGNPYVRRLLCEFAHAASRTTSVFKSKFQALVVRRGYKRAIIAIGHKILRTLFFMLKRREHYRDCATDYEALSVQRNAPRWIKALTKFGFITPASA

SEQ ID NO: 159322 - protein, 349 aa, unidentified
MEKIIKQCYGIDISKLDFSVCLSSKLSSGAILYSKVVKFTNNQQGFNQLLKWSRKIGTTSISTNFVMEATGVYYEALAYHLSKLKKEVSVLLPNKVKHFAKSLNIISKNDLIDARILSQLGIERQLMLWKPAPLMFKHLRDLTRLCNDLKQERTVFINRNESVLSGVNVHSLIKKTNDKILRMLGRQIEKCEQEITCVLNSENWLKEKVNKLLTIKGVGLTTIAVVLAETQGFSLIKNRKQLASYAGYDIVERQSGTSVKGQTRISKKGNTRIRACMHFPALVASRFNNDLKQDYQRIIENKASKMIGVTAIQRKLLLLMYTLWKKDEIYLEPEQRTSGNHETKLLLRN

SEQ ID NO: 159323 - protein, 361 aa, unidentified
MNATTVAVDLAKSVFQLAVSDAHWRVVETQRLTRTQFERWFLNRDVNLVVMEACGSAHHWAHWLNGLGIEVRLLPAQYIRAYVKRNKTDATDAAALLEAARCADIRPVRVKSVEQQALQGMHRIRSLWMGTRTSRINALRGFCREFGIAIPVGARTGVEAISRVLADPNTAVPELIRGTAKLLVEEIHLLEARIAQLERELARLAKLSPACNTLLSIPGIGLLTATALVAATSGDVSHFQDARHFSSWFGLTPKEYSSGNSRYLGRISKKGDRYLRMLLTHGARSVLRSAKVAEGAGKEVCGVRRWALDVQSRSNHNKAACALANKLARICYATLRDKEPFGEHTVRLNKKVNRESFVMPA

SEQ ID NO: 159324 - protein, 363 aa, unidentified
MFESTTVTVGLDVHARSVRLAAVRADELLEERTLPYDEEAVERVLRRWPAVRCCYEAGPTGFGLYRYLVERGIDCLVVAPGLVPQRPGDRVKTDSRDARKLARLLAGGLLEAIHVPSRELEAARDLVRAREDARLDRMRDRHRLSKFCLRHGRTLPTSSWTIVRRRWLGEQRFEFPAQQQTFDSYVHTVDLVDARIEALERAIREAAEQGPWCQLVARLRCLRGIDTLTALGLAAEIGDFNRFKSAEEFMAFVGLVPSERSSGEQRRQGSITKVGNSHVRRLLVESAWHARRHPKVGYELARRQRVQDAVVIERAWRCQQRLYQRWQRMAGRGKPQQKIVVACARELAGFVWAIATEQPLRTI

SEQ ID NO: 159325 - protein, 394 aa, unidentified
MQHYVGIDNSSLDHKIRIIDENGNKSLKFTISNSYEGFVDLSTKLSVFKNISIGFELPHGPLVDYLHMNDYHLYSLNPLKVKRYKESIKVSGDKNDDIDAHAIAEYLKNNTAYTRELIYNSSEIERLKNLSIIHTRLTNDRVRHINKLHFAIRQYFPLQEDLFGDFGCKVQLKMIIKYPTFDKLKAATENEIKEFLISNKYRRSVYINRVIERIKNYRQLISPDVEYAYQFEAKCLCGIIQVLDEELKKVEKEMNNLNDSHHLGKYFKSLPGAGDVLACKLLALFGDNKNRFDSSNGVQCLFGTAPRNYQSGMYHKVLMRKACNKSARAVLYKFAFATLQSSKWAREYYDKQKSKGKTHSVALRALSNKWVKVIYKIWKDEIFYCETEKISSAA

SEQ ID NO: 159326 - protein, 317 aa, unidentified
MQTILHNCCGLDVHKDSIYACILKTVNHSDDNRKKEETEKEIRVFETFPDDLKELREWLESKDCRHVAMESTGIYWYPIYDVLETAFEGNMEILVVNARHMRNVPGKKTDVKDCEWIAQLLRAGLLNGSFIPPMQVRELRQQTRYRKNIVQDICTQKNRIEKTLQIGGIKLSTFLTDIFGVSGRNLMNVLIKKGCLTPEDVETETRCISKEKKAEIKRAVNGRLTMVQRNFLKSQLSHLDEIYAHLTEVEESIAELSEPLHDDIERLDTIPGIADTAAKAIIAEVGTDMSKFPTAEHFCSWAGLAPGSNMSAGKKKL

SEQ ID NO: 159327 - protein, 347 aa, unidentified
MTTLARSVTGGVDTHLDVHVAAALDEKGTLLGVEYFETTRAGYKKLLAWFENFGPVVLVGVEGTSSYGAGLTRHLHAEGVAVVEVDRPNRQRRRRKGKSDPEDAISAARAAFSGDASGAAKTQDGNVEAIRVIRLARLSARRSRTLALNQMRSLISTAPDPVRDELRHLSVPRMLERAASYRPGTKTDLVSLTKWTLRTLARRAIALENEIKSLDDILKPLVVETAPKLVSALGIGTDSAAALLVAAGDNPHRLRSEAAFAHLCGTSPIDASSGKHQRHRLNRTGDRQANSALWHIVITRMVYDARTTAYIERRMKEGLTKKEAFRCLKRYIAREVYGLLPMDRLTA

SEQ ID NO: 159328 - protein, 349 aa, unidentified
MTEQRRSYAGECVYVGVDVHKETYTVTCVCHKQIVKTATIQAEPAGLAASLPRWFPGATLYSVYEAGFSAFVLHRALTKAGITNIVVNPASVAVAANDKVKTDRRDSKKLAIDLADGRLRGIYVPTEAEELARLLPRTRAQIVEHRATIARQIKAKLHQFGLITPSSRRLISNRYLREIAAWSLPPELSVSLTLLAEQWRFATRQLIEMRRLLRDQAKAQEEIEKVYRSVPGIGEVVARTLATELGDMTRFANERALFSYTGLTPSEHSSGTAVRRGPISRQGSSRVRHLLVETAWRAIPRDKALKEIFDRIAATRGKKRAIVAIARRLTGRIRACFRQGTTYAVGTSA

SEQ ID NO: 159329 - protein, 319 aa, unidentified
MKIFTDRHRYYCGVDLHARSMYLCILDDDGQVKLHKNMEAKPDPFLAAIDPFIDHVVVGVECIFTWYWLADLCAEQDIPFILGHAFYMKAIHGGKAKNDRIDSRKIAALMRGGTFPMAYVYPAEMRATRDLLRRRNYLNRKRADLLGHIQNTNSQYNMDPFPERITYKKHRAHIAEQFIDPDIRASIEADLSLIDHFERVKQKLELHIIHNAKEHDPQAIYRLQSIPGVGPILSLVILYEIGHIDRFPRVQDFASYARLVKCAKESAGKRFGNSGSKIGNAHLKWAFSEAAVLFLRNNPEGMKYRIHLREQVRVEATPR

SEQ ID NO: 159330 - protein, 404 aa, unidentified
MTAVPDVIWVGIDAGKTSHHAAAIDAGGGVLWSVKVSNGQRQIEELIARAGRSGGAVRWAVDLVSPMASLLLAVLLTSGQDVVYVPGRMAARMAEALGGEGKTDAKDARVIADIARVRRDLAPVTADDELVVELARLTSWRADLMADWVRGVNRLRELLGSIFPALERSFDYTTRSALILVTGFCTPAEVRQAGQAGLTGYLREHAAWPKGISAMATTTVQAAAGQTMALPGEATTATLVKQLARKLLDLDREIKDTDKLITSRFRGHPQAAIIESLPGMGPILGAEFLVATGGNAQAAFGSPGRLASYAGLVPVPKDSGRVSGNWRRPRRYNRALRRVFFMAALSSLRTDGPSKAFYQRKRAEHRIHTQALLALARRLVDVLWALLRDNRTFSPAPPVSAAAA

SEQ ID NO: 159331 - protein, 402 aa, unidentified
MNAVGIDVSKGKSMVAIMRPFGEIVSTPFEIKHTASDIHSLVELINSVEGESRIVMEHTGRYYEVLAHQLSEANLFVSAINPKLIKDFDNDSLRKVKSDKADAVKIARYTLDKWQNLKQYNVMDELRNQLKTMNRQFGFYMKHKTAMKNNLIGILDQTYPGVNTYFDSPARSDGSQKWVDFASTYWHVDCVRKMSLNAFIDHYQNWCKRKKYNFSQSKAEEIYGKAKELVPVLPKDAITKLIIKQAVDQLNSASTTVESLRTLMNETASKLPEYPVVMAMKGVGTSLGPQLMAEIGDVSRFTHKSAITAFAGVDPGVNESGSYEQKSVPTSKRGSSDLRKTLFQVMDVLIKTHPQDDPVYQFLDKKRAQGKPYYVYMTAGANKFLRIYYGRVKEYLSSLPES

SEQ ID NO: 159332 - protein, 338 aa, unidentified
MTQHKIIGIDLAKNIFFLVEINHKGKNLSRKKLQRSKLLNYVANQTPSIIAMEACSGAHYWAREFEKFGHDVLLYPPQHVKNQRRKQKNDYNDAEAIAELALYQRAYPVRHKSIEQQDIQSLIRMRRLCVTERTRLINQVRGLVAEYGIIIPKGKASFRQTIPEILEDVENQLSPILRELLSHQYERYLYIDEQIQWFEEKLNQTVKQFDNAKRLMSIPGFGPLTSQAVAVWLGSGQQFKTGRDAAAAMGLVPKQDTTGGKVILLGITKRGNTYIRSLLVHGARAALRRAKFKSDKLSKWMLELQERRGPNRAAVALANKFMRIAWAVTTKNEEYQPA

SEQ ID NO: 159333 - protein, 355 aa, unidentified
MDSVKYIGMDVHNEAISIAVLNSAGKLVMESTIETKAITILDFLKGLSGSLHVTLEEGTWAAWLYDLIKPQVAELVVCNPRRNALLQEGSKSDRMDARKLAELLRSNMVRSVYHGENGVRSLKELSRSYLTISTDLIRVMSRLKAIYRSWGIRCAGKQVYAERHRPEWLGKIEEAGVRRRAEFYYQQFDALRSLRLQVRRDLLAEAQKHDGWKLLRQIPFIGPIRAALLIARIQTPHRFRTKRQLWTYSGFGIQTHSSAEQRYVQGELKRAKKPASVRGLNRNHNHDLKNLFKSAATVAAAKAGPFKEFYDALVAKGIRPEMARLTLARKMAAITLIVWKKGVRFDAQHLKPQTA

SEQ ID NO: 159334 - protein, 428 aa, unidentified
MADHLNNKPFGAWIAIDIAKDFNAVLSETKAGKRQHFRMANSAADHDRFIAFLKSLPPPCIIGFEATGNYHRALGHRLVAAGFEVCFISSVASARYREVMFNSWDKNDPKDAAVLLELLKQGITQRYVDPLIAGHHDLQELSKTYYQVTLSRTRLQHSILTHYLPLYFPEMGKWWNSTRADWWINYLLHFPIPSAVTKHSQEAFCEIASPVIGRKVNKAAKLIELYETALHSIGLPVEADSLACKTFQIQLRRYQEINACRKQLEETAQAVLADNPDSAILQSVPGIGPINALTILAEGGDLRRFSHHRQFLKYCGFDLAKNQSGNYRGQEQISKRGNARLRLALWMAVNTAIAQPENSFQQKYSRYIKGAPQDKDLQRKARTAVAAKMARVVYGLVKSKQLYQGYYEKALPSGSIPLCGAVEAARTS

SEQ ID NO: 159335 - protein, 394 aa, unidentified
MAFKIFRKNCCGLDVHKTWIYACMGITDTNGRTEYKQARFSSFTKGLQELADWLAKYDCNDVCMESTGKFWIPVFNILEKTCWVTLAYPKYTKPQKGNKTDHKDAKWICDLYMCDMVNPSFIPPPDIRQLRDLMRYRSKLTNIMTSEKNRALNCLTVSNLKLDDVFSDVFGKSSRSVIRYILEHPGETFQVAPFIDRRCKHPVEEIQAVIDGTISHQQAVKLRECLQHLDELEVHKTNVEKEILCLVQQYPYQLELLQTVPGFSGNIMTAIALISEIGADMSVFPSAKHLVSWAGCCPRNDQSSKKVKSTRISRAGVYLKPLLVQVAIQPFTANADKFSAAGAVEIRCQICDGRFLSMWAALFIFLGCPLPPCPKNLHVHNGRIVILASVAWIF

SEQ ID NO: 159336 - protein, 345 aa, unidentified
MKIVGCDLHTRYQQIAMLDKETGELIERRLEHASGEARAFYAGLEAPVRVGIEATGHTRWFERMLAELGHELWIGDAAQIRASVVRKQKTDARDAAHLLQLLVEERFPRIWRPSLEERDLRQLVWHRQKLVWMRNAVGNQLHALAMGEGVCRKKQLFTKKGRVELEALRLGLWASHRRQELLTMLDQLDRSLRELDQAVAEQAGQNAAAQRLMTHPGVGPVTSLAFVLTLGPVGRFARSKQVVSYLGLNPREHSSGGRQRLGAISKQGNPMMRSLLVEAGHTAARLDVELKQDYQRLKLRRGSGVAKVAIARKLAVRMYWMLRSQASYAQLVRMQGSSRGTLVQW

SEQ ID NO: 159337 - protein, 504 aa, unidentified
MGYRDSQTLFEGGIEVSTTSRKLKFTPFPQRFFDPVVPLLKDYCFLLSTPENIHLGYYGSPIIHGDTIHHQAICSVEKQEELILQKEYRVFKESPKGDEGGSMFYLGIDVAKKSSRYLVLDSEGKRVVSFSLENLKERFQNLLSRLQEAKIATKDILAGLEATGWFWENLYQFLQEKGFKVVLLNPYYVNKFREALAKKAKTDDIDALVIANLLRTGEYMNSVVPEEKIQVLREYTNLRYEFLRTRQDYQRKVISLLGVVFPEYERTALKNPFGVAPLQILKEFPTAKDLALAKPRHIEKIVRSIQGNNFDLKEIQSLIDWAKNSIYSGRAKEARGVSLKMLLGQVQALNSNIQEIDKSIEDILSPGTDDSFPGENLLSIPGVGKKTIAAVLSYLGVDGSSFCSAKKVTGYVGFFPRLYQSGETKRENRISHRGPKVLRWALYMSAVSCLIHNKEMRVIYQRKISQGKSAKQALIVVAKKLLEVMLAMLKSGKTYNPIQVYANT

SEQ ID NO: 159338 - protein, 468 aa, unidentified
MRKAKRNVKSAAAAAGKKRLTLLEQINLNAAGIDVGSREHWVAVPADRDPQPVRCFGTFTSDLHALADWLLQCGVKSVALESTGVYWIPVFQILESRGLEVLLVNARQVKNVSGRKSDVSDCQWLQQLHSYGLLAGSFRPEAQICVLRCYLRHREHLVEQASTQIQLMQKALTQMNVQLHHVLSDVTGVTGMAILDAIADGERDPLKLAQMKDPRVRSSVETIAKALTGDYRPEQLFVLKQARESYRFLQTQIAACDVEVDQVLSSWEAKVDLGQQPLPPTRKKNRSKSKHKPLPFNLREQLYRVTGVDLTEVDRLDVLSAQALISEIGLNMHRWPSEKHFASWLGLCPDHRISGGQVLHNRTRPVLNRAADVLRMAAQSLKDSQSALGAFFRRLKARLGPAKAITATAHKLARIVYLLLKYGHNYVDPGAQYYEQRYRENILKSLKKRAASLGYTLIENSALNLQVS

SEQ ID NO: 159339 - protein, 355 aa, unidentified
MDNRKYIGMDVHKEAITIAVLNAAGKLVMESIIETKANTILEFLKGLRGELHLTFEEGTWASWLYDLLQPHVKRVVVCNPRRNALLKEGSKSDRVDARKLAELLYTKMLRPVYHRDNGMRAVKELARSYVTISKDQARVMTRVKALYRSWGIACSGKQIYTVRHRASWLGKIKEPSVRRRAEFYYQQLDGLRSVRRQVRRELLAESEKHKASKLLRQIPSIGPIRAALLLALVQTPHRFRTKRQLWTYSGFGIETHDSAEYRYVAGQLERSKKPQQVRGLNRNYNHDLKNLFKSAATNAVAKSGPLQEFYLALVKRGIRPEMARLTVARKIAAITLAIWKKGVSFDAEHLKQQTA

SEQ ID NO: 159340 - protein, 458 aa, unidentified
MSQTKRSRRSRELSPVHPAAAAIDIGATMHVAAVGSNRDKEPVRTFRTFTADLHRLADWFSECGIKTVAMESTGVYWIPVFEILEQRGFEVMVVNARDAKHVPGRKTDVSDAQWLQRLHEYGLLRASFRPQAELAALRAYLRQRDRLLDYAAAHIQHMQKALMQMNLQLHHIVSDITGVTGMSIIRAIVAGERDPNVLASQRDRRCHASVETVCQALIGNYREEHIFALTQAVELYDVYQTKVLTCDTQIEAILKRLKQNARPPKSKLPPARRRARQSNEPAFDVRGALHAILGMDVTQINGLGPSLALKLVGECGTNLEAWPTAKHFTSWLGLAPHNKISGGKVLSSKTRRTGNRAASLLRLAAGTLGRTDTALGAFYRRLSARVGKAKAITATARKIATLFYNTLRYGMAYTDPGAGYYEDRYRQRVLSNLKRRAKSLGFVLREMESDAASVGGVS

SEQ ID NO: 159341 - protein, 442 aa, unidentified
MAMRKREDSPEVFPNAAGIDIGGSSHWVAVPKGAAEEPVREFGTMTDDLHEMADWLLACGVDTVALESTGVFWIPVYEVLEQRGLTVWLVDARQMKYVPGRKSDVMDCQWLQKLMSLGLLRAAWRPGDEVCVVRAVARQREVLLTEQAGWVQRMQKALVQMNLQLTEVLTDVMGVTGQAIVRAIVAGERNPKVLASHRHGRVRASAAEIERALTGNWRDEHVFVLGQALAMFDSLGERILECDAKIEALLKPLGVHEVELSGPGKRGGKNTPHFDARTALARWAGVDLTRINGLSITTVMTILSEIGPDLSRFANVKHFCSWLGLCPGTKISGGKVLSARTRRSTNRVRQALKLAAMSLSRNDSALGAFYRRLCARMDKPRANTAVAHKLARMVYFMLTRGEAFVDEGQQCYEEQQRQRNIAALRRRASALGFEITPAGQVA

SEQ ID NO: 159342 - protein, 461 aa, unidentified
MPENSGGSDRGSRGKAIEGLPVVRPQVAGIDLGSEQHWVCAPALEGTGREVADFGATTAELVRMAQWLKQRKVESVAMESTGVYWIAPHEVLEAEGLEVRLVDTRQLARVPGRNQKTDPTDCEWIQRLHSCGLLRGSFRPQEQVCMLRTLIRDKANLVAESGDWMRRMQKSLDQMNVRVHRAVSDLAGSTGMAIVRAIVAGERDARQLAKLRDPRCRHSQEEIAEQLQGHWREDHLFSLQQAVKMYDAVQQRIAAYDKQILRKLAEMTPPERRRGSAPAAKNPQKANAIKMRGQEPMRQALYRMSGVDVTQIDAVGVATVEVVLSEYGPDLSPFPTEKQFVAHTTLALRVPKSGGKPVKKKKRDSASTRVAAALRMAALALRHSPTALGAYYRQIARRIGADVAVFATARKLATLIYRLLRWGQPYVDEGAEVYEKRYQEMRIKALKSTAKQLGYGLVSNA

SEQ ID NO: 159343 - protein, 366 aa, unidentified
MSSVASPAGLIHLGMDTSKNTIVVTTLMPGEDSPVTDRLVNEEAAIRRLIGRFADRPMLRCWYEAGPGGYELYRLLASMGVACQVVAPSLIPKGGSDKVKTDKRDSRRLARLGRAGELTPVRVPSPAEEAVRDLARARDAVLADRKRAQQRLTAVLMRHGRIWRGGSYWTAAHRAWIAAQRFGEPALASAIGYYRATLAIRETELAAVEAELLPWAARDPLAGPVARLGCYRGIAELIGLTLAAEVVDWRRFPAARAFMSYTGLVPSEYSSGERTRRGHITKAGSEPVRTALIEAAWAYRFQPAIGTALRRRQAGASPETLARSWKAQRRLHTRYIHLLHTGKAGPEATVAVARELAGFAWAEMTA

SEQ ID NO: 159344 - protein, 523 aa, unidentified
MPVFKNSKQQSFNVEGTFPDGTTIVKMTDGTRVVTSASNNIKRPLCGGIDVHKNILMAAACVTDKDSLSATFYVKEFSSTNDDIRKMADWFAGYGIVDVCMESTGKYWIPVFDILEQKGLKPVLTHPKYVKQVKGNKTDFRDAMNIANLFRMDVVVASFIPPSDIRDLRELCRYRLKLTYMRTAEKNRYQNSMTVSRLRIDSVFKDPFGKSASSIMSYLLLTPGDEVDDSKILSFVDARTKASPQEILDSIHGYEFLGVQRDKLEIISGHLDEINEHIAAIDEKLGYYRQKYAGIIQRLVAIPGISMESALYILGEIGADMSVWRDDKALASWAGLSPACNESARKKKSTKIGNGGHYLKPLLVQCALAAIKSTKKQPYFYSKYNSIQKRRGHKKAIIAIARKMLVAIYHMIKDGKEFQPIDYEQVVTPKPFNELNPQKVIEFLREQGVDADTIRLVEKQCSHDTTNQKGASSAAANKEQKKKQPKANTEGTATEQKPAKRRGRPPKSPQTTRPLDQSADATA

SEQ ID NO: 159345 - protein, 311 aa, unidentified
MYYIGIDVSKKDLSVFDGKDLNFINQEGLKSFKKYLKKKYHLSEIVILFEPTGIYSFYLKEFCAENRIKAYIVNPKKSHNFARALGKRSKNDKIDARTLYQFHKLIDLKDIKVPKIDQQAKTLASYLVSYEFALKQRVSLSNHLESLRDKRLITLMKKDLKMAKKLEDKLFHDIKEYVSKNQNLREDYQRLLTISGVGDKTAISLLTLFKTYQGTNRAQITALAGLDPIKRESGTSVKGKVKISKNGKGIYRKIFYLPTICATVHNQKIRVFYQRLLANHKIKKLAIIASMRKLLLIAHAMYRDKTEYVAA

SEQ ID NO: 159346 - protein, 457 aa, unidentified
MRKKNKRTPGVEEAHPFSGMSRIHPNAAGVDIGAIEIVACVAGDENTQIVKAFGNYTVDLQALAQWMKGYHIKTIAMESTGVYWIPLFEELERQGFECLLISSRSLRRVAGRKSDISDAQWIQTLHTYGLLEGSFRPQGDLVALRTLLRHRSQLVEHRSPHIQHMQKALLQMNVQLSQAVTDLTGMTGQKIIRAILTGERKPQALAALREAGCKKSTEEIGKALTGTWREEHLFVLKQSVLLYDFYTEQIQACDEEIERLYGLTRPDWETGEVEPFTRRKKNSRSKNLPQHPEEIRKHLKRISGVDLSVVDGFGVSLAQTVIMEVGTDMSRFPDEKHFCSWLGLAPKHEISGGKVLKNNTLKTRNRAGQAFRMAAQSVKQAECVFGVFYRRLKARLGPSQATVATAHAIARVVYRMLKYQVEYEPLSLNEYQRQYEAQQIKYLKKRAAKFGFQLIPT

SEQ ID NO: 159347 - protein, 386 aa, unidentified
MQASTVATPTAGHIGTIFVAIELSQRSWRVALHSPDKDKISHHKLEGGDHAELLALVGRVRERAARTLGGVPAVASCYEAGYDGFWLHRLLLAAGITNYVFDPASIAVDQRARRVKTDRIDGERMLRTLMAYLRGEPRVVRIVRVPAAEQEDARRGSRERDRLIKEQTAHTNRIKALLRLRGMAVGNPRRRDWLSWLATQRDWQGQAVPPRMLSEIRHEHARLMLVRDRLDVLAQEAAAAEPMPAEAEMTRRSELLRRLKCLGPAFATTLTSEVFYKDFRNRREVGSYFGLTPSPWRSGGIDRDQGISKAGNPRARCAAIELAWLWLRHQPDSKLTLEYRKRTLDAGKRIKRVAIVALARKLMVALWRYLTTGLVPEGAVLKAVKI

SEQ ID NO: 159348 - protein, 359 aa, unidentified
MDVSKERPKITAGLDLGDKYSYLCLVDQESGEIVEEGRLRTNPETFKRRFASERPPMRIAIEAGTHSPWVSRVLEECGHEVLVANARKTRLIYANKRKTDEIDAENLARLARVDPKLLYPLKHRGEDAQAHMAIVRSREALVGSRTQLVNHVRGAVKSFGARLPKCPARSFHKRAEEHIPEALWPALGPILEQIGSLTERIRQYDRKLGTISKECYPETELLRQVEGIGPLTALAFVLTLEDPHRFEKSRSVGAYLGLVPARDQSGDRDPREKRISKEGDEMLRKLLVSGAHYILGPFGSDSDLRRHGEKIASRGGKNAKKRAVVATARKLAVLLHSLWISGEVYDPLRNAHRLGGQAA

SEQ ID NO: 159349 - protein, 422 aa, unidentified
MLEETQETEELIERVAALDVGKAELTCCVRVPSPGKRGRRAQEVRTYQTMTRWLLVMADRLRELGVTRVVMEATSDYWKGVYYLLEAHGFQTWLVNARDVKHLPGRPKTDTLDAVWLCKLAERQLLRPSFVPPRPIRQLRDVTRYRADLVAARTAEKQRVEKLLEDAQIKLSVVASDIFGVSGRAMLAALLAGERDPKRLAQLARTRLRAKLGPLAEAFCGFFTDQHAFLLAKMLARVDALDADLAELDAKLAELIAPFADAVERLDEIPGVGQTAARLLIAELGTDMTRFPTAGHLVSWAKYAPIANESAGKGKGSRSTGHGNPYLARVLGEAAVAASKTDTFLGERYRRIARRRGKRRAIVAVGRSILVIAWHLLSDPEVHFHDLGAGFYDTHIGAERAKRNHIRQLEALGYKVTLQPAA

SEQ ID NO: 159350 - protein, 425 aa, unidentified
MNYKQNEKINQVKESTLVVGIDIGSTTQYARAFDWRGIELGKVFTFSNSREGFEAFKAWMQHLQDKYRKSDVIVGIEPTGHYWFDLGAYLEDEGILLVMVNPYAVKQTKELDDNSQSKNDRKDPKVIAKLVTEGRYSAPYTPDGVYADLRIMVANRKRLIREMTQIKNRFARWFAIYFPEYTDVFGDYEAQSSMLLLKKVCTPEAIVELGAEKINQIWRDAKLRAVGMKRATTLCETAKRSIGLKKGSSAARYEMKLLLEDYEYKKAQLDAVMEEIEKLCRKIPESEQMLAIKGIGVITVAGFLAEVGDVRRFESPRQIQKLAGLSLRENSSGKHKGQTTISKRGRSNLRAVLFNAAIPLIATNPEFKSLHEHYTTRANNPLKKKQSVIAISCKLIRVFYAILANGVTYDAQKMLSDIHRQPQAA

SEQ ID NO: 159351 - protein, 346 aa, unidentified
MMIIGCDFHPSWQQVCWLDTETGETGEQKLVQAAGDAERFYRQVPAPALIGMEATGNCHWLVDLLSELGHELWVGDAAQIRASYVRQQKTDKRDAAHILKLLVEGRFPRIWMPSSEVRDLRQLLLHRYKLVILRARVKNELQHLCLNQGVQRQHKLWSRAGQQVLRELPLKPWAARRREDLLRLMAMLDQQIEPLDQAVKAEAQRDKMALLLQTQPGVGPITALAYVLTMGEVSRFPRGKQVASYLGLIPREHSSGGRQKLGAITKQGNRMMRMLLVEAAQAAVRYDPQFRKEYWHRCHQKPKAVAKVAAARKLAIRLYWMLRTHKPYPEVVRIESSPRVPLVGAS

SEQ ID NO: 159352 - protein, 400 aa, unidentified
MKSVLSVDVAKGKSMVMLSTEYGEVLIEPKEVKHNLKDFDNIKNQINNFKLEDLTIFMESTGIYHLPVERYFKENGFNTLVINSLTTKNNYDTLRKTKTDTKDCIRLAKLFFVNEVKYHDLSKKDLYANLKAMTRQYFYLIQLNVSCKNRYKRLINICFPEFEEIFKGSRIYEETALNFIKTFPHAYIVKEKRIDALYNNLYKTNSRHDYYYKRLANKIKEVSIDSYPGVDKDHSDVKNLSDMASILQENIKTINDLKEKMIETAKKSPYFDIINSFYGIGQTLTTELLGELGDITRFDNHKQLIAFCGLDPTIIQSGKSINVRGTISKRGNKYARWILFNISQMVVKLGHQCPNHPVYNYYLIKKAEGKHYYESLTACSTKILRMLYTMCKNNTTFKIN

SEQ ID NO: 159353 - protein, 522 aa, unidentified
MAVRTARKGKRSSRTEVLHRPRGLFHSRVQRVGPEHFGIVSVDCAKARSKWMLADFYGSVLIPPTVVAHNRVELDATIAQIRQALTSNELNDVLVAIERTGRYHHVIRDAFVRAEFEARLVHPFATKRFRQPADPSTKTDDTDLAAIHRAAVNGFALLEPKLTEDWQSLQMLVRHRRNLVQKNSVLRCQIREHLEAAWPGYAACFDELWDSHIGLALVRHYATPRALLAESAPAIDHWLRQQGVRFQRPTLDTILAWAQRATPGDPLSELHRRLALAYDDDRLQKTQEIQALERDLAHRLAQTPYVLLLSFPGINVVSAAEFAGEMGPIEHYANPRNITGRAGLFPSRYQSDQVDRPHGPLVRRGNRKLRAAILGIADNLVASNQHFKVLATRWKALGKHARHTHVKIALRFCRIAFHMVAGRQVFHHPSLRERHYILDKLLAFHTQHQTPWEQTLRDLHHAIDQVPTKEHRGEAQPLADRLQRWRQRRRGPQALAEILAIVLARLGVGIVQSQESGEQDPT

SEQ ID NO: 159354 - protein, 348 aa, unidentified
MKNYQMGIDISKEKLNICLKRGTETVREEEIPNTAAAVRKCVKRINKENGVAVDEMLACAEFTGRYIYPLVCACDELGLFLWMEDPTRIKNSFGVTRGKDDRVDARRIAEYAYRFSDKAVAYEMPDRTLVSLKNLLADRDTLAADRKKYEMQLHDQKGYMDPSDYARKKRSWAAVVRTLDKQIALIDAEIQRLVESDEKIRHQKELLKSVDGVGDRVAVYMIVVTMAFTRFETPRQFNCYAGLAPFRYTSGKSIYSKSKVSQRANKQIKALLHLAAVSASTHMKESEYKEYYRRKTGEGKHPLCVLNVVRAKLVSRMFAVIKRDEAYQRHYNISTPNEKISQKTIANS

SEQ ID NO: 159355 - protein, 688 aa, unidentified
MSPGSLPVFSLRRSPVSTIASLDRIGVGIDTARYGHRVSFLRPDRKPAAKPLTVMENRAGYQALQDRLNQLHEQHPTAHFHVRIDAAGQYAVNLELFLRSLKLPMTISVGEPKRNKDYQKAHFPKRTTDDTESQAMARVAVVELPNATPAPSTPMILLREVAGRLQSKVKQTTQAINRLHNLLARVFPELATLTEDMSAGWALKLLDKYPTAERIAQAQIASLEKIPYLSVEQAHAVHQAAKQSVASLRGELAEALVRDLVNQLRLCQKAEQHLHQLLLEAFADLPASPHVQVLTITGIGEATAAALVAKIVDINRFATPNHLVSYFGVFPEESSSGVDKRGRPLPPGTLIMSPKGNDLVRFYLWNAARNAIQHNPAIRALYGRLRAKGKRGDVAFGHCMRKLLHLVYAVWKTDRPFDKEHFPWEGSSDTQPSATTPPSADAGTTPSGNEKTVGHKRDLPAEAVVTTADSTLEPASPAVKPASQSAAPRPKVDFACVREHVTMEQVLQHLGYFASLRGRGQQRRGPCPVHSQPTAPERTFSVHLGKNAFQCFHAECAVKGNVLDLWAAIHRLPLYEAALDLAETFQVPRNREDSHGGNWSDWVSKAMYRRSLSRRTGGLFICTYGSRWPSGATSVDSRTTSRHSEISGERPHTAVSDVCGPTERHASLRLCASEEITTLFGPFGRTAR

SEQ ID NO: 159356 - protein, 341 aa, unidentified
MTEIKRIAIDTSKSVFTLHGVDVADRPVLRRNLRRGELLRFFERLPPVEVALEACGGSHYWGRALLALGHRVRLIPPQYVKPFVKRSKNDRNDAEAISVAAAQPSIGSVPVKSAEQQAAAMLLSVRELLVRQRTQLANAMRGHAAEMGLVAPLGEKGLRELRAEVAAADEAAVPAAAKQAIALLGREAERLEVRLAAIDATLMQQHKTNPLSRRLAAIPGIGPIGALNFALRVDPGQFASARHFAAWLGLVPRECSTAGKQRLGGISRAGDERLRQLLVLGATAVIQHAKPGRPTTSQWLLNLLSRKPRKLAAVALANKMARIVWAMMTSGEVYRPRPATA

SEQ ID NO: 159357 - protein, 337 aa, unidentified
MNNNVVGLDISKNVFHLYSQTADGKVVKKKLKRGELLAYIANMPVSLIGMEACGGAHYWAREFTKLGHEVVLLNARFVKGFVVGNKNDFNDAEAIFTAVTRPNKRVIAVKNEAQQDIQMLHRLRQQRIDQRTALVNQIRGLLSERGIVLSQGINQVRKQLPLILEDAENGLTPLSRELFAEQYEQLKALDDDIKTRDSRINRLCQQNALSRRFLEVPGIGPIIATIMASDIGNGKGYTKSRDYAASLGVVPRQHSSGDKQVLLGISKRGNAYLRTLLIHGARSVIKCCHSKSDPLSRWLQALVERRGFNKAAVALANKNARILWAMARQDQPYQAAA

SEQ ID NO: 159358 - protein, 309 aa, unidentified
MNEELVYLGVDIAKAYLDAAIANEKRRFSNDAVGHRRLIQWLKQIKGPVQVICEPSGGYERALVRALVAAQIKVSLVPANRVRQFARAGGILAKTDRIDAKLLCAFGEAMKPGIISASQLEQEQLRELESQRRHLTHLFVMEQNRAARVSEVCVRKLNRRLITQIKKQVEQLDLLIQQQIAASRELATKAEKLTTISGVGARTAALLLAQMPELGQLNRREVAALVGVAPFNRDSGRMRGKRAIYGGRRSVRHGLYMAALVAARHNPILRGFYLRLRAAGKPAKVALTATMRKLLIVLNSALKPDLNYA

SEQ ID NO: 159359 - protein, 330 aa, unidentified
MHYVGIDLHKRFLVAASEDETGKSRGTVTLSCRDVPAIHSHFEALRPFACVIEASSSYRWLYNLLSPLGEVKLAHPLRLKAMVSGRAKTDKLDAVLLAKLLRADLIPMAYIPPAPYCELREMARSRARLSRRMTEAKNEIHALLMRNNLYPPYKSTFNKSSTRWLRQLQLGDGTDLVKEELLDRIEHFRFQLKHWDSELVKLHEDFPQADALLDIHGVGLYSALLIVGEIGEPWRFSNAKQVGSYAGLTARVNQSGDRCHYGSISRQGSTWLRWVLVQIAMKVVRRDQRLSNFYTRVRKRSSSKKARVGVARKLAGICWVRLMQWHRAAA

SEQ ID NO: 159360 - protein, 312 aa, unidentified
MADILCGVDISSDTLDARIGRTGPWRQFPNSTDGIADLAAFCREHGVTLAVMEASGGYERLPFAGLWAARIPVALVDPRAVRRFAQAMGRLEKTDRIDSAMIVWYGEAKHLHPTPLASATQQHLTALVVRLRQLTDLRTQQTNQRRLIADPTVLATFSAVLTTVATQIRTLEHQVVGLIAADPLWTALDAACREIKGVADRTVARLLAALPEIGTLNAKAASKLTGLAPLAHDSGKRHGKRGVRGGRESVRTVLYVVARLVCRYDSEFAAFRDRLKAAGKPAKVIRVALAHKLLVRLNAKARDARKVLAPAV

SEQ ID NO: 159361 - protein, 368 aa, unidentified
MSSVASPEGLIHVGMDTSKNTIVVATLLPGEESPVTDRIFNEEEAIRRLVGRFSDRSVLRAWYEAGPGGYDLYRLLASMGVACQVVAPSLIPKGGSDKVKTDKRDSRRLARLGRAGELTPVRVPSPAEEAVRDLARARAVVLDDRKRARQRLTAVLMRHGRIWRGASYWTAAHRAWIAAQRFGEPALALAVGHYRAALEVREAELAAIEAELAPWAAREPLAGPVARLGCYRGIAELSGLTLAAEVVDWRRFPAARAFMSYTGLVPAEYSSGERTRRGHITKAGSEPVRTALTEAAWAYRHAPAIGAGLRRRQAGAAPETLARSWTAQRRLHARYVHLVHAGGKAAPEAVVAVARELAGFVWAEMTAA

SEQ ID NO: 159362 - protein, 371 aa, unidentified
MRFYAQQHRFYCGIDLHGRTMHLCILDHQGNTVFDKNLPCRRDTFLNALAPFRDDLIVAAECMFAWYWVADLCQAENIPFALGHALYMKAIHGGKAKNDRIDANKIARLLRGGNFPIAYVYPKGMRETRDLLRRRTYFVRQRAALLTHLQILNAQYNLAPFPKKLSFAANRTEMDVAQRFSDPSVQKSAAINLALIDQLDGHIGELELYLTRTAKVDDLQTFYRLRSIPGVGKVLALILLYETHDVQRFDSAGQFLSYARLVRCLHESAGKKLGTGGKKIGNAHLRWAFAEAACLFLRSSERAKKWKQRQAAQRGDGKALAILAAKLGRAVYHMLRKGEAFDEARFWQGRTAPSDTGSSSLSPKESDHVGD

SEQ ID NO: 159363 - protein, 417 aa, unidentified
MAKQSKVAPIFVGIDWGSRSHQVCVIDSDRAVLLEAAYVHSGPGLAELVAALLQIAQDNPGRLSVAIEQPRGAVVETLLEKGISVFSLNPKQLDRFRDRHTVSGAKDDRRDAFVLADSLRTDAAAFRRARLGDPLLVQLRELSRMQDELKADRIALGNRLREQLHRYFPQVLALGSVYDGRWIWELLEMAPTPETARKLGISKIRTLLKSHRIRSLTAEAVKERLSERALDVAPGVTDATSRNVRLLVPRLRLAHEQKLQVEREIETILDELASGDQDDAPRDASLVQSMPGLGALGCATLLAEAWEPLERRDYSRLRLLCGVAPVTKQSGKQHAVRMRSGCNGRLRTAIHYWVGNAVQRDPRCKAHYAALRAAGHSHGRASRGVGDRLLATLVAVLKTRKPYSVNYPRGTTAAQHV

SEQ ID NO: 159364 - protein, 343 aa, unidentified
MGEVSTIGLDIAKSVFQVHGVDVDGAVVMRKRISRAKLLEFFASLPACLVGIEACPSAHYWSRRLQALGHTVRLLPPSYVKAYLKRSKNDANDAAAICEAVTRPSMRFVATKSEQQQSGLMLHRSRQLLVCQRTMLSNAIRGHMAELGIISAKGRNGTAKLLEMIADEQDDRIPAAARFSLAILARQYAAIRAEIVAIEKRIHAWHRSSEESRRLEEIPGVGPIVATALVAEVGDWKTFSSGRSLAAWIGLVPRQHSTGGKERLGSISKQGNRHLRWLLVAGAMAVIRYARQHGTKRLWLARLMERRPIKVAAVARANKIARMAWAMMVRRERFKEPKLLPAA

SEQ ID NO: 159365 - protein, 414 aa, unidentified
MQSLLRAGGQPVFVGIDWGGSHHQVCVVDAAGIRRRQVRLAHDVAGLARLDQELGRLGAGLPVAVERAEGLLVEHLQARGHLVYPVSPRIAARARERYRAASSKDDVFDAFVLADTLRHEHAHWRPLPRCSPLLAELRALTRDRDRLLATQQRTEAQLRAILEAYHPAPARLFSSIDRQVTLSFIADYPTPEAAAAVGPQRMARFLARNRYTGRVKPEILVGRLRANLLAGAPGTVAGKAHSALVFAELLGLLNQQLADYDDVIALAVERHPDAAIFASFPGVGLIGTAVLLAEIGEDRTHYPTPEVLLAEAGLAPVTRASGRSRQVRFRYAANRRLREACVWWAYNSLKESTWASDVYQQARARGQHPYRALRGLGARWMRVLWRCWTDRVPYDPAKHHRTTTQPADQEAATA

SEQ ID NO: 159366 - protein, 349 aa, unidentified
MELAKIKSKYYCGADLHSKTTYIKVMNGEGDILLKRNLPNNFAVFKSLVKSFLPDLVVGAESTYSYYWLYDGCRESGIPFYLGHALYMKAISGNKKKSDPIDAETISNLLRSNFFPIAYPYPKEMRATRDLLRRRHRLVRIRAEGYTHIHIVFHQEGLGDITSEAVKNKSTRRELISRFSNQSLQHTITADLDIIDMLDPYIKQLEIEIRNQAKSHNHRDYALLQTMPGIGEMNALIILYETHDINRFPTVQKYSSYCRVIRCERESNGKNTGNKNQKMGNPYLKWAYGQILHSAKRYNDRINRHYQKLESKHGPARARSIMAHKFAVAVYSMLKHHQAFDEERFVQNN

SEQ ID NO: 159367 - protein, 388 aa, unidentified
MQTTAHQPQAPTAIRTDLGAIFVSMELSRTSWLLTSVSPGDGERMSKHAVRSGDVAGLRARFSLLKEKVRTRTGLAVSIIVIQEAGLDGFWIHRLLLCDGIESYVVDPASIATSRRRRRAKTDKIDGEALVRALLAYKRGEPRVCAMVRAPTPQEEDRRRICRERKTLTAERVEHVNRIKGLLFAQGIADYEPLLRKRRERLDELRTGDGRPLPQHLKAQVGRELDRLELVLQQMKSVEAERDASPKASDKETPTPAAMLKRLKGIGPEFANVLWSEGLFRSFANRRQVAAYAGLAPTPWQSGSVAHEQGVSKAGNPRLRTTMIQLAWLWVRHQPNSILTQWFHQRVQFNGGRVRKVLIVALARKLLIAFWKYVTAGVVLEGAETTAA

SEQ ID NO: 159368 - protein, 355 aa, unidentified
MQKYKFSFKGQNIYVGIDVHLKTWHVTTLTESGCKYSFSQHADAKELFDRLNKKFPEAHFMSAYEAGFCGFSAHYALAEQGFENIVVNAADIPTTVKEKVMKTDAVDSEKIAWGLKRGELTGIYVKDKSFMDDTNLIRLRQRFIKDLSRHKSRVKQLLYTQGVTYPERFAKSGTHWSRNFMKWLREEVVLLSEEKLTLTLLCDQVDSVRQAVLRVTREIRRMSKDGKYKENYNLLSTVPGFGLITSMSMLAELDNNPTRFPNERKFVAILGLIPTCHDSGEKKVNGEKSFRGNKHLGPLIIEASWVAIHRDYGLGAYYTNCCQSMKPQKAIIKVARRLACRAYAVMKTKKAYVLQ

SEQ ID NO: 159369 - protein, 423 aa, unidentified
MMKLKYSICCGLDVHKNVIVATIVTTNKDGISEYLQKSFSTINSDIQRFHNWLIENNCYHVCMESTGKYWIPIFNYLENDIDVCLTHPKYVKAIKGKKTDKKDSKWIADLYKFDLVRCSFIPPKDFRQLRELSRYRFKLVCMKSSEKNRIQNCMTISNVGIASVLSDPFGKTATEIISYLLEHTADSMDEKAVRKLIKKGAKSKSDEIIEAIKGYTIETDQAKKLELARGHLEYLDDMITQTEVELYVRIKPYYKFVEFVSTMPGMTELSSTIVLAETGVDMDIFDDAKHLCSWCGLSPSNNESAGKKKSVRIAKAGDYLKPMMVQCALAAIKSKKQPYFAIKYGRIKKRRGHKKAIIAIARMMMVCIYHMVSEKKPFTPTDYEELMNPQNHVERVVLNENNVFAYLESLGYDSSKLVKRNDN

SEQ ID NO: 159370 - protein, 419 aa, unidentified
MNYAPLRVLPDVPPGGAVAGIDWASAGHVACVVDMSGKVAGRLAVAHDRAGIAALTTWLRRAGAAETAIERGDGALVDALLAAGFTVVVIPPGQVKGLRSRHSSSGAKDDHFDAFVLADALRTDRARLRPLVPDSPQVLALRQAVRFRKDLVRDRVRAGNRLRAHLQAAFPGSVGLFSSLDCRLSLAFLAAFPTSAHAAHLDEEALTGWLETVPARGNCAPGGVLAARLSAAAPGAGDPALLAPVTVQMAGACADVAARIRVVEDQIAAQLAACPDGHLFTSLPRAGTVRAARLLAEIGDCRARYTGPRALAAAAGVSPVTRKSGKWESHDYRHAVSADLRDAVCDFADGSRRASPWAARTYEAARARGKDHPHAVRVLARAWTAIIWRCWQDGVPYDPAKHRALQDILQDQAGQEDGR

SEQ ID NO: 159371 - protein, 359 aa, unidentified
MEYFAGLDVSMEETSICVIDQEGKFVLETKVETDPDAIFAALRPYAERLRRVGHEAGSFSPWLQVELQQRGLPMVCLEAYHARSALSAMRNKTDRTDAQGIAHIVRTGWFKQVHVKSEDSYRLRLLLTHRRNLKRKFLDIENAIRHSIKTFGLKLGAVSRGQFEERVRELVAQDSLIAGVVDCMLRARAALWQEYLRLHKLVVAVVSKDEVCRRFMGIPGVGPISALAFKTSVDDPGRFRRSKTVGAYLGLTARRWQSGTSIDVSGHISKAGDGEVRHPLYEAANIMLTRFKGFSSLKAWGLKIAKKRGHKRACVAVARKLSVIMHAMWRDGSTFRFKAAETQEKPQGKRAPKLLAATA

SEQ ID NO: 159372 - protein, 315 aa, unidentified
MTRIICGVDIASATLTARIGRSGALREFANTREGIGELADFCRHHGVELVAMEATGGYEQRSYVQLSESGLGVAIVNPRAVRQFAQSMGALEKTDVIDAGMIGWYAETKQSQPLCLAPHTQLELRARVTRLRQLTEVRTAQRNQQRLVTLPAIRKGFEQMLDFLEQQIGELEEAISDLIEADPLWRALNQAFRTIKGVADRTVANLMAEMPEIGTLSNKTISKLAGLAPLANDSGNHQGKRSVRGGRGAIRDLLFIVGSVVGRHEPDFVAFQNRLRAAGKPPKVVRIAVAHKLLVRLNAKAREVRVLHTQKQAFV

SEQ ID NO: 159373 - protein, 409 aa, unidentified
MRVIGLDVHRNFAQVAILESGVVKSHGRFAMARDAVLNFGATLTKQDDVVLEATGNTAIIVRLLAPFVHRVAIANPLQVRAIAWAKVKTDKIDAATLARLHAAQFLPEVWMPTEEVELQRRCIAERVQLVSQMTRLKNRIQSILHANLIPRETGRIYTKNGRARLAELPLPPDQMRMALRHHDELDRLAGELAVIDKDLSQRSLADPNVKRLMTIGGVNSIVAASVLAAIGDIKRFSSPEKLVSYFGLNPSVHQSGDHPAYHGHITHRGRGHARAMLVEAAWALAAAPGPLSAFFQRIALKRGKQVAAVATARKLAVLVWHMLTKDEDYAWTRQALLQWKLRNLELKAGHASRRGGNKPGPASDYSLQVVRDKERAWLGLAEQEYRRFVAAWRDQPPSRQIPSSKKGDT

SEQ ID NO: 159374 - protein, 427 aa, unidentified
MSYRIAAVDVHKKMLAVVVADIAGEGDYQFERRKFGATPGELHVLAQWLDQQEVEEVVMESTAQYWKPVWGTLERYWKPVRQKREGASQMCGTLHLCQAKSNRGPRGRKNDFADGERMIKRLVAHELVLSFVPDPEQRLWRTVTRRKHQLTRAKVVYKNQLESLLEQAHLKLSSFVSDLLGVSARRMLKALAEGETDPAALAAMADCRLRATPEQLRDALGACQQLDGVFRRLLKMALEELELIETHIEQLEREAMDLMQEHQDAVQRVAEVPGFGLDSAMQMIAEVGPKAATFEVAKALSSWVGVCPGNEESAGESHSTRSPKGNHHMRRLLDQAAQSAVKVKGSIFELTFHRLLPRLGYQQAIWAIAHRLCRLLWLILHKGVRYEERGPAVSAKSKRTRTARMIRELHKLGYRVEGGPLPAGARA

SEQ ID NO: 159375 - protein, 427 aa, unidentified
MFTAAFASLTKMNFNKLLSGNITKYQKEGFIMISVGIDVSKGKSTVCIMKPCGEILESPFDIGHTADELDSLISLIKSFDEETRVVMEDTGHYHLPVATYLSSHNIFVCCVNALRMKKFCSQSIRRAKTDKIDSIKIASFGITYWNELVKAYPSNVIYDELKFLARQYYQVTGMLVKSKVNFSNLLDQVMPKINDVLSNQGENHKLTEFVSRYIHFQNILDIGEMKFTSDYCKWAKKKGYRLNERKAAEILALAQNGIPTLPNSQSVKIAVSEAVKLIHSIEESRNTILAQMQDLCNTLPEYSVVKEMDCIGDTLAPRIIAEIGDVRRFKNKHSLIAYAGIDAPPYQSGAFHASERHISKRGNSYLRKTGYEIMQSLIKHKPADNAVYDFIQKKRSEGKCGKEAMIAGLNKFLRVYYGKVMEFYSEH

SEQ ID NO: 159376 - protein, 402 aa, unidentified
MNAVGIDVSKGKSMVAIMRPFGEIVSPPFEIKHTTSDINSLVELINSVEGESRIVMEHTGRYYEVLAHQLSKANLFVSAINPKLIKDFDNDSLRKVKSDKADAVKIARYTIDKWQNLKQYNVMDELRNQLKTMNRQFGFYMKHKTAMKNNLIGIIDQTYPSVNTYFDSPARSNGSQKWVDFASTYWHVDCVRKMSKNAFIDHYKNWCKRKKYNFSKSKAEEIYEKAKELVPVLPKDNITKLIIKQAVDQLNSVSTTIESLRTLMNETASKLPEYPVVMAMKGVGTSLGPQLMAEIGDVSRFTHKGAITAFAGVDPGVNESGSYEQKSVPTSKRGSSVLRKTLFQVMDVLIKTHPQDDPVYQFIDKKRAQGKPYYVYMTAGANKFLRIYYGRVKEYLSSLPES

SEQ ID NO: 159377 - protein, 485 aa, unidentified
MKTTRVKASRSIKKSPGQQKGPIKPAAKMPVINPHAGGIDVGSVEHYVCVPEDAVPAGESNVRSFKGFTGDLDKLVEWLQACAVTTVAMESTGVFWIPLAQKLEAAKIEMVLVNARHLRYVPGRKTDIKDCQWLQQLHSYGLLNGSFRPAQDICCVRSLMRHRENLSQSCGQEVQHMQQALQQMNVHWHHAVSDLNGETGLRILDAILGGERDPKKLVQLRDSQCSKTTAEELEAALKGDWREEHLFVLKQALQTYRHLLKQMEECDAQVEKALAAVVIPERIEPEDPAPQNPTAKEQPQPKKKRFHHRKTGTGLKRDLSDELKRLCGVDLTQVMGLNVLGVLIVLSEIGLDMSRWRSEKAFCSWLGLCPGNKISGGKVLTSHTAHVVNRVAILLRTVAPSVGKSDTWLGLFHRRMRARLGPAGANTATARKLAGLIYHLLKYKEEYIDVDQLLFVEKIRRIRINRLRKHAEELGFEIVEKQMAA

SEQ ID NO: 159378 - protein, 430 aa, unidentified
MKSNTQNAKIEAITEKTLVLGIDVGSETHYARAFDYRGIEYSKKPFKFSNTEAGFATFKEWILDLKERHEKDKVVPGMEPTGHYWFNLGKFLQDNEMKPVLVNPHHVKKSKELDDNHPTKNDRKDPKVIAGLVREGRYMIPYLPDGVYADLRTASNIRFQLQAELTRIQNRINRWFNIYFPEYKTVYGKPDAKSGILILKEAPLPEDILTLGIDGVNQIWRDAKLRAVGKARAKTLIEAAEHSVGSKEGAVSARMEIRMLLEDYESRNIRLQEVMGLIEGLVNQIPMAEKLLEIKGVGIKTVSGFLAEVGDIRRFNDPKELQKLAGLALVENSSGKHKGKTTISRRGRKRLRYLLFEVAMSLVAKNPEFRELHNYYTTRRLNPLKKMQSLMAIAAKLLRVFYAILTKGVGYDPKKMVNDIRRPAAYAQAA

SEQ ID NO: 159379 - protein, 314 aa, unidentified
MAEENVYVGIDVSKAWLDVAIDPTGEYWRAENTEAAIAELSIRLAALEPRCIVVEATGGYEARLVKGLCDAKLPVARVNPGRVRRFAQGLNWLAKTDKIDAKLLARFAEKADPRLTQLPTEHEKRLAALVKRRKQVLEMHVSEHNRLETADPDVLSFIQDCMTMLQKQLKELDQAIQSLIDNTPDLKGKQDLMLSVPGVGQVTASTLTSQLPELGTCDRKEIATLVGVAPFSHDSGKKRGKRVIKGGRSAIRSVLYMATLSATRFNPVIRKFYDRLISNGKETKVAIVACMRKLLTILNAMIRDQRSWNQDFTS

SEQ ID NO: 159380 - protein, 338 aa, unidentified
MQLTTIGLDIAKHVFQVHGVDQHGMAVLRKRLSRGRVLAFFANLPRCVIGLEACGGAHYWARELTKVGHEVRLMPPQYVRPYVKTNKHDAADADACCEAVQRPGMRFVPVKNEQQQSLLMLHRIRDRLIAERTGTINAIRGHMAEFGMVAAQRDAGLKTLIAIITDGDDVRLPALARELLLLQLEHLRQVEARITALDGRLVRQARDDEACRRLTEAPGIGPVIATAMVATVGNARLFSSGRSFAAWLGLTPRQHATGGKERLLGISKRGDGYLRRQLMHGARSLVRLAQGREGHPWAWINALLARRPFNVVVAAVANKLARMIWAMLSRGEAYRAAA

SEQ ID NO: 159381 - protein, 368 aa, unidentified
MSNHSHYKVGCDAHKHYSLFSVLDARGNPIQRTRVNHEPGAIRAFLAQFPPGTPVALETVGNWYWIVDEIEQAQCLPLLAHAARAKSMMGHVHKTDKLDAAGLATLLHLGTLPAVWIPPGDLRDERELPRTRMAFSKVRTMLKNRIHSTLAKYALSLDTDSDIFTAKWRPQLLQLLAHLPAETHRCVAQELELLDLLQIHIHQLEERILERVKITPTIQLLMSIPGPAEILSIVIDRELGSIQRFPAPKHLASYSGLVPRVKASGGKVHYGRMIKQANNYLKWAFIEAANVVIRQRHHANWSGKYVVRLFERTRQRKGHAVAVGATARYLAEAAFWVLKKGEPYREPVPRRPSGLKSPASPEQGQART

SEQ ID NO: 159382 - protein, 302 aa, unidentified
MAIRPTGKVFGVTNDRRGISQLVKRLTKLQPVCIAIEATGGLERELAYALAAKNLPIAVVNPRQVSNFAKSLGRRAKTDAIDAAVLAHFGEVMKPEIRSLPDAAAQELTAFVTRHRQLVEMMTAESNRSEMASNPVRKLINSLLRSLKDQLLLVDREIRKAISASDLWRHKAELLRSVPGVGEVTTATLLAGLPELGELDRRQIAALVGVAPFNRESGIWKGKRMIAGGRALIRSALYMSTVVAVRRNPMLKNFYERLRAKGKPAKQALTACMRKLLVVLNAMLRHQTPWSGPSHLLSSPAS

SEQ ID NO: 159383 - protein, 342 aa, unidentified
MQNMMIGVDLAKNVFQVHGASQTGEVLYRKKLSRKQFSAFMALQEPSLVIFEACGSAHYWAREMEALDHEVRLIAPQYVRPFVKRQKNDAADAEAIVIAARQPEMRFVEPKTIEQQSRAAVFRGRERLVHQRTADVNALRALLYEHGHVFPTGIRHLNRMTALIEDEISGLPMLIREECKDLLAQIAEKTARIIERTAKLKTLAAQSDKARRLQTMPGVGPLTAVAVEAFGPDMAQFKTGRDFAAWLGLVPKQHSSGGKERLGRMTKAGQADIRRLLIIGAMSRLTWLGRRTIPAGSWLSRMLARKPKMLVAIALASKIARQIWAMLTKNENYRDPALAVVA

SEQ ID NO: 159384 - protein, 391 aa, unidentified
MSPSERVVIGMDPHKRSATIEVMTSDETVLGTGRFGTDRDGYASMVTYAKQWPDRVWAVEGCQGIGRHIATRLLADGEQVVDVPPKLSARARVFATGQGRKTDATDAHSVALVGTRMAGLHPLVNDEQLAVLRILVDRRRSLGEDHTRMVSQLHQLLLELIPGGAKKSLSAAQAKGLLATVRPRDAAGKARRRVAAELIADLERVYQRSKQADKELKELVAATGTTLMDLHGIGPSGAARLLVEVGTITRFPDRGHFASWNGTAPIDASSGDQVRHRLSRAGNRQINRVLHIMATVQLRNPTEGRAYFDRKKASGKTSMEAMRALKRRLSDIVYRQMTNDAAAPMATGPGGHRGTSANSSVTGSQPHAGSSEKSLPEPADHNLRTSPLAMS

SEQ ID NO: 159385 - protein, 356 aa, unidentified
MNKRSKLNFSGQPIYIGLDVHKKSWSVSIFSEQGEYKTFSQTPKVETLVQYLQHHFPGAQYRSVYEAGYCGFWVHDQLREQGIQNIVANPADIPTQDKERRNKRDRVDCRKLARGLRSGDIKGIYTPPRWKLEDRSLIRTRLSMGRKQGRCKNQIKSILLFYGVEIPEQREIGHWSRRFIRWIEGIQMERTSGNIALKIHLEELCHLRQIIAKLNRAIVALARTDQYRSWISLLKTIPGISTLGAMILLAELYEITRFRSIDELCSYVGLIPDTHGSGEKEHVGGITQRHHSYLRWLLIEASWVAVRKDPVLLESFQEYCKRMRKNKAIIKIARKLLNRIRYVLKNQAEYVAGVLE

SEQ ID NO: 159386 - protein, 408 aa, unidentified
MEAIVERCCGLDVHQATVVACLLVGPATGRARKDVRTFGTTTGDLEGLRTWLTQQGCTHVAMESTGVYWMPVYAVLEGHFELVVGNAAHIKNVPGRKTDVKDAEWIADLVRHGLIRKSFVPPRWQRALRDLVRYRRKLVESDTSERKRLIRLLETCNIKLSTVASDVFGVSGRAMLRALIEGTSTPQQMAELARGALRRKLEPLVQALNGKLEEHHRFLLQLQLDRVERIEADVAIVDTRIDEAIVPHLEHYQRLVQIPGVDRVAAVSIIAELGIDMTVFPTARHAAAWAGVSPGNGESAGKRVQQGKRHGNVHLCTILVQAAMAAARKKGSYLKERFWRLKARRGPKRAAVAVAHSILVIAYEMLRRSLNYRDLGPDYLDRVAKRSTERRLIKRLEALGYKVAPAQT

SEQ ID NO: 159387 - protein, 373 aa, unidentified
MIVIGTDTHKRTHTCGAVNALTAAERGELTVPARKGAFGKLLRWARTLDPERVWAIEDCRHVSGALERFLIARGERIVRVAPKHMAGARRSSRERGKSDSIDAFSVARAALKEGIDNLPGAHLDGPALDMRLLVDHREDLVAARGSDQQRLRWHLHDLWPELEIPHGALDTAKWLGKASRRLARAEQTTRVRIARELVRQITASTKRIRELERELTTLVESYAPRLLQERGCGALTAAKLIGEIAGADRFRTDAKLARTGGSAPIPASSGNTQRHRLDRGGNRQLNCALHRLAVNKANWDPDTAAYLARKQAEGKSRKEALRCVKRHLTRRVWRLMRTPTTTTTSPLLLPVPAKPKALDAIAGDAPYFMPCVR

SEQ ID NO: 159388 - protein, 338 aa, unidentified
MPLYASVDLHSNNSYATITDGKDKVIKEKRLPNQIEEVERFFGPYKDRIDSVVTEATYNGYWLLDGLKGLGYNVKLANPSAMKQYEGLKHTDDKSDCLWLNRLNRLNILPQAYIYPEKDRPVRDLLRRRMYLTQMRTSFITVLKIQFQSWNSTSIAPRAIYKLDHADISKLFRDKALRLSANSFLDSIQLLNQQITEIESHVERAAKKDPVVDRLQVLKGIGPILAWTIKYETGELSRFKSIKNYLSYAGLVESLKLSNFKVKGKGNRKNRNRFLRWAFQEAAIHSLLHNRAERYHDRLARRKGKFKAKAIMASKIARVAYMIMEDPNFIYDPDKLFR

SEQ ID NO: 159389 - protein, 347 aa, unidentified
MDKVIVIGMDLGDKNHKAVGLSANGAVMDRAEVLCTPEAVRTYLKRHPGALLAVETGTHCRWVSRLGQELGHEVLVGNARKLRMIWDSSRKNDWRDAEMLAKVARTDRSLLSPVRLRGDGDHELMRLVKSRDLLVKSRTGIVNQIRGFCKSEGVRQPKCSAESFKRLEHEMPANVRPVVKPLFAVLEELGKKIGLYDKMIVEAVQRLHGEDVALLEPIGGVGPVTAAAYLAAIGDVATFGSARDAGPYFGLTPGQDQSGETDKQLNISKEGNEVVRRLLVTAANFIMGPFGKDCDLRRHGIKIAERGGKNAKKRAKVAVARKLAVLMLAILKTRSAYRPLADVEVVA

SEQ ID NO: 159390 - protein, 430 aa, unidentified
MGLIAPTVMHSERDDQPQPYEWFVGIDWGSEKHQVCVLDRDRRRVGERVVDHDGASLAQLAAWLWTVSAGQPQRVAVAIEVPRGAIVEGLVERGFPVFAINPKQLARFRDRHTMSGAKDDRRDAFVLADSVRTDQPSFRRIQLDEPQLLLLRELSRAEETLLEEFRRSANRLRDQLHRFYPQMLELCSAADEPWLWDLIDLAPTPAHATLLSEEQVQRLLKTHRIRRVKAKEVLTCLQGSALPVAPGAAEAAQAHCAFLLPCLRVLAEQLKACSQQVSALLSTLAEEPGKGEGPSDVAIVLSLPGVGRKITAWLFAEAAQPLAERDYQVLRTHSGVAPVTKQSGKRRVVVMRRGCNPRLRHALYHMARVSMQRDAHFSNVYMVLRAKGQRHGQALRNIGDRLLRILMAMLRNRTCYDASRIRRELVVQMG

SEQ ID NO: 159391 - protein, 367 aa, unidentified
MKKVSTAAAKATKNFSQPKLTIGLDLGDRSSWYCLLDEVGEVRLEQKLSTTPKAMREVFGSLPRCRIALETGMHSPWVSRLLSELGHEVIVAHARAVRLIGESRQKDDRLDARTLARLARIDPQLLCPVKHRSAKAQADLTLIRGRAGLVRARTALVNTARGLAKSYGERLRGCNVRNMNPEKAEGLSPELQRALEPLLAGIESLSERIGEYNERIETLAQKSYPQVALLKQVKGVGTLIALTFLLTLEDAHRFRKSRDVGCYLGLQPGRRNSGQSEAQMHISKEGDPYLRTLLVQGAQHILGPFGADSDLRRWGLKLAERGGKNGKKRAIIATARKLAVLLHHLWVSGEVYEPLHNSQQSPLAIAA

SEQ ID NO: 159392 - protein, 422 aa, unidentified
MHKREERPFAAFIGIDWADKKHDVCLWVEGSEKRERLVLEHSPSTIQAWAEKLRERFDGAPIAVSLELAQGPIVSALLEHDFFVLFPVQPAMLARYRLAFSPSRAKDDPTDAELALELLLRHPEKLQRLEPESAAMRSLRRLVEARRSLVEDRTRLTNRVTSALKAYFPQVLGWFRDREAAIFSDFLERWPTLAAAQRARRDTLVDFFRAGNVRNAAAIDRRIQAIGGERPLHTDAAVTEPMRLLVEALLPQLRAVCAGIERFDAAIAKLAPTLPDYQLFAALPGAGPALAPRLLVAFGERRERFPDAAALQRYAGVAPVTERSGNKSWVHWRYSCPTFLRQTFVEWVGQTIPRSFWAKAFYQARRARGARHQAALRALAFKWIRVLHRCWVDRVAYDESRYLMALQKRQAPLLKFAAESST

SEQ ID NO: 159393 - protein, 359 aa, unidentified
MSKRSGRTGNVKSLALREGDAVVVGLDVHKKSVHAAVRRNGAEVGTWVCSMDVEAIIRSLLPMKPFLKKVVYEAGPTGYGLARALQKAGLPIEVLAPGKIAREPNPGSKTDRLDCRKLAEYAEEKKSLKAVAVPTEEEEADRQVWRLRDQLVNQQRRVKQQIKSLLLQNGLSEPDGLSHWSEAALEALKRMRLRHQLQLSLEVLIEELEKIIALRQRVERHLAWVGQRKRHRQAQSVLRSHPGVGPLTAMAFVLEVYRPERFADAEELACYVGLAPRVRQSGQTRREGPLIKAGRGALRSLLIEASWRWIRQDARAATLHQRLVRNTGSAQKAIVGVARHMAVNLWCMICRNEKYRAAA

SEQ ID NO: 159394 - protein, 338 aa, unidentified
MFYGAIDLHSDTNTIGIINDRGERIYKRIMPNDLAGIKKLFDPFRAELKGIVVESTYNWYWLVDGLQEAGYRVHLANTTSSQQYSGLKHTDDDSDAWWLADLLRLGLLKEGHIYPVQQRAVRDLLRKRGRLVEQRTRNIISIENLTSRNWGVRLKGDQVKELTVAEVEQSYGDENLALAVTSTLRIIEALDAQIKLIEKRVKQQIKLSEPYQLLKTVSGIGEILSMTIMLEAGEMSRFPTVGDFSSYCRCVDSLRLSNGKKKGSGNTKNGNRYLSWAFIEAANFAIRFDPIIRRFYQRKIARSKVVVARKAVAHKLARACFYVLRDQAPFEVERCFGH

SEQ ID NO: 159395 - protein, 320 aa, unidentified
MSVPVEPVYVGIDVSKAKLDICLLPSGQALVFDNNAAGIRQLVALLQKQPRVARCLLEATGRYERRCAADLMEAGFPVAVVNPRQARDFARAIGKLAKTDTIDARTLAEFAKLGHSRLSEKTPENQAILNDLVTRRRQVTQMLAAEKTRREGLTHKIPLASVNKVIRLLEQQREDLDREIAKLIESDDDWKNRRDLLASVPGIGNTTASQLVADLPELGKLNRQQIAALVGVAPLNRDSGTMRGHRSIFGGRASVRAGLYMATLAAMRFNAVIRPFGERLIAGGKAFKVAMIACMRKLVTILNVMVRNNEPWRAPVLQNA

SEQ ID NO: 159396 - protein, 325 aa, unidentified
MAEVVGVDVAKATFDVAVALDQAGKFRTRAKLANAAKGFEEFAAWMDKHAPGAAVCMEATGHYHEALATFLVGRGTVVHVVNPAQVKYFAKSQLARTKTDRTDAKLIAQFARSQATSAKLLRPWVPPTPAQRVLRALVERLEDLKAMEQMEANRLEVADPAVRGSVEASLKELKQQIKALEKRINQHIDSDPDLRRDADLMDSIQGVGKTTAAFLLATLGDLRRFKQPGHLVAFAGLNPALRESGTYKGKVRLSKTGASSLRAKLYMPALVAMKHNPVIRAFYERLLARGKQPIVGVCAAMRKLLHLVWGVVHSGKPFDPLHAVA

SEQ ID NO: 159397 - protein, 448 aa, unidentified
MQSEDLTLEVVHPDAAGIDIGNESHYVAVPPTRDSQPVCRFGCTTSELKAMADWLKHCRIRTVAMQSTGVYWIAVYDILEEAGFEVYLVNARETKNLPGRKSDVQESQWLMKLHTYGLLRNSFRPSQEIRTMRTYWRQRNDLGRAAGRHIQRMQKALTQMNIQLANVLSDVSGMTGQAIIKAILAGERDPHQLSGLRDWRVKASEEEIARSLEGNWQEDLLFVLKQEQDGYEFCQQQMAECDRQLEQYLQQREDRTQGTRLPEEKRKERLRKKKKGNAPQFDLRAELFRMTGSDLTQIDSIDGTTAMTILSEAGWDMSKWKTEDHFVSWLRLCPDNKISGDKIIGKGRLPTNNRATLALKMAASTLRRSNTYLGAQFRRLRSKLGAPVAIKAMAAKLARLLYRMLRYGMSFIDRGEAFYESQHRKLQINYLKRKAANLGFQIIEAPAA

SEQ ID NO: 159398 - protein, 485 aa, unidentified
MAKRKMSTFERLKRGELNRKQRRDLGRKVAAGDPGLTIENPNAGGIDVGNESHYVAVPPDRDPNPVREFGCWTAALNQIAEWLQSCRIDTVAMQATGVYWIALYDVLEQHGIQVVLANAQHTKNVPGRKTDVQECQWLMKLHTYGLLRDSFRLAQEMESVRTIWRLRDRHVKEAGRAVQHMQKALTKMNIQLANVISDINGLSGQQIIAAILQGERDPWKLADLKHYRVRASREEVARSLEGNWREDVLFELQQAVDSYHFAHRQMQECDRKLEGYLASLPARMLDIPVQPEDTQAATPKKKTKKAKRPRGNQPHLDLKTELKRICGVDLTSIDGIDVMTALTIVSEIGTDVSRFQDETHFASWLGLTPAKDITGGKTIGRGKRKVKNRVAVALRTAATTLLKSDSYLGARYRSLRRKLPSFASAVKAMGRYLAVLIHRLLTKGEAWVDRGATQFERRHTEQELASLSFKARAKGFKLIPITEAS

SEQ ID NO: 159399 - protein, 313 aa, unidentified
MSEEKIFIGIDVSKDKLDVGVRPEGELMTFANTEDGIFLMTDFIKFKKPELIVLEATGGLEMASLRSLVSAKLPAVCVNPRQVRDFAKAMGILAKTDKIDAHVIARFADSVRPEIRSLKTEETEMLDALNTRRCQLVGMLTAEKNRLAIAPKWTKNDIQSSIKGLEKQLAKINRDLENLIRKSPHWQKMDKILQSVPGVGPIMSMTILADLPEIGTLNRRQIASLVGVAPMNRDSGKYKGKRTIWGGRARIRSVLYMCVISGIRHNPRIKCFYKRLRSAGKKNKVAITACMRKLMIMLNTMVKNGTCWNASGC

SEQ ID NO: 159400 - protein, 350 aa, unidentified
MEASAKAVPTAIGLDIAKNFFQVHAVDAAGRVVLRRKLSRGEVISFFKAQPRALVGIEACGTGHYWAREIAALGHEVRLLPPTYVKPYVKRGKTDAADAEAICEAVTRPNMHFVPIKTPEQQAALMMHRSREMLVGQRTALVNALRGHLAELGIVTAKGVHRVADLLAELIGADDGKIPPLARASLRCLAAQIEAVETQIAQLEALILEWHKGNEASRRLAKIPGVGPITASAVVATIGDASNFTSARHLSAALGLTPRQNSSGGKARQGGISKAGNTYLRRLLFIGAVAVIRSKRAREAGSWLARLLERRPAKVAAIAVANKTARVIWAMLRSGDAYRAPKAVAAPAAA

SEQ ID NO: 159401 - protein, 332 aa, unidentified
MNYELFVGIDISKLTIDAAAFTQETFRTPIHRVFNNSYDGFAEMLDWLTTYDITFERALFCCEHTGIYICPITAFMDANDLALWVENGLHIKRSVGIKRGKSDKADALAIASYAFSNQHMARIYRFPSVTASKLKHLLAHREQLVRHQTSLKCTCSELKGFDGENARYCIADSQEILAIYAERIKKVDAELAAVIEGDQELNAQFNLMQSVHGIGKQTAFSILVHTQAFAAFSDYRKFASYCGVAPFPFSSGTSIRGRNRVSSLANKKLKALLTMCALNTIKKDNEFKRYYDRKKAEGKNSMCVLNVIKNKLLSRVFAAVKRGTPYVAEIAA

SEQ ID NO: 159402 - protein, 360 aa, unidentified
MINVGIDVHKKRCQACLKDEKGKLIEELSIPNTTEGAEQLARMVTTYGEAKIVLESTGNLWIRLYDTLNQHAPTFKVVLANSNKTRIIAEAKIKNDRMDARVLADLVRADLVAESYVPTNDIREQRALLRQRRSLVNDIVAVKNRIHNQLDKYDLQPHYSDLFGKQGRDWLRNLQLPPIERTILDVNLKQLQSLEESVHTLTVKIAQEAIDRPDVKLLMGFTGIDYYSAMLLLSEMGPITRFPSAKKLVSYAGLAPGIRQSADHTVHGRITRDGNKYIRWILIEAAQNASRFDPKLRPFYLRIAARRGHQKAITAVARKMLVSIYHVLKRQETYQGQRDELLERKINRLQRTVDSSLQAE

SEQ ID NO: 159403 - protein, 341 aa, unidentified
MMKKALSANAFKDSIGIGIDVSKAELVIVGFNAAEQYIKRVANEMGLILDFMKALQGSGYSGKLICESTGHYHLKLVLACHEVGMEIIVLNPLQSSKHTKAKVRKTKTDPQDGLTLAMMCVNEPQLPKPMVLDRPKILIRLKMGQLAALEKQLQKGQASMNQYEQTYAGLGLEQSELQISLRTHYQSLKGLRQSMEQELEKLLRESVADPASFRRLQAMPGYSDLVCGLVSQLDRRVKDDDSWVAYSGLDISVRESGSWRGKGKLTKRGNAYLRKRLFQAAWGAYMNNADVRDYYDALKAGGRRHTEALCIIARKMLRIAYHVVVNEVEFDSKIAFAQHNT

SEQ ID NO: 159404 - protein, 350 aa, unidentified
MVVVGADVHKRTHTFVAVDEVGRKVGEKVVAATTSGHRQVVRWARSQFGVELVWAIEDCRHLSARLERDLLSADQKVVRVPSKLMAQSRASARTRGKSDPIDALAVARAYLREPDLPVASHDEVSRELKLLVDRREDLVGQRTSTINRLLWRVHELDPGRAPKPASLDLSKHRRLLGDWLATQRGLVAELAREELADITRLTEAINALTKRIGERVRAIAPALLAMPGCGELTAAKLVGETAGVTRFKSEAAFARHTGVAPIPVWSGNTAGRVRMTRSGNRQLNAALHRIAVTQIRLDGLGRAYYRGRLAAGDSSTEALRCLKRRLARVVFHHLHTDHHNRIQPCQPAAA

SEQ ID NO: 159405 - protein, 350 aa, unidentified
MLTDLIDHVLGVDPDRDRITVAVVAARAQGAIASNDFPTTPRGYRAALHWADEHTERGRRVWAIEGAGGYGAGLAATLAAQNELVIEFDHPTARPSKDGAKTDALDAIRAARETLGRTSWAAPRSRGAREGLRTLITARDSAKIARVSAINVLKALIVTCPVKLREELRRLSLGQLVTRCQRLRLDTATDPELAATKLSLRSTATRIHHLTVECRDLEKAMEPLVDALCPRLLTEPGVGVLVAAQLLVSWSHPGRCRSEAAFARLAGVAPLPATSGQTQTRHRLSRGGDRQLNRVIHTAVLTRVKTDAQTREYLARRIAQGKTKREAMRCLKRYYSRHLFRLLESASVPS

SEQ ID NO: 159406 - protein, 437 aa, unidentified
MSIPFALDTVLAVGVDPHRESLDVIAIHFPEEIVLDETFDNTRVGHRALWSKARALAAEQGLSLIFGLEDGSNYGYALGRYLVNQGICVKEVNPRMTSRQRDFYGEDKTNRLDALATAAILLRAYDRLPDVAVVQEATEATQELSRYREQLVKEQTANLNRLHRHLANQYPTYKTFFSQLNGVTALHFWATYPTPAHLRATTPQELAHFLHEKSKHCLGAESARQKARQIFKALDDAPWSEPGLLAKAQGTLIRDLAQRLLQLKRSIEGIEAKLEETVPATGQQLETFQGIGTVSAAVLIGETRDTARFNHDKDRFAKYNGSAPVTKGTGKHARQVENHWCNRRLKSILGQVALAARHNEPLSAEYYQACLDRGLDPGEAHKRLMRRLSDIIFAMMRDKTPYDPEIHRRKQQRHKRKGKSAAPAVTGGLSLALFPPR

SEQ ID NO: 159407 - protein, 309 aa, unidentified
MKEELVYLGVDIAKSYLDAAIGDERRRFANERIGHRELIKWVKQLKAPVQVICESSGGYERALVQALVGAKLKVSLVQANRVRQFARAAGILAKTDRIDAEVLCEFGRRMRPQTVTAARLEQERLRELESQRRHLTHLLVMEQNRGARVSDASVQRLNRRLINQIKKQIEHLDLLIKVYIDQSHELSAKAAKLTSISGVGARTAALLLAQLPELGQLNRREVAALVGVAPFNRDSGKMRDKRAIYGGRRPVRHGLYMAALVAAHHNPILRAFYLRLRAAGKPGKLAITATMRKLLIVLNSALKPDLNYT

SEQ ID NO: 159408 - protein, 362 aa, unidentified
MLILAIDLGKAKSVACWYQTDDAAHEFRTVPTRPGDFHTLLTDRPVDRVVIEICDAAGWIVDLCRTLAIPVQVANTNQEAWRWKNVKNKCDREDAVKLARLSAMDQLSLVHVPEKVVREWRSLILYRHKLIDRRTSVRNAIHAILVAQGMAMPGRRSMWSDDSMSKLRVLARPLSECTTMEELWRGHLQMELQQLDELCQRVAELDQKLDALGQADQRVRRLRTIPGVGPRLSELVVAMIDDPHRFANARQVSAYAGLVPRRYQSGAMDRSGRISKAGCGKLRKLLTEIAWGMLRHNAHGAVVFNRISKGQKTRRKQAAVALGRKVLCWCWAMLRDGSEWRVPTPHAKRMNNTVPLPAIASG

SEQ ID NO: 159409 - protein, 394 aa, unidentified
MKLVGIDVGKNSHHFCVMDKETGEFNVTPTSFSNNKEGFDFLINSLKPYSKKSILIGMEDTGHYHVALLKFLLSNGYTVALINPKTTDLARKMEGGITKNDKLDTITICDVLDTPERKKQYRITKVDRFDLYEQRQLTRHHHNLKEELNVYCNRLQKSIDLVFPEFNTLFSSKYGIVYMNLLKTFGSAEAIASTDIRTIRKCFEIKGKGNRISLTPEKLKECAKNSIGISSEVETIQIKHLVSQITLIKEQIAEIDKKIEEFSITNNSPILSIPGISHFSGTSILAELGDIGNYSKPSQIIKFAGVAPYHYESSQYNAQHTGITKKGSKYLRKTLYQIILPVINNNPVFKKYYRLKISQGKGHRCAQGHCIRKLLRIIYHLLETGQSFDPALLR

SEQ ID NO: 159410 - protein, 402 aa, unidentified
MTIYAGLDVSDKTTHICAVDADGKVKWRDVCATDPEVLAKTLMKRFPDLSRVVLETGSLSAFLYHGLVERGVPAVCICARHAKGVLSARVNKSDVHDAEGLAQLARTGWFKSVHIKGSATHLDRTQLKVRDQLIKSHHAMVNQLRGLLKLFGLRMGKATTPGKRAERLEALFAQKPELRITLAPPVAAIAGLEEQMKVSLRGIKARAEADPVCQRLMSVPSVGPIIALSYKSSIEDPGRFARGEDVGAYAGLVPRRSQSGERDYKGRISKAARLLDEIREALRNGNYHPEPVRQRLIPKPGKPGQFRPLGIPTLIDRVVQSALKLILEPIFEADFYPTSYGFRRGRSTHDALERIQKCLHPSSRGSSVYRFVVEGDIKGCFTAIDHHVMMERVRRLRLVTVR

SEQ ID NO: 159411 - protein, 315 aa, unidentified
MASFLGIDVSSRSLDALVRPQGIKIHVSNDRAGFEELQRSLGGRSIKRVLLEATGGYERDVMHFLQDGGYKVIRVNPRRARAFAESIGVKAKTDAIDAEVLAHYAEVIPDQSTLRISPERALLRELLQQRDRLVQQRDDDLRRLKQAQSRVVSDFLKANLQHFKSQIKLVEQAISQQAEALKDERVTQLVQVKGIGLVTAGKLVTLLPELGRVESREIASLVGVAPFNHDSGKFVGKRSISGGRFEARRSLYMSCLVAMKYNPALKARYEALRERGKVAKVAIVACMRVFLVRLNAMLRNGEPWLDLVLPQPKRT

SEQ ID NO: 159412 - protein, 408 aa, unidentified
MQVLHPRCAAIDLGKDVLVAAIRLQDGGVQRVCRTFRTTRSQLLEMADWFEGVGITHVVMEATGSYWKAVWQVLERRFDLTLANPAQIKNLPGRKSDVNDATWMADLHAHGLIRGSFVPPPEIGALRELTRTRKQFVREINRHTLRIQKILDVADLKITGPISQILGVSGRRIVKALITGERDPERLADLVDPHVKASRGEIIEALQGQLTLQQRRLMKMHLKMIEYLEASLAQIDGDIQKAVKPFREILHRLTEVPGLSDVSAPALLAEIGVDMARFPTAGHLISWARLCPRLDESAGKVRSRKTLKSSAWVKTILVQAAWSAMRTRNSYFRAQFFRIRAHRGANKAIVAVAASILATVYHLIRDGQPYRDLGFNYFQRADDDRIVRRSVARLQQRGYVVTLKRGVA

SEQ ID NO: 159413 - protein, 320 aa, unidentified
MMAQNDLVVVGIDVAKDKVDACIRSLSQRQTFPNTAQGHRKLVAWLRKHEVSKAVMEASGGYERAWARVLREAGIEVRIVDPKRVRSFALSAGRLAKNDVIDAEMIAWFAETFSDAPGQKYDAAREELQTLVKARLSLIDLRMRLVSQSEHAAPGLVQKAHAHILKSLANEIAKLEAAICAKIKSMPDFAERAEIIESVPGFAETSSANLVAGMPELGQVSDEIAAALIGVAPYDDDSGKRRGERHIKGGRRWVRNAIYMPCVGAATLNNPVLKAYYQRLLAKGKEPKVAIIACMRKLIIILNTMIARRQKWDPSHYALS

SEQ ID NO: 159414 - protein, 443 aa, unidentified
MASNPFRIVRFRCGGIDIHKNFIVCAASCTDPKTLETTFDTSQYTCFNDDLDSMCKWFQDHSVKEVAMESTGKYWIPVANKLEEHGIRYTLVHPKYVKAASGQKNDKADARFICSMFACDMAGPGSVILPKAFREIRDLARRYWKLGYSVNSEKNRLQNCMTISNLPLDSIFSDPFGKSAQAVLQELLTNRAVSDEQILKLVHGRCKNKDKLLDAIHGSNITPDQNFKMADITQHLDELETHRSSALSEIMVRLEPYIDSVIQLTSIPGINVISAVLIMSEIGVDMSFWKSGRQLTAWSGFTPNNDQSHNKKKSTRITKAGTYLKPLMVQCALAAIRSKGDKGYFAIKYRRIRKRRGHKKAIVAIARMMMISVYHILKDHIEFHPSDYDELMNPKPKQKKAKEFSESEALALLTSLGYDVSHLQKVTDTDRKIPSQTAAASAI

SEQ ID NO: 159415 - protein, 411 aa, unidentified
MQVLYERCAALDVHKKTVVTTMMITQTDGSVQEQTRTFLTMTADLLTLDDWLSSHGIEVIAMESTGVFWRPVFNLLEEGRQVILVNAQHMKAVPGRKTDVKDSQWLADLLRHGLLKASFIPPKPVRELRDLMRYRKTIVQERADEVNRLQKVLETANVKLSSVATDVLGKSGRSMLDALLGGQEDPEILAELARGRLRAKLPDLRKALDGRVRPHHQVLLTRILAHIDFLEESLAQLQGEMEQYLDPFEEAMELVQSIVGIKETAAASILAEIGTDMTRFASDKHIASWAGVCPGNKQSGGKRLSGKTTKGNPYLRAILFEVAWAIAHTKDNYLSAFYHRMARRHGKQKAIMALAHKVLVIIYHILRTKKPYADLGADYFDQQDRGRIERHHIHRLEQLGYTVTLAPKEAA

SEQ ID NO: 159416 - protein, 342 aa, unidentified
MQITTIGLDIAKNVFQVHGIDAQEKVVVKKQLRRSQVIAFFAALPPCLVGMEACATAHYWARELRKLGHEVRLMPAKDVKAYLKRNKNDAADAEAICEAVRRPTMRFVQIKSAEQQGQLMQHRTRDVLIRQRTQIINALRAHLAELGIVAAQGEAGVNELRAIVADDRDERLPIDARASVIVLAAQLEALQTLIGSIEKRIKMQHRSNETSQRVETIPGIGVLGATAIVATVADPTIFRSGRDFAAWIGLVPRQDSTGGKQKLGPISKQGDRYLRRILVVGAIAVLRRAQEDPGKYPWLTQLLARRPFKVVAVALANKMARTAWALMAHGGTYRAPELAEAA

SEQ ID NO: 159417 - protein, 358 aa, unidentified
MQLHDANSPKLFIGIDIHKKTWSISIQTDLFFHKTFSIPSEPAILYKYVQNNFADHQVSMAYEAGCCGFHAARYFLNLGWEVLVVNPADVKFSDKDRYQKTDAIDSKKLSDQLKKGDLKGIFIPTEEHEELTSLARHRSQLTRRLRQSKLQIKSMLLYHGIIIPEEHDNSYWTRNFLTWLENLELSSLPGNLSLQGKIRMYKFVKLEYQQTANQLRAYCRKHHKTDYYLLKSIPGIGGFLAAVIIAECGDLRRFNTESQFASFIGLVPGVYSSGESSKKMGLTHRARHQLRSYLVEAAWIAVRKDPEMQAYYRKHYGKDVKNIIIKVAHKMSRRILSVIKTQTPYQVNHALVAEIPTS

SEQ ID NO: 159418 - protein, 442 aa, unidentified
MQTSSQDLESVSMIKAQSAKLTPYLAVPQNGEPHRSYEGGASSYAAGRPKLEDLVMLQTVASVKPSAVDYERTLVLAIESSNKSWVLAAQVPGLPYTKVKCTVNPKAEGLLAAIAGYRSRAAATGRSIERVIAVYEAGWSVFWLARWLMRRGVEVYVIQPSSVPVDRRMRRAKSDGIDAELLLRTLLAWLRGEPRVCSMVPVPDEADEDARRCVRERTELISERIGLSNRIGAVLATLGVSDYNPLLRNRNRRLAELRTGLGEPLPRNAHAKIERLLARLELVLAQIAELERERDAVVETEASDKASKMIQQLTSLRGIGVQSATVLVREAFVRCFANGKALGSYAGLASSPYSSGGIDREQGIGKAGNRRVRTVMVELAWLWTRYQPAAAQVCWFRDRVRSTGRRVRKIMVVALARKLLIALWRFIIDGVVPEGAVLKAAT

SEQ ID NO: 159419 - protein, 358 aa, unidentified
MAGLIRSSKGDAQWPLYVGLDVSLKTTSICVVEADGSTVWEGKVESEPVSLVKALTPWRAKIALVGIEACPLSEWLYGALVESRIQTVCIETRHAQRFLSSRPNKTDRSDARGIADMMRLGHYRPVHVKSKASQLLRTTLIARRKFVDHMLAIEDTIRGLLRVHGLKVGLVHRGRFAAKIEALLAEFPILRTAIEPLLEARNMMRKQKAVLDRQLSQVARKDDICKRLMTISGVGPIVSLSFKATIDDPARFKDSKSVAAHLGLTPRVYQSGEIDRSGNISKCGDKMMRHALYEAANSHLRISKKWSVLRAWGVKLAKRVGAKKACVAVARKLAIIMHRMWIDGTDFRFGQPPAVRAA

SEQ ID NO: 159420 - protein, 392 aa, unidentified
MYIVGIDIGKNHHEASIVSPEGKQIGHSLRFATTHKGADSLMSFIFNNIGNSSCIFGMEATGHYWYPIYSFLKARGYTIYVINPIQSDSLRKMYIRQTKNDSIDSFLIAEVIRFGQFTTTSMADENILAIRQLCRYRDSVISSRTEIKLRIGTIMEQIFPEYEKQFSSLWVSTSMGILEKYLTPENIENAPIDELFEIIKDKSHNRLTRAKAISIKEAAADTFGIKIAQDAFSFQLKQLIDRMNFLDKQIEALDCQILEYYEKFDCYLHTIPGIGIIGAATILAEIGDISRFKNSSSLIAFAGIDPTVRQSGEFNSTHNHMSKRGSPYLRHAIFLAATTCSFHNSPLNAYYKKKRDQGKHHLTATGAVARKLTTVIYAVLRDSKPYEPKKFC

SEQ ID NO: 159421 - protein, 346 aa, unidentified
MQTQIIKQAVGIDVSKDSVTVRYGSMDKEQNQLITNSVTFDNAPNGHEKLFIWAQKQKLSDDVPLWFLMEATGVYYENLAYFLSEKADQKVVVILPNKAKSFSKTLEQKSKTDDIDSKNLTILALGKPLTAWNITPELMRQLKALTREHLTLKEMATQVKNQMHAKKNSYKPLKQTIRRLQQQLNLYYKQLKDIEKQIHELVDSDKDLKDRIDKIDKIEGLGLMTIVTIIAETNGFALIENQRQLTSYSGLDVVHNSSGLKKGKTSISKKGNKFIRRALFMPALVAIRYNQKLKELFIRLVAKKNVKKVALIAVARKLLVLIYTIWKNNTDYIPNYTPANAGKNIR

SEQ ID NO: 159422 - protein, 389 aa, unidentified
MKIFVGIDIAKLNHFAAAISSDGEIILEPFKFTNDADGFQLLVSKLESFDKNSIIIGLESTAHYGDNLVRYLVAEFYQVCVLNPIKTCQMRKNNIRKTKTDKVDTFVIAKTLMMQDDLRFVSFYDLDMMDLKALGRFRQKTIKQRTRLKIQLTTYVDQVFPEIQYFFKSGLHQNAVYALLKEAPSPKEIASMHMTHLANLLKVNSHGHFTKEQAKELRVLAQKSVGANDSAISIQITQTIQQIELLDSQLDKIEAEMTDIMKFNDSVIMTIPGIGYINGGMILGEIGDIHRFSNPNKLLAFAGLDPSVYQSGNFQAKTTRMSKRGSRVLRYALVNAAWNVVRNNATFKAYYDAKRAEGRSHYNALGHCAGKLVRVIWKMLTDEVEFNLE

SEQ ID NO: 159423 - protein, 392 aa, unidentified
MINIGIDVGKFKHCACVMNDSTGEILKDSFFFENNQEGFQLFYSNIKPYLKRKHKAGMEDTGHYGNNLINYLLEKNVTVALINPRATNLRRKQLGVNAKNDRKDAQLIAQMLTDRQLWRSVSKASIKYQELRDITRLYHQLKEQKNEFQNRLQKALDIVFPEINSLPWTAYSDRYMNLILAYPSAASIASTDIRSLRKILDSKGRGRKPKLTAEDLKTAAKASVGDSENHAAGLEVQAMVNIITAMDAQIDTLEKKIEEFSSELNSPITSIPGIGPITGMTILSEIGDIQNFHSAAGIVSYAGMDPGRRQSGIYDAKHLPISKRGSRYLRKALYQAIFTVTNNEPIFRLYYKHKMDQGKIYRCAQGHAARKLIRVIYKLLSTNTQYDLNLMK

SEQ ID NO: 159424 - protein, 405 aa, unidentified
MIVGIDVAKERHNAFFGTACGRTLHKRLIFDNTIEGFRKLLTLTEALKVQYDLSKVVFGVEPTANYHKPLAEHLLKCGHVVVLVSAAAVKNNRQLLDSRWDKHDTKDSANVADLISQGKCLYYEYPDPKVRDIRNLLSLKRRLKKEEHGLRVRIRNQLLAQYFPEMDRHFGPSVSLSVIRYCLDPSAIAGLQYDEFCRSVAPGKLNLSQQKRLQAIWQTAPESIGCRVGDAVPFEAQVMVSKLHQVRETIKAVEKKIEDLCIEFPEYSCLLSIPGFGPDVSSKVLAAIGYPLRFTSSKQVLKMAGFDLCANRSGKTSNSATPVISKQGKADLRYALYQAALIASLANKDFMTYFTNKLRGRQREKGIGTKMRVKLAAKLLVIAWTLMKKKEPFDPNYLNKGDIQV

SEQ ID NO: 159425 - protein, 403 aa, unidentified
MTVRPVVWVGIDVGKTSHHACAVDETGKVLWNQKVSNEQRAIEQLIARAHKGADEARWAIDLTSPMALMLITVLLGAEQSVVYVPGHVVNTMTGAFRGEGKTDAKDARVIAETARMRSDLSEVAMPDELVVELAQLTGYRTDVMADWVRGVNRLRSLLGSIFPGLEAAFDYSNRTPLILVAHLCTPAEIRAAGIKGVTAYLGDNGGWPTAIAKTAATAVAAAKQQPLALPGEAGTAALVKRLAGKLLDLDHEIKDIDKTITERFRDHPYAHIIESLPGFGPGLGAEFVVVTGGDLASFATAGRLASYAGLVPVPRDSGRISGNLHRPKRYNRRLRRVFYMAALSSIRGDGPSRQFYDRKRGERLIHSQALLALARRLVDVLWALLRDGREFTPDKPTPATAAA

SEQ ID NO: 159426 - protein, 370 aa, unidentified
MSKDISYVGLDAHGETIHAAVLLPEGVGPVEDRFANTPEGLRRFVRRVRRRAPGEVVCAYEAGPLGYGLMRELEALGVGCVVVAPALIPVRPGDRIKTDRRDARKLAELLRSGLLTAVYAPTPEQEAVRDLCRAREAVKRDQTRVRHRLSKLLLRRGVRWTRGRKAWTRAHVQWLRGLRFEQAADQAIVDDHLLALEQLEDRLEALDAKLVSIAREAPWAEPVAWLRCFRGIDTLTALSLVAEIHDWHRFRSPRELMAYVGMVPSERSSGGKERRGGITRAGNARVRRLLVEAAWHYRHRPAVGRRLRERRRGQPPRVIALADRAQRRLHARYRRLLARGKAPNQVTVAVGRELVGFLWAALQAREPEAA

SEQ ID NO: 159427 - protein, 346 aa, unidentified
MHMKDILLVVDYHLENLEIRRLNGATGEERRWKQPTTRQGILEIVEAARKEIAPGGGQVFWIMESTTGWARVKELIGDRVQFVLANVLQMPLPPKGKRRKTDKIDTARMMREECNGSLPRAYQPSRELREIRRVVDYRLALVHRRTALKNWISHYLSHETWHSTANLWSGCGLKRLKSLKLSASDRFVVGLKIEELEQVMALLEKVEDQVQVIYGQWPAAQRLDRIRGIGAISAVTMLAYIGPIDRFAGADELISFAGLAPGVHRSDGRGYNTRIGGGGTHSKLRFFVIEASKWLREIPRYAPAYERVAAKRGKNVAKLVIGRMFLRSLYKMLQTDAEFQPQTTAA

SEQ ID NO: 159428 - protein, 321 aa, unidentified
MVYIGIDISKSSFVAAYPSAKGYRTQTFPNTAAGVRKFIATLLGTEYHCVMEATGNYGFLLLYLLHQSGIAVSLVNPKQIKHFSRMMMAVTKTDEKDACMIAMYGEKMNPPIYKMPSQAILLLKQKKTVIRQLRKQLVASKNLRGSLVVLPYRDKACVRTLDKTIDFLTKQIEQLEAELADIASSEFDKQLKALTSIKGIGITLATALILTTGGFTCFDNAKQLSRFIGICPTYQQSGTSVNIKGHINRNGDEHLRSLLYVASWSALRSNAACRECYLRLKANGKPSKVALIAVANKLVRQAFAIVTTNSIYIDGFVSTKK

SEQ ID NO: 159429 - protein, 337 aa, unidentified
MSSKVIEKFFLGVDVSKKTVDCVLYSEKIDKMKYENHFKTTNDEKGCEEILMWLKKRKATQKSTIICMEYTGRYSFIFANNLAALGLKFCLIPAIKIKGAFAGARGKNDKVDAIRIAQYAYRYKDELKPTELKNDKILKLRDLMNDRKMVVIDIASRKNILKEHKNTPEDSRYQRAKEGIEFLSKQLQEIEDDIIAIIKSDDALAQNYTLLTSISGISLVNAVNLIVFTNNFKSFKNAREFAAYCGIAPFEYTSGTSVNKGTHVSKMGNKQVKADLSMAAQAAIWCDAEIKQYYKRKRQEGKSFGCVLNAVKFKLISRAFAVIKRGTPYVNTRKFAA

SEQ ID NO: 159430 - protein, 364 aa, unidentified
MDVHLRSTTVCALDAETGEAVTRRFRGNPWGEVAEWMSGFPGPSLAAYESGYLGFAPQRELSGLGVDCVVAAVSKVPRSAADFSSKNDRNDAARMAKAILSHDISPVWVPSPEIEGLRDLAGAHDAATARLAAAKQRLLAFLARRGYAYGGTTPAGNPRRYWTYDFLRWLDKVRPADDGGIRALAALRNEVEAAAETRDDLLAEYRAAVAAGPLSAEVEALQSIKGCGFALAAAFASEVGDFSRFRSGRQVTAYFGLAPKQRSSADSVRLGGISGAGNALVRKLAVEGSWSYVQASHQPKLMPKGSGVPLEVRMHGRKGSERLLRRREEMLARGMPQAKANAATAAELVRWLWALGAMCREATE

SEQ ID NO: 159431 - protein, 324 aa, unidentified
MDTKNNQNEINVGVDTGKSQLDISIRPLDVCFSVSNDDIGIKQAVKDIKKHKPTRIVIEATGRLECAFVLACKKANLPICVVNPAHVKKFAGAIGRLAKTDKLDAQLIAHFSEAIKPAVTELRPDEMQLMSDLLARRRQLICMQTMEKNRLKILPKSLHKSIKTVLKILSTEIDNVDKSLKETIELSPEYQAKNAILQSMPGVGNVVAFNLLSNMPELGYITNKQAAALIGVAPINRESGAYHGERSVKGGRYQIRSVMFIAMLSAVRCNPVFGQMYQRLVAQGKPKKKALVACVRKMIVILNSMLRENTMWDEKMLKNHYLTS

SEQ ID NO: 159432 - protein, 362 aa, unidentified
MSHGISRQTERTVGLDLGDKYSYLCVLDTQTGELVEEGRLRTIPDDLRRRFDSEQRMKVVIEVGTHSTWVSRLLTECGHEVLIANPRKTRLIYGDKHKTDKLDAQKLARLARVDPEILYPIEHRGEESQAHLALIRSRDVLVRSRTQLINHVRGTVKSFGARLPKCSAESFHKKVADALPPELAEALEGVVATICSLTERIRDYERRIERVCKESYPQETGLLQQVPGVGTLTSLTFVLTLEDPDRFEQSRAVGAYLGLVPAQEHSGERDPQKRISKEGDEMLRRLLVSSAHYILGPFGPDSDLRRYGEKIASRGGKNAKKRAVVAVARKLSVLLHRLWVTGEAYEPLHNARSTGTLGEEVA

SEQ ID NO: 159433 - protein, 311 aa, unidentified
MGKTIEFSQVVDRCCGLDVHKKVIVATVEGTGIARETREFESTTRSLTELKEWLLELGVTHVAMESTGVYWKPVINILESGGFTLLVVNAQHIKYVPGHKTDKKDSSWICKLLRAGLLKGSFIPDRAQRDLRDLTRYRRKKVQEVTAEKNRMLKVLEDANLKLSSVFSNVSGVTCTKVIDAILDGKTDPDHLTSLCTHGRLQSSKEQIRDAVEGRFTEHHRFMLKAIRRSIAGLEEEIAELEAEIDRRCEPVQEEIERLCTIPGIDQTGAKELIAEIGVNMEVFPTAANLASWSGVSPGNNESAGKKKART

SEQ ID NO: 159434 - protein, 355 aa, unidentified
MNGEKYIGLDVHQATISVAVMDSKGKVVMESILETKAATILEFFAGLRGTLAVTFEEGTWAAWLYDLLKPHVAKLVVCNPRKNALLKHGNKSDRIDARKLADRLRLNDLEPVYHGETGVRMLRELARSYLTIVKDLSRVMNRLKALYRSWAIPCAGRDVYYTRHRSEWLGKIPEAGTRRRAEQLYLQLDMLQHLRQQARRELLAESRKHAITAKLRKIPSLGPIRSALAVALIQTPHRFRTKRQLWTYSGLGLETRDSGEYHYVQGQLRRRKKQVFIRGLNKDHNHDLKGLFKAAATRASVQPGPFQDFYQRSLAKGIKPTMARLTLARKIAAITLTLWKKGENFDPEKLKSQTA

SEQ ID NO: 159435 - protein, 379 aa, unidentified
MPSENVVHIAIELSASSWLIGARLSDSDKVRLHRVDGGDTRALLALIDELRTRAASKSNAKPEVICCFEAGRDGFWLHRVLTAQGITTHVLEPTSILVNRRARRAKTDRLDAEAMIRVLIAWLAGDRRVCSMVHVPTPEEEDAKRPHRERQQLVQEKLRIENRIEALLFTQGIRKRPSLRSWDRDMAALRTGDGRAVPPSLRAELDRLRRRLVLTLQLIGELEGDRTKAVEEASATDVMVGKIIALQRIRGIGENFAPVLVREVFYRSFVNRRHLASYVGITPMPYQSGGMDRDRGISRAGNPRARTTMIQLAWLWLRYQPGSALAIWFRERVGELQGRTRRIAIVAMARKLLIALWRYVETGVVPDGIEFKTEIAATA

SEQ ID NO: 159436 - protein, 340 aa, unidentified
MKQFIRIGVDLAKNSFQVHGLESEDGRATARKLSRSAMPGFFAGIKPCLVGMEACGSAHYWARELRAMGHDVRLMPPAYVKPYVQRGKNDAVDAAAVCEAVSRPQMRFVPIKSQEQQATLMAHKTRDLLIKQRTMGVNALRGHLAEFGVIAAKGIGRVEELVEKAAEANLPEMARAALNVLVGQLDGLDAAIAEVTRQIAGAHARDPFSCLVASVPGIGALAASAITASAPDPRVFKSGRDFAAWLGATPRQYSTGGKEKLGAITKQGNRSLRRLLVLGAISLLRVAAKRKGALRDWLVALRARKAAKVAAVALANKLARIVWAVMTTGEPFRAHMFSRA

SEQ ID NO: 159437 - protein, 391 aa, unidentified
MIYIGIDVAKDKHDCFITNSEGEVLFNAFTIPNNADGFHDLFQKISSLTNDFSNVKVGLEATGHYNYNLLGFLIDKGLPTFVINPLHTNLFRKSLSLRQTKTDKVDAHTIALMMMSGVNLQSYSNTSYHNEELKSLTRYRFDKVQERAKLKTSILRLVNILFPELEKLVPSLHMVSIYALLAEFPSSAQIASCHLTRLTNLLANASKGHYNKEKAIEIRNAAKHSIGSNMPAKSLELKHTIRLIQELTSEIDEIECSIKSIMDEIRSPILSIPGINYRMGAMIIAEIGDFNRFSSPDKILAYAGLSPSTYQSGQLDGCYSHMEKRGSRYLRYALFNATKFVCIWDNQFSAYLAKKRSEGKHYNVAISHAAKKLVRVIYQLEKSGQLYHRAA

SEQ ID NO: 159438 - protein, 359 aa, unidentified
MAGKVTETAVVGGVDTHKDLHVAAVVDQNNKVLGTQFFSTTRQGYRQMLAWMTSFGALKRIGVECTGTYGSGLLRYLQNAGLDVLEVTAPDRMERRKRGKSDTIDAECAAHAAFSGIRTVTPKTRNGMIESLRVLKTCRKTAISARRVALQIIHSNIISAPDELREQLRNMTRMQLIRTLGSWRPDASEYRNVTNVYRISLKSLARRYLELHDEIADLDVMIAAIVDELAPELIKRNAIGYESASQLLITAGDNPQRLRSESGFAALCGVSPVPVSSGKTNRYRLNRGGDRAANSALHIIAIGRLRTDDKTKEYVARRVAEGHTKMEAIRCLKRYISREVYTLLRNQNRQINSFSGITG

SEQ ID NO: 159439 - protein, 371 aa, unidentified
MEQSSKTLYVGLDVHKESIAVAYAPEDRGAEVVSLGPIGTRQCDIDKLIRRLESKAATLVFTYEAGPCGYGLYRYLTGKGLACQVVAPSLIPRKAGDRVKTDRRDAMTLARLMRSGDLSAIYVPGIEDEALRDLSRGRDDAMQDLKRSKRRLKSFLLRQDIRYEGRATWNAAHLRWLAEVVCPTPPQQIVFQEYLRAVSEQQERRQRMEHELHEAVKGWRLYPVVEAIQALRGVELTGAVILMTELGDLTRFENPRQLMSYLGLTPSEYSSGARRHQGGITKAGNSHARRALVEGAWAYRYPAKVSRHLQLRLEKLPAEVQAISWKAQVRLCKRYRQLTARGKHVNQVVVAIAREMAAFAWAIARLVPLAS

SEQ ID NO: 159440 - protein, 454 aa, unidentified
MAKARAKGKTLNGFAEINHDAAGIDVGNAQHWVAVPSGRDTVSVRMFGCFTSDLHALANWLMKCGIKTVAMESTGVYWIALHEVLESRGFQVCVVNARQAKNLPGRKTDVKDCQWLQQLHTYGLLTASFRPQAEIIVLRRYLRHRETLVQEAATCIQRIQKALTEMNLQLANVISDISGTTGLRILHAIVEGERDPQRLATLRDWRIKATPEEVANSLLGNWRDELIFIVEENLTLYGVYQEKIERCDQRIEHHLKSMPAQIEGDNNPLPKPRKGKRPHGNAPAFDLRSELYRVTGTDLTQIDGIDVVTAQAILADTGTDMSAWRTEKHFVSWLGLCPDHRISGGKVLQRGTRRVVSRAATAFRLAASSLRRSQSALGAKYRRLQSRLGPPKAITAMAHHLARLFYRMVKYGSQYIDHGMAAYEARFKEQQLKWLSRKAAELHFRLAPIPDLSS

SEQ ID NO: 159441 - protein, 369 aa, unidentified
MRFYTKQHQHYCGIDLHTKTMYICIIDADGKTVFHENAPVNADVLLEIIEPYLPDIVICVECIFTWYWIADFCEERDIPFVLGHALYMKAIHGSKTKNDKIDSKKIAKLLRAGLIPMSYVYPRGLRSTRDLLRRRMYFRRKRAELLAHIQNTKSQYNLPGFEKSISYKANRKNVVCHFDDASVQQMIGCDVSLIDHYDVLLQQVELHILKHAKAHRPQDLFLLQTIMGVGPILSLVILYEIHDISRFEKVQHFTSYSRLIRPTKESAGKIKSGGGKKMGNPFLKWAFSEAVLLLIRESDAVKELHHQLKNRYGKARALAILSHKLGRTVFYMLKNKEAFNEKKFVNEKAKTKTVINEKTKTAMPVELNV

SEQ ID NO: 159442 - protein, 437 aa, unidentified
MNQADRPSSPVDASSFQMVVGIDIGSQTCSMCTLTPDKRQVIKPTEFANAPAGFGVLQEQLEQLGVPPEQVLIGLEATSRYGENLSHFLESRGYQLCLLHPRQTHQFAQQRGLRAKTDHLDATTIARVLLSGEARRGYVPSDLIATSRELVRLHTQLSDEVARSKNEIQALLTVLFPEFSQVFADPCRATALALLKLYPSAQAIATAGGEAIAAKLHELAPRNYGHRTAEHLVQLAQHSVSRGFAVAARSTSLKILCHQLEHTQANMAQLEREIDTLLETDAGAKGLISVPEFGHKTVAVLRAELGDVTRFQRTDQVVAYAGLDIEVKESGKWKGQAKLSKRGSGRLRRILYMATVRCIRLPSSAFGAYYHRLVARGMKKCDAMMAVMRKMLIVAYRLLRTEETYDPTKVCAVVVTQPVELPPLHTPASTKVVAAKA

SEQ ID NO: 159443 - protein, 339 aa, unidentified
MKTYVGLDVSQKVTVICVVDDAGEVTWEGTCESNPASILTTLTRRAPKSDLIAFETGPLAVWHWHALKNAGLPVVCLHARHVHAAIALQVNKTDRNDAFAIAQVARSGWFRPVEMKSYDAHRIRLLLTARTRVVSMRTTLYSQIRGVLKTFGIVLPPGRGAAFERLVREATSQDDYLESVVGSLLDIWCRVSDDLRRYNRDLERLARASDICRNLMTTPGIGTLTALAYMSAIDDPSRFRRSEDVGAYLGLTPRRYQSGEVDRSGGISKCGDRMTRSLLFEAAHILLTRSKEDNYLKDRGRGLARRIGPKKAKIAVARKLAVVMHRMWMNEVLFNPSPA

SEQ ID NO: 159444 - protein, 327 aa, unidentified
MAKRTTICAGIDTGKRKLDIALDGSSEQLQIDNTPEGYKTLLVWLRRHRVKRIGIEASGGYEQAVVAELRRQRFVVVVFQPAQVRAYAKFHLQRAKNDKIDAALIAACTAAVKTIHDAPDARLLPFAEHLTMIDQIAEDIARLKNRIETCRNLRFRQNWKEDIARLQNRQKVELKALVAAIGEHRDLAERLELIGSVDGIGPPTAVAILVRLPEIGRISREQAAALAGVAPYDDDSGEHAGTRHIEGGRKRLRRALFTAALPASFRWNPQLIALYRRLKAAGKEHKRALIACARKLLIFANTVVARGTPWDHARPPVPSMTTVPQPG

SEQ ID NO: 159445 - protein, 362 aa, unidentified
MRIIGCDLHARQQTLAMLDTTTGEVVAMILTHEGDNVREFYSALPRPVRVGIEATGSMQWFVNLMEELGIQCLVGNPAQIRACAPRKQKNDRRDADLILKLLAENRFPAIWLPSKELQDLRSLLRHRHQWVRMRTRIQNALQSIALANGLRRGPALWSHDGQSRIASLSLAPHTAYRRSELQAMYKQFEAEIEKLNQRVEQQASQRPGARLLMTHPGVGPITALATEVFLGNPARFADSKALASYVGMIPREYSSGGRQRLGGLSKQGNPLLRFLWGEAGAHAARKDPELQRFYRRKLVQKGLGKASVAVARKLGIRLWIMLRDQIEYHEFCRRGQKQQKSSGACAGMPETPYGAKSHRPVD

SEQ ID NO: 159446 - protein, 312 aa, unidentified
MNAKIDPIHYVAIDVSKSTLQVQDERRAFVVSNDAKGHRKLLDHLRTCTNPLVVFEASGGYERDLLRALHEAGMPLTMVNPARVRAFARSEGVRAKTDPIDGKMILAFAKSKALRPMEAPSEALLKLAALLDRRGHLVEQLAREKNRLQNSEIFIHRSIKRMIRILEKEIAAIEEAIEKLLDSDPGLQSRAGIIESVKGVGKVTSWTLLAYLSEIEELDRNRLVALAGIAPFNRDSGKFSGRRSIIGGRAKVRKCLYMAAHTAASCNPVIAAYVQGLRDRGKPYKCAIVAAMRKLLIHIQSLMKKAQLSPCQ

SEQ ID NO: 159447 - protein, 422 aa, unidentified
MLAESHDEEQIIARVAALDIAKAELVCCVRVPSPAGGKRRLQEVATYSTMTQALTELANRLVEMRVQRVVMEATSSYWKPVFYLLEAHGLDPWLVNARDVKHLPGRPKTDVLDAVWLCKVAERQMLRPSFVPPWPIRRLRDLTRYRTDLVAARTAEKNRVEKLLEDACIKLSVVASDIFGVSGRAMLAALVAGERDPKVLAQLARARMRGKIDRLEQAFDGHFDDHHRFLLSRMLARIEGLDADIAAVDAQIDVQLAPFAEAAARLDEIPGIGPVAAAAIIAEIGVDMSRFPTAGHLCSWAKFAPGINSSAGKTKGSASSGHGNPYLARILGEAAVGTTKTNTFLAARYRRIARRRGQPRAVVAIGRSILVIIWHLLHDPDTRYRDLGSDHYARHVDPTAKKRSHIRQLEALGYTVTLTPAA

SEQ ID NO: 159448 - protein, 314 aa, unidentified
MIHAGLIVGIDVSKARLDIHVHPSGEHWSSANGRAGIAGLAKRLAGLRPAAVGMEASGGYEQPLAHALHTAGFDVHILPPARVRAFARAIGQGAKTDALDAMMIARCLEASRERLVRYAPDPARERLSALGTHRRRLIAERNGLASQLDTIAEPVVRRMIQARLRSIALGLVCLDKAVRTLLAATPHLQRQVDRLCQAKGVGPVLAGALVADMTELGHISAKAAAALIGVAPHARQSGASRRPGRCAGGRKALRDILYMATLSAIKARDPVLAGFYKRLREKGKPFKLALVATMRKMITILNAIARDDPAFQTA

SEQ ID NO: 159449 - protein, 410 aa, unidentified
MLAINLVINTIVSIDVSKGKSDYQAFKEMNVKYTGSRSIKHTKEGFDEIVSLVREMEKKLETEVCVVYEATGVYHRVLKKVLEDNNIKQFIINPLLSAITRKNDSLRSPKTDKLDPKSIAKTYYSHSLHNSHKPETIYHELRELSRYYEDILVHLRKDKVAFRAQLDVVFPGYDTLYDDLYGPVALAVIEKYPHPEMLQKKKINTVSKVIQSKTCHRQAMSDTMADKAIEYSKTIYSGCDKDDIEVLILQRFIKKLKEDMAEAERTIGEMIKLAQELPDFSIIKSIPGIGDNLAARIIAELGDMTRFKKKNELVAFAGLDPRISESGQNDGDHMHITKKGNKRLRCLLYLAVTCSIRLKRDDNSIKDFYIKKKQQSNPMCSKAAKTACASKLVRIIYSMCKTGELYQYNK

SEQ ID NO: 159450 - protein, 411 aa, unidentified
MQVLHSCCCGLDVHKRFVVACLIKSGEDGKHQKELRRFNTLTPDLLRLIDWLQEACCTHVALESTGVYWKPIFNLMEGLFERVLVNAQHMKAVPGRKTDTKDAEWIADLLQHGLLKASFIPPQPQRDLRDLTRYRSSLKQERTQHVNRIHKLLEETNIKLSSVFGDMMCKTGRAILDALVRGESNPAALADLALVWAPHKRDALVPALTGCMRAHHRFLLRELLGMIETLERAIARLDREIEERLRPQQATLERLDAITGVSHRVLETLFAEVGWELNAFPDAEHLASWVGICPGQHESGGKRMSGRTRKGNRYAKTILVQAAHAAGKTKHTYLGAQYRRLSKGRGIKRAAVAVGHSILVIYYHMLTTSQPYQEKGEDFFVHHDRSERERRLVKQLERLGYAVQLTQEHTI

SEQ ID NO: 159451 - protein, 433 aa, unidentified
MNARLTVGIDFSAQWADASLMAPDGTPLVRHQRFDNSQPGFEAFKRLLLETLSSAACSAVDLAGEATGMYWLPFFLELATDPDLRTYDAALFVLNPRWVKWYKQCLPQTDKTDRHDAYLIADRTRVHRPDTPWQLDLPMLALRCTTRYRRHLVQLLASEKSFFCAYLFLAAAAYQRLAPFSDVFGATSRLVLDDVCTLDALASLPVNALAEHLDALSHHTLPEPPRNATRLQQVARESFRLPTALGLSVHAILHTTLQHITFLEAQIAQVETEIARQLPHFPAIQQLSTIPGIGPVFSAGIGAEIGDVRRFLQGTKCDARGRVRPKTLRDAEDAVAKIAGLWWPRSESGAFAAEDRRMSKAGNANLRYYFIQGADRLRHWEPDYRAFYGRKLREVTQHRHKRALVLTARKSVGLYVGLLHRNEPYRSREARRA

SEQ ID NO: 159452 - protein, 333 aa, unidentified
MSQRQDRPGPTAWVGIDVSKDTLDACLLPEGGAPRHQTFANDPAGHAALVAWADGLDPSAGFCLESTGAYGLAVATALAEAGRHAAVVNPARVKYAGLMRGQGNKTDRADAKLIAEYASRERPTAWRPAPAETQELQALVRRRDDLREMAAREKGRLAAPGLSRAARQSLTRTVRFLGREADRLQREADRLIASSEALRADRELLLSIPGVGEVTAQAILAELPEPGRLASAEKAAAFAGLAPRQYRSGSSVHKRTRLSKAGNARLRKALYLPALTAIRFNPLLKALFERLVAAGKAKMAAVGACMRKLLMIAYGVLKNRAPFDPSWGMKRHS

SEQ ID NO: 159453 - protein, 504 aa, unidentified
MAPGRRLNIGEAQRGTPLGESRGINPPGRPVFTNTGREGCDGMANEERTGRPEGLKPIDEGFPVLRADVAGIDIGSQQHWVCAPTPTGKGREVAVFAATTPGVEQLAAWLKDRGVTSVALESTGVYWIAPHEILEAHGFDVVLVDTRELGRVPGRNKSDRRDCEWIQRLHSCGLLRGAFRPVEQVCMLRTLVRDKGTLIAERADWIRRMQKTLDQMNVRVHRAVSDVDGATGMAILRAIVAGERDPHQLAALRDPRCRKSEVQIAEQLTGHWRDDHLFSLQQALKMYDALSETIAAYEREILRQLERMTNVDRRDDQAPPPTSPTKAKAIKKRGEDPLRHALYRISGVDLTTIDAVGVETVNVVLSEYGPNLSQFPTEKQFVSHVGLAPHTPTSGGKVVKKKKKPGSASARVGAALRMAATSMRHSQTALGAYYRQVARRGGADVAVFATARKLAQYIYRLLRWGQPYVDEGVAAYEKRYQLARAQRLAAAAKNLGYRLIPVEA

SEQ ID NO: 159454 - protein, 382 aa, unidentified
MRFYPTQHPFYCGIDLHARTMYVCLLDQAGATLLHRNMTATPEALLKTIAPSRDQIVLAAECLFPWYWLADLCAEHGIPFVLGHALSMKAIHGGKAKNDTIDAHTIAVLLRGGMLPQASVYPAERRATRDLLRRRMPLARQRGELLAHVQNTTSPYNLPAIGKKIASKANRDGVAERFADPAVPKSIEIDLARIGDDDELLRDVERTLVKTAKHHDANPLYLRQTVPGIGKILSLVLLYESHDIARFPRVQDFASYCRLVTCAKESAGKRSGTSGTTIGNAHLKGAFSEAAVFFLRDNPAGQTLLTRLEKKPSTGTAFTILAHTLARAVYYMLTRQTAFDLDTFLQGYGRGAGELKASLDSHGMNLIRHARHAVKNCVCERL

SEQ ID NO: 159455 - protein, 384 aa, unidentified
MFFMGKDQSGNDLIQRFKITNNKADLGHLYETIERIKSKIPGKSDVVFGMEATGIYSLPLYSALKRDGYKVKLYNPIQTNGFRKINIRKTKTDPIDSAIIADMLRHSEPPQVSETKDMNLYQLRELVRIRHRLIEKQTVCKVQLVRNIDTIWPDYGNVMKRVSGATSMAILKKYSVPSKVRAKPFEQFYELVHKSSRSKISRIQAEEIYAHAGNVLTIPELDSVITFEIKTLISQLELYDVQIQSVEIRIDQMMKLNSSKIMSIPGIGDTLGPIILGEIGSVYRFSNVKKLIAFAGLDPVVSQSGRFENFSGPISKRGSPLLRQALFLAANVARQNDDNLKRFYDKKRSEGKHHYSALNAVAAKLLRIVYWVLKNNKEYQTPPN

SEQ ID NO: 159456 - protein, 343 aa, unidentified
MQHVAIDLGSRESQVCIRTADGTIVEEKKHPTRSLGDWMKLWPTSRVILETSSEAFRVADAARAAGHEVRVVRSTLAKQLGIGDRGIKTDIRDARTLSLLSCRTDVESVHIPTEETRQLRATITSRELLVQTRTQLNNRVKSWLRTQLWRLRSGSPETLPDRVRGKAAEQQQTLPEHIERVLLSLEALSVQVKAATQELKKLAKDSPTCRLLMTIPGIGPISAVTFVAAIGDVSRFEYGHRLESYVGLTPGESSSSERERRTSITKAGPSSVRRTLIQAAWAVWRGYPNDPMARWAMNIAERRGRPIAIVALARKLAGIMYAVWRTETPYQASKAARRQELTV

SEQ ID NO: 159457 - protein, 403 aa, unidentified
MITCGIDWAEDHHDIALMDDSGFIIERRRITHDPNGFAELLAMVADHGGTADDVPIAIETDKNLLVVALAGAGFTVYPINPRAVARYRERHGQAGNKSDSRDAAVLADIVRTDRHQHRRLPANSEQQQAIKALARQHQEAIWAQNQTISRLRSVLLEFYPQALQAFPRLKHRTAMEVLSIAPTPTDAAKLTRPRISNALKRVGRRNDPALVTQIHSDLHAPGLRQPDAVEVALGHTVASLVSIIVAMLDAVAVLERELITAFAEHPQADIIDSVPGLGGVLGARILAEIGDDPKRFSSPTGLRSFAGTAPVTIASGRSHYVKARKVRNRRLADACHWWAFAALTWSAPAREYYDHRRAVGDHHNAALRALANKLLGRLWWCLQHDQSWDDTAAWPRAATPAAA

SEQ ID NO: 159458 - protein, 346 aa, unidentified
MNQIIRIGMDTSKHFFQLHGVDTAERPMLRRKLRRNEVLGFFAKLAPTVIGMEACGAGHYWARELRKLGHEVKLMAPQHVKAYVKRNKNDGRDAEGLCEAMSRPTMQFVPVKTEEQQAALMLAGVRQQLIARRTQLSNAIRGYATEFGLITAKGLDKIEPLLGRIAQDERLPELGREMFAMQGRDYARLQIELKAIEARLLAWHRANADSRRLAKIPGVGPIGATALVMKAPDPRLFPSGRHFAAWIGLTPKDHSTAGKTRIGKITRAGDEMLRSVLVAGATAVIQQAKKGRGRPSPWLVALLARKSPKLAAVALANKIARIAWKLLTTGESYDGARMPGASALAA

SEQ ID NO: 159459 - protein, 327 aa, unidentified
MKKNPAPVYVGMDVAKATLQVHLNGHQFEFKNDSKGHAQLSEKLAKLTLPHVICEATGGYERPVVEVCHKAKILVSVLNPAHTLAASQAQGKRAKTDPCDAAALTDYGQRFEPEPTAALPPAVRAITELTLWLKQLIDNRAVVKTQAEHLANSFVSQRHQELLAHYQSQIETVEKEIKKMVQAQALFQQRVDCLTQIEGVGFRTALLTLVFLPELGSINRGATAALAGLAPWTRDSGTMKGKRCIGGGRAQVRPVLYMAALSASRCNPVLAPHYQGLKKRGKPSKVALTAVMRKLLIHMNSKLKKLAAKPVNEKPGKSNKTKKSLAK

SEQ ID NO: 159460 - protein, 350 aa, unidentified
MKTIALDVHADLSQLALVTKDGEVMMEMQVPTRAEELRRIVGGIPGPKRVVFEEGPMSALIHDALKDVADEVASVDPTRNALICRAEDASDERDAVRLAELANNRSTRTVYVPEEPYRTMRSLTRYDRTLADAVTTVKNAMKALCRRWAIPCKGTRIYGKKTRDEFCSQLPSSPLRWQFQSLARRLDSIELERTRAKRTVAKLARKLPIIEALKSIPGVKSVGAPTLVAWIVDPGRFNSRNARSSYSGLGLARKTTNWKPVGRARASKRGNRQLKRVLFIAATAAISGDNAFARRYQARIALGWEHRKAIRDVARKILFTACAIMRTGREYDDGRVSVPKSPGDAGRLRD

SEQ ID NO: 159461 - protein, 340 aa, unidentified
MNLIAVGLDIAKSIFQVHGVAAHGRSPLRKQLRRSEVLRFFAKLPPCLVGIEACHSSHFWGRELSKLGHRVRLIPTQYVKPYLLGGKNDANDAAAICAAAMRPDMHAVAIKDAEQQSLQSLHRMRQRLVLERTAKSNQIRSMFAEEGVVFPVSITHLRRSVSNAIGDPRSAITPILRRLGTMYLEQLAALERWLAELNEQLHQIATERDDCKLLTSIPGIGPIVATALVGTVGDPRQFRNGRQFAAWAGLTPRQRSSGGKTSLGGITKRGDVYLRTMLIQGARAVVRFVTRRTDRQAVWLQRLMQRRHKNVAIVALANKIARVAWAVLTRRTAYNLCQQP

SEQ ID NO: 159462 - protein, 363 aa, unidentified
MQNSITWVGMDVHAENNVLAAVRGSSEAVLFRAEFPNTPKGRERLAGKLAENAPVRCVYEAGPCGYELRRFLEGRGIECDVAAPALIPRKPGDRVKTDRKDAEKLARLHRLGELATVFVPTPAQEALRDLLRTREDAREDLLRRRHRLSKFLLRLGRRYAEGVRWTTRHWDWIRAQTFTDHNTETVFREYIVAIEQEVERIRRIEQQIVEESRSPEVGKAIARLRALRGVDTITAMTIITEVIDLNRFRSPRELMAFIGVVPREHSSGGRERRGSITKTGNAHIRRVLIESAWHYQRLPAGTPKTILVRREGQPPEVIETARKAELRLHRKFMKLLGRGKPKGIAAVAVARELAGFIWALGRG

SEQ ID NO: 159463 - protein, 427 aa, unidentified
MILASIERCAGIDVGKRVLSVCILTGPLDQEPREERRRYGTNYQDLLQLREWLQEEQITCVAMESTGSYWKPVFNVLEPAVQVCLAQPEQVKARKGHKTDDKDGWWLGHLLRHAMIAPSFIPVRGQRELRDLTRRRKKLLGAATAEKNRVQKILEDASVKLSSVLSDVFGVSGQLMLEKLLEGKAQPAEIAQLAQRKAKQRVPEIVAALEGHQLNDHHRRMIGFSLEHMQFLEQQLNQLDDAIVSQIEALGWNRQWELVQTVPGLGAHSAATVLAEAGVEMQQFPSDKHLGSWAGLCPGNNRSAGRSKSSHTHGGNPWLRSALTECAWAAASKRDCFLKEKFWRITTRRGKKPIALIAIAHTQLRLIYEVLQSGQPYRERNAEPPSEIQKQRLIRHHIRRLGKLGIQVRHSSLAPDAMDCRKRKQKT

SEQ ID NO: 159464 - protein, 413 aa, unidentified
MSLLRWVGRAIGLDVHRDFCVIAICEDGVVRSAGRVASTPEALGMLAESLLPTDRVALEVTGSCWEVARILEPYVNRVIVVSPDDTGITQARAKTDRLDARALARLLWKGELESVWMADDRSRVLRRRLARREQLVRARTSSKNEIHAALQRRLKDRPPSTDLFGVKGRRWLAGLELPVEERESVDAALRHVDFLEHEIAQVEQLIAQQAVAWPEIQRLMTVPGVNLICAATFMAAIGDVNRFTTSRKLVAYLGLDPKVRQSGEAPARSGRISKRGSASARWALVESTWIAVRQPGPLHAFYERTRGRRGHGKAIVASARKLAVLFWCMLTRGQDYAHQQPSLTAKKIRKLELKAGAPRRTEAAAGIWSANRAIRQAERQLAEQAEVSYKRMVQDRAGAPTRKVGASATPERA

SEQ ID NO: 159465 - protein, 360 aa, unidentified
MDKHKYVALDVDSANIVAGVYDSKGKTVMQCCLRNEGQAIQEFLKLLPGTVHVTFEEGTQAVWLYELIRPLVAEVVVCNPRQNKLLKAGNKSDRIDVAKLGKLLRLGELRPVYQGPSATQGLKQLVHGYAALVDDTTRVKNRLKALYRGRGLSCKGEMIYGREQRQQWLSQLETKELQRRATYLYEELDCVMRLRVEAEKVMCRAARKIEAYKWISSTPGLGAIRTAQILATAITPHRFRGKRQFWPYCGLAVVTRSSSDYEWVDGGARRKRKPIQTRGLNQNYNRTMKAVFKGAAVSALQQHQEFQEYYQRLCGKGMRPEMAQLTLARKLAAIVLILWKKGELYDSERLNQAAPGAGQQ

SEQ ID NO: 159466 - protein, 345 aa, unidentified
MTTMNYIGLDVHKKTISYCVKDVSGRIQQEGKIGSTRRELDCWMKTLPQPWTVAMEATIFSGWIYDHLLPHATQIKVAHPLMLRAIAAAKKKNDQIDASKLADCLRCDFLPECHMMPRAIRDRRRTLRYRHLLVRQMVQMKNRVSGLLMETGVEYNKQRLHKVSYFRELLSANGEVPPSIRPLLNLSRETIERCQKTEYALVSSLQRDPVLADRIKRLRTVPGVGPITALTWALEIGDVSRFGSIKKAISYCGLCGDERSSADKAMRMPLSKQRNKHIQRALVEAAKLAPRQNHEMAVIYDQERQKGNSNRATLAVARKMVAYLLAVDRQQRDFVPAEERRTTAT

SEQ ID NO: 159467 - protein, 408 aa, unidentified
MKTLLRRCAGLDVHKVEIVACLRLVEKGKVARRVRRFPTTTQGLLELVEWLEGAGCSHVAMEATGVYWKPVWHILDGHFALILANAMHVKAVPGRKSDVNDATWLADLLAHGLIRASFVPPTPIQELRDLTRTRKQLTREIVQHVQRIQAVLEEANVKLSSVISDIMGPSGRRILTAIIAGETDAEKLAALGSERLGCGRAALSEALKGRIREHHRFLFAQHLRTIEQLEESVAAFDARIAGALAPFRDVVERLNEVPGLGRIAIETIIAEIGTDMSRFPTAGHLVSWAGLAPRLDESAGKRRSTRIRNGAPWLKPALVQAGWAATRKKNTYLQAQFLRLKSRRGPKKALIAVAASILTIVYHMLRDGTFYRDLGPEYFARRSPAKLAANLANRIRNLGYHVEISATT

SEQ ID NO: 159468 - protein, 328 aa, unidentified
MSKVTKKVIGVDVGAKFLTVSFNDFENRDQVFNVENTQRSILSFLKKLRIEDYCFVIEATGNYSSRILHLSLVHGFDSSLINCMSVKHFARMKNIISKTDAEDAKLIRLYGEMFRPDIYISKSVEIEYLDQELKLLNDLEEEKRRYSVKLKSLRYHPQINPNTEKHYERRLKHLEKEIKEVEGRLPGLQDGEFKETKDLLQSVSGIGEKTSLQLMTATSGFKNFSSAKSLSKYFGLAPRIYQSGKKSYSPGKCRTSKTHIRGLLYVCSWTAIKHNKQCREFYERLLSQGKPKKLALIAVCNKLLRICFGVVKNKINYQPDYQKKTLKF

SEQ ID NO: 159469 - protein, 386 aa, unidentified
MQKLNDLSRSLTALEPDGTLIAVIEMSLSSWLVAGIVPGVERQPLKKLAVDESALLKLLHRWREEAEKAGRRIERIAVAFEAGRDGFWLARWLKVRGIEAYVIHASSVAVSREHRRAKTDRLDTELLKRSFLGWLRGERDHCKMVEIPTMKDEDAKRPNREHDSLIGERSRIVNRMKAALVRLGIRGFNPKLKRASTRLDGLRTPEGEPIPPNALAELRRDMERRRLVNNQIRQIEEERLERIEQAPCDGPHVMVRLLARVMGVGIETADMLVHEVLSRNMRDRRAVARYAGLTGSPDESGRKRREKGLARSGNARVRRGMIQLAWRFLLHQKNSALTKWFRSRTENARGTRKPMIVALARKLLIALWRLVREGIVPDGVVLRAAQ

SEQ ID NO: 159470 - protein, 396 aa, unidentified
MSGPSVTWMPVPAAQGYLVNPYKQGDTMTESSDYESIQVFIGVDVGKDTHHAVAVNRSGKRLFDRALPNDENKLRALISDLKQHGQILLVVDQSATIGALPVAIARSEGVLVGYLPGLAVRRIADLHAGEAKNDARDAAAIAEAARTLAHALRTLKVADEQIAELSMLCGFDDDLAAQTMQASNRIRGLLNQIHPALERVLGPCLDHPAVLELLQRYPSPEKLASLSEKKLAAQLSKLAPRLGKSLAADITRALTEQTVVVPGTNAAIVVLPRLALQLITLRKQRDEVALEVEQRVLVHPLYPVLTSMPGVGVRAAARLLTEVACRAFASAAHLAAYAGLAPITRRSGSSIRGEHLSRRGNKTLKGALFLSAFAALREPISKAYYTRKINQGKRHN

SEQ ID NO: 159471 - protein, 530 aa, unidentified
MQGKAHVDAMAAVYVGIDVCKARLDVYLHPCGERFAVANDAGGRRRLRRRLDKLAVALVVIEATSKYHRAVHRHLDAAAIRVAVVNPLRARLFAEASGIFAKTDAIDARTLALMGARLDPARTPPVSRIVEALDELVRARSAAIDERVALANRRDNTATPFLRIELARRIRALDTHVRRIEARISHLVAQDPHMAARHAILRSIPGIGPVNAATLCAGLNELGRVDAKQVAALAGLAPFATDSGPKNGQRHIRGGRPHIRKALYMAALSACRFNPDLKRFHASLIANGKPPKVAITAVMRRMLVLANTLLRNDLPYDAFKDFAPVTLLGTVPHVLVARRGLAADSVASLVELARRTPDRITFASGGNGTSSHLGAEMFMRAANIRLAHVPYRGQGPALVDVVGGQVDLTLGNMPEVIPHVKSGAIKVLAIVAPKRSPLEPGWPTLAELGYPSVVSDSWFGLMAPAGTPADAIARFQREAARALASPDVRDRLAAQGFVPSGITPDEYRAFLQSTAAAYKQVIEAAKIKLD

SEQ ID NO: 159472 - protein, 354 aa, unidentified
MNLAGDADLIIGVDTHLDTHTAAICDARGRALSQLQVPATAAGYAQLLAWARQAAAGSRAVWAVEGTRHYGLGLARHLASQGERVSEIDAGRHVGKRRAGKSDAIDAVRAARELLARPHPAQMRADGDREALRLLMIDRDNATQSAKTARTALAAILVTAPAPLRERLRHLPRQRRAAECAALTCPANADRQTQVLHQTLIRLGQRIAGLTKTAAELETQITAIVEEMTPGLVAAEPGLGALSAAQILLSFSHPGRIHSEAAFAMLSGTAPVPVSSGRTDRHRLNRLGDRQLNRALHIIAVTRMRYHPATLAYVQRRRAEGKTDKEIRRCIKRYLARHLYRTLSSQPNPVPQTT

SEQ ID NO: 159473 - protein, 337 aa, unidentified
MKRYLGVDLHRTQFVVCTRWENGEQEIRQWRIGELAKFVEQLHSEDQIAVEAMGTTGRFYDAVAGRVARVVVVNPHQFKVISESVKKTDRKDAQALALYLEKDLLPEVRMKPKQNRELMHLAETRDLLVKQRSALKGKINNLLAMQGIELKREALSSKIALQRVLALPVSRMVQLELRVLVEQIRSLSESIAQLDEQLEEEGQQLPGYENLTSIKGIGSLSATVLLTVIGKISDFADENKLAAYLGLVPKIANSNESERSGRITKQGNKLARTALVQCGLVAKRYSPYLQRFYERIKQRRGGGKAKIALARKLVKIVYDTLKNQWVFEDFPSFTLAA

SEQ ID NO: 159474 - protein, 347 aa, unidentified
MKRVVGMDLGDKQHVVVVFNEEGEEIEVRRFANTSRQVQKFFAKHPGAVVVMEAGSHSAWISRLLTSMGHEVHVGNPRKLRAIWDADDKSDERDARILGLMYRMEPRLLHPIFHRSEEAQMDLELIKARNQLVACRSKLINHVRGAVKGIGERLPGSSSECFARHARGHMPDKLKDSLAGLVEAIEQINEQIAQQDRLIERACTEKYPETKWLRQVPGVGPITALAYVLTLEEPGRFEKSRSAGAFLGLTPRRDQSGETDKQLRITKAGNTYLRQLLISCAHYIMGPFGQDSDLRRYGERIANRGGKNAKKRAVVAVARKLSVMLHRLWSDQVEYVPLYGSPRKAAA

SEQ ID NO: 159475 - protein, 361 aa, unidentified
MDQIIRIGMDTSKHIFQLYGVNAAELPVLSKKLRRRDMVAFFAKLEPTEIAIEACGASHHWARLLQSFGHRVKLIPPQLVKPYVKRGKNDAADAEALCEAMSRPTMRFVPVKTAEQQAVLMLLGVRDRLIRSRTQLANAIRGYAAEFGVAAARGIAHLPPLLERLQADHSIPNLGRELFAAQATEFEQLEARIAAIEAKLMAWHRANERSRRLAQIPGVGPIAAVQLVMKTPAPELFRSGRQFAAWIGLTPKDHSTAGKVRLGVITRAGDEVLRSALVAGATSVIQQVRRGAQQKCIAMAYRASQAQVAQVGRRGAGQQNRSHRLEADAHRGKLQSSNLRPVNHIEGCVEIGPRATLLQRA

SEQ ID NO: 159476 - protein, 340 aa, unidentified
MPLYGGIDLHANNSVIVLLNEQDEVIYRKRLPNDLSTILEQLAPYHTAMEGLVVESTYNWYWLVDGLREANYRVHLANPAAMQQYSGLKYTDDHSEARWLAHLLRLGVLPEGYIYPKAARAVRDLLRKRAHVVRQPTANVLSVQNIMARNTGARFSVKRIHELPKQDLTTLLAEETQVLAVTSSLVVLDGLRHQIKRLEQTVQKRLHHTPSYEQLLTVQGIGTILAQTITLETGAISRFPTVGNSASYCRCVDSTKMSNGKRKGTGNVKNGNPYLAWAYMEAAQFAMRFQPEAQRFYPRKLAQSRNNTVLARKAVAHKLSRACYDILRDLVPFEATKAFG

SEQ ID NO: 159477 - protein, 341 aa, unidentified
MNIKRIGIDLAKQVFQVHGVDGQEKAVLRLKLPRAKMLTYFQKLAPCLIGMEACGSAHYWARELEKMGHTVKLMAPQFVKPYVKSNKNDANDAEAICEAVARPTMRFVAIKTIEQQDIQAVHRIRSELVQQRTAKGNQIRGLLSEYGLVMGQRIEVLRKALPLLLEDAENGLTIDFRTLLEGLQQDLITLDERVDEMDKKIRLLASSNEDAKRLQQIPGIGPITATALIFAIGDGKQFKRGRDLAAWLGLTPRQHSSGGKDRLLGISKRGDAYLRTLLIHGARSVLRVAGNKEDPRSRWIQSLCGRRNKNIAAVALANKNARIVWALLTKKTDFLPEAKPA

SEQ ID NO: 159478 - protein, 451 aa, unidentified
MAQSKRRHPERDFTPTHPNAAAIDIGSRMHVAAVPPDRDTEPVRAFGTCTGDLRQLADWFERCGVRTVAMESTGVYWIPAYEMLEQRGFEVVLVNARDAKHVPGRKTDVSDAQWLRRLHEYGLLRASFRPKGELAALRAYLRQRERLLDYSASHIQHMQKALMQMNVQLHHVVTDMTGETGMRIIRAVVAGERDPAVLATHRDRRCHASEAEIAAALAGNWREEHVFALGQALELYDAYHAKVVECDLRIEAVLRRLRDAAAKPVGRLPPARHRDKTANAPAFDARTALHAVLGVDLTQIHGLGPSLALKLIGECGTDLSAWPNAKHFTSWLCLAPANKISGGKVLSTRTRRSGSRAAALLRLAAVTVGRTQTALGAFYRRLSARVGKAKAVTATARKIATLFYNTLRHGMDYADPGASYYEERYRARVLANLQRRAKSLGYTLREMPAPG

SEQ ID NO: 159479 - protein, 382 aa, unidentified
MARVIIGVDPHKRSATIEVVNEREQTIAQGRFGTDTDGYKAMLAAGRRHKDRMWAVEGCNGIGRHVAQRLVADGETVVDLPAKLSARARAFATGQGRKTDPVDARGVAVVALRTVGLRRVEADDTTVALRLLVDRRDQLGRARTELVSRLHHLLLELIPGGAKKDLSAQQARSLLAAVRPRDVVGKTRRWLASELIQELVVIDKKIKVAKQELTELVASTGSRLLELHGIGPSGAARLLGDVGDIRRFASRAHFASWNGTAPIDASSGENNRHRLSHAGNRRINRALHIMAIVQLRHDTQGRRYYRRRLAEGKPPMEALRALKRRLSDVVYRQMLADTKRLETGPAGHAGATLTSSAADPIPMIDTSDKSLPGPAEPQTKKS

SEQ ID NO: 159480 - protein, 389 aa, unidentified
MEARTVNNLPPAGIHDDAICCVLAIELSKKSWMVAVNTPLSDKISRHSLKPCDGKELLDLCERIRTRVARETKQRAEIVSCYEAGYDGFWLHRLLEAHGIRNYVIDPASLQVDRRARRAKTDRVDVERLLRSLMAYLRGEPKVWSVVRVPSVAEEDDRRLHRERGRLINERIQHVNRIKGLLAIHGIYDYQPLRRDRAQRLEQLHTANGRTLPPRLKAEILRELQRLELVIGMIKTIEAERDAIALVNTETERRGAKKIQHLAKIKSIGPEFATTLVGEVFYRSFDNRKQLASYVGLTPTHFQSGAMSRDQGISKAGNAKARTVMIELAWLWLRHQPDSPLSIWFRDRVGKLKGRIRRIAIVAVARKLLIALWRYLETGLVPKGAALKV

SEQ ID NO: 159481 - protein, 413 aa, unidentified
MNRLIERCAMLDVHKSQITACVRVPDGDGGRRQEIREFRTTTAGLLTLADWLRSWAVTVVGMESTGVYWRAVYYLLEDEFECQLFNARHLRHVPGRKSDVQDAEWGCQLIEHGLVRTSFVPPRPLRELRDLVRYRKAKIQERGREVQRVEKTLQDAGIKLSSVASEVLGVSARKMLDALISGTNDPEILAELAKGALRKKIPALREALQGRFTGHHALLVGQMLAQIDFLDETIATLSARVEELTRPFSREIELLDTIPGVDKRAAEMILAEIGPDMSRFPTEHHLASWGGMVPGQRESGGKKHSAATRKGSKWLRGTLTECSKAVVRTKGTYLSARYQRIKSRRGHAKATVATGHKILTAAYHVLNNGIPYNELGEEFFYRRDTENTERYRKRLVKQLERIGHSVTLEPAAT

SEQ ID NO: 159482 - protein, 461 aa, unidentified
MAKKAKKVKTAKGAELRIVNPDAAGIDIADGIMQVCVPADRSKDNNRAFGAYTSDLHAISAWLRECGIKTVAMESTGVYWIPLFCRLQDDGLDVVLTNARDVKNITERKTDESDAEWLMLLHQYGLLKASFQPHNDAKRMRTLTRHRDTLSREASSIVLRMQKAMQQMNIKLTLVLSDITGKSGIRIIEAILAGERDPKRLADLADIQCKTPKEEIAKALEGNWEEDLMFVLRQNYDTFKHYCTQLGECDAELEKLMENYRAEVAKVEDTSYSPAKKRRDYKKTRHTVGFDVERKAYEMWGVNVFEIPGISHLTALELMSELGHDFTRKFPSSKQFCCWCNISPNTKISGGKRISSHVPHRRNNVGLIFRSIASSLANAKNQLGNFYRRIRSRAGGKAAVIATAHKVAEIFFAMVANQTTYNPERVGIDEKVLLEKRITRYKRELERITGTHIEIGNACVP

SEQ ID NO: 159483 - protein, 408 aa, unidentified
MDAILESCAGLDVHQETVVACILTGSLDQKPKKVVKTFSTTTTELLALAKWLEEFNCSHVAMESTGVYWKPVWNILESCSFKQLLANSQRIKNVPGRKTDVKDAEWIAQLLRSGLIEGSFVPLHDIRDLRDLTRYRKKLVQEVTQEKNRIHKILQDANIKITTYVSDIFGVSGRCILETLIQGETLTASKLRNMVFGPIKSKISDLMEALNGNVRPHHRDMIRYSWNHLLYLEETIERVERQIDECLKPFRNEVELLDTIPGVNQRAASIMIAEFGTDMSVFPNDSHLSSWSGISPGNNESAGKKKGSKTKRGNKALKGVLCECAWAASVTRNTRLSATYWRLVKRLGKNKAIVAVAHLILRIAYQILQTKTPYQELGTQFIENQEKKKEQRLIKALESKGYQIVKAS

SEQ ID NO: 159484 - protein, 340 aa, unidentified
MKANSKFFIGIDVSKPFFDASLMAVTDHQKRGIETARFDNTLEGLKAFGKWLKSFKVAMDPNTLVVIENTGIYHRLIWSFCNKKGLPLHIGNAAHIKCSFGITRGKNDKIDSIRLCKYACKESDTLKVSSALNPVLMQLKDFMTSRTRLLSQINSNKQYIKELKNINDPMVQKAVEKAHLAAIEGIAGSIKEIEALISKIIAENPELKNNYDLLITVPGIGHLTAVYLICCTTNFSAKISGKQLACYAGVVPFEHSSGISIKGRNRVHHMANKELKKLFHLSALSVIQYYPEFRTYYNRKKEEGKHPMSILNAIRNKIALRVVAVVSHQKPYVSNQLIAA

SEQ ID NO: 159485 - protein, 338 aa, unidentified
MTSFVGVDLHRNNFTYCIRENGEEKKIGKCEISDLKGFASLLGKNTVMAVEATGNTFMFCRFLKAHVGRLVVVNPSQFKVISMSTKKTDRHDAKVLAEFLEKDMLPEVRMKDDLQAKISSLTQTREKLVQLRTVLKNKVNNLLAANFIVLKREELSTETGLRKALSFHFDPITDTEMFVVVEQIRSLNQSIEKLDKAIEDHGSKMDGFKNLKSIKGIGSKGAATLLSTIGNIHDFRSSKQFAAYIGIVPRVSNSNDTVCHGRITKNGSKIARTTLVQCALIAKRYSPYLHAFHESVKSRRGGAKANIALARKFLDIVYRTLKNNWMFEDFTQFKLVKN

SEQ ID NO: 159486 - protein, 458 aa, unidentified
MNRKRSKPKIDRTMPTVHPNAAAIDVGATMHMAAVRADRTPEPVRSFGTFTTDLHRLVNWFKECGVETVVMESTSVYWIPIFELLDAHGFTVFLVNARDAKHVPGRKTDVSDAQWLQRLHSYGLLRASFRPKGQIAELRAYVRQRERLLEYAASHIQHMQKALTEMNLQLHHVVADITGATGMRIIRAILAGERNPKVLARLRDYRCHASAETIEKALTGSYRSEHLFALQQALALYDAYHEKVSACDVRIEAVLKELSIGRGRRSDSMPSSRRRTDQANGLAFDVRAALFALLGKDITQIDGLGPYLSLKLIAECGDDLSAWPSAKHFTSWLCLAPSNKISGGKVLSSRTRRCGSRAATLLRLAAVTVGRTDTALGAFYRRLSARIGKAKAVTATARKIAVLFYNAVRHGMEYVDPGASFYETRYRTRVVNNLHRRAKAFGFVLQPMEPTPGVVVVS

SEQ ID NO: 159487 - protein, 402 aa, unidentified
MNSVGIDISKGRSTIAVMRPFGEVVISPFEVRHTDSELSELARQLKSLNGETRVVMEATGNYHAPVAKQLHDAGLYVSVVNAKLVHGYGNNDLRRVKTDRKDAIKLANYGLDRWLTLPRYIPEENTRLLLKNCYRQYRQYSKVQTVLKNNLISLLDMTFPNANRLFNSPARADGSEKWVDFVAEFWHCECVSERPLKSFVNKYWRWCRKHGYNFSEEKAHAIYDEASGHIGVMPKSETTKLLVEQAVSQLSATSAALAVLKQEMQSLSSQLPEYPVVMDMFGVGPTLGPQLIAEIGDVRRFYSKKALVAYAGIDAPPNDSGDVIGRHKSMSKVGASSLRRTLFLVMSVYLQNSPPNEPIYQFMNRKRAEGKPYRVYMMASANKFLRIYYATVKAYLEILEQI

SEQ ID NO: 159488 - protein, 402 aa, unidentified
MPMLSIGIDVSKGKSTVCGMKPGGEIVYAPFEVQHTREGMSELVLLLHNSGEEVRAVLESTGSYHCPVVAALLENGIFVSVVNSLRMKRFCSQSIRKVKTDRIDAMQIALYGLAYWQELQPTKLPEDTYRELQLLARQYYQMTSLLIKAKVDFNAICDQVLPGMQELMNDHAGRHKLSDFVLRYRHTTHILEMGETRFRKDYCKWAEKKGYRNCERMAVLIFATAQNGIPVLPNAPSTQIVITEAIRVLHTVEASRDAILTQMQALAKTLPEYSLVREMPCIGDTLAPRLIAEIGDVRRFHSKRALIAYAGIDAPPYQSGKFCANNRHISKRGNRYLRKTGYEVMQSYVMHKPANDPIFTFIEKKRGEGKSGKLAMVAGLNKFLRVYYGKVTELYRSLPAIE

SEQ ID NO: 159489 - protein, 344 aa, unidentified
MKITTIGLDLAKSVFSVHGVDATGQVVVRKSLRRSQMLAFFAKLPSCLVGIEACGTSHHWARELIKLGHEVRLMPPAYVKPYVKRGKTDAADAEAVCEAVTRPTMRFVPVKSPEQQAALSMHRTRDLLVKQRTQLINMIRGLLAEFGVDIPKGLERALLMARQIVDGRSPDVPIEAAKIVGTLSQQALDTHIRLRQIDRDLLVWLRSNDVARRLTTIPGIGPVGATALAASVTDPHQFHSGRQFAAWLGLTPLQKSSGGKERLGRITKMGDKYLRKLLIVGMTSLVRRAKYNPGKIDPRLADLLARKPTRVATVAMANKTARVIWAIMARGETYRIGYRPVLAA

SEQ ID NO: 159490 - protein, 396 aa, unidentified
MRYAGVDIASERHVVVVVDGDGTVLRKASPFGEDAEGYSLLRERLGPAGEVLVALEATGHYWKNLVGFLLAEGYTVALLNPLRTKRFGQEDLVRAKNDNVDAMLIARFAAQKRLGGTRLPDEATEELREMVRLRDRLVQDLGDRVRQLHRLVDLGFPEFTRHVKSLDSQLACSILKEYPTAKAFVGLKPNVLSRLCYDGRHRVGPELAQALIATAAVSVGRHHGEAYRTQVLYVCDDINTLRTRIRETEANIEKKLDEHDVGSLLTTIDGIGPQTAARLIAELGNPAEFKSSAALASYLGVAPATNQSGKRQSQRAGITNIGNARLRSALWMPTLTAVRRNPWLKAYYERLRSRGKVAKVALVAAMHKLLSAIYAVARDRKPFTPHLVPEIAPPTT

SEQ ID NO: 159491 - protein, 413 aa, unidentified
MDVVHPRCAGIDISKRDAKVCVRIQGRGNTPTTSTVTTWGAMSNQILALREHLLTERVSCVVMEATGDYWKPYFYLLEDTLTVMLVNAHDARNMPGRKTDVSDAAWLADLGAHGLLRGSLVPPAAIRELRDLTRARTALTRDRSRQVQRIEKVLEDAGIKLSSVATDIMGVSGRAMLAALIAGTATPAAMADLAQRRMRSKIPALTEALTGRFTPHHGYLIRMHLDLIDQYGQALADLDVRIGEAMAPLAAARELLISIPGVSRIVAEVLLAETGGDMSVFPTAAHLASWAGTAPGCNESAGTVKSTKTRRGNRYAKTALGTAALAASRTKGTYLSAKYKRIAARRGPMKALVALEHSILVATWNMLTNGEFYRDPGADYFTLRIPAKTKARAIGQLEALGYRVSLQPLTDTA

SEQ ID NO: 159492 - protein, 343 aa, unidentified
MQITTIGLDLAKNVFQVHGVDAAGQVVVRKSLRRSQMLPFFAKLPPCLVGIEACGTSHHWARELIKLGHEVRLMPPAYVKPYVKRGKTDAADAEAVCEAVTRPTMRFVPVKSPEQQAALSMHRTRDLLVKQRTQLINMIRGLLAEFGVDIPKGLERALLMARQIVDGKAPDVPIEAAKIVATLSQQALDIHIRLREIDRDLLVLLRGNDVARRLMTIPGIGPVGATALAASVTDPHQFRSGRQFAAWLGLTPLQKSSGGKERLGRISKMGDKYLRKLLVVGMTSLVRRARHNPAINPRLADLLARKPTRVATVAMANKTARIIWAIMTRGETYHAGHRPALAA

SEQ ID NO: 159493 - protein, 394 aa, unidentified
MLNSVMANVPIEAGLVEEASVASRRDQTGRREIECALANQAVAERDPRRACGNSPNSRLSRRRPTRPPSSHRQDREIAMMNALYLGIDVAKDSFDVASDPAGLKLSLPNDPKGRHKLLDTLQTHAVALIVLEATGGYERDLVADLLHAGLKVVVANPRQVRDFARGIGQLAKTDGIDAAVLAHFGQVVQPQPRPQPSGQMEVLAELVTRRGQLTNLRTQESNRLPHARHATVRKSLQKILRTLDQQILDLDKLIRQNIESDDGLRRKDEIVQSVKGIGPGTSAMMLGRLPELGSLNRQEIAALVGVAPWDIQSGKWAGKSRIWGGRQEVRNMLYMATLTATRFNPVIRDFYQRLTSKGKLFKVAITACMRKLLVILNTLVRNNCLWSPAPAKNH

SEQ ID NO: 159494 - protein, 349 aa, unidentified
MIYVGLDLHKSFSVITMMDAGGKEMVKQRKLANDGGIVKLLHEFDQPVTVAMEATRSWYWLYDLLEENGMEVKLSHPLKTKAIASAKVKNDKIDSRILAHLLRADLLPLSYVPPKPIRMQRELLRYRASLVKIQTGVKNRVHAMLAKNNMTHDFTDLFGKQGKAFLSSLSLPEIYRMALDGYLSVLDELEQQIKAVNKKIVVSAKDDEEAKLLMTIPGVGYYSALLIKSEIGDITRFPSAKQLCAYAGLVPSTYSSGDTTFHGHIVKQGSKWLRWILAEAIGHCITKPGHLQAFYWRLERRKGRKIAKVATERKLLEWIYHMLKQRRTFEEMDKIATNWGEPVPLSGLK

SEQ ID NO: 159495 - protein, 459 aa, unidentified
MNKVKTKTAKTKSIIEMPIVNPYSAGIDVGDKELVVALPEGLAEQRVRTFGTMTCDLEQIVDLLKVCEIDSVAMESTGVYWKPLFSMLVRNDLEVYLVNAGHVKNVTGRKTDENDAMWIQKLHSCGLLKSSFLPDDEQEALRTLVRYRKTLVQDSSRFVNRMQKSLELMNIKFHTVIKDITGKTGKAIVEAIIAGERKAANFLPLIGKGIKADLFTIEKSLQGNWREEHLFTLKESYTIYKQYREHIAVCDIEIEKQLQQYEAKRNEGIIEETTAAKKGEDHESVKKQRAKNHPRFDVRGYLQRIYGVDVLSIYGLNSVGGLEILAETGTDLSKWKNEKHFVSWLNLCPNNKISGGKLISSKLLSKKPSPASIAFRHAANGVQKSDHWLGDYFRRMKTKGGNKYAIIATAHKIATIFYKMVRYKEEFKPMDLALYQQKYKQAKIAYLERKLMELKKQVA

SEQ ID NO: 159496 - protein, 483 aa, unidentified
MTKASQTTTLAANDQARAQELRQTKQRMEKYFRQRYPRLNEMSVVHRHAAGIDLGGKKSHFVAIEIGDEIEVREFGMTTPQLIEMAEYLLANGVTTASMESTGVYWVPVFDLLEKSGLEVFLVNPAHAKNVPGRRKDDKLDCRWLQKLHKYGLLSASFRPAESIRPLRSFLRHRETLVQQSADHLRRMQKVLDMMNVRVHKAVSDLGGVTGMRIVRAIVAGEYDPAVLATLRDPRCSCSEEELRDELTGFYQNHLVKQLASVLRLYDGLFAEIAIVDQDIEAELQTLSALDAEALAAEVAADAHPLPDGKHAPAFNTSAYVEIVTGKDPTTIPGIGPQHALKLLGELGEDMSKWPTVKHYGSYITLATQINISGGKVLSAKTRPGRHPAAVIFRQAAATVVKQGTSALAAFYRRMAMRRGKGKALTALAYKIARMYYYLMKYGREYVEVGEQAYEAKYQKQQVALLHKRAKQLGFTVTPVVAA

SEQ ID NO: 159497 - protein, 410 aa, unidentified
MDAIVERVCGVDVGQATVVATTLIGAAHERATKQTRTFRTVTKELMELREWLLANGVTHVALEGTGIYWKPVHAVLEDAFEVIVGNAHHIKNVPGRKTDVKDSEWLADLARHGLIAKSFVPPKPLRQLRDLLRYRRKLVEGRTAERNRLLKLLETANVKLASVMSDVFGVSGMLMLRALVDGTATPETMAQFAKGLLRKKTADLERALEGRLEDHHRFLLSLQLRRLELVDQDLALLDDRIDETMRPYQEQCRLLQQIPGVNRVLAAVLVAELGPDMRVFHSARHLAAWAGVCPGNNESAGKQKMAPARKGNVHLRTALVEAAMAASRKKGSYLKDKFHRLRARRGTKRAAMAIAHKILIAVYHMLSTGTGYADLGETYLDGLEKRRVTRNLIRRLERLGYEVKLETKAA

SEQ ID NO: 159498 - protein, 410 aa, unidentified
MQVLYERCAGLDVHQKSVVVTVMLTAPTGQVSKVTRTFSTMTADLLALDSWLAQQQVGQLAMESTGVYWYPVYNLLEEGRSVILVNPQHMRAVPGRKTDVKDSEWLAELLRHGLLKASFIPPKPIRQLRELTRYRKRLVQERTQALNRLQKVLESANIKVGTIATDLLGVSGRAMLEALIAQEHPPVQMANLARGRMRSRIPAWRQALEGRVTDHHRFLLRQMLNHLDFLEQAIQQVQTQLEHQLAPYAEAMALLQTIPGISATSAAAIIAEIGVDMSQFPSAKHLASWAGLCPGNKQSGGKRLQAGTNPGNRWLRGTFGEVAWVVSHTKDNYLVAQFRRLAHRRGKYKAVIALAHTILVIIYHVLRDKRPYTDLGADYFDRLETARVERYHVRRLEQLGYTVTLAPVVA

SEQ ID NO: 159499 - protein, 408 aa, unidentified
MEVLYARCAGLDVHATNVVACVRIAAGAKVTYEHRTVPTTTRGLLELAEWLTAHACTHVALEATGVYWKPVWHVLEDHCTLVLANAMHIRNIPGRKSDKNDAMWIADLLALGLIRSSFVPPAPIQDLRDLTRTRKQLVREMARHTQRIQKTLEDANIKLTEVVSDILGVSGRAILLALVAGETDPERLADLAHRRLQTPRAQLVEALHGRVTAHHRFMIQLHLTQIAALETAVADVEARIHEALAPFRAAVSLLMTMPGVSATAAAVIVAEIGDDMSTFPTAGHLVSWAGLCPRLDESAGKRRSTRTRSGAPWLKTTLVQGAWAAARKKDSYFHAQFLRLKSRRGPKKAILAVAASMLTDVYYMLRDGVEFHDLGGQHFVQRDKEHLTKRLLARLRDLGVDVEVKHAA

SEQ ID NO: 159500 - protein, 375 aa, unidentified
MIFVGIDVAKDKHDCFILNSEGTVLADVFTIANNRIGFETLLSRIQSCSQGESKIKVGLEATGHYSYNLLGFLLDSGLATYVINPLHTNLYRKSLSLRRTKTDRIDARTIAMMLMSDVDLKSYSNTAYHNEELKSLTRYRFDKVKERAKLKSSVARLVNILFPELEKLVSSLHIAVVYALLSNYPGASYIANANTEELAETLCTASKGRYTKSKTAEIQVAAGVSIGSKMPAKSMELKHTIALIRELDKEISEVESAIDKITSQMDSPIFTIPGIGRHMGAMILAEVGDFSNFASADKLLAYAGLSPSTYQSGQLQNCYAHMEKRGSRYLRYALFNAAKYVCLWCPTFSAYLEKKRSEGKHYNCLLYTSPSPRDS

SEQ ID NO: 159501 - protein, 355 aa, unidentified
MTASYDYHIGVDYHKSYGHLVVQDSGGKTLRSGRVKNDRQSLGGFLERYRENSHAVVEATRNWMVIYDWLDDICDDVVLAHPLKVKAIADAKIKTDKIDATVLAHLLRADLVPEAWAPGERARDLRVALRERMFYVRLRTMTKNRIVTVFDRYPEQTAQLKKLGDLFGKAGRIQLAQVNVSEIDRIQIDRGLAFIGDIDGRIKQSEATIRTMTKANGNVRLLKTIPGIGEFFARLIDAEIDDISRFRNPKKFAAYAGLVPSTYSSGGKTFHGKIIKQGNKWLRWAFVEAVAPAIASDPQLRAQYEHLKFRGVNKARVAIARKLLTIAFQILRDQRAYEPRGASPTEGASTISRLS

SEQ ID NO: 159502 - protein, 397 aa, unidentified
MYIVGIDIAKRKHEAAVIDGDGAVVIKPFSFTNNCSGYNRLLAMLAKAKLPLDEVSFAMEATGHYWLALFTRLQKEGFRVQVINPVQTNSIRSFYIRQAKTDPRDALLIAEVIRFGHFSGSTLHPENIYELRELCRGRHAIVSMQADVKRKVVALLDQVFPEYETAFTNLFGDTSMAILQTCPTPKELSEMPLEELCHLIEVSSHKRFRMAKAQELQVLARNSFGFAMAGDVFSTMIRLYAKHLVFLKQQVREMDRKIAEIMDTLDTPITTITGIGPTLGAYILSEIGDISRFPSAAKLAAYAGIDPTMRQSGEYNGVRNRMSKRGSPYLRHAIWLAASSAVLHDPALKLYFQKKRDEGKPYMASVGHACRKMVSIIYAVMRDNKAYTPCIPNEISA

SEQ ID NO: 159503 - protein, 422 aa, unidentified
MLARTQDNEEIIERVAALDIGKAELVCCARVPDEDHPGKRLQEVATCSTMTRFVQAMAGHLACLGVTRVVMEATSDYWKPVFYLLEAAGFETWLVNAKDVKHLPGRPKTDKLDAVWLCKVAERQMLRPSFVPPPPIRKLRDLTRYRADLVAARTAEKQRVEKLLEDACIKLSAVVTDIFGLSGRDMLAALVAGERNPKVLAQLARRSMRKKITVLEEAFTGHFTDHHAFLLSSMLARVDAITAAIAALEVQIAAHAAPLAHLVARLDEIPGISLASAHVILAEIGTDMTRFPTAGHLTSWARFAPGIKESAGKKKGKGSTGHGNAYLAAVLGNAAAGAAKTDTFLGERYRRIARRRGSKRAIVATGRAILVIVWHLLSDPDARFHDLGPGYYDARIDPERRKRNHIRQLEALGYKVTLDPAA

SEQ ID NO: 159504 - protein, 366 aa, unidentified
MKKISTMAIEGIQIFKDNQLTIGLDLGDRTSRYCMLNEAGEIILEQELSTTPKGIEQVFSKIPRSRIALETGTHSPWVSRQLTELGHEVIVAHARNVRLISESSRKDDRLDARTLARLARIDPGLLNPVRHRSAKAQIHLTVIRARAALVSARTALVNAARGLTKSYGARLPKCGTEQMNREITKNLKPELQEALNPLLVEIESLNARIAEYDRRIEQIATEVYPEVARLKQVKGVGPLIALTYVLTLDDPYRFRRSRDAGCFVGLRPGRRNSGMSEPQLHISKEGDRYLRTLLVQGAHYILGPFGQDSDLRRWGLKLSERGGRNAKKRAVVAVARKLAVLLHKLWVSKEIYEPLRNNRKQMAQVA

SEQ ID NO: 159505 - protein, 366 aa, unidentified
MKKTSTIRVNGNMIFKGHKLTIGLDLGDRWSFYCILDEAGQIILEQKLPTTPEAMKQTFGKIPRSLIALETGTHSPWVSRLLRELGHEVLVAHAQKVQLISKSNRKDDRHDARTLARLARIDPELLGPVRHRSAKAQIHLTVIRARAELVSARTALVNAARGLAKSYGERLRKCGTQQVSRELAAELSVELREVLEPLLQEVESLNERIKEYDARMEKIARESYPQVERLKQVKGVGTQIALTFVLTLEDPHRFPKSREVGCFLGLRPGRRDSGESQPQMHISKEGDPYLRTMLVQGAHYILGPFGQDSDLRRWGLKLAARGGKNAKKRAVIAVARKLAVLLHRLWVGGEVYEPLRNSHKAMRAVA

SEQ ID NO: 159506 - protein, 321 aa, unidentified
MSDTTDSGGATHVGIDVSKEHLDVCLLPAGELFVVPNDGAGIESLLDRLLKARPVLVVLEASGRYERPAALAIASTGIAVSVINPRQARDFAKATGRLAKTDKIDAEILARLAAAVGPRPSTLPDEETQALQAILARRRQLLEMLTAENNRLKMAPEAVARRIRAHIKWLKKELQSTDKDLDEVIEASATWKENEALLRSVPGVGPVLARTLLAELPELGKLDHRRLSALVGVAPFNRDSGTFKGKREVWGGRAPVRATLYMGTLVAVRYNPILRKFYGRLLKAGKPKKVALVACMRKLLSILNAVMRDRAPWRSTHVPTP

SEQ ID NO: 159507 - protein, 388 aa, unidentified
MIYVGIDIAKLNHYASAIDSDGVVLIEPFEFLNDNAGFYTLLSKLNSFELDDIIIGLESTAHYGNNLVSFLVTKGLHVCVINPIQTATLRKNNIRKTKTDKVDTLVIAKAVALMDHPRFVTLYDIALMQLKNLGRFRMNLVKQRSRTKIQLTAYLDQVFPELQYFFKSGIHQKTVYAILKEAPSATRIASMHLTHLKNLLVSNSHGHFKKETALELRVLAQKSVGTADRSLSIQITQSIAQIELLDSQIDTVESEMKDIVTSLDSVIMTIPGIGPINGGMIIGEIGDINRFSKPRKLLAFAGLDPSVYQSGNFIAKKTKMSKRGSSALRYALMNAAHNIVKYNQTFKEYYDSKRAEGRGHYNALGHCAGKLVRIIYKMLKDDVEFNLD

SEQ ID NO: 159508 - protein, 465 aa, unidentified
MMRRDDGAQKGAWQGLKIVHPHAAGLDLGSSEIWAAVPPDSTAVPVRRFGSLTPDLVALADWLAACHVDHVAMEATGVYWIPVFEYLEARGFKVAVVNAQHVKNVPGRKSDRQDCQWLQELHSVGLLRGSFRPEAEIVVLRAYLRQRSGLIEHRAAHIQHMQKALLQMNVQLTQAVKDITGVTGLAIIRAIVAGERDPQRLAALRQPGVKQTAEQIARALTGHYRPEHLFALKQALALYDFYSQQIAECDREIESQFAHLKSSPPSDDLPPLDPSDKRNSKSKNGPKYDARSLLYRWAGVDLVAIPGLNATTVQTILAEIGTDLSAFPTDKHFCSWLGLAPHNDISGGKVLRSRTRKTPNRAGQAFRLAAQSVSRSRNSVFGAFYRRMRSRLGPKQAIVATAHKIARCFYHLLKTHTPFHDMGGEEYERLARERELRHLQKRAAKLGMSLIESPWLAPEPAPTVS

SEQ ID NO: 159509 - protein, 330 aa, unidentified
MEVIYPCCGGIDVHDEFVVVCLSRVQQGQRHKELRRFATYSADLRALCHWLAEAGCTHVAMESTGIYWRPVYDRLVGQFEVLVVNAQHMKAVPGRKTDVQDAEWIADLLQHGLLTASFVPPAEQQQLRDLTRLRISLVQERARLVNRVHKLLQEANIKVGNVLSDVMGVSGKAILQALAQGETDPKRLANRAHASVQRKHEQLVRALDGDMGAHEQFLLQELLSLITAMERAIVHVEQQIEERLRPFEDCLGRLEQITGVSRKVLYVVFAEVGTDMSRFPDAAHLASWAGMCPGQHESAGKRRSGRLRKGNRYLRAALVQAAHASGRTQT

SEQ ID NO: 159510 - protein, 332 aa, unidentified
MSVYVGIDVHRKRSQVAVINQDGEVLANRNVPNGVEPILRVIGGLPSGTPAAFEAAFGWGWLVELLEDYGFEPHLVHPLQCKAIASARLKNDKVDAAILAQLLRADLLPEAWIAPPQVRQLRALLRHRIQLVRLRTLLRNRIHAVLADHGHDRPSGYWSGPGRSWLASLDLPAVSAEVVADALALIDALESVIGRLDAEIRGHARSDPRVTVLTALPGVGPFTALVLLAEIGDITRFGSARKLAAWAGLTPTVRGSDRTVRHGHISEQGSVWVRWILCEAAQTAKRSPEFAARYQAIARRRGKKIATTAIARKLLTRACHLLTDASSDGAPR

SEQ ID NO: 159511 - protein, 324 aa, unidentified
MIDGILGIDVSKNTLDASMSSCNKVRAKSFANSPDGWRHLLDWLIGQKIRRVHACLESTGLYSLGIACKLNEAGHVVSIVNPAQIRDFARTKLGRNKTDAVDASHIREYCELFKPAPWSPPSHAHRQLGELQTIRAGIVAGLTEWKNRKNSGMVDAVAQSLADATISHFTSQLGAVEKAIAQAIDNDTDLRRKRDLLLSISGVGETLASVVLAELPGPDVLRSSAEAVAYTGLNPRRHQSGTSIDRLTRISKIGNAVLRAALYMPAMSAMRYNPAIVALVTRLKARGRLNPKQIVVAAMRKLLVLCFGVLKTGKPFDPALAMGC

SEQ ID NO: 159512 - protein, 346 aa, unidentified
MNKVYNKKRLFGAFDLHSNNNHLAIIDREDNRIYRKKLPNQPDVILAELEPYRVHLSGIVVESTFNWYWLVDLLMDEGYRMHLANPAGIQKYKGLKHADDNHDAFWLAHLLRLGILPEGFIYPKQERPVRDLLRKRSHLVRLRTSLINSLQDIIYRNCGCKMGVNSIKAVKENKVEPLFDGQDDLALSGAVSKETIDYLGRQIRQVENAVLDKVKLREEYAKLLSINGVGKILALTIMLETGTIKRFPKVGNYASYCRKVPSHWTSNGKKKGKGNDKNGNTYLAWAFSEAAEMTRRYDEHARRFFNKKAAKTNRMVAHKALAHKLSRATYYIIRDRVDYDPLKLFA

SEQ ID NO: 159513 - protein, 306 aa, unidentified
MLRPDGRHRTKKFANTTKGHDELVSWLKGHKIDHAHICIEATGTYMEPVAESLYDAGYIVSVINPALGKAFAQSEGLRNKTDTVDARMLAEFCRQKRPAAWEAPHPLERALRALVVRHQALTDMHTQELNRTETAREVQRPSIDAHLLWLEAELKRLEKQIKDLTDDDPDMKHRRKLLESIPGIGEKTSAVLLAYIGLKDRFAHARQFAAFAGLTPRRYESGSSVRGASRMSKAGHVSLRRALYMPAMVATSKTEWGRAFRDRLAANGKKGKVILGAMMRKLAQVAYGVLKSGVPFDASRHNPVAA

SEQ ID NO: 159514 - protein, 368 aa, unidentified
MKEQNFVPREFEIFGGLDVDKKSIAVTFMSHQGVLQSFSMPYRAEHLLSYVGKHFDGKKVAFAYEAGPTGWGLYDRLTREGHLCVVAAPSMIPKVPGQRVKTNRLDSQKLSEHLRGGQLKSVHVPSESYRQLRQLTGLRDTFVQDIVAMKLRIKALLLFEGLEFPPAPPGSQWSLIVRGKLKRLSCSSAVRFKLDRLLESLESSEKQALQTIQEIRRFYQQDPELCQAMKYLKSIPGIGEIVASHLLARVGDPQQIDNVRQLAGFIGLAPSEHSTRSKLIQAAWSAIRQDPELREFYRSVYQRHPRDRAARKAIVAVARKLTTRIYAVLKQQRPYVVREIVHSAPLTQEETSPQGTTRRRAEPGDTFS

SEQ ID NO: 159515 - protein, 381 aa, unidentified
MTTAVTHKTNVHTTEATLFVAFELSEKIWQLGFTMGHGQKPRERNVTARHQERVLDEISLAKHRLGLPETAPVVSCYEAGREGFWLHRFLLAHGITNHVVDSSAIEVSRRQRRAKSDGLDVRKLLSMLIRYEQGEHQVWQVVKVPSVEAEDQRHLHRDLETLKRERASTTTRIQGLLSSQGIQVSTLAKLPEQLDTLRLWDGTPIPPGLRRRVLRVYAHHTFLTEQIAAIEAERRAQLQTSSDASIDQIRQLMMLKGIGINGSWLLVREFFGWRAFKNRREVGGLAGLTPTPYQSGESAREQGITKSGNPHVRWMITELAWSWLRFQPESALSVWFRERFGDGGKRLRRIGIVAVSRKLLIALWRFLETGVLPEGAVLKEG

SEQ ID NO: 159516 - protein, 292 aa, unidentified
MILETDTYFQEPNSPDGIKRLMGRLGRYKLTRIIVEATGGYERHLVEACAERAMPVIVIQPMQVRQFARAQSLLAKTDKLDAKLMALFGAVIKPEPRAIPGKKIRYIRDLLSRKRQLNETRTQELNRLHKVPKVLAASHTRLLKLLDREITWINDKLTKEVAEVTEWQRTYEILSSAPGIGDGVAFTLLGELPELGHLSSRQISALCGLAPFNRDSGSIKGRRRIKGGRAPIRTVLYMAMLSAIQHNTVMKNFYQKLVAQGKHKKVAITACMRKMITILNAMVRDNQEWQST

SEQ ID NO: 159517 - protein, 361 aa, unidentified
MRIIGCDLHAAKQNIAMLDRDTGEVVEHTLSHDGDTVREFYAAIPKPAVVGIEATGSMGWFVRLMEELGVTCRVGHPAAIRTAEPRRQKHDRRDAQLLLRLLAEDRFPAIWMPTAEQRDLRALLLHRHQWVRMRTRVQHALQAIALGQGVRRGGTLWSTDGQAVLAALPLLPHATDRRDALQALYRQLNAQVERLDEPVRAIAEQRSGATLLMTHPGVGPVTALATDIFLGDPFRFPSGKALASYVGLIPSEYSSGARQRLGHVSKQGNPFLRFLWGEAVMGAVRRDPELQRFFRRKLPQKGLGKARVAAARKLGVRLWIMLRDQITYDEFCRRRSTATVMNGAARAGRPVLGHGPRVTDH

SEQ ID NO: 159518 - protein, 341 aa, unidentified
MKRPKYYVGVDISAENFMVAVGEEPWRVVAKGEEFRNKLEGYEKMKAWMKKRGIGEENAVLCMEATGVYGEGLAYYLQANGYQIAIEAPLKVKRAFMPTGHKNDRVDSQQIAEYAYRFYDELVYWKPREEILEQIKVFLEIREQYVVQKTGHFNALKALKRKVVQTPLAEALHERSIDQIKKNIKEIDAEIRRLIDQDPKYGDIIRLLMSVPGVGLLLASNMLLIIESAPDEVTPKQMAAYIGISPYEHRSGNSVYKPDSSRHYGPTKVRKLLYLASLSVRTHQEQFKKYFLRKVDEGKPKKVVLNNIANKLVKIMCAVVKTQTPYIPNYRSIHPSLYKMS

SEQ ID NO: 159519 - protein, 557 aa, unidentified
MSDRNSAGACARIAGARQASYGRRDNGAFLPVDEYGSGPVDHEIGGSRFERSGLTPLERVFNRIATGPRLAKCRAQRKEASVAIKTTAEGGQGQRLTRRQRRELGRRIWSDKPGLEVAHRDAAGIDIGSREHYVAVGPDRDAEPVRTFGCFTADLHRLAEWLLACGIQTVALQSTGVYWIPVYDVLEQHGLEVWLVNARDTRNLPGRKSDVHECQWVMKLHTYGLLRKSFRPTAEIRAVRTCWRERAEYVEQGGVCIQRMQKALTEMNVQLATVLSDLSGVTGMSIVRAIVGGERDGLRLAEFRDPRVQASKETIARSLEGTWLPEQLAVLKRQIEDWDHVQRQIAACDRDLEALLHKLPAAEHEPAPPGARTPPPRKPKKSSKNEPDFDMAGALRRVTGVDLTRIDGVKANTVQTVITEAGVDMTPWRTEDHFVSWLGLCPRNDVSGGKVLNRKTRQVVSRLATALRMAASTLRQSDSYLGAQVRRLRTRLGAPKALTAMAAKLARLIYRMLKYGQEYVDKGTAHYDHKHREQQVKLLAKKAAQHGFALVPATNRA

SEQ ID NO: 159520 - protein, 412 aa, unidentified
MQDILTCAMGLDVHRDIIVACLVKGAVDAEPEAETRTFSTLIPEMQKLRDWVIESECRNIAMESTGIYWQPIYEMLESCFDGEISILVVNARHMKNVPGRKTDMKDAQWIATLLRAGLLKGSFIPDKAFRELRHLTRYRKSVVHDITAQKNRIDKFLQSSGFRFTAFLSDTFGASGRNIVRHLIEHGSIDREALDKCLKTKTRNRIDEILVALNGSLSEHQRRFLNMVFWHLEDLEAHKHTVEDEITEEVLKHTDTLNLLCSIPGIDVTAAAAIIAEIGTDMSSFPDSQHICSWVGLSPGNNESAGKRKSVHINKGNPYLKNMLCEVAWIMASHRKLYLSGWYWKVKQRKGAKRATIALARKILSIIYTMLKTGTPYNEECFEQRRLRCERKRANRLVNELQKLGYVVVAPD

SEQ ID NO: 159521 - protein, 402 aa, unidentified
MNAVGIDVSKGKSMVAIMRPFGEIVSAPFEIKHTASDINSLVELINSVEGESRIVMEHTGRYYEALAHQLSEANLFVSAINPKLIKDFDNDSLRKVKSDKADSVKIARYALDKWQNLKQYNVMDKLRNQLKTMNRQFGFYMKHKTAMKNNLIGILDQTYPGVNTYFDSPARSDGSQKWVDFASTYWHVDCVRKMSLNAFIVHYQNWCKRKKYNFSQSKAEEIYGKAKELVPVLPKDDITKLIIKQAVNQLNSASTTVESLRTLMNETASKLPEYPIVMAMKGVGASLGPQLMAEIGDVSRFTHKGAITAFAGVDPGVNESGSYEQKSVPTSKRGSSDLRKTLFQVMDVLIKTHPQDDPVYQFIDKKRAQGKPYYVYMTAGANKFLRIYYGRVKEYLSSLPES

SEQ ID NO: 159522 - protein, 345 aa, unidentified
MTTMNYIGLDVHKKTISYCVKDVSGRIQQEGKIGSTRRELDCWMKTLPQPWTVAMEATIFSGWIYDHLLPHATQIKVAHPLMLRAIAAAKKKNDQIDASKLADCLRCDFLPECHMMPRAIRDRRRTLRYRHLLVRQMVQMKNRVSGLLMETGVEYNKQRLHKVSYFRELLSANEEVPPSIRPLLKLSRETIERYQKTEYALVSSLQRDPVLADRIKRLRTVPGVGPITALTWALEIGDVSRFRSIKQAISYCGLCGDERSSADKAMRMPLSKQRNKHIQRALVEAAKLAPRQSHELAVIYDHERQKGNSNRATLAVARKMVAYLLAVDRQQRDFVPAEERRTAAA

SEQ ID NO: 159523 - protein, 381 aa, unidentified
MTTTATHNAHDTTPGRALFVAFELSEKTWKLGFTTGHGQKPRERSIAARNQTRVLQEVAQAKRRFGRPETAPVFSCYEAGREGFWLHRFLEAQGIPNHGVDSSSIEVNRRKRRAKSDALDVRKLLSMLMRYAHGARDVWRVVRVPSVEAEDQRHLHRDLATLKQERASTTPRLKGLLSSQGVRLTSVNKLPEQLEALRLWDGSPLPSGLRRRVLRVYAHHQFLSEQIAALEAERRARLQSAHDASIEKVHQLMHLRGIGINGAWLLVMEFFGWRALKPRREVGGLAGLTPTPYQSGESARAQGITKSGNRHVRWMTTELAWSWLRYQPESALSCWFRERFGGGGKRMRRIGIVAVARKLLIALWRFLETGVIPQGAELKAA

SEQ ID NO: 159524 - protein, 430 aa, unidentified
MKSNTQNTKIEAITETTLVLGIDVGSETHYARAFDYRGIEYSKKPLKFSNDEAGFVTFKAWILDIKEKHGKDKVVPGMEPTGHYWFNLGKFLQDNEMKPVLVNPHHVKKSKELDDNNPTKNDRKDPKVIAGLVREGRYMIPYLPEGVYADLRTASNMRFQLQAELTRIQNRISRWFNIYFPEYKTVYGQSDAKSGMLILKVAPLPEDILTLGIDGVNQIWRDAKVRAVGKARAKTLIEAAEHSVGSKEGEISARMEIRMLLDDYESRNTRLQEVVALIEELVKKIPMAEKLLEIKGVGIKTVSGFLAEVGDISRFNNPKELQKLAGLALVENSSGKHKGETTISRRGRKRLRYLLFEVAMSLVSKNPEFRELHSYYTTRKLNPLKKMQSLMAVAAKLLRVFFAMLTKGVDYDSKKLVGDIKRPEVYLQAA

SEQ ID NO: 159525 - protein, 417 aa, unidentified
MAEEIEWFVGIDWASQSHQVCLIDAHGECLGERAIAHGGPGIEELCDWLIARTGGTPEVIGVAIEMTQGPVVEALLERGFCVYGINPKQVDRFRDRFTVAGAKDDRRDAHVLADSLRTDRHAFRRLSNDEPVIVQLREWSRMADELQQERARLASRMREQLWRYYPQMLELADDLAADWFLNLWSHAPTPAKAARLRVTTIERFVKAHRLRRWQAPEALRILKQKPLSVAPGVVEAATAHIRTLSVRIRLVNQQLKTAHRKLDELCAQLIPSDEDEPGQRYEQRDVVILRSMPGLGRIILAVLLAEVWQPLRRRDYHALRSLSGVAPVTRRSGKTSVVVRRYACNKRLANALYHWARLATQHDALSRRRYAALRQRGHSHGRALRTVADRLLSVACTLLEQQTLFDPAYEVRDAAGA

SEQ ID NO: 159526 - protein, 341 aa, unidentified
MKQEMHVLGIDIAKHVFHAVGMDDRGNVVYRKRVSRHDLIPFLAKLPPVRIGIEACGGAHYWARRFREHGHEVKLMAPQFVKPYVKSNKNDSRDAEAIAEAVTRPTMRFVPIKDVDQQDIQALHRVRERLIGERTALVNAVHGLMHEYGIVMPKGVAKFRQAVVGKLESEKDKLTPLSQEMFWKLVEEFAALEAQLAYYQEKLEALAQTHPECQRLMTIPGIGPLTATALVAAVSDASAFKNGRQFAAWLGLVPRQYSTGGKERLLGISKRGDSYLRKLLIHGARATIRWVGRKTDRRSQWIRQLVERRGTNRTAVAVANKNARIVWALLTSHQAYELAKG

SEQ ID NO: 159527 - protein, 362 aa, unidentified
MTKNNRVGSGMTSKMTIGLDLGDRHSYFCTLDGAGENIESGRVQTTKSTLEKRFRNCEAARVVIEAGTHSPWVSRLLADCGHEVLVANPRKLALITQNDSKDDPVDAELLARLGRVDPQLLSPIEHRGRQAQADLAVIRARDAVVAARTQLVNHVRGAVKSLGSRMASCSTRSFAKKAASQLPEDLRLALEPLLEVIAAMTQQINGYDRQIEDTCREKYPETELLRQVTGVGAVTSLTFVLTLENPHRFARSRSVGSFLGLRPGKDKSGAQDPELHITKGGDRLLRRLLVGSAQYILGPFGPDCDLRRWGLKLASRGRKSAKKRAVVAVARKLAVLLHRLWAGSEVYEPLHLAQPTALSVQA

SEQ ID NO: 159528 - protein, 338 aa, unidentified
MNKFNHFVGIDISKKTFDAALIICSNTATVKHQIFQQDAAGFADFIDWLARYKVAGNEALICMEHTGLYSYGIIDFLVAANLDVWVEMPLRIKRSMGLQRGGDDKVAAIQIALYAYRYQDQVLLWKPEQAMVAELRQLSAQRDRLKLSFNQLTIPLQEMADCSYDKAAVKMQIKLQAPVIKAIEKSISSIETQIDNLIAADPTVKATIARVSSIKGVGKQTAIHVFIYTKGFTTFSSGKQLASYCGVVPFTKSSGTSVRYKTQVSPFANKHLKKLLHLCAMAAIQHNEELKHYYKRKIEEGKNKMSVINAVRNKLVQRIFAVVRDGRNYVENYEYKRA

SEQ ID NO: 159529 - protein, 440 aa, unidentified
MHSKATDTTIGIDTAVVADHRVAVRGTTPAEDFAVPPTLAGMAMLTRRLAEHAPALAVAEPTGMTWLAIGHAVRAAGCDLTLVQPRHSARLRGAIAGKHKTDVADADMLAGCADVFGLTATTLPSPAQIALRRAVRRRHRAIVDAHRSECRLWALAAWAFPDVWHACQHAQPLLQPLLRCWPHLSQLARARTASIAALCRQRLRRPGDVDRRAERIRDTAAGWADFWQDRLDLDALAWEITELLDDIAAADARIDRAAGHAHQLWRAAWDHDDLLTSLPGIGATIAPIIRAWFGDATQFDNGKQAAAFVGLNPSNWESGLMAAPSRPITKEGPPELRLAFYQAANVARRHDPQLAAFYWRLMVERSKTHIQANCAVARKLTTRVWATLTSATPYELRDLDGTPIDRRDATELAAKWTVPTDVRRRTRTRVTAYRRGRLSS

SEQ ID NO: 159530 - protein, 401 aa, unidentified
MVSDFKKGRYNLMKIYVGIDIAKLNHFAAAISSDGEIIIEPFKFTNDADGFQLLVSKLESFDKNSLIIGLESTAHYGDNLVRYLVTELYQVCVLNPIKTCQMRKNNVRKTKTDKVDTYVIAKTLMMQDNLRFVSFFDLDMMDLKALGRFRQKTIKQRTRLKIQLTTYVDQVFPEIQYFFKSGLHQHAVYALLKEAPSPKEIASMHMTHLANLLKVNSHGHFTKEQAKELRVLAQKSVGANDSAISIQITQTIQQIELLDSQLEKIEAEMTDIMKFNDSVIMTIPGIGYINGGMILGEIGDIHRFSNPNKLLAFAGLDPSVYQSGNFQAKTTRMSKRGSRVLRYALVNAAWNVVRNNATFKAYYDAKRAEGRSHYNALGHCSGKLVRVIWKMLTDNVEFNLK

SEQ ID NO: 159531 - protein, 354 aa, unidentified
MKYYTSTTQFNCGIDLHARQMYVCVMDREGKKLVHTNIRNNDFAYFLKLVAPYRHDLTVCAECMFGWYWLADACQEAGLNFVLAHALYLKAIHGGKNKNDRIDSEKIAHLLRTNLIPPAYVYPAAKRPLRALLRQRILYVWRRSELLARIQSHQLAYNRPTLPQTRSNRDRWEEKLLAQEDNPIRQLALQNDLALIRHYDTQITILEEQLQTLTKATAWRDYTLLQTVPGIGEHLGLTLLYEIGDIHRFPTVKDFLSYCRLVKGTVASAGKLKGLRGAKLGNAYLRWVFGEAAVIAKRDHTVIGPLAQRLEARLGNKFKANTVLAIKLARAVYFMLRDHTVFDPERLVAALTHQ

SEQ ID NO: 159532 - protein, 323 aa, unidentified
MTIMDIRYFIGIDIAKATLDWAVYDGKKMVLQTSTPNTIAGIKTALRLLKTLPDWNPSEAIFCMEHTGIYNAHLLDFLHKLRFPIWLESSLQIKKAGGLQPHRRTGGKTDSIDAQRIAEYAFRFRDQLRLWEPPRQVVQKLAFLSAARQRLISVYNQLAGPLAEHQGFIDPALQKQLDKTCQASLTALEKDRKAVEKAIDALIEADPRLSQLFELVMSVPGIGTATATEIVIATNEMKTITDPKKMACHAGVAPFNYQSGSSVRGRPGVSQHARKRLKSLFHLARWPVPSYVGYSSEAGPPSRVNCRTTTSAKSRKARTKCWF

SEQ ID NO: 159533 - protein, 313 aa, unidentified
MNTALVYYGMDVAKATLELAGPTDGRTFPNTPRGHAQLLGWLTAQPGPAHLVCEATGGYERAVVAGLHAARLRVSVLNPRTVRDFARATGRLAKTDPIDARVLRHFAQAHPPAPTAPASAAQTELVALAQEYQHLTAALTQEGNRLEHLTQPLALRLAAARVRQLKGQRDELEAALTRLLAATAELADRATRLQQIKGIGRKTAVSLLAFLPELGTLHAGQAAALAGVAPYNRDSGQWRGPRWIAGGRPAVRRALYMAALTASQRNLVLAPFYRRLVARGKPKKVALLAVMRKLVEHANRLLTQLANISPCTP

SEQ ID NO: 159534 - protein, 360 aa, unidentified
MLGQRTSVGLDVHARSVVACGLDRETGAVVERRLTPDHREIVGWIEGLPGPVAVTYEAGPTGFFLARALEAAGVSCQVAAPSKLIRPVGDRVKTDARDAVHLARLLHLGQVTAVTIPTAEQEAARDLVRAREDCRGDLMTARHRISKLLLRQGIVYYDGKNWTGRHELWLRKQRFDNPALQLTYDAAFDAMTACVDRRERLEAAIEAMAADSEFTPVVQRLGCIRGIATLTAFGLATEIGDWHRLTGRTIGAYLGLVPSEYSSGDSRVQGSVTKTGNGHARRLLVEAAWHHRSPYRPGTMLRRRWELASPAARARGQAANRRLHQRWIDFDLRRKRSVVAYMAVARELAGWCWSLAVLQE

SEQ ID NO: 159535 - protein, 346 aa, unidentified
MEHYVGLDLSLKLTAICIVDRTGKIEREGVVASDPETITAFIKSHAPHVTRIGLETGATSTWLWTELNKMGLPIICIDARHAKAALKMQINKSDRNDAVGIARIMQCGWYKEVRVKDLDSHAIKALLVSRALLVKIKRDIENQIRGLLKNLGLVIGRAKMKVFAVRAAELAEARPELAAAVEPLLKAREAVGRQIADLDRKVMRLARNDAQVRRFMTAPGVGPITALCFLATVDDPTRFKRSRSVGAYVGLTTRRYASGEIDWTGRISKCGDAMLRSYLYEAANVLLTRVVKWSTLKAWGVRLAKRSGLRKAKVAVARKLAVILHRMWIEGTEFKWSSKEVANQPA

SEQ ID NO: 159536 - protein, 420 aa, unidentified
MARRLELGKDMTDQRQWYVGVDWASESHHVFLTDADGRKIAERVFKHGGEGLAEMAAWLVAASGAEASQIQVAIEVPHGPVVETLVERAFKVHAINPKQMDRFRDRYTLAGAKDDSRDAQVMASALRTDPRCFRLLAAADPVVIELREWSRIAEDLSAERNRLTNRMREQLWRYFPAMLELDGDLGAEWLLDLWEVVPTPAKALRIRDKTIATLLKRNRIRRFDATHVLDVMRKPPVRVAAGTTEAASAHISALVARIRLVNRQLVQAHRQIDALTARLIPPEPEPGQRKQHDVEILASLPGVGRIVLATLLAEAFDALQRRDYAALRSLTGVAPVTKRSGKSCIVVRRQACHDRLANAMYHWARVAVQHDPRSRAKYAALRSRGHSHGRALRSVADRLLNVACAMLKTGTTFNPSLAAP

SEQ ID NO: 159537 - protein, 324 aa, unidentified
MSKDKKYFGIDISKDVFDVYDYIGNYYQYSNDFKGFKSFNKLLDKGCHCVMEATGYYHSKLAYYLVEKGVLVSVENPLKIKRFIQMGLSKIKTDKSDSKQIYNYALKADLTLWYGESEMQQESLQISRLLSSYTKQSTMIKNKLHGETVLGIPSKLVVQSLKRQLKSLQKEIGKLELALEINVKTEHQESLTLLKTIPGIGPKTAMMMLVFTDGFNRFETSKELCSYAGITPVIRESGSSVKGRPRISKVGNVKLRNLLFLCSFNACKYNKSCKALYDRIVAKGKSKKLALIAVCNKLLKQAFAIIKNRIPYDDNYRSLLVGNN

SEQ ID NO: 159538 - protein, 345 aa, unidentified
MTNIVKQVAGIDVAQKELVVSLGRIDQLIQKEVYAYKTFANKPSGFAALLLWIKKHTDGSIAVRYVMEATGVYHEQLAYYLTEQSFEVSIVLPNKISNYLKTLETKTITDKTVSQGICQYGLERTLEMWQRPKKIFRTLKQLTRERDQLIAERTMIKNQLHAEQAEAHPSEYSISRMNERINLINRQEKEIRSEMAENIKPDTGLIKQIANITSIPGVGKLTAVTVLAETNGFDLIRNKKQLVSYSGLDIKEKESGTSVKGKPKISKKGNRYLRKAMHLPALSAIRNEDRYKAIFVRLVSKHGVKMKAAVAVQRKLLELIYIIWKTNQPYSKEYLQRVSENTNAV

SEQ ID NO: 159539 - protein, 349 aa, unidentified
MLADEAEFVIGVDTHARSHTLALLDKQQQTRAVVEVSACRSGYRRALRLARLFAPGRRVWALEGTGCYGAGLARFLVGRGERVLEVERPARREGGSRTRLKSDRLDAERAARLLLAGRAGARPRLGEATAALRSLLACREGAIRARTAALNQLRAALLSAPCQLREQLQDQPRAQLLASCARLRPAACSYRERAASALTLQLLARRVQALTREAETLERELTRRVQHAAPALLDQRGVGPISAAVLLCAWSQPGRLRNEAAFARLAGAAPIPASSGKRIRHRLDRGGDRKLNRALHTIALTRRRCDPTTIAYIQRRQREGKTEREAVRCLKRYIARNLYRLLEATATTT

SEQ ID NO: 159540 - protein, 342 aa, unidentified
MPIVGGLDIHRRQLTFDYLDTVTGQVQRGQVAPADREHLRAWLGRFAGRGDVAFALEGCTGWRYVAEELASAGVTPHVAEPADTAFARGRKRHAKTDRTDARHLRTLLAEGRLPECWIPPSRVLEARALLETYHDLRREHTAWVQRVHAVFFHQGAPHLGQGALAHPDAVRSAASACLSPAGQLQVAVALEMTAVLEERLHDLRRRLLDAARHLSGAKALAGRLYGVGPVTALALTCWLGGAGRFSSSRKAVRFAGLDITVHSSDRKGPPGRLSRQGPPVLRWALYESGKAHARSCAPDHAYYAAVKDRKDGKRAALSEARKIVRQASHILAELGDDALTAA

SEQ ID NO: 159541 - protein, 403 aa, unidentified
MNSVGIDISKGRSTIAVMRPFGEVVISPFEVRHTDSELSELARQLKSLNGETRVVMEATGNYHAPVAKLLHDAGLYVSVINAKLVHGYGNNDLRRVKTDRKDAVKLANYGLDRWLTLPRYVPEEDTRLLLKNCYRQYRQYSKVQTVLKNNLISLLDMVFPNVNRLFSSPIRGDGSEKWVDFVAEFWHCRCVSEKSQKAFTNKYQRWCRKHGYNFSEAKAHTIHAEACGHIDVIPKSETTKLLVEQAVAQLRATSAALAALKHEMQALASMLPEYPVVMDMFGVGPTLGPQLMAEIGDVRRFYSEKALVAYAGLDAPPNDSGDVTGRHKSMSKIGASSLRRTLFLVMTVYLQNAPLDEPVYQFMDRKRAEGKPYRVYMMASANKFLRIYYATVKAYLESLEHTA

SEQ ID NO: 159542 - protein, 344 aa, unidentified
MKIAVLGIDLGKNVCSVVGLDASGAVVLRRRVRRDTLIDLVAKLPACIVGMEACCGAHHLGRLFATQGHNVRLMSPEYVRPYVKAQKNDDRDAAGIAEAATRPTMRFVEVKTEAQLDMQTLHRSRERLVGERTALINQLRAVLLERGIVVPQGKRKFEQYLVAMMDEHDGEGLSARMRMLVADTRAQWRELDRRIAAFDAEFARWAKENEDARRLATIPGVGVTISTALIAAIGKAETFEHARDLAAWLGLVPRQATTGGKPRLMGISKRGNKYLRTLLIHGARAALPHLAEKGTTLGRWAKNLLSRVHQNVAVVALANKLARICWAVLRSGQKFAAKEATLAV

SEQ ID NO: 159543 - protein, 339 aa, unidentified
MYPFYLGIDLHLKRTYMVLMDAKGEIIDKGRISNQEITKYLQEKVPQETYAVLEATRNWPFMYDILNEHVQKVDLVHSKGVRAIANAAVKTDQIDASTLAHLARMNYIPKAYAASKEMRDLRQLLRHRGWMVNQRTKAKNRIHAALASYNLVSPVTDLFGVAGRAYLAEVMEKELRPAARQVVADHLALLDHLGERIHSLEKSISLNERQNHIVKLLMSMPGVGRLIALIILAEVGDISRFHKPKSLCSWAGLTPRVHNSDAVVQHGHITKEGSRYLRTAMVRAATTACRVSPRWYVAHEHLALRCGRRAARVAVARRLLTVIYYMWKRDQPYQENYGQ

SEQ ID NO: 159544 - protein, 408 aa, unidentified
MNAVGIDVSKGKSMVAALRPMGEVALLPQEFLHTGVGLEQMAYTILALGEDTRVVMEATGRYHEPVAAALHEYGIYVCVLNPLYIKQSGGGSIRKVKTDKADAMKIAKYGLDNWVDLREYTPMDTVRQQLKLCSRQYNLYMKTVVSLQNNLISLTDKTFPGVNELFSSPERADGHQKWVDFVMTFWHCDCICRVSEKAFTERYQKWCKRKGYHFSEEKALDIYAGSCGHFTTLPKNDNTKLLITTAAQQLLAGKTTLAALRAEMTRLASQLPEYETVRAMYGVGETTAAQLMAEIGDVRRFPRRSSIVGFAGVDPAVDQSGKHETQSTSTTKRGSPHLRKTLYQIVCTYLRKAPADEPVYQFLDKKRAEGKPYFVYMTAAQNKFLRIYYARVKECLEAFDAQQGTSQG

SEQ ID NO: 159545 - protein, 312 aa, unidentified
MSEPLYVGLDVSKQHLDLACEPARPPQRVPHTDEGIAGLVAQLQPLGPALIVLEATGGYETDVATALALAGLPVTLVNPRQVRDFARALGRLAKTDALDAQVLALFAARVRPEPRPLPDEAQQALAALVTRRRQLVEMLTAERLRLPLAKGPIRRDVQAHIHWLEQRVKDTNTDLRAALKTSPLWQAATRLLQSVPGIGPTTAAVLIAELPELGRLTRRQLAALVGVAPLNHDSGQHRGIRTIWGGRAPVRRALYMATLVATRHNPVIRAFYRRLLTAGKPKLVALIASLRKLLTILNAMIKAQQPWAPTHP

SEQ ID NO: 159546 - protein, 343 aa, unidentified
MDMIRVGIDLAKNVFQMHGVDRSEKAIWRRKLTRVEWLDVLQRTVPLHAVIGMEACGSAHHWARRLQAIGYTVKLIAPQFVKPYVKSNKNDANDAEAICEAMSRPGMRFVAVKTVEQQDVQAVHRVRAGLMEQRNAKANQIRGLTSEYGIVAPREILQLRRAVPVWLEDVNSGLSDRFRRLLTGLWEDLRSLDDRIRELDREIAAIAASDAVARRLQQLLGVGPMVATALIATVGNARQFSNGRQMAASLGLTPRQNSSGGKERLLGISKRGDAYVRCLLIHGARAMIQMARRRTDALSLWVVRIAGSRHPNIAAVALANKTARIAWAMITRETGYQPELAAH

SEQ ID NO: 159547 - protein, 355 aa, unidentified
MKGEVQSKKVLVRGKEVFIGVDVHKESWHVTARTEGEEIFNGRIPSQYQALRKLLGHFKDCKIKVAYEAGPCGFWLYDKLTEDGVETIVVPPSLIPVESGNKVKTDKRDSRKLAKLLESNMLKRVYVLNEEDRVDRELLRTRRQIVEHRNDVARQIKSKLLFYGIHSPFARRYGWHQNYLRWLKEMELPREGLRVCFGSLIELYEYLSDQLLKINQKVKELSQSLKYRQRLKLLCSVPGIGTLVGMELLVELQEVERFKRADELASYIGLTPSEFSTGQYIRQGRITRCGNKRVRTCLVESSWILITKDPLMRFKYNRLKAMKGAKRAIIAIARRLIIRIRRILLNNEPYVVGLS

SEQ ID NO: 159548 - protein, 281 aa, unidentified
MRFYTKQPQFYCGIDLHARTMSLCLVNQAGEILVHRTMPAGPDPFLKVVAPYREDLVVCVACLFTWYGLADLGAREGQPFVLGHALSMKAIPGGTATNDQIDAQKIAVLLRGGMLPQAYVYPAEMRATRALLRRRIPLMRKRAEWLGHLPQTHSQYNVPAMGQKIASKANRASVAARFLEPAVQQRIDVALALLDHDDCLRRARELTSLKTAKQHEATTLYLLRTVPGRGESLRLVLLSDVHAIARFPRVQDVVSYGRLVKCAKASAGQRYGTSGTTIGNA

SEQ ID NO: 159549 - protein, 391 aa, unidentified
MSLYFVGIDISKYKHDCCIISAADQKVISKFTFKNDKAGFEELITTFNSLSNPEDIKIGFESTAHYALNLELFLKNANHSFMEVNPVLIKEYKKSTTLRRTKTDSVDCESIARWLMTVEYKPHSKGFYHAYSLKSLTRLRDRLIRQRSFYLVKITNVLDHTFPEFNPFFNERLSKTALYLLENYGSAEKMARMNSASYDKLRCISRGKFSIQQFLRLKELASNTVGVNNSIFDIELNSLLTLHKSLCTEINTLENEIIKFIEEVHPHYMSIPGIGPISAAVIYAEYGDISNFDNPGQMLAFAGIEPGINESGTESHGGRMVKHGSSQLRYVLLNACLPLIRFDLTFATYYAKKRAEGKKHRVAMTHVAKKLIRVIYALERQDIDFNAQKIR

SEQ ID NO: 159550 - protein, 345 aa, unidentified
MSEFYEGQQFLGMDLHRRRSVLVRMSETGEHLETTRILNDRDSLAEVMSRAGESPEVVLEATYGWYWAADALAELGATVHLAHPLGVKAFSYRRVKNDQRDAADLADLLRMGRLPHAWIAPPETRELRELVRHRAKLVAMRSQCKAHIHAGLAKNGIWVPMTDLFGVEGNLLLDKVTMSAPYQERIASLRRFIEAFDAEIDLFTTLAQRRLTHDAGYTAIQQIPGIGPVLGAVFVAEIGDVHRFGKPAQLTCWAGLTPSHRESDTTVHRGRITKQGSRLVRWAAIESVKMLPKSSHIGAIRDKVADRRGNRNIGAVAAARRQLELVFYGLRDHHIRALHHPPRAA

SEQ ID NO: 159551 - protein, 362 aa, unidentified
MSDIFALDVSMGKSYCVWYRGKHCLKEFSLVHTKAGFNALRDMIKKAQKPIIYFEATGIYSRVMEHFCETNGLRFCRLNPLELHLKSESLRRVKTDQKDAHRIALTVQENAFRLTVPWKKDYLQLHELSRFYNQLNADWNYRLNHLHTALEQVFPELKQLFVNRTSKLALNIVELFPHPALVRPYSRVKLKNILMASTDKRISKMKAYKYADRLIDLAQKSYPAVSGDAIQVDEVRYYARQLIALTRKREEVIKRMESIAQRLPEYILYCSFPGIGKQTAAQLMGELGDISRFDNANQLNAFVGIDIRRYQSGTYLGQDHINKRGNPIARKLLYFTVGNMIRQQHANSNHIVDYYYRLVEIE

SEQ ID NO: 159552 - protein, 414 aa, unidentified
MFAVGVDVSNGRSTVAVLQTKTSALMKPFEIPHTAEGFASLAGKLAGLDGEVRIVMEHTGRYYESFARAMHSAGFFVSAINPLAIKNYQDGINIRRVKTDKADAMKITRFALDKWEILPQYTPMDTIRYDLKTMHRQFQLSSKTKTALSNNLVALLEQSYPGANRYFDSPARPDGSQKWVDYVDTFWHVDCVAKVSQSAFVERYRKWCKRHGYNFSQQTAIDLHTDARQKFALVPKSDTCKLLVREAVSQLNAVSRTVETYRTEMDRLASQLPEYETVMAMTGVGKSMGPQLMAEIGDIRRFPHQKSIVGFAGTDPIKDDSGDKVSDSKPSSKRGSPYLRKTLFVIMSILLQLHPQDDPVYQFLDKKRSEGKPYYVYMTAGMTKFLRIYYGKVRDCLKEQGLWEQTSDAPGMAD

SEQ ID NO: 159553 - protein, 358 aa, unidentified
MDLYGAIDLHGDNGYCGIVDEEARRVFGKRVPNVMDTVLETLEPYRERLVGIAVESTYNWYWLVDGLQEHGYRVHLVNTAAVKQYAGLKYSDDQRDALFLANLLRLKILPEGYIYPKEERSVRDLLRKRMLLVRQRTTHVLSLESLITRHTGKQISARAAKQLTEEDVAALVNNRHVEMSARMNIETIRFLSEHIKTIETEVVKEVGVQEEYQQLLTVPGIGKIMALTIALETGDIRRFAEAGNYGSYCRCVKSERLSNQRKKGEGNEKSGNKYLGWAYVEVAHFMLRYYEPAKRFYQRKSNQRNTTVATKALANKIARACYYIMRDRIPFNGARMFGPEAGCVGKPAQGLAKSDHQV

SEQ ID NO: 159554 - protein, 413 aa, unidentified
MNSLYAGIDVSKNSNVAYLMKPDGTKFSEFPVPNDFNGAKLLSERIVSTLKSLSLSEVVIGMEATSVYGELLMYSLREDEDLKQFQRSIHVLNPKQVAKFKQAYPDLPKNDYVDAFVIADHLRFGRINTEVYMDDYRYKALQMLTRARFLAIQNLIREKQRFANYLFLKCCSIAQDNNLPNSSATMLNLMEHYDTVDDLVNASLDDLTAFVRESGRGRFSDPEAFAKVVQKAARSSYRLPKTVNDSVNQIMAVSISAMKALEKQIKEYDKAIERQFEIIPNTLTSIPGIGPVYSAGIIAEIGDIKRFDSQAAVAKYAGLVWSQHQSGSFEAEATHLIKSGNRYLRYYLLEAANSVRRYDSEFSRYYNLKFKEVNQFQHKRALALTARKLVRLVYRLLKDNRIYTPPVGTTTGH

SEQ ID NO: 159555 - protein, 327 aa, unidentified
MTEQPLSDRVVIAVDPHKASWTAAALDASLQPLDVIRVPVSPQGYRQLRGFAQRWNDPGWAIEGAAGLGAPLTQRLTADGIDVVDVPAKLAARVRVLSTGHGRKTDEADAVSVGVAALTATRLNTATVDAAITALRALVEHRDDLVKTRTQTVNRLHVLLTHLTPAGAPRGLTADHAADILRQIRPRDPAVKTLRGLAVDLVTEIRQLDRRIAKAATDIHTAVDTTGSTLAELCGIGTLNAAKILARVGSVHRFRSAAAFASYTGTAPIAASSGDVTRHRYPVPETASSTVVCTPWRSPRSPATHPDERTTERNEPPVRATEKRCAA

SEQ ID NO: 159556 - protein, 330 aa, unidentified
MKLYSAADLHSNNHFLTIIDEQDKRILEKRLPNDLSVTLKTLEPYRPNITGVAVESTFNWYWLVDGLMEAGYHVMLVNTSKVRQYEGLKYTDDRNDAFWLAQQMRLGILPTGYIYPKGQRAVRDLLRERRRLVRQRTTNVQSIQSTLWRHTAIRLPAAVILERKEAQWPQLSDPNIKLGIQARRATIKVLNKQIETIEGTVLKHLKPIPEYKTLLTVPGIGPVIAWTIVLEAGDLSRFANVGHFASYCRCVESRRTSNQKKKGENNAKNGNPYLAWAFFEAAHFAIQYLPAAKCFYERKAAQRNPILAMKALSHKIARACYYLMRDQVPF

SEQ ID NO: 159557 - protein, 427 aa, unidentified
MPYVIAGIDVHKKMLAVVVADVELDEEYRFERLKVGTSPAELRGLADWLVEHEVEEVVMESTAQYWRPVWEALELHWRPKRRTREGATPVSGTLHLAQAQSNRGAGGRKKDFPDAERLVKRLVAQELTLSFVPDAEQRLWRTVMRRKYQITRNRVQLHSRLESLLEEAHIKLSSLVSDLLGTSARRMLKALADGETDPATVALLADQRLRATAAQLSDAVTACTTLHPVYRRLLTLTLEELRLIEEHLEQLDQQMADLLAAHHAAVQRLAEVPGLGVDSAQQIIAEVGASAATFPSPKHLASWMGACPGTEESAGKNYSHRCPKGNRQMRRVLNQAANAAVKAKGTIFAIVYRRLLPRLGHAQAIGAITHRLCRLIWKILHEGVRYEERGPAVSEEVKKVRARKMIRELRNLGYRIELLAAPSSNPA

SEQ ID NO: 159558 - protein, 358 aa, unidentified
MQTKSTKISFEGQKIFIGIDHHLKSWTVTIYTEELMHKKMSMEPDAEKLAKYLERHFPNAEYLSAYEAGFSGFSTHRKLIAAGINNIVVNPADIPTTNKQIVQKDDKRDSNKIAKGLRNQDLEAIYIPSRSFEELRSLMRYRRTLVKDISRNKTRIKMFLYRNGVDIPEKLYSASKYWSSAFTNWLKTVKLTTNYGHIELENLLENTEKLRVSLLYVTKELRKLSRHTAWKKQVDLLCTIPGVGMITALTFLSELFTIKRFKNLDRLCSYIGLVPSTNSSGEKERTGNITKRCNNHLRSILTESAWIAARNDPALSLKYNELKKRMKGNQAIIRIAKKLLNRIRFVLINEVEYQYAIK

SEQ ID NO: 159559 - protein, 395 aa, unidentified
MHEKQKHIYVGVDLHKQHHVAVIINCWQEKLDEIKFENKPSAFSTFLLDIDALTEEGLTPIFGLEDVGGYGRALAQFLTDHGQVVKEVNPALSYAERKSYVTVQKSDSWDAECVARILVRQLSQLPNAKPHDLFWSIQQLVTRRNALVKAQGALKNQLHIQLSHHYPSYKKFFSESCVEGVSIKQLTTFLLEVSHNTCSVKKANEILKLVIEDGNTTKEHQETRDFLVRSIVRDISFKKKEMNYVEGELKQLMSLLDFQLDSMPGIDLVTASALIAEIGDVRRFPNANKLARFAGIAPVYFGSGGKGKEQKSKQGNRALHALFYNLAVQQVQVAKGSKLPRNPVFYAYYQRKLKEGKTKGQALVCIMRRLVNIVYGMMKHQTAYELPIIEEKEVV

SEQ ID NO: 159560 - protein, 337 aa, unidentified
MSTIHILGIDLGKHCFHAVGNNHTGKDVIRRKFSRSQLLRFLSVLEPTIIAFEACGGAHWLARKCEAYGHRVRLIPPQYVKPYVKGNKNDFIDAAAVAEAASRPSMRFVSAKSEEAQVIAAIHRVRDGYIKERTACMSRIGAVLLEFGLSFPKGHAKMKALFQWLAEQDIKLPQSLMAELLSIHEHYKYLNEKVSTQDRKLKAITENNENAELLKSIPGIGDLTATLCVANISSPSNFGGGREMAAWLGLVPRQYSTGGKSKLLGMSKRGNKHLRALFIHGARSVLSRIETTGKVFGNWLVNLRATKPFNVVVVALANKLARIAWAVLYHRQAFKAV

SEQ ID NO: 159561 - protein, 331 aa, unidentified
MTAEYIGIDLHKAFFQACALTPAGDRVWEGRFARTAEGVARFVAHGVGATHTIAVEASGPTWAFVDALQPTGARVCVVDPRKTRLKAGFAAKTDRLDARRLADAVRRESVVSIYVPPPAIRELREMCRGRHQVVRLRTRLAQMIRALLLRCDAGDPPGTRLWAPQALAWLAAVPVPADVDRTLRRLERLYRAVHGEAHAADHEVRQRARLDPIAVALDDLVGIGPVLAMTLRAEIGDITRFRSGPALACYAGLVPRIDSSADRVYRGRITREGSPWLRWALVEAARHAIRRDDARARWARRLAVRKGLNKARVALARVLCDQVITTWRQAK

SEQ ID NO: 159562 - protein, 358 aa, unidentified
MDVIHDRAAGIDISKRDAKVCLRLPSARKGQFRPAVSTWGATATEIVELRSFLEQQDVPVVVMEATADYWKPFYYVLEETLPVLVNARDARNIPGRKTDVSVASWLAQLAACGLLRASFIPPPRIRELRDLTRARAITVRDRTREIQRLEKFLESSGIKLSAVVSSLTGVSSRLMLDDLITGQRDPLVLAAHAKGKLRSKLPELTAALNGRFGEHHALMTKLYLDQIDTYTRKIRTLTESIELLMVPFRQTREVLSTIPGASELVADVIIAETGAGMSVFATAAHLASWAGVCPGSNESAGRVKSSHIRPGNKYLKSALGIAALAASRTKGTYLAAKFRRIAARRGPMKLSSRFSTRF

SEQ ID NO: 159563 - protein, 319 aa, unidentified
MSPTRRREVHVGIDVSKRRLDVCLLPEGQSFVLSNDQEGVDELLSRLEGVRPTLVVLEATGRYERLAATSIAARGIAVAVVNPRQARDFAKAIGRLAKTDRIDAFVLARFAAAVEPAPSVIPDEEAQLLQHILARRRQILSMLVAENNRLQMAPQALQKRIRAHVRWLEKELSRTDGDLDEAIEGSVTFKENEALLRSVPGVGPVLARTLLAELPELGKLTHKRLCALVGVAPFNRDSGKRRGKREVWGGRAAVRAALYMGALVASRHNPTIKEFYERLLAAGKPKKVALVACMRKLLSILNALMRDRAIWRCPHVLNP

SEQ ID NO: 159564 - protein, 416 aa, unidentified
MNYIGIDIAKTFHVVTIIDENEVKVLKKAFRVENDIDGYISFIEKLDTVSSDKTNFLIGLEATGIYGENLLEFLMSKGYNVKLLNPFQTSRYREQTTMKKVKNDNIDSLMIALFLKDGKYSEGYVTNDEYQSLRTLYRNRATIQDDMKDVKKRILTNLAVTFPEFEYIVNPFTNIGLALLDKYPTAEHYKHSSIDRIVKVFRHIKGNNFNNEKALQILQASKQSVYSGKAKEARAIAIRSSIRLLQMYLQEIDILEQEIFLLLEKQNISTEKFEEDMKADDKSTTLINNLKSIPGVADKTIAAIISECGDLTRFPNTAKFIGYLGLFPTENSSGNSKVIGHLSKRGSSIAKHALYMSSVSCMLHNSELKQLYDTKKSQGKSKKEALIAVSRKLATIIYAIFKYNTPYNPNRVFAKS

SEQ ID NO: 159565 - protein, 362 aa, unidentified
MTKSTTIVAFDQHAATTVAGVLMPGQRTAAIHSLSSDVTTIGRFVERLRRGGPVRCCYEAGPCGFELQRFLTGRQIPCDVIAPALIPRRAGDRIKTDRRDAGQLAVLYRAGVLTAIHIPTEQEEAARDLLRCREDIRADVLRARHRLSKFLLRHGRRFTVTKKAWTKRHAAWLQAQRWPLPALEQTHRAYVRAVDEAVGRLQAVELELRDLLTLESLRDRVARLRCFRGIDDLTALTGAAELGDARRFPTAPSTMAFVGLVPSERSSGTKQARGAITKTGNAHLRRVLVEAAWHYRHHPFLGRSLTQRQQGAPARVVEQAWSAQHRLHRRYRRLAARGKPKQLIVTAVARELTGFLWAALTQ

SEQ ID NO: 159566 - protein, 337 aa, unidentified
MRIIRIGLDTAKHAFQVHGVDETETAVLRAQLRRGAVARFFAKLPPTRIGLEACGASHHWARLLRGLGHEVVLLPPQYIKAYVKRGKNDAIDAAAICEAMSRPGMRFVPIKSADSQAALMLLRVRDLLIKQRTMLINAMRGHAAEFGVIAAKGPVRVAELLQHARSDAAGVPALAQELLALLADQLETIAVKLKALEGQLLAWHKQDPVSQCLASQPGIGPIAAVSFTLKVPDPKLFRSGRHFAAWLGLTPKENSTGGRRRQGRISRQGDESLRKLLVLGATAVIQFAKPGRGSPWLVNLLARRPRKLAAVALANKMARILWAMMASGEVYRRPQPA

SEQ ID NO: 159567 - protein, 416 aa, unidentified
MLSRHEEVTLTITCGIDWAEAHRDVALIDKQGVVLARSRIDTDAAGFSMLLALIAEHGGGPDDTPIAVETDKNLIVVALVEAGFVVYPINPRAVARYRERYGQAGGKSDPGDAAVLAHILRNDRHLHRRLPANTGQAGAVKVLARQHQEAIWALHQAVSRLRSVLLEFYPQALQAFPNLKHHAATAVLAAVATPAAAEKLTRTRVATLLRRSGRGDQPVLAERILTELKVSALRQPPRVEAAYGHTVRGLVGAVVAMRTAVDELEKGLACEFDQHPQSDLLRSVPGLGPVLAARILAEIGDDPARFDNPQSLRAYAGTAPVTIASGRSHYVEARKVRNKRLADACHWWAFTTLTKSAGARAHYDRRRAAGDHHNAALRNLANKLIGRLWWCLVNNQPWDEQGAWPLTTNTDKATAA

SEQ ID NO: 159568 - protein, 357 aa, unidentified
MSSENNILNFNNQRFYVGIDVHKRSWKVTIRTGGLALKTYSMNPSPHDLSKYIQEKYPGGIYHSVYEAGFCGYFAHRQLEELGFKNIIVSPNEVPTNAKEKTNKTDSIDSRKLARELENGSIKGIYIPGPLNQELRSLVRMRYQLMQSSVRLKNQIKSYLDFYGHKIPENYQTKHWSGIFISYLRSLSFQYNIGKEQLEIYLSDLTEKRKLMVRVIKKIKSFCEEYGFNKDIQLLMKVPGIGFITAVTLYSELIDINRFPKLDNLASYVGLTPSVRSSADRENNLGLKMQHNKYLRSMLVEAAWIAVRKDPVLTACFNEYLKRMSKQEAIIRIAKKLLNRIRTVLKDKKEYVCSVVK

SEQ ID NO: 159569 - protein, 317 aa, unidentified
MAEVTFPQLIQRACGIDVHLKVVVATIDGAGIQRETRSFKTFTSPLNELKEWLLSNGVTHVGMESTGVYWKPVYKVLEDSIPNVWIVNARHIKNVPGHKTDKMDSEWICKLLLAGLLKPSCIPPKEQRQLRDLTRYRNKLIQQIASEKNRMMRILEDCNIKLSSVVSNTSGTTAASLIDMLCEGKVLTLDDINSVYHGKLSASPEELLEACTGFVEEHHIYLLQMIRKDIDQTQTLVDDLSERIKRLLSKYENVLELLREIPGFSTKVVEDLVSEIGLDMSHFPSEKHLSSWAGLSPGNNESAGKKKAHESLTETNR

SEQ ID NO: 159570 - protein, 338 aa, unidentified
MKTATFGMDLAKRVFQVHWVDTETGEIGRRQLKRAQLCEFFAHRPPAIIAMEACGSAHYWARQLISLGHEVRLIAPEFVRPFVKRNKTDAADAQAIWEAAQRPEMRFVAVKSEAQQSVLTLHRVREQLVKVRTMQINQIHGLLYEFGAAVRANRHSLSEAAQALTRLADTIPAVVIDTLREQLRRVDALTQDIAEIERRLAAWQRGHEAAKRLMAIPGVGLLGASAAVATIGDARAFRCSREFAAFLGLVPRQSGTGGRVKLLGISKRGDVYLRTLLIHGARAVLACSKHLSETSQRLLARRPFNVAVVAPANKIARTIWALLAHDRVYQPGYTTHAA

SEQ ID NO: 159571 - protein, 314 aa, unidentified
MTDGGVFVGIDVAKAELMVAVRPTAAQWRTPQTDAGWAALETRLQALAPALVVLEATGGLELPVVSVLAAAGLPVAVVNPRQVRDFAKATGILAKTDGVDAHVLARFAEGVRPIPRPVPDAATQALEALVTRRRQLVEMLTAERNRRASAPPAVRPRVDAHIRWLQRELGAVEAGLQQAIRRHPCWRVQDDLLRSAPGVGPVLSVTLLASLPELGHLSRRAIAALVGVAPWSRESGAWRGPRRCWGGRAELRAVLYMGALVGIRHNPILRAFYQRLRLAGKLKKVAIVACMRKLLTILNAMMKHQTPWSAALAA

SEQ ID NO: 159572 - protein, 317 aa, unidentified
MAKRVAKITLGIDVAKDECRVCQWESTEALTLPNQAGSIRAWLQSLQGPVQIALEPTSHYHLVWVDAALALGHEVYLINPRQLAHYRGAVNARNKTDPQDAWLRARYLVHEGCQLRAYQPPCRKAQQLWALLKRRAVAVTARKQLQQSFREINLSTRALLSQFQHLLARIDRRMSILIQALGWAGDYQRCLSIPGVGPLNAAALVTAYHRGAFANSDGFVAFIGMDVRLRESGRYRGKRKLTKRGEAELRRLLYCAAQPARTYPPFENYYQRQLDKGLPKIAAKVILARKLARIAFSLLNNQQMFIRQTEKMVAYSP

SEQ ID NO: 159573 - protein, 418 aa, unidentified
MSKELTTLYVGIDVSKMANQVIMIDFDQTVLGSFSAVNNNVGAETIETAMLKVLESKALERVIVVLESTGIYSTHIATYLSASKRLLPYGIHVYTINPKIARNYRASFADMDKTDPKDAFILADIARVGRTKGLNPFRGSQKLALQRLTRHRVHLSESLSKEKTYILGNIFLKFSEYGKKHKEGKAFANDFSKTAVSILESFYDTEDIINTSLEDLANFIAEKGRNRFKDPLHTAKLIKKAARDSYRLDKVAYEPINMAISSSLSVIRCLESEIKKVDKTLEALIKGFNTNEYQALRSIPGIGPVFAAGILSEIGSIEQFDSNGALAKYAGITWRKRQSGNFEADDTEMIKTGNHYLRYYLIQAANLTRRFAPEYAAYYQKKFNQVKSHQHKRALALTTRKLIRLIYGLMSKHQLYQR

SEQ ID NO: 159574 - protein, 360 aa, unidentified
MSSWLVAGLVPGVLRQPLKKQGADAAALLRLLYRWRDEAQKAGKPIGRIVVAFEAGRDGFWLARWLQAQGIETYVIHSTSIPVSREHRRAKSDRLDTQLLMRAFLGWLRGEPKHCSMVAIPNVEEEDARRPSREHETLVGERTGLINRMKSTLTRLGIRGFNVKLKKAADRLGDLRGPDGLPLPPNTLAELQRDLARLRLVREQLKEIEKVRLERLQQAPQQGAHAMVLILARVLGIGVETADMLVHEVLSRELRDRRAVARFAGLTGAPDESGGRRRDKGLARAGSARVRRGMLQLAWRWLMFQKDSALAQWFLARTVGAHRNARKIMVVALARKLLIALWRYVTAGEVPAGARLRPAA

SEQ ID NO: 159575 - protein, 416 aa, unidentified
MANEAIKVIAGIDTHADTHHVAVINEHGKPLADREFLAVGSGYRKIVDFITSYGTVTAVGVEGTGSYGAEIARTLRAAGLTVLEVNRPNRAARRLKGKSDPLDAYEAAKSVLDGRTTSVPKAKDGPVECLRILRAGRASALKASTAAINQIKGLLVSAPDKLRAKYRAMATSTLIPALQRTRPSGHTADPEYVTLLTLKALATRCQSLAAEIAAADAALQEIIDAYAPMLCDLPGVGTDVASQLLVTVGDNPDRLGNEAQFASLVGVAPVPASSGKTTRHRLSRGGDRNANHALYQVVLVRMASCQRTKDYVAKRTAEGKSKREIMRCLKRYAAREIYRQITNPQASPDNTDLRQMRTALGCTITTAASELGQWPSKISLLERGLIRNDDLATTYRKWLTDQTTKMGVQFTVASSA

SEQ ID NO: 159576 - protein, 320 aa, unidentified
MAQQESAIIIGIDVCKDRLDIFEHESGRGYSIGNDAVSIEAWLDGHAGRLRVALEPTNRYHEAVAEAAYARGHEVYWIDPFRLSHYRAGLGRRAKTDPQDAYLLARFLEREGGELRPWKPLSRGQQRFWRLLKRRSTLVRAKVQLRQSLTDMGTLQDEVDSLLRHCIRMIAKLDRALLAQAKELGWGESIARCRAIPGIGPLTAMALVATWHRGDFSNVDAFVAFLGLDVRVRQSGRWQGRRKLTKKGDGEIRRLLFNAAMQARRNELWEPYYLRLRDRGLSTTAAFVALSRKLAKVCFALLQNDTEFDPLAHRSTCMST

SEQ ID NO: 159577 - protein, 325 aa, unidentified
MVHERAEAYAGVDVSKERLEVCVRRDREARVGEDTFGVSNDPAGTQTLLARLLQERPALVILEATGGFERPVAAALAAAGLPVAVVNPRQARDFARATGRLAKTDRIDAQILARFAQAVRPAPRPVPEEEAQALAEITARRRQVVGMLTAEKNRLGAATTKPVRKRLEAHVRWLEKELSRTDRDLEEAIAKSPTWRENEKLLRSVPGVGPVVARTLLAELPELGSLRPKQLAALVGVAPLNRDSGAFRGRRAVWGGRATVRAALYMGALVATRHNPQIKEFYERLLGAGKPRKVALVACMRKLLTILNAMLKNRTPWRTPQTRAP

SEQ ID NO: 159578 - protein, 320 aa, unidentified
MKANENEVVHCGIDVSKDSLEVVVSIPRRVLARWQTTNDEAGVEQCVAQVQAFKPAPMLIVLEATGGLETLVAYRLQTAGLPVAVVNPRQIRDFARALGRLAKTDALDAQAIALFAERVRPAPRAVPAAEARALGELVQRRRQIVEMMVAERNRRQRLASQRMRKSVDRLLAALQKELSALEADLDDAIRGTPAWREAEDLLTSVPGVGDKLARTLIADLPELGQLDRKQIAALVGVAPLNRDSGKMRGKRTTWGGRAKVRAVLYMAALVAAHRNPVLTGFYQRLLAAGKAKKLALTAVMRKLLTILNAILRDKTPWQTA

SEQ ID NO: 159579 - protein, 375 aa, unidentified
MLADELDYVVGVDTHRDEHVLAVVAAATGAVLARRAVGANAGGYSAALRFAEEAAGGARAWAVEGTGSYGAGLARYLAERGENVLEVSRTPRSERRLCGKDDALDAVRTARAALAGEELALPRHGEGREALRLLLVARRSAVDVRREALGQLRGVIVTAPDRLREELRVLPTGRLLERCSRLRRSSSTGADELATRLVLRSLARRIEAATREAAELEREILAHVRALAPALLDEPGVGPIVAAQLIVAWSHRGRLRSEAAFARLAGVAPVPASSGQTRRHRLSRGGDRQLNRALHTVVLHRRQHDHRQTDRRREEPTRRHPAAQALPRPPPLPTTAKPGAADDLTGHRSFIPARRPPEREQRAGLSACWDRSTMR

SEQ ID NO: 159580 - protein, 419 aa, unidentified
MSFKILKFNCCGLDVHKTWIYACIGITDSNNRTEYKQARFSSFTKGLNELCDWLAKYNCKDVCMESTGKYWIPVFNILEQHGLWVTLSHPKYTKPMKGNKTDRKDAKWICDLYMCGMVKPSFIPPADIRELRDLVRYRFKLTCMITGEKNRAQNCLTVSNLKLDDVFSDVFGKSSRSITEQILQHPGEKFDVAPFVHGRCKTPIEEIQAAIDGAISKEQAVKLRQCLDHIDELQKHISEVEQEILRLSDKYEAALTLIRTVPGFDKNPMTAIQVLSEIGGDMSVFPTAKHLVSWAGCCPRNDKSDRKIKSTRISRAGSYFKPVLVQVANALIKSKKHPEFTTRYKRIKARRGHKKAIIAICRMILTAIWHILTDLKPYTPEGFLESRPVNKEKVLTTSQALNLLRQRGYLIKDEPSPVS

SEQ ID NO: 159581 - protein, 359 aa, unidentified
MGERDRRAAAKPAGNPNSRRGRACEPELRKAGGRPARKWVKVMEQYTELFVGIDVAKRTLEVALSSGESWTVKNDEAGVAGVVKELARRAPALVVLEASGGYERKVWLALIEAGVPTARVNPRDTHHFAQAHRQLAKTDRLDARGLMLFAAQVRPQPDAAPGAADERLKELVMRRQQLTAMLTAERNREQQARTEANRRGIQTVIRFLERQRKAIEEAIEKHLRANASAHELSELLQTATGVRGVVAGTVLALLPELGRLSGKQAAALVGVAPYDRKSGDWEGRSHIFGGRTQVRCALYMATLSAVRWDPYLRAFYQRLLKRGKEKKVALTACMRKLVVMLNAMVKTRTPWSPPCPALR

SEQ ID NO: 159582 - protein, 354 aa, unidentified
MSQKLDASPAVIGIDIGKNSFHIIGQNQRGGIVLRQKWSRGQVETRLANLPPCLIGMEACVGAHHLSRKLQTLGHDARLMPAKYVRPYSKGQKNDFRDAEAIAEAVQRPTMKFVATKTADQLDLQALHRVRERLVGQRTGVINQIRAFLLERGIAVRQGLRSLRSELPGILATRTDVLSPRMLRIIEDLAGDWRRLDERIEDLSSEIEALARQDKGCERLMTVPGIGPIISSAMVAAIGTGDVFSKGRDFGAWLGLVPKQISTGDRTILGKISRRGNRYLRALFVQAAWVVLVKVKGWERYGLKSWIEAAKKRLHHNVLAIALANKLARIAWAVLNKGRAFECVNTEETASRAA

SEQ ID NO: 159583 - protein, 333 aa, unidentified
MKKMKRGDMMKKSYVGLDIHEESITGIALNEKGVTEFYDDFPNTKEAIQGFLSGVPSPQITIAIEACELWRGVYYILSELEYQVVLANPAKTRQIAGVKKTDKVDATTLAELLRIGYLPWVHIPGKGILLIRDVTRHRKRLVEDLTRLKCRAKSYLRREGIKFPKTWNKETYEFFRNASLHTGQLVNVMDTINLQIKEVDKEIRVLAKNTPLSGVLRTAPGIGNFGSLMIIGEVSEVTRFPRPKNLVSYAGLCPGIYQSGSRSHPVRNKACNKYLKWIMYECSGKAITMDTKYKTHYWKLFKRKGEHTARRSTARKMLTDVWYMLTYEEPYRP

SEQ ID NO: 159584 - protein, 316 aa, unidentified
MKNYIGIDISKSTIDVYDGKKSYKFKNNDEGFKKVVSLSENIKETVFIFEPTGVYSYPLTEFCEKKNIGCVIVSPKVSRDFARSLKVRSKTDKIDAKVLYKYQSHVEPNMIKVPTINHHAIQIQEMINSYELLKSNIQQFKNQLESISSDNKVLIRLTNKMIKFNETEADKLFQKIEDLLLKDEAMKKKYRAMLSIPSIGKKSALYLISFFLKYPSANAKELTALMGLDPVMRDSGTYRGKQRISKHGGQQLRTLLFLPTLSALRWNDRIIEFYIRLTSKAKPKKLAVIAAMRKLILMAFSIFKSEQNYKPLVIQN

SEQ ID NO: 159585 - protein, 345 aa, unidentified
MTEAYDGRQVVGIDLHRRRSVIVRMTEDGRKLETVRITNSAAALRREIAKAGKHPRVVVEATYGWYWAADVLEAAGAEVHLAHPLGVQAYSCRRVKNDQRDAADLADLLRMGRLPEAWIAPPEIRELREITRYRHKLVQARTSVKDQVHAVLAKLGIPVTHTDIFGVHGQAWLDGLRLPQPYAGKVTSLRQLAGELSAEITLLEQVLGDLLAGHEGYAAIRQLPGIGPVLAAVIVAEIGDITRFRKAGQLACWAGLTPRHRESDAKVTRGHISKQGPRILRWALCEAIQHQPAGTRPQQVKDGIIARRGPQARNIAKTAAARELLTLIFYALRDGRVRRAASPAA

SEQ ID NO: 159586 - protein, 366 aa, unidentified
MRKINTLSSSGSRIFKARQLTIGLDLGDRWSWYCVLNEVGDIVLERRLTTTPETMKQVFGKMPRSRVALETGAHSPWVSRLLAALGHEVIVAHARNVRLIGESRRKDDRIDARTLARLARVDPQLLSPVQHRSAQAQIHLTQIRARAELVRARTALVNSARGLVKSYGERLGKCGTQQVGQELARGLSPELREALEPLLREVESLNAQIKEYDRRIEKMARESYPQVELLKQVKGVGDLIALTYVLTLDDPHRFRKSREAGCFVGLQPGRRNSGQSEPQMHISKEGDRYLRTLLVQGAHYILGPFGEDSDLRRWGLKLAERGGKNAKKRAVVAVARKLAVLLHRLWVGGEVYEPLRNSQRAVSAVA

SEQ ID NO: 159587 - protein, 368 aa, unidentified
MSTRDTQTDATQKTLSRWCGCDVAKPTFDAALLLPVEEERPFTMKDMPVRTFQRTREGVREFLAWADELLEPYMDSLCPMRVVMEATGKYSAELAIWMTAERPSLSPAIINPQTAHAFTESLSLRNKTDKTDARALAIYGVERRPVAYEPPSRELSQLRSLSRHRQSVIEMRVAEENRIKETNDSPLVRQMLKRHIAQLRRDEGRLEKEMKKVLETMPELKRDAQATDQIDGVGFITAVTVLAEVGDLRRFEKARQLSAFSGISPRQNRSGQSVHHKTRMSKKGSSRIRKALYMPAMAAIRGNNDLADCYHRLLAQGKPKKAALGAVMRKLLLLMRAILISGEEYQKHYRRPCGKLLKKGLKIELILT

SEQ ID NO: 159588 - protein, 400 aa, unidentified
MKGPIVSIDVSNGNSHFQCFTQRGTKMGKVHRIPHTVEGFNFLKSKIEELEKKTNEEVVAVYEATGVYTKPLERFLEKNEIKQYSISPLQSAKQRKTEIHNKKTDKKDPESIAEVYYIKELRENEKEADLYHELRTANRVYEDCLVHLRKYKVTFQSHLSIVFPGYMKLFQDGYSQISLQLLEMYPHPDRLKNKQPEKVAKKLNKHTDHSFEVCLKTAEKVIEFANKTYPGCDKEDAWVAVLVDDIHHLQDTMEEAEAKLDKIIELAKATPYYSIILSIDGIGPNLASRIIAEFGDISKFKTRGAMVAYVGNDPNRAESGDIEGYHLSISKKGNKRLRCILYLAVTCSIRSRKENPINAFYQKKRQQSTPLKSKAAKVACITKLIRTIHGMCKTGTVFTS

SEQ ID NO: 159589 - protein, 357 aa, unidentified
MISKKISVKSKKNNSCSLTENESYDHYIALDWSEKNMAIARLGKKDTEPKVIDVPSDLKELKLYLSKLQGKKILTIEETTTSQWLYVELYEYADRIFICDPYRNRLLTDGPKTDRIDAGKLCKLLKNGMMKEVYHSTNQMYELRKLVSYYDDEVRAGVRLLNQKSALYRAENKSWKKKQELEASRVNKFIVAQLDEKIESYREKKKKYEEEFEKISKKSKVIRSLKSIPGLGPISSVTILSIVIDGRRFKSSNHYLSYCGLVKHEKQSGGRSYGRRSPRYSRRLKAVYVSAAVRVASTENPLRQYYEYLLNEKKLPVYNAKNALARYIAKISLGIIKSGEKYKPYKWRESKKGKEAA

SEQ ID NO: 159590 - protein, 410 aa, unidentified
MSTMNDSTQVSRYVALDVHRNYLVVGAVDSQQHIVLSPCRFGFESFAAWAPTHLSEADAVVLEASANAWVLYDQLEPLVGQVTVAHPLAVKLISAARVKTDARDTIKLARLLAANLIPVVWVPPLPVRELRALVTHRTCLVQQRIQVRNRLQGVLQRHNLDAPEGNAFARGTRDWWCSLSLSMAEQLRVRQDLALLDALDPLIAEVEKHLGSLSMTPPWRQQVPFLLQLPGLGMICAMTILAAVGDISRFPTSKQLVGYAGLGARIHASGQVQRSGGITKEGRSELRIAMVEAAWVAVEHHPHWKGEFERLSARIGKNKAIVAIARKLLVAVWHVLSQKSADIHADVQAVARTLLRWTARCGTTPGKRRSQAMLLRHYLDQLGLGEGLEEIHYSGRVYRLKDAHPERGKT

SEQ ID NO: 159591 - protein, 410 aa, unidentified
MRRVRDRVAGIDVHRDTAVVCCQLWAEQQLTVDKQTFSTTATGLRSLRDWLAGHEIELVVMEATGDYWKSVFYPMEGLFGEVWVVNAQHVKNVPGRKTDMADAEWLADVAAHGMVRPSFIPPPEVRSVRDLTRYRKTQIKARGQEIQRLEKVLQDAGVKLTSVASRVWSKSSAAMVEALIAGERDPAKLAELAKGRMRSKIPELVEALEGNWRPHHSVVAGRILAHIKFLDEQIESLNTEIVEATRPFDAAVTLLETIPGVSTLTAQTIVAEIGTDMTRFPTAGHLAAWAGLAPGSRESAGKHKPVGTRKGGRHLRTSMIEAAKSASRAKNTFFAARYRRVARRRGHQRATVAVAHSMICAVWHMLATGEVYNDLGEEHYDRYQQPERRHQRAITELQSAGYTITAPQAA

SEQ ID NO: 159592 - protein, 331 aa, unidentified
MSIHVGLDIGSRNTAMAWRAHSKPAGSWNIEQTPKGHKLAVKKLLALKPDSIVMEATGIYYLDLAMALTAAGLPVSVINPKSFHNFAKLMLKNSKTDALDAQLLAEYGERMTPRLWTPPTEIQLELRAIGRHINRLTGHRTRAKNELHALMATQTSSVMLIEDEEEAIAAFDRRIERFRQAGRDLIEKCPQLSAQFKHMLAAPGMGDASTFAVLAELTLLPETLKSSQVSRHAGLDVRLAQSGTSVDKPGRMSKCGNAYLRTAMFMPALSAIRCDRYVKAFYEALVSRGKKKMQAIGAVMRKYLTGLWACIRTGTDFDTAKLFSEKHLAKA

SEQ ID NO: 159593 - protein, 334 aa, unidentified
MVAGTLGSFDKDGSKKMTKPTTLTAGIDTSKDKLDVAIHGQAGRLTVENSPSGWKLLADHLRRASVVRVGIEATGGYERKVMRYLQREGFTVVLLQPLQVKAFAMMRLQRAKSDGIDAGLIAACTFLFDPRNKMPPDPRFDALTDRLTFIEQIEADIACCKTRMEHIGDKRLLRIVAGDIRRFEKRRAAELKRLLAELRGHADLAKRFDLVLSIPGIGERTALALVLRMPELGQLSREEAASLVGLAPFVHQSGKRKGETHIGGGRARLRRSLYAAALPAAFFWNPALKALYARLIARGKPHRSAIVACARKLLIFANTVVQRGTPWIAAEAVA

SEQ ID NO: 159594 - protein, 317 aa, unidentified
MDKPPATDRFVGIDVSKDHVDVHVRPDVTVFACTTDPGGLADLVNRLAPLQPHLVAMEASGGYEAVVAAALAEAGLPVAIVNPRQVRKFAGAIGRLAKTDAIDAGVIAHFADAIRPAPKPMPDALMLRLRELLARRRQLVLMINAEKQRLAKAADKLAQRSFKTILRSLEAERARIDRAIDTLIEDSPLFCARQDLLKSVPGIGDVVARTLIVELPELGTVDRHQIAALAGVAPMNRDSGRYRGKRRIQGGRVEVRAPLFMACLVAIRHNPPLRRFYQRLREAGKPARLALVAVMRKLLTTLNAIIRDNRAWADAQS

SEQ ID NO: 159595 - protein, 437 aa, unidentified
MVSTRSKVRIISGKSPAIFGKELVLMKDLLEISCGLDVHKDKIVACILSGPIGKTTVSEIREFTTLIPDMAALRDWIVSCNCHHVAMESTGIYWQPIYEILEDAYSGDITLLVVNARHMKNVPGKKTDMRDSEWIATLLRAGLLNGSFIPDKQIREFRYLNRYRKSIIRDITSQKNRVEKFLQSSGFRLSTFISDIFGASGRNIICHLIQHGCIDRESLDSCLKTKTRNHINEILVAVNGTLSQIQQDFLEMLMDHYDSLKSHLAEIETALEEAMAPFSLHIEQLTSIYGINTTASCAIIAEIGTDMSYFKTAEHICSWAGLCPGNNESAGKRKSTSITKGNPYIKSMLCEIAWVIAGKRNTYLSAWYWRIKQKKGAKKAIVALARKLLVIIYTMLKQGTLFDENCFETRRKNCEQKQVSHYIRELEKRGYHIEASA

SEQ ID NO: 159596 - protein, 348 aa, unidentified
MSEAYDGREVVGMDLHRRRSVLVRMSPDGRKLETTRITNSPAELRRVIARAGKRPRVVLEATYGWYWAADTLAAAGAEVHLAHPLGVRGFAYRRVKNDEKDAADLADLLRMGRLPEAWIAPAEIRELRELTRYRIKLVRLRTSCKDQVHAVLAKLGIPVTCTDIFGVQGSRWLDGLALAQPYAGKVASLRVLTDELTAEITVLEEVIAGLLAHHGGYHAIRALPGIGPVLAAVIVAEIGDITRFPHPARLCSWAGLTPRHRESDVKVRRGHITKQGSPIVRWALIEAIQHVPADHLLRRRKEEILARRGDQAKNIAKVATARQLLTWVYYAMRDGQVRALASAERQAA

SEQ ID NO: 159597 - protein, 412 aa, unidentified
MTEDTQWFVGLDWAREKHRVVVLDAKGESVAERDVTHDGAALSELCAWLIEVTGAQPAQIAVAIETPRGPIVETLLERGFVVYSINPKQLDRFRDRFTVAGAKDDSRDAHVLASSVRTDRRAFRRLTFDDPLIIELREWLRIEDELKQERIRLSNRVREQLWRYYPQANRLSDDVADDWFLDLWEQVPTPATAAQVNENTVAKILKTRRIRRFNAAEALAILRQQPLQVAPGTAKAATAHIRTMAVRLRLINEQIKQAERRLDELCAGIKASAPGQICEQRDVAILRSFPGLGRINIAALLAEACQPLRERDYQVLRVLSGSAPVSRRSGKSWIVLRRYACNNRLRNAIYHWARVAIQHDAVSKRRYDELRRRGHGRARALRGVGDRLLLCFASCSNGKRPTIPNTKFSKCN

SEQ ID NO: 159598 - protein, 348 aa, unidentified
MNALHYIGFDVHKKTISFCVKTAAGEIVEEGMVPAERARLRQWAGTRPQPWRGAMEATLFSGWIYDTLQPYGEQLEMAHPAKMKAISAGKKKSDTLDARTIADLVRCNLLPACYVAPPRIRELRRLLRYRSLVVSEAVRMKNKMAGLLMETGAVYVKEKLHRKKYFANLLEELEEVPQSVIDLLRLSRGALEMFESTQKRLVRELLADPELTQRVERLMTIPAVGEITALTWALEVGDPQRFHCNSDAMSYCGLTAALKSSAGKPQRGPISKQRNRWLQTTLIEAAKLAPRWNPQLAALHARELERGHRTRATLAVARKLVAYLLAVDKSGQPFQVRAAAEMATPKAA

SEQ ID NO: 159599 - protein, 414 aa, unidentified
MKQQEVAAWIGLDWADKKHSIHLQVRDGKPEHRMLDQKPDVIHEWVTELRRRFQGQRVAIAIEQRKGAIVHALMMYDFIILYPINPKALARYREAFRTSGAKDDPSDSELLLDLVSKHGDKLRAWVPDTIEARKLQLLCEQRRKIVNHRVALTNRITSLLKQYFPQALDWVGDVASVQACDFLSTWPTLSAVQRARKETLRKFYRQHNCRKDSVIDERISQIANAVPLTSDSAIIEPLSLSVQIYATQLHSLIRAVQQFDKQIAATFAQHPDHDIFDSFPGAGQVCAPRLAAAFGTDRSRWQAAVEMQSHSGIAPVTERSGDSKWIHHRLACPKFIKQTFHEFSDQSIRFSKWARAHYDQLRSRGKDHHAALRALAYKWIRILFRCWKDRKPYGEEKYLAALRRRGSPLVETIA

SEQ ID NO: 159600 - protein, 353 aa, unidentified
MNSLADLREVVDVVIGVDTHVHTHSAAVVDTATGGVLDEITVEATAEGYAELVDFAGNYPMLRAWAIEGTGGHGAGLSRHLLGMSEIVVELDRPKRAARRNGAKSDPLDAIRAAREAMARPRLGTPRRGGERQALSVLLAARRSAINASTEAQQQVFSLVIAAPEPIRARFRGQKLAVMLNTAASLRVHSSWDVETTSTVVALRTLARRAHAMLKEARELQKAILAIIRSWRPDLLEEFGVGPIVAATVLCAWSHPGRIHSEAAFAMLAGVAPIPANSGQVTTRYRLNRYGDRNLNTALHTVVQVRIQYQQATRDYIGRRTAEGKTSREIKRCLARYVARDLYRLLESGAATA

SEQ ID NO: 159601 - protein, 343 aa, unidentified
MSVSSHATISTQLNAIFVSLELSRSTWLVTSLAPGNGERMSRHTVPGGDIVALLARFCQLETKVRERTGISYSLVVIQEAGLDGFWIHRCLVNEGIESHVVDAASIATSRRSRRAKTDRLDGEALVRALLAYKRGEPRVCAMVAVPSVEDEDRRRIGRERRVLVGERIQHVNRIKGLLFAQGITGYEPVKANRRALLEELRTGDGRPLPNHISRQIERELDRLEMVIAQIDEVNKVRDAMLPTVEAVGTANAPGLLLQLRGIGHEFAGTLYSEGFYRHFANRRQVAAYAGLAPSPWRSGTIDREQGVSKAGNKRLRTTMIQVAWLWLRHQPGSELSQWFNQRV

SEQ ID NO: 159602 - protein, 422 aa, unidentified
MDKNDDTRLKEFRQLKNEIRGSTQHLVVGIDIAKERHYAFFGTPSGKTLLRRLVFDNTKEGFEHLVFHADTLSTRHDLTKAVFGMEPTSDYHKPLGEYLITQGRMVVLVGGPAVKKNRELLDGRWDKNDTKDAANVADLITQGKCLFYDFPSLDLRELRSLLSLKRRLKKLEQGYKVRIRNHLIAQYFPEMDAYFDYSEGRAIVKCLDPVKLGNLPFEAFATMASRRNGGAPQRSRLGEIHAKAAVSIGCSVHPSVPFEAATLLEGMGQIHTMMHETDKRFTEVCKRFTEYSFLLSIPGFGPGVSAQVLGALGDPYRFENHRQVLKMAGLDLSANQSGKRTATTPVISKKGKADLRYGLYHAAVVASSRNPHFMRYFTDKLKGREKEKGITTKMRTKLAAKLLVIAWTLMKKKEVFDPDCIK

SEQ ID NO: 159603 - protein, 412 aa, unidentified
MKLFVGIDVSSQDLKVCIMDSGGDTLQAFTVLNNYHGACHLRDQILAHADRIKPSEIHIGLESTSVYSWHPAMFLHEDKLLSERHTKVFTINPKLISKFKEAYVDLDKNDRIDAWIIADRLRFGRLPMTVVAQEQYIALQRLTRMRFHLVHNLTREKQYFLQHLFYKCSAFSAEVESSAFGHAITELLLEKYSLDEISSMDVADLADYLKDKGRNRFPDPEGVARCIQKAARASYRLSKVVEDSIDIILGTSIEAIRSTQKQIKELDKAIERIIAGLPGENVLKTIPGIGPIYSAGIIAEIGDIHRFDDQAALAKYAGLTWRKNQSGKFEAEETSRIKSGNRFLRYYLVEAANLVKNRDAEFGEYYRKKYNEVTKHQHKRALVLTARKLVRLVDVLLRNDQVYTPRRKVTNA

SEQ ID NO: 159604 - protein, 389 aa, unidentified
MLHDHPSVRPTAILTQFGAIFVSLELSRSKWVLTSLSPGNGEKMSQYSLTAGDIGGLLARFADLKRKAKERTGSDYPIITIHEAGLDGFWVHRVLQNEGIESHVVDAASIATSRRRRRAKTDKIDGEALLRALLAFKRGEPRVCAMVVAPSPEAEDRRRICRERQTLIEERIIHVNRIKGLLFAQGISDYAPLRRDRRKRLEGLRTGDRRPLPVHLKTQISRELDRLELLLDQIRKVEAEQEALLAAESKAAPEGEPHNAVAMLLAVKGIGEHSAAILWSEGLCRQFSNRRQVAAYAGLAATPWRSGAVMHEQGLSKAGNPQLRTTMVQLAWLWLRHQPQSALACWFRARGERGRKGSIVALARKLLVALWKYVTHGVIIEGAVMKPAA

SEQ ID NO: 159605 - protein, 363 aa, unidentified
MEVAGRFIGIDLGKRTYEMCIVDRKGKISRTGGKTDFAGIDRLCEKLNDDDAVAIEACNLAFRIERAIRKSVGCKVCIMNAGKLAVIYMSTRKTDKEDSLKLAKLLKTHDEDELPIVAPPSDEEWERRKLLSEYRSLKCQRTKEINKLHAIFEHNGYTQFVRKDMCSEKNRANILPLLKGYEKEEAERLVERLNLLEKQIERLLQKINAEVENDGKIQKVMTVPGIGPITALAYVAYVGDVNRFDNAHQVSNFIGFVPKVDNSCTICRSGHTTKKGNPLLRSLLVQAAWSTVKSKNGGALRDKYKYMAESRCIGKGKSIVTIARKLGELLYLILKTDQEYKPQKFITPELKISKLAEDALECS

SEQ ID NO: 159606 - protein, 419 aa, unidentified
MAFKILRRNCCGLDVHKTWIFACIGITDANGRTEYKHARFSSFSNGLRELAGWLTKHSCADVCMESTGKYWIPVFNILEKTCWVTLAHPKYTKPQKGNKTDRKDAKWICDLYMCGMVKPSFIPPADIRQLRDLMRYRTKLTNMLTSEKNRALNCLTVSNLKLDDVFSNVFGKSSRSIVQHILEHPGEQFDVAPFLDRRCKHSVEDVQAAVDGAMSREQAAKLRECLLHIDQLNGHRETIETEILRLAQPYSHQLELLRTVPGFSAAPLTAVALISEIGVDMSVFPSAKHLASWAGCCPRNDQSNNKVKSTRISRAGCYLKPLLVQIANAVIKSDKYPECKERYRRIKARRGHKKAIIAICRMLLTAIWNVLSKLEPYSAKGYLEDKLTEHSVVISKSQGLELLRKRGYIFKDEVSADSG

SEQ ID NO: 159607 - protein, 479 aa, unidentified
MNSIVLTANVQPNLDVNYIGMDVHSDNVVVCVRRNTINSSGQLVGKTIKTKKVVIKNSQEPLVELLSKYADGQQHIMTAESTFNWYWLADIAEDHGWNFRLADPCTVSQANIKAANDETDAEYLADRLRTGSLKSTSVLPRQLRGVRDLMRHRLRVMQEVSDKKVRLSNLYHNHCAHPMHGKLLAALQDAYDEINIDAVLESGICNNGSELIIGDLLTGLREAETRLAKIEAAVYARIDEVDSYKAERMLLKTSMKGCGDVLSAIIVTEIGDISRFRTMGDFVSYCRLAPTSKLSNGKSKGQGNAKNGNAYLSWALTELATLMARFNEPTRRYLERKQEKTGLRVVAVRALAAKLARCVYQVLRKKESFDLGLAFGSKPTHGQMTAAAEAAQTPPEPALPPVPAVAGEHHCPAEESDAPIVVKEPVPVKSKRSTRKKAVSAASSEPAVAAEGRQTARKADRVKARCALTATPPSCAGTS

SEQ ID NO: 159608 - protein, 451 aa, unidentified
MAHPKTRKTNKKHTRPTPGKTNPDAAGIDLGSTVHYVAVPAERDEHPVRHYGTLTEDLVELADWLKQCRISTVAMEATGVYWIPLFQILEDRGFEVCLVNARHVKNVPGRKSDVQDCQWLQYLHSVGLLNASFRPPAQICAVRSLMRHRESLMRTACQHLLRVQKALDQMNVQLHHAVTDITGYTGLAILDAIIAGERDPAALARLRDYRCKKSEAAIAKALRGDWREEHLFTLRQSLEAWRFHQNLMADCDQQIASLMAELEDRPVEPVPETKGKPKKTHNEPLRLELCQKFGVDLTAVEGVSIQTCLTFLSEVGTDVDKFASAEHFASWMGLCPDNRITGGRTHAAHTRKVQNRLATALRMAAQSLHRSKAGLGDWFRRIKSKLGTKAAVTAAAHKLARILWAMVKYRCPYEPSRLGNPELARAKKEAYLRRQAKQLGYALTPADGAVS

SEQ ID NO: 159609 - protein, 421 aa, unidentified
MREADTRKVRFVKDDTLIVAIDVGMEMNHGYCTTPDGRDIKPFKFDNTREGLDKLWDMVMASKSRFQCEEIIVGYESTGPYGEPMVHYLMKKPVMVVQVNPMHTKRVKEISDNSPLKTDDKDPRVIADIIKLGRALSIVIPEGDAAYLRRLTNSRERHVRERTALVNQLQQLVFLLFPEFRKVFKNIKCMTPLYILKTYPTPEAISVLDKDDLGEEMRKQSMGKFNERHADILINLAKNTIGIREGVSGLSMDIRHILVQLEVLKDLIAEIENEMEITLERISYSSKLLAIKGLGVISVAGIIGEVGDFKKFQTRAEIMKLAGLDLYEISSGKMKGQRRISKRGRSLLRKILYYVAIQTIRKNGIMHNYYTKLTNGGMKRMKALVAVSRKLLGIIYAIVRDDSEYLVNFESIKRQVIKKAA

SEQ ID NO: 159610 - protein, 358 aa, unidentified
MTEYSATIPSRTIGIDLGDRYSHFFILDAAGEEVESGRVVTSQAGMKKFQGMERARIVIEVGTQSPWISRMLEGWGHEVVVANAREVKLISKNDRKSDRVDPELLARLGRMDVKLLKPLRHRGAKGQADLAVLRSRDALVQGRSALINHVRGAVKSWGARIPKGSAESFHKRLLHVPKALQPALLPVMETIRRLTEQIREYDRKVEQMGRQEYPETARLRQVVGVGGLTALAYVLTLEDGHRFGKSRTVGRYLGLTPKQSDSGDRSPQLRISKAGDRMVRRLLVGSGQYILGPFGPDCDLRRWGMRLFERGGKNAKKRAVVAVARKLAVLLHRLWVSGEQYDPWRHHRGQEPVVQTAA

SEQ ID NO: 159611 - protein, 392 aa, unidentified
MYIIGIDIGKNHHEASIVSPEGKQIGHSLRFATTHKGADSLMSFIFNNIGNSSCIFGMEATGHYWYPIYSFLKARGYTIYVINPIQSDSLRKMYIRQTKNDSIDSFLIAEVIRFGQFTTTSMTDENILAMRQLCRYRDSVISSRTEIKLRISTIMEQIFPEYEKQFSSLWLSTSMGILEKYLTPENIENAPIDELFEIIKDKSHNRLTKAKAISIKEAAADTFGIKIAQDAFSFQLKQLIDRMNFLDKQIEALDCQILEYYEKFDCYLHTIPGIGMIAAATILAEIGDINRFKSSSALVAFAGIDPTVRQSGEFSSTHNHMSKRGSPYLRHAIFLVATTCSFHNSPLNAYYKKKRDQGKHHLTATGAVARKLTTVIYAVLRDSKPYEPKKFC

SEQ ID NO: 159612 - protein, 374 aa, unidentified
MLLPRQRSKLAKGAKDKEHAMPQNPSSSMAVIGIDIGKNSFHIVGLDARGAIILRQKWSRGQVEARFANMPPCLIGMEACVGAHHLSRKLKAFGHDARLMPAKYVRPYSKGQKNDFRDAEAIAEAVQRPTMRFVATKTADQLDLQALHRVRERLVGQRTGIINQIRAFLLERGVAVRQGLRFLRAELPTILATRTDVLSPRMLHIIEGLADDWHRLDERIEALSSEIGALACGDPACDRLMTVPGIGPIISSAMVAAIGNGAAFAKGRDFGAWLGLVPKQISTGDRTILGKISRRGNRYLRVLFVQAAWVVLIRPKSWERYGLKPWIEAAKKRLHHNVLAIALANKLARIAWAVLNKERKFECIRTNKMSPRAA

SEQ ID NO: 159613 - protein, 322 aa, unidentified
MNKVIGIDVSKATFDVSWQENGKYKPAVFANESKGFKCFLKTLKSGDHCVMEASGPYYLSLAMFLHSKNILVSVVNPLSVRRFCQMHLVRAKTDKKDATMIAKYGEMVHPELWKPEGEHIMQMRDILTTLEGYEKQITALNNQLEAEKHLPVRSKKAFNSKERIIRLIQKEIDLLNSELESIAEENCKETLDNLQTIPGIGIKTSVTLIILTNNFQHFDDAKKLSAYIGLSPRIYQSGSSVKGKNHICKMGNARARKMLYLCTWTAQKCNPQCKELKERLEQKGKPIRVIKIAMANKLLRMAFAVAKKNVAYDKNIGLETCF

SEQ ID NO: 159614 - protein, 410 aa, unidentified
MNLNVGIDVSKAKLDYCGLDSAKKVIFQDKTTNTPDGAGQIEKLILEWAKRQDDSLKIVIGMEATSVYNIHPTLYFEQSSALSALDATVVTLNPKMTHRYSQLFDDDKTDTIDAFHIADFLRIGRYQVPVTRDEKHIALQRLTRERYHVVKQITDGKNHFLNNLYFRLNTLEAELPTSVFGNTMMTVLSGEKYTLDEIAQMPLQTLTQDLNQLSHGRFGDPEAIAKALQKAIRSSYRLSKTVADSVDQVMAIYINQIRMLQKQLKALDKSITDLCAVIDGSQSTQSIPGVGPVYSAGLLAEIGQIERFPSEASLASYAGLVWRRSQSGNGERQLTPRTHNGDQYLRYYLIEAANSVRAHDPTFARFYDKKYREVPKYQHRRACVMTARKLVRVIYALLKNHELYKPAKAV

SEQ ID NO: 159615 - protein, 371 aa, unidentified
MKEFTKYVGMDVHKETIAVAIAEAGGGEVRYLGEIANTPESLQKLVKQLRKGDAALSFCYEAGPCGYGIQRQLTDLGWDCQVVAPSLIPKKAGDRVKTDRRDSLSLARLHRAGELTAVWVPDEAQEALRDLTRAREDLKHLQRQARQRLSAFLLRHGKSYGGKSHWTQAHDRWLEGAKFGHPVQQIVFQEYVDTANKLSQRVAALDQQLATAATASVFWPVIEALMALRGVSLLTATMIVAEIGDLQRFASAPQLMAYLGLVPSEHSSGGSKSRGGITKTGNGHVRRVLVEAAWAYRHPARKTAYLQRRAERTPEAVQDIAWKAQKRLCARYRLMEGRGKLKVQACTAVARELAGFIWAIGHALPAPSVRA

SEQ ID NO: 159616 - protein, 348 aa, unidentified
MITIGVDFHKRTSSYNVLNTKGQSIKACKLENTRDNIREFVQSFEGPKRLAMEATRSWGLYHDSVTDLVDEFHLGHPKKMKAISECQTKNDKMDASTIAKLAFTGFFPEAYVSAVDIRQLRSLLRFRHFLVNERRSIRNQTHALIDRNLWPSDKPQAFKNIFCKRGLVWLRDLKLPPRDRFILDECLESFKTKSQKILELEAFIQSQTLDLPGLKHLRTVPGFKLGRVNALIVLTETADIQRFSKARSFAHYSGLIPREYSSGDKHRTGRLIKDANLHLREAFIESTFPAIRMDKGLKAYYQSVKQRKGSGPAIIATARKLSYAVYHVLKEQRAYRPEPLPPAADCHP

SEQ ID NO: 159617 - protein, 411 aa, unidentified
MNNTLFVGIDISKRSNVATFMNCEGKVVGRLTFSNSGSGADRLVAKILSYYEKEDFEAIRIGMENTSIYSKNLVWFLYEHEALNEHKLSIIPLNALMVANYKKSFLDMDKDDITDSFAIADFIRIRPGLLPFKLDDRQEALKIMTRSRYNYVQALSRMKSQFLTRLFLSFSEMEAGKPFYSIFSKTSLSLLEEEFTLDELAEKPIPELVEFLQEKGGGKFQNPEEIAKVLKKAASSSYRVPAMVRESLNRTMASDMEIMRILENEIHNCDKNIEKLMKSVPAILVSIPGIGPVLAAGIMSEIGDISRFQKQGSLGKMAGFKWKRNQSGKKESEDKAAVLSGNKKLRYYLVEAANRVRIHDPVFEAYYRKKYAESKTHAHKRALILTARKLVRVIFYLMKENKLYKPDVGIS

SEQ ID NO: 159618 - protein, 349 aa, unidentified
MWIIGCDYHPRFQQIAFVNTEGGEYGQRRLEHVGEAEQFYRSLAGADVRVGMEASGHARWFERLLAELGYELWIGNPAAIRAAAPRKQKTDARDAEHLLRLLCEGRFEGMRIWVPTAQDRDVRQLVLHRHRLVQMRTRVKNQLKAVALNEGMERKPGLWSRRGREQFEQLSLPAWTARRRQDNLELLDELVSRTEPLDGAVEQEAQRRPEAMLLMTHPGVGAVTALAFVLTIGNPARFARGKQVASYLGLIPAEDSSGGRQRLGHLTKQGNALLRGLLVEAAHSAVLRDPQLGRCYRRLAMKKNRAIAAVAVARKLAIRLWWMWIRGFNYEQFRECGSHAGKPGLAGGV

SEQ ID NO: 159619 - protein, 413 aa, unidentified
MPQKTDYIYVGMDIHKETHTAVLMTYMEERLGKIKITNNIAGYRRLKAYVEKIQGNRIPIYGLEDVSHYGRDLAVYLLDQEYIVKEVNSALSCMERNSYATVKKNDEWDARCICSVLSRRSDSLPDANPQDYYWTMKHLVGRRDALVKNTSALVRQFHEQIQKQYPSYKKFFTVIECQTSLAFFERYPSAGHLTGVTVQELGTFLREQSHNTCSDKRAERILNLVEQDKMKEREYQSGRDLILQSITRQMIFNQQEMKRLEWMQGELLKELGYHLETIPGISTVTASALVAHIGDIKRFKNADRLANYAGVAPICHSSAGKGKNTQNKHLGNRDLYNVLYLLAMQQIQVNKEGTARNPLLRAYFEYKVSQGKTKIQAMVCIMRRLVSIIYRMMKNQTPYQMPEVESPKEQMIS

SEQ ID NO: 159620 - protein, 320 aa, unidentified
MMAKLIGAGVDVAKDTLEAAWGDGQHLQVMNDASGWDALIAAFREAQVDVVAVEATGGYESKLAYALQAAGLSVALLNALHARRFAQSLGYLAKTDRVDARMLAEFAVVLAQHPQRARYVKVLADERRQFMAQLVMRRRQLSDMLTAERNRLGVSQARAKKSIENVMRTLERELKRIDEDMDDHVRTHFKDLAKLLDSVTGVGKVLIATTLGMLRELGALSGNEISALVGVAPMNRDSGKRRGKRSIWGGRAELRSVLYMATLSAIQHNPVIRAFYDRLMAKGKLPKVAIVACMRKLLVILNAMVRDNAPWDISKHQKIA

SEQ ID NO: 159621 - protein, 432 aa, unidentified
MKYKLKQKQNQRITRITESTLVVGADIAKKVHVARAVDFRGIELGKDCVFHNDQEGLSKLTAWMKELGQAQGKTDIVFGIEPTGHYWFPLAAYLQEQQIQVVVVNPHHVNKTKELEDNSQTKSDYKDAKVIADLIRNGKYSEPNLPTKEYAELRILMNLREKVSASLTQVKGRIGNWFDRFFPEYASVFKKWEGKASLMTMRAFPLPSDIVSKGARDVLAHWKTDVKRGVGIKRAEKLVAAATASIGLTEGSMAARVELSTLLGQYDLFSNQLEEIMGKVLEILEHIPGAKQMLSVPGVGEITVAGFLAEVGDLNNYDHGQQIIRLAGLNLKENSSGKRKGKTGISKRGRSRLRALLFRAVMPMVAKNEAFKALHKHYTSRSQNPLKKKQSIIALCGKLIRVLHTLGTKQRGYNAIDVMGPMRQFQIQQEAA

SEQ ID NO: 159622 - protein, 370 aa, unidentified
MEEPAVFKNSMLFIGLDLGDRHSHLVILDQDGELVEEARLPTTQASLERKFSGIPACRVAIEVGAHSRWVSALLARLGHEVLVADARKLRLIYNNPRKHDRADAEYLARLARLDPGLLSPIHHRSPQAQAHLAVIRARDSLVRARTQLVNHARGLVKTTGARLPSCSAASFHTKTASAVPQEFLPALSPILATIGSLTQSIQAYDRQIQQLAQDHYPETRLLRNVPGVGPVTSLAYILTLEDPHRFRKSRELGACLGLVPRTDQSGAQDPQLHITKTGDSYLRRLLVQSAQYILGPFGPDCDLRRWGLKLAERGGKSAKKRAIVAVARKLAVLLHHLWKNGEVYDPFYQSAQPPAELPQPSAKETAIAPA

SEQ ID NO: 159623 - protein, 400 aa, unidentified
MTAVWAGIDSGKRAHHCAVIDAAGRMVLSRRVANDESALLELITSVLALAGGDQVVWATDLNAGGAALVIALLADRGQQVLYIPGRIVHHAAATYRGDGKTDAKDARIIADQARMRTDLQPVHGGDQISTDLRLLTARRTHLVCDRVRAINRLRATMLEYFPALEAAFDYSKKAPLILLSGYQTPEAIRRTGASRLAAWLKKRGCRGSANVARKAVEAANAQHTVLRTEPVAAQLVAAIAGQITAIDTEIAQLDDVISERFAQHPDAPILLSMPGFGPVLAAAFLANTGGDLRAFQSADRLASVAGLAPAPRDSGRISGNHHRPRRFNRRLMRTCYLAALSSLKNSPASRAFYERKRAEGKSHKQALIALARRRISTLWAMLRDRTTYREPAPPALAPAA

SEQ ID NO: 159624 - protein, 342 aa, unidentified
MESVQGLVVGVDTHKDTHSAAMVDEIGGVIAALDVGANRNGYRSLLEWARCQSSRRIWVVEGTGSYGAGLAAFLSAEGEVVFEGDRPQRRKRGAAGKSDQLDAIKVAREALARPHPAVPRRRGQREAIRILLTTREGAVQAYRQGLNQLYALVVSAPEPIRERLIRLKGEQLIHACMRVRGASDLESSVTATTMRQIARRLNLLRSEAADYERQLAELVGAAAPSLLAEPGVGPITAAQLLISWSHAGRIRHEGAFAALAGVAPVPASSGRVVRHRLNHQGDRQLNRALHVVALSRSGFHRPTRAYIARRTAEGKSTREIRRCLKRYLARRFFRLLQRLDNP

SEQ ID NO: 159625 - protein, 318 aa, unidentified
MEQQNQACFVGIDVAKDHLDVAVRPTGAARRFAADELHTLVGFVQEARPTLVVMEATGGLETAVAAALAAAGVAVAIVNPRQPRDFAKALGKLAKTDAIDAAVLAHFGEAVRPEARPLPDAQTRELEALVMRRRQLLEMLIAERCRLSACRVSSMRKSLEHHIEWLRKQVKDLDKDITKSVRNSPMWREKDDLLQSVPGVGPVVSSMVLVALPELGTLNRKQIAALVGVAPLNRDSGKMQGKRSVWGGRAPMRAALYMATLVATKRNDKIRDFYQRLLIAGKAKKVALVACMRKLLTMLNAMLRAGSRWKSNEVPAPA

SEQ ID NO: 159626 - protein, 335 aa, unidentified
MQIKHFIGIDVSRDTLDLSVVVDGISLQHYCITNRSIEIGSTINKIMKSLGASVNDTIFCMEHTGIYNLPLVNWLQRHQGKIWMESGVHIRKTLGLVRGKNDKDDSIRIAMYAFINRHQIKLWKASRKIIERIAALLSQRLRLNKAKKQLNTANQEQRLFMDKDIMRNLNRYTQKTVVVINKQIEAIENEILGLIKEDEKLNHMYQIITSVHGIGFVTASYILVTTNEFINFNNPKKYACYSGVVPFEHSSGSSVRGKTRVSHMANKNIKTLLHLAALSTIRKQGELQEYYYRRVAEGKNKMSVLNAIRNKLILRVFACVIQNREYEKNYQYKFA

SEQ ID NO: 159627 - protein, 422 aa, unidentified
MMGKERRWFVGVDWGSQEHVVSLYGDEGEKISQRRFAHGGTGLTDMIAWLLKASGGKPGDIHVAIETPHGPIVEAVLERGFNAYSINPKQLDRFRDRFTVSGAKDDSRDADVLADSLRTDMRAFRKLSIADPIVVELREWSRIDEELKVEHVRLTNRLKHQLWRYYPQMLELADDVGANWFLDLFEVVPTPEKAANVREKTIARILKNHRIRRFDATHVLSELRKPALSVAPGTIEAATARIRGLIERIRIINNQIKDAGRQLDRLCKNLSEPVADKDEETSPGQKTEQRDAAILDSLPGVARTVLATLLAEASDTLQRRDYHALRALCGSAPVTRRSGKSCIVVRRYACNQRLRNATYHWAQNAIQHDATSRAKYDALRAKGHGHARALRSVIDRLLNVACAMLNSGTLFNPEFASKQTTG

SEQ ID NO: 159628 - protein, 285 aa, unidentified
MQVTRIGLDIAKNVFQVHGVNAQGKVVVQKQLSRNKVLAYFAQLPACRMGIEACGSAHDWGRELQKLGQEVRLMAAQLIKPYRTKQKNDRNDAEAICEAVSRPQMRFVPIKTVAQQAVLTVHRARELLVSERTAVANQIRGLLMEYGTVIPLGIQRLRRELPAVLSAEDEGLPTLARTVVTELQTRLQELDERIAGHDRQIAQVARQTEAAKRLMQVEGVGPITATAVVATVGDAKAFSHGRQFAAWLGLVPKQCSTGGKPRLGSITKRGNVYLRTLLIHGARAV

SEQ ID NO: 159629 - protein, 319 aa, unidentified
MSYYSVSLVDEHGIELLRDTVVNNIVELTGFFLSLSGYCPDDGELRCSVEATACYHHPVVEAATLSQTACFIINPIVTKQQIKATIRGKKTDRTDALMIARLGLRGEGWRAVPEQYQTAKYCARGQLRIHQLKQALRAYATHVQDVLEDELPETVRIALNQTDVELTNLKIAFERAAAIAAPTELSGLLQTIPGVGPYVAASLLGELQGMERFNSSKALIAYAGLDPKIRQSGHTLNNTGRLTKRGSVYLRRSIFIAASQARRCDPVLKALYEHKRAEGKSYTVAVVVIARKLLTIVRAVWLRGTPYTTDLQKVLDRVI

SEQ ID NO: 159630 - protein, 426 aa, unidentified
MPYRIAGVDVHKKMLAVAVADVEEGEWRFERRQFGTSPSHLRALAAWFVEAEVNEVVMESTAQYWRPVWDALEREWQPTRRCHVEAAPMAGALHLAQAQSNPAPRGRKQDFPDAERLVKRLVAHELTLSFVPDVTQRLWRTVTRRKYQVTCNRVQLQNRLECLLEEMHIKVSSLVADLIGPSARRMLRAVASGETDPATVAALGSARLHATPDQLRDALGPCADLNRVYRRLLAMILDELDVIETHIRELDEELAGLLRVHQDAVQRLAAVPGLGVDSAQQIIAEVGSTAATFATAKRLASWVGACPGHDESAGVNHSHRSPKGNRQMRRLLNQAANAAVKTKGSLFEIVYRRLVVRLGHQQAIGAIAHRLSRLVWKILHDGVIYEERGPAVTKARAQRRAAKMIRELRSLGYRIEPGLPPASALA

SEQ ID NO: 159631 - protein, 350 aa, unidentified
MIIIGCDFHPGFQQIAFVDTETGDCGEQRLEHCEGAQKFYHDLATQGKKVRVGMEASGHARWFEQLLEGLNIELWVGDAAVIRAKRGRKPKTDRQDALHILNLLLTGDFPQIWVASWENRDLRQLLWHRHRMVQARTRVMNQLQAVALNEGLRCKKKLWREHGREQLEAFRLAPWASRRREDLLELLDRLNPTIAELTQAIEQEAEKCPQAQRLMTHPGVGALTALAFVLIIGKAERFQCGKQVGCYLGLVPLEDSSGDKRRLGHITKQGNSLLRFLLVEAAQVTSRTIPEWRSKYLHLTMRRGRKIAKVAMARKLAIRLFWRMRQGWNYQQVMKFGSHVGQPGYGPDVQ

SEQ ID NO: 159632 - protein, 400 aa, unidentified
MISVGIDVSKGKSTVCILKPYGEIVSKPFNITHTHKDLSELSSMLFRLNDEVKIVMEATGIYHLPILTYLHEKGFFVSVINPYLMKSYRNESLRKAKTDKIDSRIIANYGIDHWFKMKEFQISGVIYEELKLLGQQYRHYMKLHLLSLAELTHLLDLTMPGIKNLLASWNETNRKDKRSDFVERFWHYDVITSMSEQEFTEKYILWAKEKKYVPSQEKAKVIYTLAQESIPTLPSETSSVKMLVTEAVRVLKEVDATLGLILSRMQEIAKTLPEYSVVREMGGVGNTLAPKLIAEIGDVRRFRNGKALVAFAGIDPPPYESGQFVGCNRKISKRGSASLRKVGYETMRSLKMRSRPEDPVYRYVVKKESEGKSKKSAKIAGLNKFLRIYYARVTELYKNI

SEQ ID NO: 159633 - protein, 412 aa, unidentified
MDVIHPRCAGLDVSKKDAKVCVRINGAGRRKTSETVTTFGATTRQIMALRDHLVAQQVTCVVMEATGDYWKPFYYLLEDLPGVEVMLVNTRHVKNLPGRKTDVADATWLAQLGAHGLVRGSFVPPEPIRQLRDLTRTRTAVTRERTREIQRLEKLLEDAGIKLSSVAADLNGASSRAMLEALLAGETDPAAMAELAKKRMRVKIPQLTEALYGRFTSHHAFLTRMHLNLIDQHTAAIEQLTDRIEVVIEPFRRFRDLICTIPGIGGFTADVVVAETGADMTRFPTAQHLASWAGTTPGNNESAGKVKSRRTRPGNPYLQGALGTAAMSISHTRDTYLAAKYRRIATRRGPMRANVAVQRALLVAIWNIATTNTSYHDPGGDYFTRLNPQKARNNAVHQLEAMGYHVTLDQAS

SEQ ID NO: 159634 - protein, 377 aa, unidentified
MKKPIRFVGLDVHAETIAVAVAEPSGEVRSLGTIRNRPEAVRRMVRKLGPAAQLRICYEAGPCGYVLYWQLTELGAVCEVVAPTLVPVRAGDRVKTDRRDAEKLARSYRSGDLTAVWVPDAAHEALRDLVRAREAAKKDQLRARHRLQKFLLRRGLRPPEKIKAWTAQHLVWAKTLRLEQPALAATLLDYITEVEHVRERIERLERAIDQAIEAAPAAIRAVIEGLQALRGVARISAATIVAELGQLSRFHRPKQLMGYTGAVPSEHSSGERVRRGTITKTGNAHLRRILVEAAWSYRHRPNVGSELRRRQANASEEVKEIAWKAQHRLHYRYVRLMARGKIKQQVVTAVARELAGFVWAIGVEIEKQPVSRPARAA

SEQ ID NO: 159635 - protein, 350 aa, unidentified
MRIIGCDYHPGFQRIAFVDTETGELEERRLQHPQEAEKFYRELAAEGMKARVGMEASGHARWFERLLSELQFELWIGDAAEIRTKRVRKQKTDRQDAQLILRLMLKDDFPRIWVPDWENRDLRQLLWHRHRMVQARTRVMNQLQAVALNEGLRCKKRLWREAGREQLEAFPLAPWANRRRRDLLELLDRLSTTIAELTQTIEQEAEKCPAARRLRTHPGVGSLTALAFVLIIGRAERFQCGKQIASYLGLVPSEDSSGDRRRLGHISKQGNTLLRFLLVEAAQVTVRSLPEWRSKYFHLAMRRGRKIAKVAMARKLAIQLFWMLRKEWDYEQVNRFGPHAGQPENRRGVQ

SEQ ID NO: 159636 - protein, 338 aa, unidentified
MKTYGGIDLHSNNNYIGILDEDDRKVLQKKLPNELSEVLKVLKPYKKKIEGIVVESTFNWYWLVDGLMGNGYKVHLANPSAIKQYEGLKHSDDARDAFHLAQLLKLSILPEGYIYPKEERPVRDLLRKRSQLVRQRTMNILSFKNLASRNLGKQIPGNEIKRLKEEEVEDLFQQEHLTIAGKANIATIRFLTERIKEIEKAVLKKAKLRVGYKNLLTAPGIGTILALTIMFETGDVARFPEAGNYVSYCRCVRSSRISNGKIKGEGNSKNGNKYLSWAYVEAANLSIRNYIYVRRYYQRKMAKTNNVVAIKAVAHKIARACYYMIKNREVFNPKRAFG

SEQ ID NO: 159637 - protein, 318 aa, unidentified
MVIDRDKQNVVYEQFENNAKSIRRIGLWLKKYNIEWDRVLVCMEFTGIYNRPMLQFCTLKKIAVWMIMPIEIIRSMGIQRGKNDKIDSKKIAMYAILHHDKIKVWQPVSKNIVLLKDLLALRQRLIKVSKILLQPINELKAIKDKVAAKETEVHCKSSIEQLKKELHKTEARIKKIITEDEVLQKNYNLLLTIPGIGAYTALDLVCYTNNFEYYQEAKQLACYAGTAPFEHSSGTSVRGKTRVSKMANQSLKTNLTLGAWSVIRTKGFLRKYYERKLDEGKAKMLVVNAVRNKLLHIASAVIRNQMPFDRNYSSPLAS

SEQ ID NO: 159638 - protein, 498 aa, unidentified
MSLAPGLDLEGSRTVASSTPVRISVPSTDAPGQPALGECWIGWRTNELNNEPEIVLDDEHELVIERVAAIDVAKASGKVCMRMPHPSRPDRRMSKVRDVDATTRAVTELADDLLGEGIERVTVESTSDYWRIWFYLLEAAGLRVQLVNARDVKNVPGRPKTDKLDAVWLAKLTEKGLLRPSFVPPAPIRQLRDYTRFRVDLTRERARYWQRMEKLLEDALIKVSAVVSRMDSMSVRDMLEALIAGERDPRRLAGLARGKMRPKYNALVEALSGRFDEHHAELARMLLDQIDALGAQISTLTTRIDELLAALIDTPGPAADGSVRDRDGEVELMVTGLDAAERLAEITGIGPVSAQVIIAEIGLDMARFPTAAHLVSWAKLSPRTIQSGAIQRSGKAGKGNPYLKGALGEAAAVAARTDTFLGERYRRIVKRRGKLKALVAVARSILVIVWNLLSDPTARFHDLGPDYYTRRIDTERRARNHLAQLAALGYRVTVEPAA

SEQ ID NO: 159639 - protein, 356 aa, unidentified
MISSTKYIGMDVHKESISIAVRNAAGKIVMECVIETKASMILEFFGGLRGDLHVTFEEGTWAAWLYDLLKPHVSKLVVCDPRRNALLQDGNQNDRVDARKLSDLLYMNKLNAVYHGDHGLRTLKELGRSYLTVTRDQSRVMSRIKAIYRSWAIPCSGKQVYGLRYRAEWLGKIAEPGVHRRAELYYQQLDALRTLRQEVRRDLLVESKKHRIWKRLCAIPSIGPIRAAELLSILQTPHRFRTKRQLWTYCGLAVVTSSSADHEVDNGQLRRRKKRKETRGLNENCNHDLKDLFKGAAVVASIKPGPFAEFYAALLAKGMRPEMARLTLARKIATIVLIVWKRGVCFDAQHLKPQTA

SEQ ID NO: 159640 - protein, 428 aa, unidentified
MNGKEIIRHEKYCQLRKEIRGSQDHMIVGIDVAKDKHHAFIGTATGKTLLKRLIFENNMDGYSRLFARTEAIRVQNGLSEIVFGLEPTGNYHKPLATHLIRCDHNVVLVSGVAVKRNRELLDGRWDKHDTKCAANIADLISQGKCLFYEYPLSDINELRNLLSLRKRLKKEDHSLRMRIRNNLLAKYFPELDRFYGQCETENMAIVRWCLEPGKIAGMEFNKFFRMVTTRERGIAQKQRLRKIHSLSSESVGCPMGQASEFEAQVLVDKLKQVRQVIKKTEDLIEDVTLGLPEYSWMLTIPGFGPYVSSIVLATIGDPFRFKNRKQVLKMSGYDLNANRSGKTSLSAVPVISKKGSSALRYALYQAALVASTRNSYFINYYTNLLRGREREQGIKTKMRVKLAAKMLIIAWTLMKKKESFNPNYLNKK

SEQ ID NO: 159641 - protein, 332 aa, unidentified
MKKVQFFVGIDVSKATLDVFIHGLNLYFVVENNLQGFVCLLEKVMMGTKCKKEELFFCFENTGKYSRMLSVFLQSENILFTMESALQIKKSLGITRGKNDRVDAKRIAHYAYEKREILVPTILPGAKIDQIRSLISLREKLLKHRTAYKNGISDLHDCYEDGESELIKEVQKRLINNLNDEITKVEQKIEHIIESDDSISRNYKLILSIRGVGRILGFYMIGYTANFTSFTNARAFACFAGIAPFSYSSGTVKGNPRVHPFANKMLKALLNLAAMAAIKYPGEYMLYFNKRVSELGKNKMSTLNIIRNKIVYRVFAVVQRQTPYVDLLKFAA

SEQ ID NO: 159642 - protein, 366 aa, unidentified
MKEQNNRSEFTMGLDLGERRHRFCVLDEAGEVVEQGSLSNERVALARLTQRYRGALVVMEAGTHSPWISRYLKELGSEVIVSNPRKVRAIYQHERKSDQRDAQMLARLGRMDRALLYPVRHCSEQAQQDLLRIKLRDSLVRARVGLINSVRFSLKSLGYTVRNPSSERFHKVVWETLPEAVRQIISPSVQALAELSARIKVLEREINLLAQSKYPQTLWLQQVPGVGVVTALYFVLKIEDPQRFENVRDVGAYVGLCPRRDQSGGSDPQLRISKRGDAYLRRLLVSAAQYILGPFGPQSALRAYGLMLAGDGSARAKKRAVVAVARKLAVLLLSLWKNRSHYEAFPHWQTIEDKRSGTIAIHRVEA

SEQ ID NO: 159643 - protein, 474 aa, unidentified
MTARRLLTRGPNPLEPPEAQPQTVPVGKRTALKVQEKVAPRRAGIRATCRSCSTAARATRQGGGSVRYYLGVDWADQTHAVWVVDERGTKLTARTVPHTAEGLSEWGRELDEWRAQGIELWAAIERPEGRVVDFLLDHGVVVYPVNPKALDRARDRFRQSGAKDDPFDARVLADFLRTDHAHLHVLQPSSEAAQELKLLTEDYQRQIRQQTRLVNQLTITLKAYYPRALEVAELTTALARAFLEAYPTPEAVIALTERQWQRWARAHRLSEARTLELWNVLQRPQLPVPAHVVRAKARLMRTLVAELAAVVAAVSEYREAIEDFFARMPTAQWIRTLPIGDHGITAPTLWARLGDAPERWESFRHLQAQAGAVPVTKRSGQQRFVQFRFACDKPLRYIVDQVAFLSLQRNEWARAYYDQQRVRGHSHRQALRALGAKWLKIIFVMWKRQASYDDQYHLASMARQLLRQPQKKIA

SEQ ID NO: 159644 - protein, 347 aa, unidentified
MRPGSRFQGDETQVDCPFQNHFLMDKDKKTFGIDISKNTFDVMDCSGNYYQFDNNTKGFVKFLKLLCPVSHCVMEATGYYHYQLAYFLVDNNIAVYVENPLSIKRFIQMKLSRIKTDKSDAKMICMYGQDQELKLWVGYSKNQMECLQQIRLLDTYTKQSTALQNKVQAEQTLGNPSKVVISSLKRSLRNIEKEVILIETQLLELVKSEYQEVLTKVESIPGIGRKTAMMLVVLTDGFKRFESSSQLCSFCGLTPVLRQSGSSVKGRTRISKIGNAKLRNLLFMCSFTACKCNKACKAIYDRITEKGKSKKLALIAVCNKLLRQAFAIAKSGVEYSKEYRSPMPKFI

SEQ ID NO: 159645 - protein, 363 aa, unidentified
MKEEERRYVGIDLGKREYTMAIISVKGKMSIHKGKTSIQGRAALYKLLEKSDKIALEAGNMAFTMAREIMQQAGSEVRVLNSAKLPFIWDAPTKTDKEDAMKLARLVEERRDEKLPVVPLPSEQEMERRELISSYGREMRCRTRVINTLHSLFWKQGHTEVVRKDVATAAKARETIKVLAGQIREDAEWQIKHLELYEQRIKELKARIKETAKKDEDMKLLQNIAGVGPVVAYAFVAHVGDGSRFSKGAQVSNYLGFVPRLDYSGTIQRQGHISKRGNGYLRGLLVQAAWAMVRSGKGGSLKERFQYLTMFQGKSKKKTIVSIGRRMAELMYSVLRNKTKYEVRHWKGALNNPAALAGQARGA

SEQ ID NO: 159646 - protein, 341 aa, unidentified
MKVSTLGIDLAKNVFQLHGVDHEGHTILRKKLTRAKFVQFVIQLEPCLIGMEACSSSHYFARLFTRYGHEVKLIPPQYVKPYVKTNKTDAADAEAICEAVTRPNMRFVQIKTEEQQAVLALHTERGILIRERIACANSLRATLAEFGITIAAGQSHLTRELPAILEDGENGLSPFVRTSIYRQSKHIRELEEQVKQVEEALASWYRTQEACQRMAKIPGVGMLTATYVVAAVGNARQFSTAKQFASWLGLTPKEHFSGGKQQLGGISKRGDGYFRYLLVHGARALTARVNRNGAVEKNSWLQGLLERKHYNVAVVAMAAKTARIMWSMLSHNTEYQPRQLA

SEQ ID NO: 159647 - protein, 425 aa, unidentified
MNYKQNEKINQVKESTLVVGIDIGSTTQYARAFDWRGIELGKVFPFSNSREGFESFKAWMQHLQDKYRKSDVIVGIEPTGHYWFDLGAYLEDEGILLVMVNPYAVKQTKELDDNSQSKNDRKDPKVIAKLVTEGRYSAPYTPDGVYADLRIMVANRKRLIREMTQIKNRFARWFAIYFPEYTDVFGDYEAQSSMLLLKKVCTPEAIVELGAEKINQIWRDAKLRAVGMKRATTLCETAKRSIGLKKGSSAARYEMKLLLEDYEYKKAQLDAVMEEIEKLCRKIPESEQMLAIKGIGVITVAGFLAEVGDVRRFESPRQIQKLAGLSLRENSSGKHKGQTTISKRGRSNLRAVLFNAAIPLIAKNPEFKSLHEYYTTRANNPLKKKQSVIAISCKLIRVFYAVLANGVTYDAQKMLSDIHRQPQAA

SEQ ID NO: 159648 - protein, 418 aa, unidentified
MSIYCGMDWAEGHHDVAIVDRDGRLLAKKRIADNPTGFAELTQLLADTGDTKDDPVPIAIETPRGLMVASLRAAGRPVFAINPMAVARYRERHSVARAKSDHADAMTLANILRVDAHLHRRLPADSELAQAIAVLARAQQDAVWRRTKASNELRSLLREYYPAFLDTFAGRSATNLAKPETRAILAIAPTPAAAAKLTKTRVAAALRRAGRQRGIDQLASEIVTSMRLPQLRQPGPIERAMGQQALALLAMLNAACAGAYELEQAAAEQFRTHPDHAIITSFPGLADLTGARMLAEIGDDRRRFADARALKAYAGSAPVTRASGKSISITHRRIKNDRLAAVGWIWATTMVVLPGPAQQHYRRRRDHGDRHAPAVRHLFNKMVGQLHHCLQTRQTYDPVKAFADHPPRPPAPESAPAA

SEQ ID NO: 159649 - protein, 313 aa, unidentified
MSQNNPSILYAGLDIAKASLALHLAGQSHALSNDPKGHAQLRKLLRAQSGVQVICEATGGYERAPVRALHQANILLSVVEAGRVRHFARARGQRAKTDPIDARVLADYGAAVRPGATVAPTAQQERLEALDTRRRQLIETLVAERNRSAHYTEALCRRQSRSLLKALEKQVAQCEAAIAALIAADEKLQAKADRLDAIPGVGFITAAVMLADLPELGTLSDEAVAALAGVAPYNQDSGDKTGVRHIAGGRSVVRCALYMATLSAVKHDAILKAFYLKLRAAGKKPKVALVACMRKLVVLMNRLLKNPKFELAK

SEQ ID NO: 159650 - protein, 481 aa, unidentified
MSRQKKHPQKPAEAKTKAGKGNRGRKRKGMCLEDRPILERNAAGIDIGAREIFVAVPPDRDEHPVRVFSTFTEDLQKMAKWLVSCGITTAAMESTGVYWIPPYDVLEQHGVKPCLVNARGMKNVPGRRTDWHECQWLQFLHSVGLLRAAFRPDAEVCAVRSLMRYRGDQVLMANQHIQHMHKALTQMNVQIQHVISDITGLTGLAIVDSIIEGEHNPAVLAKLRDPHIKASEETIRKSLEGNWRAEHLFTLKQSRKSYQHYQEQINACDEEIEKMLLAFEPRVDPEQRRLPPDRKRRQRGRKKKNVNPKTGFDMRTESYKLFGVDLTQIPGLMAMVLTLFSEVGRDMSRWPTAAHFVSWLALCPDNDISGGRILWRGIRKVHNRAGDLFRLAAYSLHHDETALGDYLRRMKSKLGPAGATTATAHKIAIIFYTMIKKQVEYDPTIWAQRDAERAKRFEAKLKRQAHQLGYKLIPIEAKPAA

SEQ ID NO: 159651 - protein, 331 aa, unidentified
MKLYGAIDLHSSNNVTVVIDEQDRVVYQKRLPNDLAMIVEQLSVYRGSLQGIVVESTYNWYWLVDGLMEQGYKVHLANTAAIQQYEGLKYTDDHSDARWLAHLLRLEVLPQGYIYPKGERPVRDLLRKRSQLVRQRTANLLSIQNLVTRNTGESLSANRVKGLDVQQVDELLPDGDLALAVKANLSVMCSADEQTEILERTVTERVKLRPQFSFLKTVPGIGQILALTIMLETGDIRRFPSVGNFASYCRCVGSQKVSNSKKKGKGNTKNGNKYLAWAFVEAANFAIRFNSKIKSFYQRKKAKTKVVVAIKAVEHKLCRACYYIMRGSSRL

SEQ ID NO: 159652 - protein, 320 aa, unidentified
MMAQNDSVVVGIDVAKDKVDACIRALALRQTFTSTVQGHRKLVRWLRKHRVNKAVMEASGGYERVWARVLREADIEVRIVDPKRVRNFALSAGRLAKNDAIDAEMIAWFAEIFSEAPNQRHDAAREELQALVKARLSLIDSRMRLVSQSEHVAPGLVQKAHGRILKSLASEIARLEAAISIKIKSTPDFAERAEIIESVPGFAKTSSANLVAGMPELGQVSDEIAAALIGVAPYDDDSGKRRGERHIKGGRRWVRNAVYMPCVGAATQNNPVLQAYYQRLIAKGKEPKVAIIACMRKLIVILNTMIARRQKWDPSRYSLT

SEQ ID NO: 159653 - protein, 422 aa, unidentified
MEVIHSRCGGLDVHKETVVACVRLALEGKITREVRTFETTTSGLLLLLAWLTEMGCTHVAMEATGVYWKPIWNILSDGDFELVLANAAHIKNVPGRKTDVSDAAWIADLLAHGLIRSSFIPDQEIQELRELLRTRKQLGRQQSRHIQRLQKTLEGANIKLDSVITDIVGKSGRAMIRALIAGETDPIKLAALADGRIKASPQELREALRGRVRDHHRFLLHLHLQHIEFADAAILDIDRNVAALITRMDQEVEAGRTFQTLIALLITIPGIDVLAARIILSEIGPDMNRFPTAGHLLSWAGLCPRNDESAGKRRSTRLRKGDRWLKTLLIQCAWAAKRKKGSYFNAQYHRLTGRRGPKKAVCAVAASLLTTIYHMLKDGTQFQDLGADHFDRRSKEVRAKRLINQLAKLGFDAKLTPLAEAA

SEQ ID NO: 159654 - protein, 431 aa, unidentified
MDVKRPPIAGVIIGMDPHKRSATIEVLDQRERLLGVGRFSTDTAGYRQMLGAGREFKARTWAVEGANGIGKHLAQRLIADGEHVVDVPAKLSARARVFSTGQGRKTDATDAHSIALVALRAPALRVVKVDGEHVALRLLVDRRDELGVRRTESVNRIHKLLLELLPGGAKTALTAPQAKALVATVRPRDVAGKTRRRIVVALIEELAGTDKLIKAANKELMDLILASGSRLMDLHGIGPSTAARLIGDVGDIARFPSKGHFASWNGTAPIDASSGDNNHQRLSRSGNRRINRVLHTMAIVQLRHDTEGRRYFDRKKAQGKSSMEALRALKRRLSDVVYRQMIADDELRQAGLQPPTGPVDDVLELVGELEVIALEDVVEEVVVTGPGGQVGASTGSSAAGSYPQTGPSEKSLPGPATASSTRTPGPRKSLG

SEQ ID NO: 159655 - protein, 418 aa, unidentified
MWCTGIDWSDQALDFHLRSPDGEVLAEGQVRPTLEGLAELFHALEAHAPPSQIGIAAETAHGAWVQPLLDRGYRLYPVNPKSVDRFRQALSVAGNKSDRIDAKVLAMFLATMHRDLRPLRPDDPDIIALRMACEDRVRLVEERTAKLNELRAVLKTYDPAFLGLFADLDTHIALQFLREFPTQNRMLSLSPRRLRGWLKRHAYPCPQRIEEMLAVLTRPALPVAEHLQTAKASLIRYLAESLLALQDEIARREQDITDQFRRMPEADWVASLPGAGRTLGPALLACLGRDPQRFASPADARAFMGTAPVTRASGTSRSVRFRRGCWKFARRTLQLFADGSRRQCAWAQACYDEHRARGHGHHAALRALAHKWLKIILALKRQAIPYCEATFVNSQRRFLLQTAAASSLKAPKTGATLT

SEQ ID NO: 159656 - protein, 402 aa, unidentified
MDTPLLVAVDVGSRFHQVAVGDGTGHVLDEFRIDHEPSGFTAFFERVERHRRSPDQRVQVAMEGYNGWARPLDSQTLARGWALYNVNNLKLARYKEIFPAPAKTDAIDSRRMLELFALDQQPGVARNALQRVTLIPKAHRHLKYLTRRRRVLVQERAGRLTRLNCDLQALCPGLLSITGSIDNRWFLRFLTCRDRLTALPRVRASTLLRIRGVGRAYLAKIQAWQPTAQFAPDIAFGDMDVVTDARSILTLSERITELDTELERLACESQPARLLRSIPGFGPTGVAELVGEIGTLDRFTKESGLAVYVGMAPLANSSGVRDRGKRPRSVNTRCQNALMTCVARHMAHVPESRAYYDRKRAQGKTHNQAVRTLGRHLIRMIWTMLRQGREYHRRPTRETPKP

SEQ ID NO: 159657 - protein, 467 aa, unidentified
MGKSKLGLRGRLFHNLLGEEFNPHQLLIMAIDTAKFEPKAAVFSYFIELVHNSFFFSPDRRGVEKLCKIAETVLQATKKERLIFGIETTGNYHKLIVKLLKEYNQTVLVINPNSTNEERKSLLDYSKNDDLDLYAIASAIAGGKVIYNQDRSDLEAQLVFLTRTRRTQIKERTRILLALRTTLELYWPQLQGMTNVINGKPSIDVIFKDLSRPTFISFLRLLPTPVDVLAQGSDGLREISRKNKLRLGSNRISLINQAASLAEPVNTALLQMYAAYVKNLLDKLDQLNSSITSFEEQMEEILVRTNGVLLLSIGQVGVVTAAEFMAEVGLRIDQYSSSSAIIKLAGTNPVPKESVDRKGQRKTSHQGNPYLREVVYTIGKNLSEGRNTNPYFFKFRSQLACKYVNQKRIAVGNKFIRVSFAMLNKGEVFNPETWTGPCLTDDPLRKLSVANRETASQTLAQIVASKA

SEQ ID NO: 159658 - protein, 359 aa, unidentified
MQTQRKELNFEGQSVFVGLDVHLKSWTVSIFTEKLHHKTFSQPPKAEILSEYLKFNFPNASYFSTYEAGFCGFWAHFKLEELGIQNIVVNPVDVPTTQKDQKRKSDPVDSNKLGRSLRSNELKGIYIPRPETLEDRTIIRVRFTIVKDMVRQKQRIKSLLYLYGIEYPDEFQNANTHWSKRFINWLKTVQLQYTTGTDALNLLIKEAEQQRLILLEATNKLRALSKTERYAKNIELITSVPGIGLITGMMLLAEIEDIKRFDNSDKLAGLIGIVPDCHSSGLTEKKGEMTSRGQYFMRKGIIECSWVAASKDPALSLAYYNYCKRMEPNKAITRIARKLINRIFSVLKNEKKYEIGTVK

SEQ ID NO: 159659 - protein, 347 aa, unidentified
MKILALDLGKFKSVACVYETTSARHRFERTTTTAKALHDLLVEHEPERVVIEICSIAGWVSDLVRMLGIELQVTSTMHEAWRWRQVKRKNDRADALKLAQLSALNQLRLVHVPERETRQWRALINYRHRLIRQRTSSKNHIRDVLNREGLWLARGSAAWTSKGLEQLLELARPLAEVGVGELWRGELAVELLNLQTLEQQLRQVETKLDELGGAAAGVRLLQTIPGVGPRLAEALVALIDKPQRFQRGKEVGAYLGLTPKQIQSGESNRLGRITHAGSRVVRALLVEVSWVGLRYNSWMRGVYERTRRNSKTRKKIAIVAVARRLLIRCWAMLRDGTAWQPEYRAIR

SEQ ID NO: 159660 - protein, 409 aa, unidentified
MEVLYTHCAGLDVHKDTVVACARCHVDGQVEREVRTFSTTTSNLLALSEWLASLGVTHVAMEATGVYWKPVWNVLDDGEFTLTLANAKHVKNVPGRKTDVNDATWLADLLAHGLIRASFVPDRATLETRTLLRTRKQMTRERTRHVQRLQKTLEEANIKLDSVITDVVGKSGRAMIEAMIAGVSDPAKLASLANRRIKVSPQTLTEALRGRVTRHHRFLLRLHLDQIDVLERALAEIDREIEAGLDPFRPFIGLLTSIPGIAELSARVVLAEIGTDMSRFPTAANLVSWAGLCPKNDESAGKRRSTRMRKGAPWLKTTLIQCAWAASSAKDSYLRAQYHRLKARRGGKKAVGAVAASMLTAIWHMLRDGTFYHDLGADHFKRRSTSQTKHLVAKLEGLGYKVQLSPLAA

SEQ ID NO: 159661 - protein, 341 aa, unidentified
MCISDWTSRSQAPRSAQGRILKETTAASGPEDLVTALKAMRGDVVAVGLEAGLLSQWLYQFLTDAGFATVLMETRQVKGALKAMPIKTDRRDAEGIARLLQKGWYRPVHCKPISAQEMRAFLSARKIVQQAAISLELSIRGVLRNFGLKMGRVVKGRFEARVQELAEGNSMLEAAANPILTARRVLRQELAGLEKALRDHAREDPICRKLMTMPGVGAVVALTVKAAIDDPERFRLSKDIGPWVGLISRREQSGERDIVGQISRAGAVGLRTALYQAATVMLHRGRNNWLTAWALNVATRRGKKRATAALARRSGVVPHAMWKDGTGFRFTREDAAAVAAV

SEQ ID NO: 159662 - protein, 393 aa, unidentified
MYLNIGIDVAKDVHEACILNDKGEQIGKYIRIKNFKSSIEKFRQRVESTASELDLIPRIGMEATGIYWYTIYCELSKHYEIHLFNPSQIRGFAAVNVRGAKTDKIDAKTIAGMLRFGKAPKICYGDKMRLELKEYCRFRFKLISLMANLKKRLIRNIHLIFSGYDQLFSSIFIKTSIAILNEAPRPSDMLEMGEEKLYELMRKTSRNHYSPEKARELLEMAKDSISPDFIEEALLFEVESLLKLIEYIEGQIKKVEAKILAAWETVKDKHYLQTIPGISDLMAAMIWAELGDVENFSHPDQIVAFAGYDPKVKESGNKKVILGPNKRGSRLLRWVLGRAVVQAKMFNPVIKQYFKKKMSEGKHYNTALCATAKKLIRIIWSVEKNKRAFQIPT

SEQ ID NO: 159663 - protein, 429 aa, unidentified
MKIIYPRVCGIDVHKQFIVAVICISESVEPIYLKKRFSTFHNDLIRFRDWLIQNDCQNVCMESTGKYYIPVYNILESHISNIVVANPKWVRAVKGEKDDDKDAKWIADLFKLGIVKSSFIPQKDFRILRELTRYKYKLVNMRSSEKNRYQNALTSGNCKLDMVFTDVFGKSASNIIDLILSDNPYTDEDILSKVHKNCKASPDMILNSINGTDLTPVQKSRIELVNDHIKQLSSNIQRLDKLIDLMIEPYEDYISFLCQIPGVSRNSAITILSEIGVDMNQFTSTRRLTSWAGLTPSSNQSAGKKKSVRISRAGVYLKPCLVEVAHAAVKDKNHPYYANKFNKISKRRGKKRAYIAIARKILVAAYHMLLTGEIWNPADLSEVETPVEQRIKYVKNNLKSDIKQLLDIGLTVEELTLMIQQNANIIATQ

SEQ ID NO: 159664 - protein, 345 aa, unidentified
MPAARVRTFAGIDVSALELSVAVRRGEGDDKPAMAKFRNNASGHKALLAYLLRGDGRVRVCMEASGNHGLDLALTLQAHRQVEISVVNPRRARRFAESLGERSKTDPVDARVLCEYAARMRWVAWQPPSPAALRLRALTRAIEDLVTMNTQERNREHASAASQALPRLVVSEMQRHQKYLQNRMARLRQECLRLIARDPELDRRFRLMLTIPGVGETSALQILGELAVLPDMLDARQWVAFSGLDPRFFTSGKTVEKRPRISRGGSRHLRRSLYMPALVALRHDPYLRGFYQHLVARGKARLQAVVAVMRKLLHAVFAMFRSDQPYDGSKLCAIDSSANSLLVSA

SEQ ID NO: 159665 - protein, 327 aa, unidentified
MHIAIGIDVSKDKLDLGWLRDPQTNKKKTKVFRNKSTELVELSRWILKNTAAEPQDVLITVEPTGVYHEALVYHLHAQGFNVFMPNPARIKAYMRAEGLVHKTDKSDAIVLARYGIQTSNLQLWTPEAPEIRELKAMMRRLDGLEKDRMREMNRLEASTISACSERVTQSLQDMIAVLDAEIKALQKDIDDHIDRHPDLKKNRELLTSIVGIGPVVSRELVYLLAAKPFQSAKQVANYAGVIPQVQQSGKWEGRTRLSKEGPGRLRAKLYMAAVVAKKHNPVVRDQYERLLATGKNKMQALGAAMRKLVHLSFGVVKNQQEFQPQPL

SEQ ID NO: 159666 - protein, 411 aa, unidentified
MDKIYDKCCGIDVHKKLIVACFRCGKKQEVREFGATTRELLELADWLKDGGCEMVAMESTASYWKPLYNILESSDLNAIVVNARHMKAVPGRKTDVKDAEWIADLLQHGLLQPSYIPDKDQRELRELVRYRKSLVGERTRELNRLQKMLEGANIKLSGTVSDINGKSARSILEYLLTGKSMDGSKYDEMYEQKIIAHNLKATKEQIVDDLNGVMSPLQRRMMKELLVHLDELNIHIKNLDDEIDNFMKPEEKQASQAIRDVTGIGNTSAQAIISVIGSDMSRFPTDRHISSWAGLCPGDNESAKKRKSGKTRKGNALLRTTLITCAHAAVKNKKSYFYAQYMRISAHRGPKRAYVAVAHSMLISIYHILKDGVVFKDLGADYYNQFNKERKINAYLKKLKALGWEAPIVAA

SEQ ID NO: 159667 - protein, 346 aa, unidentified
MNQIIRIGMDTSKHFFQLHGVDAAERPVLRRKLRRNEVLAFFAKLPPTVIGMEACGAGHYWARELRKLGHEVKLMAPQHVKAYVKRNKNDGRDAEGLCEAMSRPTMQFVPVKTEEQQAALMLAGVRQQLITRRTQLSNAIRGYAAEFGLTAAKGLDKIEPLLANIAADEALPELARELFAMHGREYAHLQAELKKIEARLMAWHRANADSRRLAQIPGVGPIGATALVMKAPDPRLFPSGRHFAAWIGLTPKDHSTAGKTRIGKITRAGDEMLRSVLVAGATAVIQQARNGRGRPSPWLLALLARKSPKLAAVALANKIARIAWKLLTTGESYDGARMPGASALAA

SEQ ID NO: 159668 - protein, 346 aa, unidentified
MRVLIGIDPHKATNAVAAIDERGELLEYAVFSTNRAGLRSLARWGKRFQKRRWAVEGAGGLGRFVALCLVAAGELVMDVPAKLSSRARLLATGNARKNDRVDAIHVALAALRRGERLAEVGEEEQAEVLRMLSERREDLIKERTRTLNRLHGLLRDLLPGGAPKNLSAEKAARVLRGVRPRSGPARTRRRLAADLLRDIRRLERQLYELECRIREAVKEASTGLTLMFGVGPILAAEIKGRVGNVARFPTKAHFASYTGTAPIEASSGEVVRHRLSRAGNRKLNHVVHMIAICQARHDTKGRTYYRRKLAEGKSEKEALRCLKRRISDAVYKQLRADLPAANLTAA

SEQ ID NO: 159669 - protein, 357 aa, unidentified
MSHKSAPPTVSTIGIDLGKNSFHLVGLDQRGAIVWQLKCSRAQLERRLANIPCCLIGMEACSGAHYIARQLAALGHDVRLIPAQYVKPFLKGHKNDYRDAEAIAEAVQRPTMHFVAIKTPEQMDLLALHRVRSRLVGQRTGVINQIRGFLIERGITVRQGVVPLRKALPDILSSNNDALSPRMVNLIAELAQDWRRLDERIAAVSDEIESLAEQDEACQRVMTVPGVGPIISSAVVAAIGNGAGFTQGRDFGAWLGLVPKQESTGDRTILGKISKRGNKYLRTLFVQAAHVVLTRRPNAAMRGLWPWIEQLSRRLHRNMLAIALANKLARHRLGGSRARSFLSAEDRRRRRVIKARF

SEQ ID NO: 159670 - protein, 349 aa, unidentified
MIGVDYHPSFQQIAFLDPETGECGERRLNHSDGEAEKFYRELRQKGISARVGLEATGYSRWFERLLVELGIEVWIGNAAEIKAKRVKKQKTDRKDAQLLLKLMLEDRFPRIWVPSPENRDVRQLLWHRHRLVQMRTRIMNQLQALAMNEGKRWKHRLWSAEGRAVLEKFPLAPWASRRRQDLLELLDRLNPTISELTAAVEQEARKCPEVLRLMTHPGVGPLTALAFVLIIGTPGRFHRGKQIGSYLGLIPKEDSSGGRQRLGHISKQGNALLRFLLVEAAQAAARYNQDWRQKYWHLAMRRHKSIAKVAMGRRLAIRLYWMWRNGCGYSQSLEFGSHAGQLVTGHGMN

SEQ ID NO: 159671 - protein, 311 aa, unidentified
MTEKQYIGIDISKTKLDVCAPWWATTKTFKNSPKGLQKLFRAIKSKPISCHLVCEATGGYEGLLLLTAWKHDVTISRVNPRKVRHLAIAMGFLAKTDPIDAFVITESGKMLKPKPTPEPTKTAQQLGVIVRRREFLMRQLTREKNAKEKASDTFILQDINASIASLSKRLAHFDEAIAKLIDADEVLREKRRRMEQVTGIGPGTSRLLLAALPELGSISDKEVSALVGLAPMNCDSGTRRGKRIIQGGRANVRRGLYMPALCAARHNPTLKAFYDRLCSAEKAHHVALTAVMRKLICLLNRILADPDFNPA

SEQ ID NO: 159672 - protein, 346 aa, unidentified
MEQYVGLDVSLKLTAICIVDRTGKIEREGVVASDPEAIAAFVKSHAPHVARIGLETGATSTWLWTELNKMGLPVICIDARHAKAALKMQINKSDRNDAVGIARIMQCGWYKEVRVKDLDSHAIKALLVSRALLVKIKRDIENQIRGLLKNLGLVIGQAKMNVFAVRAAELAEARPELAAAVEPLLKAREAVGRQIADLDRKVMRLARNDAQVRRFMTAPGVGPITALCFLATVDDPTRFKRSRSVGAYVGLTTRPYASGEIDWTGRISKCGDKMLRSYLYEAANVLLTRVVKWSTLKAWGVRLAKRSGLRKAKVAVARKLAVILHRMWIEGTEFKWSSKEVANQPA

SEQ ID NO: 159673 - protein, 370 aa, unidentified
MKKFIMYVGLDVHKKSIEVAFADPGRDGEVRSYGKIDGNLTALDKVIRKLEAKGAELHFAYEAGPCGYEIYRHLNSNGYDCIVVAPSMIPRQSGNRIKTDRRDAQMLARLHRAGELTSIYVPALEDEAMRDLTRAREDAKSVERKAKQRILAFLLRHGYRYSGKTPWSRAHFRWIAILKMPHPAQQIVLQESLDALSECTERVNRLTEQIQRLLPQWRMFPVAQALQTLRGVSLIVASTTIAELGDLTRFASPVELMSYLGLVPSEHSSGEQTKRGSITKTGNGHVRRVLVEAAWAYRLPARVSTALHLRQEGMPLNVCAISWKAQLRLCNRYKRLLERGKARQLIITAIARELCGFMWAIANEVETPTA

SEQ ID NO: 159674 - protein, 343 aa, unidentified
MYYIGLDVHKKAISYCVKDAAGRVCQEGKIGSTRHDLDAWIKTLPQPRMIAMEATIFTGWIYDHLLRHAEKVKVAHPLMLRAIAAAKRKNDTIDARKIADCLRCDLLPECHMASTEIRDRRRTLRYRNLVLRQAVQMKNRVSGLLMETGVSYNKLRLHRMGYFAELMSTNEEVSESIRPLLRLCREHIDRSIRMNTVLLTSLERDPRLADRLRRLRTVPGVGPITALTWALEVGDTSRFNNIKQAISYCGLCSAEKSSADKVMRGPISKQRNKHIQQVLVEAARLAPRYSDELALLYERERQRGNGNRATLAVARKLVTWMLAVEKRNKDFVPAGDFKRTAAA

SEQ ID NO: 159675 - protein, 379 aa, unidentified
MITKYSVGTDMSKNDFKACFTEFNQHQEIKVKASRTFANTVNGFEHFKKWHTKYQREKLPIVFVMEATGSYHEKLAWFLHKNKQTVSVVLPNRAKAYMASLGMKSKNDKVDAKGLATMGAVQNLIPWQPISKYTYNLRQLTRHLEDLQKIRTSLINQNEQSDYAMYELKTVANSIKKVLKTIDGQIADCKDKIKGIIEKDSELSRKISYLTSIKGVSTMTASILIAETNGFALINNAKQLVSYAGYDVKENQSGARTGKTRITKKGNAHIRRAMHLPAFSTVRHKVKPFENLYDRVYDKTGIKMKGYVAVQSKLLRMMYTLWKNETTFDPNFSTSGIHEPKTLFSVAPLGAHKTAEQLSPAALDGLPCNQSPEALFSVT

SEQ ID NO: 159676 - protein, 314 aa, unidentified
MKKQVQSNVFIGVDVSKDSLDVAVGPCGESMRFANNEDGIALLADFINPLTPALVLFEATGGWEMNAVRHLAAKRLPLVVINPRQVRDFAKATGQLAKTDAIDARILARFGEAVRPEVRPLKPLELQKLEALNNRRRQIVELITIERNRLVTAPEWIRPDIEELIAILRKRLDALNGDLNQLIRKSPLWREKDKILQSVPGVGPVMAMTLLADLPELGALNRKQIAALVGVAPLNCDSGMYQGKRRIWGGRAAIRSVLYMCALTAIRCNPVIREFYQRLRQAGKLPKVAITACMRKILVILNAMMRSRTCWQTT

SEQ ID NO: 159677 - protein, 412 aa, unidentified
MRLFVGIDVSSADLKVCAMNTDGNTLDIFTVQNNYDGATYLRDKLVFLADRENPKEIHIGLESTSVYSWHPAMFLHEDGSLQERGTKVFTINPKLISKFREAYPDLDKTDYVDAWIIADRLRFGRLPMTVVLQEQYIALQRLTRMRFHLVHNLTREKQYFLQHLFFKCSAFTSEVESNVFGHAITELLLEQYSLDEIGSMELADLADYLKEKGKNRFPDPEKVAKCIQKAARSSYRLSKCVEDTIDILLATSIESIRAIKQQIKQIDEAIVRLLDGIPNTLETIPGIGRVYCAGILAEIGDVHRFKDQAAVAKYAGLTWQKHQSGKFEAEDTKRIKSGNRFLRYYLVEAANSVKRYEPEFRDYYQKKFAEVPKHQHKRALVLTARKLVRVVDALLRNDQIYTPRRRVNPSSR

SEQ ID NO: 159678 - protein, 356 aa, unidentified
MSHDVKYIGMDVHKEAIVIAVLNGSGKLVMESILETKASSILQFLHGLRGELHVTWEEGTWAAWLYDLLQPQVQEVVVCNPRRNALLKEGSKSDKVDAHKLADLLRTGMLRPVYHGENGLRTLRELARSYQTISKDLTRVMNRLKALYRGWGIPCAGTQVYAPRYREEWLNKIPQAGVRRRAELLYQQLDSLQALRRNLRPEFLAESRKHKAAKLLRQIPCIGPIRAARLIALMQTPHRFRSKRQLWTYSGLGIETHDSAQYRYVGGQVQRSKKPQQIRGLNQNHNHEMKEIFKSTATRASCGAGPFHDFYAALLAKGMKPEMARLTLARKIAAITLTLWKRGERFDVEQLKTQAA

SEQ ID NO: 159679 - protein, 346 aa, unidentified
MEYIAMDVHKKYTWARVENERGDKLYECKLSHSHGTIENFVKRWTAGSGVAVETVGNWYWVVDEIEAGGGKPQLVNARLAKLMMGMVNKSDKLDAKGMNRLQRTGTLPTVWIPPSSVRDARELPRTRMVLSKQRTQLKNRVHATLGKYGFVVEGASDAFGKRGREILTELMAKLPPHTEQALGRVLDQLDHVCENLQWIEEKMIEVFVPCPQTLWLKSLPGVGDILAVVIWTEIGTIERFSRAEQLASYCGLVARENSSGGKIRFGPVRRDVNVYLKWAFVEAANSSVLNRKRCGYDHISRLYERIKARRGHGKAKVAVARHLSEASFWMLKKGEPYREPMSSTQR

SEQ ID NO: 159680 - protein, 397 aa, unidentified
MTENLTIYLGLDVGKTNHHATALTSNGKKIWDKPLPQSEPKIRELLTKLSTQGTVLLVVDQPKTIGALPIAIAQNIGIQVAYLPGLTMRRVADLHPGEAKTDAKDAFIIAETARTMPHTLHGITVADETTSELSMLCGFDDDLAAQATAVSNRLRGFLTQIHPHLERVLGPRLSHQAVLGLLKKYPAPAELHFAGRTKVRNLLKKKAPRLAPKLTEEIFQALDEQTVIVAGTASASQIISSLAAQLELILAQRSEAEQQILDLVEAHPLSAVIRSMPGVGVRTSARILTEVVGKDFKDASHLASYAGIAPVDRKSGTSIKGSHASRRGNKALKRVLFLSAFASLKADQASRAYYDRKCAEGKRHNQAVMALARKRLNVLFAMLRDGCFYESRVSVGA

SEQ ID NO: 159681 - protein, 342 aa, unidentified
MRFYCGIDLHARDCFLCVIDDQDRVHLKSKVSNHLPSILDRLERFSPRPSVVVESTLNWYWLVDGLGEAGFEVKLAHTMGLFMITGAKVKTDRRDAFTLARLLRLGAIPEAYIYPKDKRPIRDLLRRRNRLVFLRAAVYGDLRRTLLQHGLFGYSRDEIKGLSEAEILHDLEHPAARCGGLLELERISLYSRQIKDLEEMILATVAEEPLFDLLQTIPGVGKILALTIYYEVGDIDRFEGPKQFCSYARVVPGIAQSGHTFRRGRGSKQGNGYLKWAFSQAAGLAVRFHPRVRKFRQKHLARRRSKARKLISMSIVAHKLAQAAYYVLKDQVPFDTELMFRP

SEQ ID NO: 159682 - protein, 344 aa, unidentified
MDTHRDAHVAALLSLVGEVIGTDKFPATAAGYRDLLGWARASGTVRRAGVEGTGSFGAALSRYLLAQGVDVFDVNRFDRADRRRRGKSDPLDAENAARAVLSGRARAQAKTGDGPVEIARMYKLAKDSAVKARTQAINQLKAVLIRADPQLREELAGLGNAELFHTCARLVDDSLNHEADEGAVLHATHITLCLLARRISQLSEEIQDLEGRLTRLVERHAPQLLAVVGIGPDTAVTLLITIGDNPERLGSEVSFAALCGVSPVERSSGSRQYRRLNRGGDRQANAALHRIVQTRLRVDPRTQEYYERRSKEGKTRREIVRSLKRYAAREVFHLVRPVQSSPPL

SEQ ID NO: 159683 - protein, 320 aa, unidentified
MMSQNDLVVVGIDVAKDKVDACIRALALRQTFPNTAQGHRKLVGWLRKHKVNKAVMEASGGYERVWAKVLREAGIEVRIVDPKRVRSFALSAGRLAKNDAIDAEMIAWFAATFGEAPSQAHDAAHEELQTLVKARLGLIDFRMRLVSQSEHAAPGLVQKAHAHILKSLASEIAKLEAAIAAKIKSTPDFAERAEIIESVPGFAETSSANLVAGIPELGQVSDEIAAALIGVAPYDDDSGKRRGERHIKGGRRWVRNAIYMPCVGAATQNNPVLKAYYQRLIAKGKKPKVALVACMRKLIVILNTMIARRQKWDPSRYVLS

SEQ ID NO: 159684 - protein, 355 aa, unidentified
MNGTKYLGMDVHTATISVAVLSYEGKLIMESVIEAKRSTIVDFIQGLRGELFLTFEEGTWSAWLYDLLTPYVTKVVVCDPRRNALLKEGSASDRIDARRLAELLRLNFLRSVYHGENGLRTLKELVRAYLTIGKDLVRVMNRVKAIYRSWGISCAGNSVYTPRYREEWLRKITQPSVRRRAELLYEQLDALVRLRKQARQELLAESKRHPAWKLLRSIPALGPIRAAVFMAIIQTPHRFRTKRMLWKYSGFGVVTQTSADHEYVKGQLQRSKKPAFVRGLDRAHNHHLKDLFKSAAIQASTTKGPFREFYEALVAKGMRPEMARLTLARKIATISWMAWKKGVAFDAKYLKPQTA

SEQ ID NO: 159685 - protein, 399 aa, unidentified
MFVGWDWGNTAHDVTVIDSAGDRVHRMAIPHTEDGIVRAVAKLADHGDPGELPVAIETTRGLVVDRLLAAGHPVIPVHPNAFHAVRPRWGAARAKNDPGDSFKLADYARTDIHRLPVLVPTLPETLELQALTRQRDNQLALRIAAVNQLAALLDQHWPGGKTIFAQLHSPIALDFLHRYPTPQAAATLTRARIEAFCRRRQYSGRRTGAELLDRLRHAPIAASRLGEPTVAQMIHTQVSAVRALQAGIDTLDTVIAKKATAHPYAGLLAGLPRIGTLNLAQIIGEVGPILERATSFDQLAAETGLAPVTRSSGKTHSVAFRHTTNRRARQALHTWLDNSRRSSDWAQQRYAAARARGQRHPHALRTIGRAWLRIIWACWRTKTAYDPTRHQAAKQPTAA

SEQ ID NO: 159686 - protein, 351 aa, unidentified
MLIIGCDFHTRFQQIAMVDTTTGEMIERRLEHENGEAQKFYATLPGPARVGMEATINAQWFEKTLQASHHELWVGDAAEIRAAMVRKQKTDSRDALHILDLLLTNRFPRIWIPPAAERDVRQMLRHRHKLVCYRTSVMNQLHGLAMGQGLCRKKKLWTRAGRQELEGLPLDPWASRRREELLQLLNQLDPWIAQLDEAVIQEAKNRPEAVCLMKQPGVGPVTALAFVLTIGPVERFRRSKQVVSYLGLNPSEESSAGRQRLGAISKQGNSMMRYLLTEAAQTASRFDPELRRDYQRLKFRRGHSGVAKVAIARKLAVRLYWKLREAAQPVPPARMQGSPASPMVEETPSRS

SEQ ID NO: 159687 - protein, 361 aa, unidentified
MKKPAQHLIAEVPRRQAKVEITIGIDLGDVWSHYCTLNQDGEVVDRGRFRTIPKAIEKWFTEVPPARVAMEAGTHSIWISEQLQELGHEVIVANVRELRAISHSDRKSDQVDAEKLARYARLDPNILRPIAHRTVEQQQALTLIRARALLVRLRTAAVNAVRGLTKSCGYRMPASATTCFAQRSLAVMPPGLAQALGPVLQQIADMTLKIKQYDRQIQQLGQTEYPETQALLKVHGVGHLTALTFVLTLGSKERFGRSRDVGCYLGLRPRRSQSGDHDPQLGITHAGNAYLRSLLIECSNHILRPHGRDSALRQWGLHLAARGGKQAKSKAVVAVARKLAVLLHHLWSTQEPYMPFYEQAA

SEQ ID NO: 159688 - protein, 368 aa, unidentified
MNNESPVVAGMDVHKKMLAVVVAKVDGNRIEYLSERFGTTRQDLDQLAHWLHQQQVSEVAMESTAQYWMPVWLALEEQFTLYLAQPRSTAAPKGRKSDWADAQRIVRRLLAQDLTLSYVPGREQREWRTMTRTRVEMSAQQVRLRNQMEGLLEQAQIKLSSVLSDLLGVSGRRILREMVKGETNPACLASLADKAVKASEKTLQEALGGKLTATHRLLLKMYLEQWDLLASQIDQLNTRMAQALSQHQAAVHRLVEIPGVSLTAAQQIIAEVGPEARAFAAPQKLASWVGVCPGQHQSAGTEYSHRSPKGNRMMRRVLVQCAWASVKVKGASFTRNSASWCPGWVRARLSGRSLIGCCGSFGSSSMTE

SEQ ID NO: 159689 - protein, 363 aa, unidentified
MFTERTSVGLDVHARSVVAAAIDSVTGELVQTRLAPSYEHIRSWVTDLPGPVAVTYEAGPTGFGLYRALTAAGIRCEVVAPSKLQRPVGDRVKTDAKDALHLARLLRLDEITSVSVPSADQEAARDLVRAREDCRGDLMRARHRLSKLLLRHGIVYYGGAAWTGKHDLWLRAEALPQLSGAATRLAFDADYDQVLTVRARRDRLDATIEEMAAGSEFTPVVRRLGCLRGVSTLTGFALAVEIGDWHRFTGNTIGSFVGLVPTEYSSGASRVQGSITKTGNTHVRRLLVESAWHHRPRYHVGAVMRGRWDQAPAAARARGDEGNQRLHRRWVGFLERRKRPTVANVAIARELAGWCWSLAVLTD

SEQ ID NO: 159690 - protein, 462 aa, unidentified
MKPFYMGIDVSKGYADFVIINPKKKPVTQGFQLDDTFDGHKALYNIVARFLSNHPDSRLFAGMESTGGYENNWYHSLVAFQGSLNILTARLNPLGVKHNSQAGLKKNTTDKISAQNVAEYLVAHPEKVNYQQQDQLAGLRKQWGFIQMLTKQRTQFINQFKGLLYSSNPELLRYCQTETPAWILKVAVTYPSAARLKRAKAKTITKIPYVTLKKAQQIVSDAQRSVASATDTTTEQLIVATAQQIIHLNKTIDAQTRRMIEACAMPEVELLKTFAGLSNKSAIGLMIEIQTVERFANAKKLASFFGVHPVYKKSGDGVGGIKMSKQGRKAPRHILYMSTLAAIKCNPLIKQTYEKHQENGKHNMAAMGVCMHKILRIIYGMLKHQKAFEPQIDIANQHRSVNGRNAAPRKNETRRFQAYDIKAPVSRRQTIKRLERDRSHSVLDTKSGITVPIPVGDSIAKM

SEQ ID NO: 159691 - protein, 322 aa, unidentified
MNKYKEIFGVDISKDVFDVHGSKSGHDQFKNNASGFKSFLKRLPKESLVVMEATGYYHYRLAQFLYKQNIIVSVVNPLSVKRFIQMKLAKIKTDKSDAKAICEYGQINEVPLYTALTNVQSECLQLFRLMDSCIKKRTATKNKIHGEEVLGIPSKYVYRSLKRIKKYLNKEILGIEKKLLSLVKQEQQVQLTLLTSIPGIGLKTALFMIVITDGFTKFENSKQRCSYVGITPTIRESGSSVRGRSRISKVGNRKLRNLLFLCSFNACKHNKACRDIYERIVNKGKSKKLALIAVSNKLIKQSFAIAKSGLPYDEKYVSVLSK

SEQ ID NO: 159692 - protein, 348 aa, unidentified
MLIIGCDYHPGFQQIACVDTETGEADQRRLSHREEAEQFYRTLKTRRVRIGMEASGHARWFERLLIELQFELWIGDAAEIRTKRVRKQKTDRQDAQLLLKLLMEDRFPRIWVPDAENRDLRQLLWHRHRLVQMRTRIMNQLHVVALNEGVRRKKALWRPAGRSELESLVLAPWALRRRQDLLDLFDQLTPKIHDLTRALEEEVEKRPIARRLMTHPGVGVLTALAFELVIGTPERFGCGKQIASYAGLVPTEESSGERRRLGHISKQGNALLRFLLVEAAQVTVRSQPQWRSKFFHLALRRGRKIAKVAMARKLAVHLYWMWRQGLDYGQFEKLGSHAGEPGNRHGAQ

SEQ ID NO: 159693 - protein, 353 aa, unidentified
MTSEKYVGLDVHKATIVAAVQDASGKCLITSVIETKAETIRAFIKGLAGTVRVTLEEGTHASWLYELIKPLVAEVVVCNPRQNALLQSGNKSDKIDANKLADLLRAGLLKPVYHEAHGTQSLKQLAQCYETLVSDNIRVMNRIKALYRGRGIDCSGTGVYCESQQKDWLAKLEEPGARSRAQLLYSQLESVKKLRRQARNELIKDSRRQAAYKLLTPVPGLGPVRVALILATVVTPFRFRTKRQLWTYVGLAVVTKDSAEYEFVGGRLHKRNKPRSTRGLNRNYNRRLKKVFKSAALDATRTEPFASYYRALIEKGTSPEIARVNIARKLAAIVLSLWKRGEEYDRQRMKKSA

SEQ ID NO: 159694 - protein, 405 aa, unidentified
MQVYIGIDWSKDQQDVAYMNAAGSVIAYQTIAANPVGYAALDARRQQLGAQLEECWIGIETVHNLVLDDLVRRGYPHLYLVPPSLVKDSRGRFGESKANSDRKDAVLLADLLRTDRARLHPWQPDSDLTQQLTVQVSLESFLTNSIIRVTNRLRNGLWRYYPNAANVFSSLDTQIALEFICTYPIPEQAQALTFEAFRAFAQQHHYPNPKKLPACYARLQQPQPEPAPAILLAYRPEAVYLAQLALQLVQQRVKVQKTIQDLFVQHPDAAIFASLPGAGKKLAPALLTKFGDDRQRFPTPASLQALAGTCPYTKASGKRHRVLFRHACDKEFRTIAQQWAKASVDLSPWAIAYFQTALPRCRSTSQAYRCLANRWLAIAWRLWQDHKPYNETYHLHQHALRAKPI

SEQ ID NO: 159695 - protein, 343 aa, unidentified
MSLSMIGLDTAKTVFQIHGIDEAGKVEIRRKLQRNDLITFFERQAPCTVVMEACGAAHHWARILTGLGHSVKLIAPEAVKPFVKKGKKNDATDAAAICEAASRPDVKFVPAKSVEQQGILALHTARSLLVKQQTMLANAIRGLATEFGVTVPKGIRKLDELMTLVDADEVIPKRAKQAITGLHDYCNDLSEGIETFEAEIVAHARGDETARRLATIPGIGPITASLIAATVADISLFKTARQFAAWLGLVPRQNSTGGKTRLGRITKTGNREIRKLLVLGATSMVYRADGWNSAVGAWLRSVLQRRPVRLVTVALASKMARIAWAVMTRKEVYRPKGGIAAAA

SEQ ID NO: 159696 - protein, 393 aa, unidentified
MSFIDRPNSLAATAVDNGIVAVSLELSRSKWLVTSLLPGSERMSKHMVAAGDAAALLALLGRRRRQAEEQVGGPVRVIAIEEAGLDGFWLHRLLEANGIESHVVDAASVAVPRRRRRGKSDGIDGETLLRTLLAWRRGEPRVCSMVRPPSPGQEDRRRVVRERAVLIRERIAITNRIRGLLMSQGITDYQPLRRDRRQRLETLVTGDGRALPPQIKRELLRALDRLDLLVEQLKAVEAERDAVQEVVTEGAASEAVAPDDPARLLLRLRAIGPQTAAVLTLEAFHRHFDNRRQVAAFAGLAPSPWQSGAVVHDQGISKAGQPQLRKAMVELAWLWRRHQPGSALSRWYAQRARGQDARRRRALIVALARKLLVALWRYVSAGVVPEGAAFKAA

SEQ ID NO: 159697 - protein, 388 aa, unidentified
MDVLYQSCAGIDVHQATVVVCILHGPLTSTRPKREMAQFDTTTKGLKACHDFLTQFHVEAVGMESTGVYWRPVWHELCDDFELILAQPAHMKAIPGQKTDKKDAHWIAQLTRIGLLPRSFVPDETIQELRELTRQRKHYVESRNRETNRIHKILQSGGIKLTTYIEDIMGASGRNLLQLLIDETPLTPRMIHQSVYTSLKRKVPQLLEALDGYFSAHHRFMLGQSLEIYDFYQKQIDCLEERINGYLNLYERPVEILDSIPGMDLITASVIIAEIGVDMSQFPTAGHLASWAGLCPGNNESAGKKRSTKIRHGNSYLKRCLCQAVFAAKRQKGSPLAERYYQIQSRRGPQKATIALAHQLLKIAYILLKENLTYQELVLQKRLLETSQ

SEQ ID NO: 159698 - protein, 320 aa, unidentified
MDAHGTIVVRKRLYRAQVMAFIAQLPPTLIGMEACGGAHDWARCFRAHGHEVRLMAPQFVTPDRKANKNDRRDAEAIAEAMTRPTMRFVPVTSVAQQDLQALHRVRERLMKARTALINETRGLRHAYGIIVPQGAAPFRQHVLEQLTTEDAKLTPHSLGLFRQLLEELDALEARVATYEAQLAQVAQTHPVCQRLMTIPGLGALTATALVAAVSETAQCKNGRQCAAWLGLGPRQHSTGGTARLLGISQHGESSLRTLLVHGARSCLRGVGQKRDRRSQWGQSLMDRRGWNKAAVALANKQARGAWVLMGTEQVSRVAEA

SEQ ID NO: 159699 - protein, 349 aa, unidentified
MEVLKQVLGIDVAQKELVVTLGRMVEDLSIDLYAYKVFRNNEKGFSALLEWVKKLTNDKIKVRFVMEATGVYHQKFAYFLDEKEHEVCVVLPNKISNYMRTLDNKTVTDKTCSEAIAQFGLERKLDLWHRPRSIYRNLQQLTRERDQIVFERAMVKNHLHAEQSEAEPNESSILRISTRIKFLSGQEKEIKKEIENWVNNDPVLKKEIENICTIPGVGELTAVIILAETNGFELIRSKRQLTSYAGLDVKEKQSGTSVKGKPRISKSGNRHLRKAMHLPALTVVKWDDNFRDFYARIVSKHGIKMKALIAVQRKLLEMVYTIFKNKYPYDKEYETKRMGQKNSVHAQTA

SEQ ID NO: 159700 - protein, 336 aa, unidentified
MVQLKTPLAAGKICVGIDVAKAKFDVMIDNSKKPFSVANRPGGRSKLIKRIGGLPLASIVVESSGGYERPLLFDLLDAKLPVAHVNPRIVRDYAKGFNQLAKNDPVDARVLACYARERQPRLMDQDDKLRHMLADLNRCRRQLIDQITALKNQVQIALHPTTIKVLSSSIEALQEQLEIVDKDVQAEIDKLPAMKRRQELLLEVVGIGPITSRTLVIELPELGQIDRRKLAALVGVAPFDDESGTISKPRAIQGGRAHVRSALYMATVTGITSNAVLKAHYQHLIQAGKAPKVALVACMRKLLIHLNSILANDAKQQLTTESNPQNPEAGNEGKRR

SEQ ID NO: 159701 - protein, 353 aa, unidentified
MQPEASQEVKKEVRFVGIDIGKAKCRAAIMDPGGLILEEFTFTNNHEGIEDLTSKLTLTDRVVMESTGSVWTNLYNHLDEKHIPITLANPLKTKAIASAKIKSDKVDARILAHLLRSNLVAESYVPPKHLREIRTLIRHRVAIVKIRTMVKNEVHALIDTHGLVCPYSDIFGKGGLEWLRDLTLPSLDRLILNNHLTHLESLNQQTERVDEEIHSKACEDEDVRILLSLTDINVYSALLVRSEIGTISRFPHYKKLVSWAGLAPSLHQSGSVELHGSITKQGSRMLRWVMVEAARVAVNHDDRMRAFHERVKHRRGDQKAIIAVANDAQNNLVHAHTQRTIRIQKRETVPEKT

SEQ ID NO: 159702 - protein, 424 aa, unidentified
MNCNQNFKISQVTEGTLVLGIDVGSNTHYARAFDWRGLELSKVFKFKNSFEGFQSFVLWVNDLCCKYNKSKVIAGLEPTGHYWFSLGELLKENNITIAIVNPYHVKQSKELDDNLQTKNDSKDPKVIAKLVIDGRYSFPYIPEGIYGELRVADKLKNDITQQIISIKNKIHRWLSIYFPEYEKIYSSIDSKSGFLLLKETPLPKDIVELGSEGIVERWKQTKLRAVGLDKAKKLEEAAKKSIGCKNITSSARFEIKLLIEDYEYKQNQLNSITEELNKLCEKIPMIKEIAEIKGIGIATAISFVAEVGDIRRFKSAKQVQKYAGLALKENSSGKHKGLTRISKRGRKKLRTILFRATIPLIGFNKEFSSIYNYYIERKDNPLKKKQALTAICCKMIRIFFTILSKGIKYDETKMLHDIKRPVAA

SEQ ID NO: 159703 - protein, 342 aa, unidentified
MEYYVGLDVSLKQTSICVVDQTGSVVREGVVDSDPEAISVYVRSKAPDAVRIGLETGPTSTWLWTELKRLGLPVICIDARHAKAVLKMQINKSDRNDAIGIARIMQTGWFKEVHVKDIDSHSVRALLASRALLVKIKRDLENHVRGLLKNLGLVIGRAKFNVFAVRAEELIEGRPELIATIRPLLEARNAVGQQVSELDRKVMRLARHDAQVRRFMTVPGVGPITALAFKATIDDPARFARSRSVGAYVGLTSRRHASGEVDWTGRISKCGDAMLRSYLFEAAGVLLTRVPKWSAVKAWGVKLAKRNGLRKAKVAVARKLAVILHRMWIDGTEFNWSKEIAA

SEQ ID NO: 159704 - protein, 347 aa, unidentified
MRFYTNQHQFYCGIDLHARSMYVCVLKQDGEVLLHRNMKAAPEPFLKAIAPYREGLVVAVECIFTWYWLADLCAQEGIPFVLGHALYMKAIHGGKVKNDKIDSQKIAALLRGGMLPKAYVYPAQMRATRDLLRRRTHLMRKRSELLSHVQNTNSQYNLPEIGKKIAYKANRDGVAERFEDASVQKTIEVDLALITYYDELLKDLELFILKTAKHHDAHTLYLLQTVPGIGKVLSLVLLYEIHRIERFPSVQEFASYCRLVKGSKESGGKRLGTSGKKIGNAHLKWAFSEAATLFLRNNPQGQKLLSRLEKTHDKGKALSILAHKLGRAVYFMLKRKVAFDMNRFLQT

SEQ ID NO: 159705 - protein, 415 aa, unidentified
MESSSSTEFAAFVGIDWADRKHDVCVQAAGSGRRERSVLPHSPESISQWAQDLAERFAGRPIAVCLELAKGPLVYALQRYPFLVLFPVNPSTLAKYRETFCVSGAKDDPSDAEFALELMLTHPERLTQLHPQSPAMRMLQQLVEQRRALVDDVRRTTNRITDALKQYFPQVLEWFRDKDTVMFCDFLTRWPTLKQAQRARQARLRAFFQEHNLRYPHIIEQRIQAILTASALTSDPAVIAPNRLLVEALVQQLRTLLHAIERFDHEIGELAPTLPDYAVFNSFPGAGPVFAPRLLAALGEDRQRYPTPAEVQKYVGIAPVTERSGNKCWVHWRLQCPKFLRQTFVEWAALSIPHCYWAKAFYEQQRARGSSHQAALRALAFKWIRILHRCWLDRTPYDETKYLNALKRRGSPLLN

SEQ ID NO: 159706 - protein, 371 aa, unidentified
MMQPGRVVIGMDPHKRSVTIEVMAPDETILGGGRFATDPDGFTALHEYVRRWPDRVWAIEGCNGIGHHVALRLLAGGQDVVDIPPKLSARARVFATGQGRKTDATDAHSIALVGTRMAGLRPVIDDAQLAVLRTLADRRRSLGEEHTRMVSQLHHLLLELIPGGAKQYLSAAQAKQILASVRPRDAAGKVRRRVAAELVGDLERTYRRKKAADKELRELVLATGTTLLDLQGIGPSGAARLLVEVGDITRFPDRGHFASWTGTAPIDASSGDHVRHRLSRAGNRQINRALHIMATVQLRNPGVGRDYYDRKKAAGKTSMEAGACTPTATGSATSRSRWTSARHERGAATLGHLVPGGLAHRAAVEHAGAAG

SEQ ID NO: 159707 - protein, 344 aa, unidentified
MAIVGGLDIHRRQITYDWIDTTTGETRRGQLSPATRLELRSWLAQFDGPQVDFALEATTGWRFVAEELARAGIAAHLAEPADTRALRGPKRRAKTDRTDAHHLRELLRAGTLPESWMPPAHVADARTRVRLRRALVGERTGWYQRIHAILFHHGLPERSQLLTTEGRAWLARAELPAVARQAVDLALRMIDHLEVELDRLDGELARIARAQPGCQALMGRYGIGWLTAVTIWAEFGDVRRFANSRQAVRFTGLDITIAESDGKRARGHLARQGSPVLRWALHEAAMCAARPSSPDHPYYLQVKQRLGGKRAALSVARKLAREAYHTLRALGDQALVPAELPTAA

SEQ ID NO: 159708 - protein, 356 aa, unidentified
MSRDIKYIGMDVHKEATVIAVLNGSGKLVMESIVETKASSILQFIHGLRGELHVTWEEGTWAAWLYDLLQPQVTRALVCDPRRNALLKEGNKSDKIDARKLADLLRTGMLRPVYHGEHGLRTLRELGRSYQTLSQDLNRVMNRIKALYRGWSIPCAGTQVYAPRYREEWLNKIEHAGVRRRAELLYQQLDGLQGLRRTLRPELLAESRKHKAAKLLRQIPCIGPIRAARLIALMQTPHRFRSKRQLWTYSGLGIETRDSAQYRYVQGQLQRSKKPQQIRGLNQNHNHEMKEIFKGAATRASCGVGPFHDFYVALLAKGMKPEMARLTLARKIAAIALTLWKKEERFDAGQLKPQAA

SEQ ID NO: 159709 - protein, 304 aa, unidentified
MDHFAGLDVSVKETSVCIVDDTGKIVREVKVASEPTALLAVLKNPAYQFKRIGLESGPLSQWLYSALAEAELPVICVETRHMQAVLKAQINKTDRNDARGIAQMMRVGLYRPVHVKTLRSQKLRMLLTDRKLLQSKAIAIENDLRGTLRNFGLKVLVGTVKFEARIKELVENLPDLALLVEPLLVVRRVLREQFVILHRRLLAIVRDDEVCRRLITTPGVGPVVALTYRATVDVPARFRKSKAVGAVFGLTCSKYQSGEIDWSGRISRCGDEMMRVYEAAQSICVRRNGPGSRLVRCRSPGAAG

SEQ ID NO: 159710 - protein, 343 aa, unidentified
MYFIGVDHHKQVSVMTVLDEDGAELKRGRVPNLRKYVKLFLEGFQPFTAVLETGYSSYVMADLLRELGGEVKIANAHQVKAIAHARIKTDKRDSRTLAHLLRAGLIPEIYQREAWNRRAQRVMRIRAYWVSKQTEVKNKIRALLAQQREEVRLEVEKLQDGLFSPKGLEFLDQLSLETREKEVLDDLVEGYQEIRGHIRKSDGLVRALYGEIEEAARIDTVPGFATMLSVLMAVEIADVRRFSRPAALHSYAGVIPSTYSSGERCYHGHITKQGNAWLRWAALEAVTPAIKKDFSLRVLYSRLARRKGANVAKVAVARRLLTIIYRVLTEKRDYIPTMNQSAA

SEQ ID NO: 159711 - protein, 371 aa, unidentified
MAHDSEAFIGIDTSKLKNAVAIAEAGRNGEVRYLGEFATTEAATRKLVAKLSAKYRKLTFCYEAGPTGYGLCRLIGSLGHACDVVAPSLIPRKASERIKTNRRDAESLAKLQRAGELTAVWVPDAAHEAMRDLSRAREAAVDDLKRKRQQISSLLLRHGLHYPAKKTWGKKHRTWLSQVRLGHVGTRLAFEELMAAEREAQARVDRLTAAIREAVPQWWLAPQVTALQAMRGIELVTAVVVLAEIGDLSRFASPRELMAYLGLVPSEASTGDSVKRGSITKAGNKRARRVLVEAAWGYRHPPRVGRALEARVAAAPEVARQIAWKAQTRLCSRYRTLSRKGKRSTVVTTAIAREMTGFIWDICRQVVPGGV

SEQ ID NO: 159712 - protein, 520 aa, unidentified
MPATSRKSVRKRRGYLIQKPAGQLTPRVQAVGPERFGVLCWDCAKARSKFMLANFYGTVLIPPQTVPHTRGHLQAMLDQVRQAIARHQLGDHIVAIERTGEYHRPVQRACRHAGFDTRLVHPFTSKQFRQPADPGNKTDDTDLAAIFRAAVNGFGLLEPVLPDDYQQLQLLARHRRDLVAKMSTLCCQIREHLHALLPGYAECFADLWENRLALPLARVCGPAETLRQDGGQGLHRLLAQHQLAARRDSVAKLLAWADTAPPSHPQHELRRLLLCGLDDDRTAKIRQIAELERRCAAYVARMPYLLLLVIPGINVVSVADLAGELGPITLYPQANNITGRAGLAPSRYQSDHVDRADGPLRRRANRRLRTALLQVADNLIACNHHFQAKANHWVQLGKDPRWMRVKVAKIFSRLLYAMVAGRQLFPHPCRQEHHYIIHKLLEFHRAHDTPLSQTLADLDAATQQLPRAAYATEAQPLHARLKEVQRRKGPQPLADILPIVLARLGGLPVQSRTSEVSGPS

SEQ ID NO: 159713 - protein, 412 aa, unidentified
MQDILTCAMGLDVHRDIIVACLVKGAVDAEPEAETRTFSTLIPEMQKLRDWVIDSECRNIAMESTGIYWQPIYEMLESCFDGEISILVVNARHMKNVPGRKTDMKDAQWIATLLRAGLLKGSFIPDKAFRELRHLTRYRKSVVHDITAQKNRIDKFLQSSGFRFTAFLSDTFGASGRNIIRHLIEHGSIDREALDKCLKTKTRNRIDEILVALNGSLSEHQRRFLNMVFRHLEDLEAHKHTVEDEITEEVLKHTDALNLLCSIPGIDVTAAAAIIAEIGTDMSSFPDSQHICSWAGLSPGNNESAGKRKSVHINKGNPYLKSMLCEVAWIMASHRKLYLSGWYWKVKQRKGAKRATIALARKILSIIYTMLKTGTPYNEECFEQRRLRCERKRANRLVNELQKLGYVVVAPD

SEQ ID NO: 159714 - protein, 459 aa, unidentified
MYRKESKSKVDRTMPMVHPNAAAIDVGATMHMAAVGPDHALEPVRSFGTFTADLDQLVKWFVECGVETVVMESTSVYWIPIFELLDARGFAVFLVNARDAKHVPGRKTDVSDAQWLQRLHSFGLLRASFRPKGQIAELRAYVRQRERLLEYAASHIQHMQKALTEMNLQLHHVVADITGATGLRIIRAILAGERDPETLACLRHYSCQSSVETIAKALTGSYRAEHLFALDQALALYDAYHEKASACDARIEAVLKELTIHRDHDHGSAPPVSRRRNRTDQANALAFDVRASLFALLGKDVTAIDGLGPYLSLKLIAECGDDLTSWPSAKHFTSWLGLAPSNKVSGGKMLSSRTRRSGGRAAALLRLAAVTVGRTDTALGAFYRRLSSRIGKAKAVTATARKIAVLFYNAVRHGMDYVDPGASSYETRYRTRVINNLHRRAKAFGFVLHPLEPGAGAVS

SEQ ID NO: 159715 - protein, 375 aa, unidentified
MIATTRPEMSVNEPTLYVAFELGKKDWKLAMTSGFGVDPWLRTVASGDLRAVERAVQQGRIRFGLSAQAAVMSCYEAGRDGFWIHRALTALGIRTRVVDSASIEVNRRARRAKTDRLDALKLVQMLVRVCDGERKVWSEVHVPTVADEAARQVSRERAALTKEQTRLINQMRGGLATWGCVLPKHRRSEWWTAVRDWAGAPLPVEVQTRLARAEARWAVVDRQIAELEQQQQAAVTAAAPASTLRQLVQLKGVATTSASVLLDEGLVWRAFRNRRQIGGLLGFAPTPYDSGESTREQGISRAGNKRLQTISIQLAWSWVRWQPHSALTLWYHAHFGTGKRARRIGIVAVARRLVITLWRYVTTGVVPAGAIVKGA

SEQ ID NO: 159716 - protein, 344 aa, unidentified
MNYYAGLDVSLELTSVCLVNQQGEVVREAKVASEPEALVRFLNEQQLSIVRVALEAGPLSQWLHSGLDAAGFDAVLLETRHVKAALSAMTVKTDRRDARGIAQLLRLGWFRPVHVKSASAQEVRSVLTARKLIQAKLLDIESGIRGVLRGFGLKVGPISRGRFEARVSELVLGHSMLEQVAGSMLTARSALQTEFARLHRMILSLVRADRVCRQLMSVPGVGAIVAITFKSGIDDPGRFRRSRDVGPHFGLTPRKYQSGEKDVTGSISKVGDRMVRTALYEAASVMLSRTVRMSALKAWGMAVAKRRGGKKARVALARKLGVILHRMWVDGTHFRWTREAAAMA

SEQ ID NO: 159717 - protein, 355 aa, unidentified
MKSVQSNFGNLQLYVGIDIHKKDWSVSIYTDAAHHRTFCQPPSPAALKAYLDHNFPGAKVICAYEASKLGYWIYRNLIQFGYQCLVVNAADIPTSNKESSSKTDPIDSRKIGKALRAGLLTSIHVPDQITEGDRQLFRYRRKLLADLTRVKNRIKDKFLFTGTSIPQEFDNSNWSKAFLTWIKNADLPDCNTRLTVDRLLEQYHFLYKHFLKVSIEVRRLQRESRYKKSAKLLRSIPGIGPLTTVELLCEIQDISRFESCKKFNGFIGFRPGSHSSGERDWKGRLTYRRHNALRSSLIECAWSTLHKDPVMLQRYNELKQRLTGKRAIVIIARKLVSRIYAVLKKQTPYELGLVK

SEQ ID NO: 159718 - protein, 342 aa, unidentified
MLHAGMDMHKRFSVVTVTDSSGEEVIKGKRLENDEGEIRSFFESFDDEMRVVLEAGGNWYWMCDLLDGMGIDNILCHPLKTKAIASARIKTDKIDSRILSHLGRMDFVPEAYKPDMATRHLRELLRYRASMVKVRTATKNKVHALLARLNVPSPYSDLFGKKGIAYLEGLELLPVYREALDGYLRLLSAVGEELSYAEVLVGKAREHSQEAQLLETIPGVGPILSLTILSEVGDVARFHSAKHLASCAGLVPAVSQSGSSTRYGHITRAGSSWLRWALVEAAIHASTRPGPLRDFYLRLKRRKGNKIARVAVARKLATYVYHMLREGKEFSEVVAYNRGVLR

SEQ ID NO: 159719 - protein, 407 aa, unidentified
MLEVKVEQCAGIDVGKKFIDVCVLTGPANRKPAEEVRRFGTNVGDLEVLRAWLKEKACTEVVMESTGSYWKPVFNILEGQLKVILANPEQVKALRGKKTDRKDCRWLAGLLRHGLVQPSFIPPRDIRELRDLTRRRRTLLQNGAQERNRVQKILEDANVKIGNVLSDVFGMSGQAMLEALMENKLGPEEVADLARRSLRRKIPQIVEALKGHRMSDHHRMLIRQALKHMKFIERMIEELDKQIQQQLAPYQKQVELACTVPGIRSEAAASILAEIGMDMSENGPFPSCHHLASWAGVCPGNNSSAGKRKSGKIRKGNRWLKATLTQTAWAGSNKKNSAFQFRYQRLKGRRGVKRATIAVAHSQLIALYWVLRNGAAYEGQRQEVERQQRESLIRHHLHRLAQLGYTA

SEQ ID NO: 159720 - protein, 416 aa, unidentified
MRIAIGLDVSSKTTNVSVVVHDGEVTREAEACKVSNDLVGFGTIFKLIHKYSISDEFPDVVFEATGVYSRRLQHFLQTHAVAYTQLNPLKAKQELAAIGSLHRRKTDQMDALGLAQSQLILQRAKTCVQDPVYVQLMDEERFYQEINSDMVTAKNRLHRPLQLTFPELEDVMSSTDGEFYWRLVQTFPHPDLLLKSHEPFDQLVETIRHLTKRTLSESHGQRIAEKLSDSAFTAAPAVSAAPTEINQVTYLAGELIRLSAQKQHIINEMLDLAKELPELDILKSLPGVADTSAVTLLAEFGDLHRFQTTNQINSYVGIDLRHYESGNYEAADHISKRGNPYARKILFKMIGTMDSVAKLPNHPNHIVDYYEKKKQSSQSKGTKKIAIAAVSRLIRTIYHLVMHNQTYDYQKASLGR

SEQ ID NO: 159721 - protein, 359 aa, unidentified
MDNNEDGTRHVVGGVDTHKDLHVAAVVDGQDRVLGTACFATTRQGYRQMLVWMRSFGDLRRIGIESTGSYGAGLLRFMQQAGIDVLEVTAPDKHDRRRRGKNDDLDAQNAAHAALAGRRTVTPRSRDGMVESLRVLTVCRKTAVAARRVAIQIIQTTIVSAPDGLRDTLRSMTRMQLVRTLAAWRPDLTAYREVEAAYRISLKSLARRYLELHDEIADLDAMISAIVDDLAPELIARNSIGYTGAAQLLLTAGDNPERLRSEASFAALCGVSPVPASSGKTIRHRLNRGGDRAANSALHIIAIGRIRTDSATKAYVARRTSAGHSKLDAIRALKRYIAREVFHIITRRHREINQTRIAA

SEQ ID NO: 159722 - protein, 351 aa, unidentified
MLIIGLDYHPSIQQIASLDLETGDTGERQLNHKEGEVEQFYRGLKQQRISVRVGMEATGNTSWFERLMMELDFELWIGDPVQIRRQRVRKQKTDSRDAQLLLKLMVEDRFPRVWVPSPENRDLRQLLWHRHRLVQMRTRIMNQLQAVALNEGVRRKKALWSKEGRAQLESFLLLPWATRRRQELLELLDRLKPIIADLNIAVQEEAERRPEVRRLMTHPGVGPTTALAFVLILGTPKRFQCGKQIGSYVGLIPSEASSGGCRRLGHITKQGNTLLRFLLVEAAQATVRCEPEWRRRFTHLALRRDRRIAKVAMARKLAVRMYWMWRKGWDYPQFLKFGSHVGQLEMGNGVK

SEQ ID NO: 159723 - protein, 435 aa, unidentified
MRRSETALKGEVYMSYCPVAGIDVSKRFSDMCILSPDNKIFAQEKIYHDETSINRANALLQKAERLFFSKPVIVMESTSHYHLILFQFFSEHGYDVIVVNPLQSNSMKDFSIRKRKTDRVDAFKLAMMYRTKTLRPSQIPQTATRALRQLCRHRAELLNDVSSYKNRLTALLDQTFPGYDKVFSDVGGVTSCAVLVRFPTPTILLVEEESELVEVIAATSKSGYSFAKKKAGLLISAAQKAQTLGIHSCADETLIVCTIQMLRTLSESVLQIETAIDNLLAQIKEMRNNVSLLQSIPGVGSHSAALLLGEIGDISLFKKPKQLAAYFGLDPTERQSGSFRGTKNKLSKRGSPYARAALHMGVVNSICKRGKDSAANPVLLSYYEKKCKNKPAKVAQAASMHKLVFIIFAVLRDQKPFELKTPEQHAVEQGFVKAA

SEQ ID NO: 159724 - protein, 397 aa, unidentified
MFYLGIDIAKHKHYASIIDQTGKPITKPFPFQNHKEGGQTLLNQIYQYIESPTEILIGMEATGHYWLAVYSFLLDHGFSVIVLNPIQTNAWRKGTEIRKRKTDAIDATMIADIIRFGRFVETPLVDEKMFALKQMSRFRNALVSNMSDLKRKALVVLDQTFPEYQSIFSDVFGKTSSQILLEYASPSDYEQISIDDLTQIIEQTSRNRLGKKTANKLMELASNSFGVTFCKNAFSFQLKMLMEQIRFIEDQIKECEDEMSQLLIDLDTPIMTVPGVGPILGATILSEIGDIHRFDKPSKLVAYAGIDASVSQSGQFESSGMSISKRGSSHLRRALFQAAVTAHKHDPVLKAFYEKKRKQGKHYYVCIGAVARKLCYIIYAILKNNKPYEIPQYPKEV

SEQ ID NO: 159725 - protein, 437 aa, unidentified
MKPAGKLVNQTEERSIALKPIKTKKRAFVNRNFLIVTADMGKDKHFGYWRCPNGSDVKTFAIPNNGAGFWEFWERISRAQKLHNLDGIIFGYESTGPYAEPLAHFMRARGAELVQVNPFHTKRFKEVTDNSPNKTDQKDPTVIADIIEMGRFLTVVIPEGPAAELRRLSQARERSTRRHTALANQIQCLMASIFPEFLQAMRGIKSASAQYLLKHYPTPQEIAAYGLPDLTKTLRKVSRGKLGADRAQALYDGAKSSVGVAEGQASIVMEIHELLSLMEASEQFTESLELEMTTHLAQIPYSNTLLPLKGIGEVTAAGLIGEVGDFRKFHTMGEVMKLAGLDLFEVSSGRHKGQRHISKRGRPLMRKLLYFAALNTVKKGGAMHQWYQSACERGMPKLKALVAVSRKILGILFALVRDHSEYVPNYSETRCQLKEAA

SEQ ID NO: 159726 - protein, 343 aa, unidentified
MKRNTIGLDLAKNIFHVVGFDHHGKQLFRKQLRRKQVASWFVQQPPSVVGIEACSSSHYWARQLIAQGHEVRLIAPQHVKAFLRGQKNDYNDASAIAEAVTRPQMRFVPIKSATQLDLQALQRLRTRLIRERTGLSNQLRGLLAEHGIVLPRSLAVLRRCIPELLEDADNELSALFRRLLHGGWQHLLEIEVQIKVLDQELARAVAQDEDCQHLMTIPGFGPVVASGFSVAVGDGRCYRRGRDVSAVLGLVPRQHTTGGKPKLLGISKRGDNLLRAHLIQGARSVLMHAKGKDDPLCRWALKVCAERGFNKATVAVANKLARIGWAVLRNQTTYQPEFRLRTT

SEQ ID NO: 159727 - protein, 475 aa, unidentified
MKEPKEAKAKTKSEVSKSIREHEPNAAGIDLAANEIWVAVPADRSSTAVRRFEGFTRDLMAIVEWLIQCGVRSVAMEATGVYWIPLFQLLEDKGLKVCLVNARHVKNVPGRKSDVRDCQWLQYLHSVGLLLGSFRPAQAICATRSIYRFRQNLLTMAGQYVQHAQAALDQMNIKLHHVIDDITGVTGQAIIEAILSGQRDPVQLAKLRDKRIQASAASIVKALEGDWRKEHLFVLQKAWAQYQQVQKQIQDCDQELLAYTHELEAATTVIKPTKVVRLRPELLGEPVSNQPVQKTRKARKKTSKNQPQGPWKEELGRFFGVDLTAIPGISVLSAITLMTELGNDLSAFKTEHHFASWLCLCPDNETSAGKVLRRRTRRSQNRVRQALRMAASSLHRDKSYLGDKFRRLRARLGPAKAITAMAHQLARIIWTLITRQVPFDLSVFAYHQKLNEQRRLKRLAASARQMGYQLTPLAA

SEQ ID NO: 159728 - protein, 372 aa, unidentified
MTITSMPDPAAADTAAATPDEVVLGVDTHRDRHTAAVVSMSGALLACEEFAATAAGYRAMLAWARRHGQLRRAGVECTGSYGAALSRMLQAEDIAVFDVNQPDKRARRTRGKTDKVDAEAAARAVLSGRATVTAKTGDGQVEAMRLLKTVRDSAVNARTKAINQLKAILVSADPALRESLSGLGPATLIRRCAQLPDPAEDASTAHLAAVCALRMLAERIQRLKAETYDLEKRIEALIADTAPKLLERRGVGPDSAAALLVAAGDNPERIRGEASYAALCGTSPVEASSGNTQRRRLNRGGDRQANAALHRVVISRLRWDPRTRNYLQRRLAEGKTRREAIRCLKRYVARELFAVIRAAQPPTDAADAAAAA

SEQ ID NO: 159729 - protein, 344 aa, unidentified
MKKVLIGIDFSKEKFDVAIIVKSTSMQAHAEFDNKVSGYRKMIKWIKSVVEEKTCSSWLFCGETTGGYSRMMSDWLYAQGYDVWIENALTIKRTFPLKRIKNDAVDAFMIAEYALRFEDKAQLYEPLSPALSGLRELFLYRHHLVRHRCSFQVRRIEKRFTQEKSPIKNTISQSARHIITEINKEIAKCDEKIKEYIESDDQLSSIFAIVTSMPGVGTINAVSLMVYTNNFTKFAYNPRKIACYYGIAPFGRDSGTSVHTDPRVGFIANKMLKSLLTQAALAAVRTCPQIAKYYQRLIERGKKPMVALNNVKNKMIAIITAMVRNGCMYQSDNICVATPSVNVK

SEQ ID NO: 159730 - protein, 357 aa, unidentified
MATVSMPQETAGVIVGVDTHADVHVAAALDPLGRALGRLEISTTPTGYGRLLRWARGFSPTAIFGVEGTGSYGAGLARYLTAAGCTVIEINRPDRRDRRAQGKSDPLDAEAAARAVLGGKAQCIPKADHAQVGMIRSLRVARRSAVKMRTQTVNQMIALVVTAPDALRDRLRGLPAADLVAVCAALRPGAVTTPTAAVKAALRGLAIRHQCLTGELEFLDAELSGLTVEAAPALRSIQGIGPDVAGALLVTAGDNPQRMRSEAAFASLCGVSPVPASSGKTNRHRLNHGGDRVANNALWRIVMVRLTCDPRTKNYMARRTTEGLSRREIIRCLKRYVAREVYSALVALAPTHLPTAA

SEQ ID NO: 159731 - protein, 348 aa, unidentified
MAHFVGLDVSVKETSVCVVNDAGKVVLEQKVPTEPSDIIALLTSLGATYGRIGIEAGPLSQWLVNALTAAELPVICVETRHMKALLTAQQINKTDRNDARGIAQMMRVGLFKPVHVKTLVAQEQRMLLTSRKLLQRKLLDVESDLRGTLRNFGLKVGVVSGGRYEARIRELVVGFPRLAAIAEPLLSVRRVMRQQLAVLHKMLLDTVRDDPVCRRLMTAPGVGAVVALTYRATVDQPQRFVHSRAVGAHVGLTPKRYQSGETDYDGGVSKCGDALLRTMLYEAAQVLLTHGSKWSWLKAWGMRVAQRRGIRRAIVAVARRLAVVLHRMWVDGSEFRWSKDSAAAPTVA

SEQ ID NO: 159732 - protein, 350 aa, unidentified
MPKFTVGLDIAKSVFQVHAIDRSGQVVIKRKLRRNSVLKFFAGLAPSVVGIEACHSSHYWGRELIKRGHTVRLLPTQYVKPFVVGGKNDANDAAAICMAVSRRDIHTVPVKSAEQQSLQSLHRMREKAIQERTAKSNQIRSMFSEEGHIFPAGLPSLHKGIITLMDDGEAELTPILKRLGQMYLEQMTVLKAWLDELDAMIDDNFKNNEICQRLATVPGIGPVIATAMVGLVGDPAQFKNGRRFAAWLGLTPRQHSSGGKTRLSGITKRGDGYMRKLLVQGARAVIYNVHRKTDARAEWIKALLARRPANIVAIALANKIARIAWAVFMRGEKFISATRPVKVCCREKFV

SEQ ID NO: 159733 - protein, 373 aa, unidentified
MVETSTLRSTRFLGLDVHKASISVAVAEDDDRAPEFWDKIPNEPSAVRKMVRKLGQGGHQLKAVYEAGPTGYGLHRQLRELGVECVVAAPALIPTPRGGVKTDTRDALNLARVLRRGDLTAVWVPDREHEALRSLVRARYDAKEDHQRARHRLAKFLLQLNRRPAVGVRAWTKRYHQWLKELRLEQPAAQVVFEDYRAVEQAAQERVRRLEQELRTWAEQSPRMAQVVALQILRGIGFLSAVTIVAEVGDFRRFAHARGFMCFIGVTASEHSSGSSQHRGGITHAGNRYLRHVLVQSAQHARHAPCLSSALRKRMQDMPPDMVELATRAQQRLHYRYRSLSWRIGRPKAIVAVARELAGFVWALGTRVEGLAA

SEQ ID NO: 159734 - protein, 452 aa, unidentified
MSEPSNESKGTSLEIVHPNAAGIDIGNAAHYVAVPPDRDRQAVRRFECFTEDLKKMADWLIQCGIDTVAMQSTGVYWLPAYEILTERGLRVFLVNAAHTKNLPGRKSDVQECQWLMKLHSYGLLSNSFRPTEEICVLRTYWRQRDEQVKAASMTIQRMQKVLTEMNVQIANVISDISGVTGMAILDAILQGERDRYKLAELAHPRIQASKEEIAKSLEGNWRPELVFVLRQERDIYREYQKKIGECDEAIQAHLKTMEDKAEPGSKPGTPKAGKRAGGNAPRFDLRGELYRISGIDLTRIDGINIMVAQTILAEVGLDMSKWPTEAHFASWLGLCPNHQITGGKVYHRGSRHVENRAATAFRMAATSLWRSKTYLGAKFKRLRAQLGAPKAITAMAHNLARLVYRMLRYGKEYVDKGMEFYQQRYQQQIKWIEKKARDLGLVITLAPAGTVD

SEQ ID NO: 159735 - protein, 385 aa, unidentified
MTIQVEVPKFIPRDYDVFAGLDVDKRSMAVVFADHAGSQRAMRMAHSATPLVNYVRKHFAGQRVAFAYEAGPTGFGLHDELVRQAYTCVVAAPSKVPRAPSERVKTNRLDSRKLAESLRGGQLRGIHVPTAVYRDLRHLVQMRDTHVRQLTASKLRVKSLLLYEGIPFPDPQEKWTAPAMRELQTLPCSETVRFKLDDLLDTLHFHFQASARATKQIRQYCLQTPELQQSINLMLSLPGIGWIVASHLAARLGDPRQITNGRQIAGFLGIVSSEHSTGEKENRGEITRSGDSRLRNKLIQSAWTAIRKDPELRAFYRRIYQRHPKKVAARKAIVAVARKLTNRIYVVLKERRPYVIRPDSSIAPLTAEETVGPRERLDGAQNDQP

SEQ ID NO: 159736 - protein, 430 aa, unidentified
MGLIVPSAMHPQQDDQPMPYEWFVGIDWGSQQHQVCVLDRDRHQVGERVVDHDGASLARLAAWLWIVSAGQPQRVAVAIEVPRGAIVEGLLERGFHVFALNPKQLDRFRDRHSVAGAKDDRRDAFVLADSVRTDQPSFRRLHLEEPQLLVLRELSRAEETLLEEFRRNANRLRDQLHRFYPQMLQLCSAADEPWLWDLIDLAPSPAHAALLSEEQVQRVLKAHRIRRVTAHEVLTYLQTPALPVAPGAAEAAQAHCGFLLPCLRVLAEQRQACGQQVSALLRTLAEELGEDEGPSDVAIVLSLPGVGRKITAWFFAEAAQPLAERDYQMLRTHGGVAPVTKQSGKRRLVVMRRGCNPRLRHALYHMARVAMQRDAHFSSVYVALRAKGQRHGQALRTIGDRLLRILVAMLRHRTCYDASRIRPEPVVQMG

SEQ ID NO: 159737 - protein, 410 aa, unidentified
MIKENYVYVGIDLHKETHTAVMIDCYNQKLGEITFPNRPAAFPKLVTKVKKCNTDGKEVVYGLENAYGYGRALAVWLIDKGYLVKDVNTAISHRQAKHRGAMYRKSDSDDAKAIALATLNMLDKLPDACPNDAYWSLGQLVHRRDNIMKQRTRLVNQLHEQLCIAYPSYKQFFNDISRPTALYFWEHYPSRKYLKGKSVEDLRAELVPVSHNKCSTKTCEKILDAVASDKVKNIDYQDARDMVTLSIVSDLQHYDSQLAEVDKMLEQMYKMLGCTLTTIPGVNVITAVKILAEIGDIKRFSNANKLAQFAGIAPLHLSSSGKGKDVATKQGNRRLQATIYFLAIQMVQVSSKGTPRNSVVRAYYEKRKAEGKTSQQALICISRRLISVIYGMLKNGTEYRMPVVENAGEK

SEQ ID NO: 159738 - protein, 326 aa, unidentified
MEHELHYIGIDTAKEKLDVDVLRPDGRHRTKKFANTTKGHDELVSWLKGHKIDHAHICIEATGTYMEPVAECLYDTGYIVSVINPALGKAFAQSEGLRNKTDTVDARMLAEFCRQKRPAAWEAPHPLERALRALVVRHQALTDMHTQELNRTETAREVQRPSIDAHLLWLEAELKRLEKQIKDLTDDDPDMKHRRKLLESIPGIGEKTSAVLLAYIGLKDRFAHARQFAAFAGLTPRRYESGSSVRGASRMSKAGHVSLRRALYMPAMVATSKTEWGRAFRDRLAANGKKGKVILGAMMRKLAQVAYGVLKSGVPFDASRHNPVAA

SEQ ID NO: 159739 - protein, 470 aa, unidentified
MAVVMIGIDPHKASHTAVAISAAEEPLGELRVRACAAQAERLLAWAAAWPQRTWAVEGAGGLGHLLAQQLLGAGERVLDVQPKLGARVRLLTAGDSNKNDPNDARSVAIAALRSAGVREARPDDHAAVLKIWSKRYRDLGRTRTQVACRLHAVLCELIPGGLSKEITAGHAARVLEAITPAGAVEAARCELAAAFAEDLRGIDAQIRQTRARLATAIQATGTSLTGLFGVGPVIAAAVIGDVRDVSRFPGRDHFAAYNGTAPIEVSSGPRKVYRLSRRGNRRLNHAIHMAAVTQIRHRHSQGRAYYDKKLAEGKMPKEALRSLKRQVSNAIFACLQADARRAAARVKGPGGQQGNDSVASAAGSHPRHRLFGQATPGPGDHPTATFSSPAPGPAHGRGTAGHSPVAATPPPPTPQVQVERPQRSEDERSGGAARRRPHSAARKAKAKGSLITPQRPKGTSHPAKKTDGNP

SEQ ID NO: 159740 - protein, 336 aa, unidentified
MTIIRIGLDTSKHVFQIHGVDENEQPVLRRQVRRSGVTKFFAKLPATRIGIEACGASHHWARLLRGLGHEVMLIPPQYIKPYVKRGKNDAIDAEAICEAMSRPGMRFVAIKSAESQAALTILGVRDLLVKQRTMLINAIRGHAAEFGVTAPKGPQQICELLRRLVVEGSVPALAREMIGVLAGQLEALNTKLREIEARLMAWHRQDQTSQCLATIPGIGPIGGVSFALKVPDPKGFHLARHFAAWLGITPREHSTGGRQRLGKISRAGDEDLRRLLVLGAMAVIQQAKKGRAAPWLLGLLARKPKKLVAVALANKMARIVWAMMVSGETYRRQTAG

SEQ ID NO: 159741 - protein, 457 aa, unidentified
MAKKKRESQNQAVLPILKPNAAGIDIGATEIWVAVPADRDPQPIRCFPTFTEDLHRLADWLKACRITTAAMESTGVYWIPLYQILETRGFEVCLVNARYYQNVPGRRTDVSDCQWLQYLHTVGLLRASFRPEPQVCVLRSFLRHRDNLIQIASTHVLHMQKALNQMNLQIHHVLSDITGLTGLAILDAILAGERDPKVLAKLRNPRVQASPQTIMKSLVGDYRVEHLFTLRQSLAAYRYYQQLIADCDREIEKQLLQFQDKVDVATKPLPPLKVQRTTRYSNAPSFDLRGHLYRTLGVDLTAVPGINVLTGHTILTEVGPDLSSFRSASAFASWLGLCPDNDKSGGKILSVRTRKVNSRAALAFRLAANTLHRNKSWLGDYYRRMRAKLGAPKAITAAAHKLARIVYHLLTTHQPYDESIYAKYQQQSRARATAKLKKQAIFLGFQLVPMHATPAAH

SEQ ID NO: 159742 - protein, 400 aa, unidentified
MLSIGIDVSKGKSTVCGMKPGGEIVYAPFEVQHTREGMLELVSLLRSSGEEVRAVLESTGSYHCPVVAALLENGIFVSVVNSLRMKRFCSQSIRKVKTDRIDAMQIALYGLAYWQELQPTKLPEDTYRELQLLARQYYQMTSMLIKAKVDFNALCDQVLPGMQELMSDHAGRHKLSDFVLRYRHTTHILEMGETRFRKDYCKWAEKKGYRNCERMAALIFATAQNGIPVLPNAPSTQIVITEAIRVLHTVEASRDAILTQMQALAKTLPEYSLVREMPCIGDTLAPRLIAEIGDVRRFHSKRALIAYAGIDAPPYQSGKFCANNRHISKRGNRYLRKTGYEVMQSYVMHKPANDPIFTFIEKKRGEGKSGKLAMVAGLNKFLRVYYGKVTELYRSLPAIE

SEQ ID NO: 159743 - protein, 329 aa, unidentified
MYYVGIDISKRFIDVCLLVDGIKGKRKTKALPNDPNSAQALAQWLILQKCDPSQAHIIMEATGVYHEHLADGLHQSDILVSVINPHRVREFAKGMGILTKTDKVDAYVLACYGCLKQPENWLPPPQEIRKLKALLQHRDSLLNDKQRIENRLSTLKSITAPEEILTSLESIEQNLKDELARIERLIAEHIDKHPGLKNDLKLLKSIDGVGEQIGWNMLAIIRGNNFRSAEQVAAYLGVIPIERRSGTSVCGRARLSKIGPPGIRAKLYMGAIAAISWNSHVRALYERLRLKGKAKMVAIGAAMRKLVHLCYGVLHTQQPYDKNHGVVAG

SEQ ID NO: 159744 - protein, 397 aa, unidentified
MYIVGIDIAKRKHEAAVIDGDGAVIIKPFSFTNNCSGYNRLLAMLTKAKLPLDEVSFAMEATGHYWLALFTRLQKEGFRVQVINPVQTNSIRSFYIRQAKTDPRDALLIAEVIRFGHFSESTLHPENIYELRELCRGRHAIVSMQADVKRKVVALLDQVFPEYETAFTNMFGDTSMAILQACPTPKELSEMPLEELCHLIEVSSHKRFRMAKAQELQALARNSFGFAMAGDVFSTMIRLYAKHLDFLKQQVREMDRKIAEIMDTLDTPITTITGIGPTLGAYILSEIGDISRFSSAAKLAAYAGIDPTMRQSGEYNGVRNRMSKRGSPYLRHAIWLAASSAVLHDPALKLYFQKKRDEGKPYMASVGHACRKMVSIIYAVMRDNKAYTPYIPNEISA

SEQ ID NO: 159745 - protein, 315 aa, unidentified
MTQIICGVDVSSASLEASIGTRGATSSFANNPDGIDALAAFCHHHHVTLVAMEATGGYERQAFALLTQAGLDVAILNPRAVRQFASGMGRLEKTDRIDAAIIAWFAEVKRSRPSLLASASQLHLRALVTRLRQLTALHTAQLNQQRLITNPHVQATFDELLGLLKRQIKDLAAQIAALIDQDPLWRELDMAFRSIRGVAARTVARLCAELPEIGTLPNKTISKLAGLAPLANDSGKHQGKRSVRGGRAPVRDILFIVASVAGRYEPDFIAFRQRLSDAGKPPKVIRIALAHKLLVRLNAKARDVRTQTLITTQIP

SEQ ID NO: 159746 - protein, 426 aa, unidentified
MEDILEVSCGLDVHKEMVVACIISKKPVPAKNPLLVEIKTFKTLPDDLSHLKSWIEDHGCHDVAMESTGVYWCPIYDVLETAFGGNINILVVNARHMHNIPGKKSDVKDAQWISKLLRAGLLKGSFIPEPAIRDLRDLTRYRKHVTEDISTQKNRIEKFLQRKGFKISTFLSDVFGVSGRNLLSILTTKGEITPDDVRNELRGAAKRKTEEMLYALNGYLDVNSRQYLSRMLEMLDSLLRHLKDIEADIDSEASTFNPQIELLQTVPGIGATAAKAIIGEIGVDMSKFSTVAQFCSWAGLAPGENESAGKKKSTRVNFGNTYIKSIMCECAWGMIRTKDSYLSKFYWKLRVRSGSQKAVVAVARKMLTVIFFMLKNNEAYSEEHYEEAKKKYEESRMRKLFVEASKLGFTLTPASLPDVKTDELVG

SEQ ID NO: 159747 - protein, 402 aa, unidentified
MNAVGIDVSKGKSMVAIMRPFGEIVSTPFEIKHTSSDINSLVKLIKSIEGESRIVMEHTGRYYEVLAHQLSEANLFVSAINPKLIKDFDNDSLRKVKTDKADSVKIARYALDKWQNLKQYSVMDELRNQLKTMNRQFGFYMKHKTAMKNNLIGILDQTYPGVNTYFDSPARSDGSQKWVDFASTYWHVDCVRKMSINAFIDHYENWCKRKKYNFSKSKAEEIYGKAKELVPVLPKDDITKLIIKQAVDQLNSASITVESLRTLMNETASKLPEYPVVMAMKGVGTSLGPQLMAEIGDVSRFTHKGAITAFAGVDPGVNESGSYEQKSVPTSKRGSSDLRKTLFQVMDVLIKTHPQDDPVYQFIDKKRAQGKPYYVYMTAGANKFLRIYYGRVKEYLSSLSES

SEQ ID NO: 159748 - protein, 401 aa, unidentified
MQQRLWAGIDAGKTAHHCMVVDADGQRVLSRRIDNDESALLGLIRAVTSLAEGGHLTWAIDLNAGGAALLITLLLAHDQELLYIPGRTVHHAAGSYRGDGKTDAKDATIIADQARMRRDLHPLRRGDELVAELRILTSRRNDLSADRTRTINRLRDRLGEYFPALERAFDYSNNQAALILLTGYQTPAALRRIGTARLETWLQNRHARKVSSVAASAVAAAHTQYTAVPGEQLAADLVARLTQEVIDLDAALKEIDVMIEDRFRRHRYAEIIVSLPGFGPRLGAEFLAALGGDIALYDSADRLAGVAGLAPVPRDSGRVSGNLHRPRRFNRRLLRASCLAAQLSIRHDPASKHHYDRKRAEGKRHTQAVLALARRRNNVLWAMLRDRTHYQQPTGDPATAA

SEQ ID NO: 159749 - protein, 354 aa, unidentified
MPRNTSRLEAVATIGIDIGKNTFHLVGLDRNGAIVLRQKLSRRQVEARLVNMPPCLIGMEACVGAHHLSRQLKALGHDARLMPARYVRPYSKGQKNDFRDAEAIAEAVLRPTMKFVAIKTVEQLDLQALHRVRERLVCQRTSVINQIRAFLLERGIAVRQGLRALRTEMPIILAMTDKLSPRMIHMIEALCTDWRHLDGRIETVSEEIKTLSEQDDGAKRLMTVPGIGPIISTATVAAIGSGDVFSKGRDFGAWLGLVPRQMSTGGRTILGPISKRGNRYLRMLFVQAARAVLLRPQSWEKHGLKSWIEAAARRLNRFKLAIALANKIARIVWGVLHGGRNFEVKPIRPVSQAA

SEQ ID NO: 159750 - protein, 391 aa, unidentified
MIYVGIDVAKDKHDCFIMGTGGEVLHDVFVISNNKDGFNDLFQKIQIASDSFDNIKVGLEATGHYSYNLLGFLIDKGLATFVINPLHSTLFRKSLSLRKTKTDKVDARTIAAMLASDLDFKSYTDTAYHNEELKSLVRYRFDKVKERAKLKQSVARLVNILFPELEKLVPTLHMVSIYALIEEFPGAHHVADAHLTRLKNLLYVASKGRYGDETAVLFRDEAKRSIGSKMPAKSLELQHTIKLIGGLDVAIDEIESRIKAIMDEMNSPILTIPGISYRMGAMILAEIGDFYRFDSSDKILAYAGLSPSTYQSGQLMSCYAHMEKRGSRYLRYAIFNATKFVCHWEPTFAAYLAKKRAEGKHYNVAISHAAKKLVRLIFALERSRQMFVSAA

SEQ ID NO: 159751 - protein, 398 aa, unidentified
MLSIGIDVSKGKSTVCGMKPGGEIVYTPFEVQHTREGMSELVSLLRGSGEEVRVVLESTGSYHCPVVAALLENGIFVSVVNSLRMKRFCSQSIRRVKTDQIDAMQIALYGLAYWQELQPTRLPENTYRELQLLARQYYQMTSLLIKAKVDFNALCDQVLPGMQELMSDHAGRHKLSDFVLRYRHTTHILKMGETRFRKDYCKWAEKKGYRNHERMAALIFATAQNGIPVLPDAPSTQIVITEAIRVLHTVEASRDAILTQMQALAKTLPEYSLVREMPCIGDTLAPRLIAEIGDVRRFHSKRALIAYAGIDAPPYQSGKFCANNRHISKRGNRYLRKTGYEVMQSYVMHKPANDPIFTFIEKKRGEGKSGKLAMVAGLNKFLRVYYGKVTELYRSLPQ

SEQ ID NO: 159752 - protein, 366 aa, unidentified
MSVMNVICVGCDSHEKTLVNKIAVNREAPEQFNVSGRRSGRQKLIAVLKRKAQEIGGARIVLAYEASSQGFILYDALKAAGIECYVLAPTKIARSHQQKLNKSDKKDDKCLLDIVRSHVLAGTELPAVWVPDRQTRDDRETVRTRDDVSDKQRVLKTQIQMLLKRWGIEKPGELHGTRSKAYRQWLKALAEDRTRGTGFRTILSSLIRQLEFVERELEQLDQAIVELGEQPHLKPIVDALDAETGVGRLGAVTYATEVGDFGRFRRRQQIGAYWGLTPSSNESGNIQDRKGHITRHGSPRVTRLLCQSHWVRVKHDPHEREVYQRLVARNPKRKKIAVVAGMRRLSVRLWHVGRQAQLRMRNLGPQ

SEQ ID NO: 159753 - protein, 310 aa, unidentified
MKDTMIGVDLAKRVFQLHGATMTGEVKFRKKLSREQFRAFMAAQPASLVVFEACGSASYWAREMEALGHEARLIAPQYVRPFVKRQKNDAADAEAIVIAARQPEMRFVAPKTANQQAKAVLFRGRERLVHQRTELVNALRAVLYEYGHVFPIGFCHVQRIAAVVEDPGCDLPALVISECQDLLAQIAEKTERIETKTKVLKAIAAETDTARRLQTMPGVGPLTAVAVEAFAPDMAQFKSGRDFAAWLGLVPRQHSTGGKARLGRISKAGQSDIRRLLIIGAMTRIMSRARQKVPASCTFAPIGRTASNRW

SEQ ID NO: 159754 - protein, 340 aa, unidentified
MRELYAGCDLHSNSNFIGVIDGQGKRVFKERLSNDIGEIRETLVALKEEIVGIVVESTYNWYWLVDGLMEEGYRVYLANPSAIQQYAGLKHVDDKHDAFWLAEMLRLGILPEGYIYPKQERPIRDLLRKRGHLMRLRTSLVVSLQNILSRNLGRKVSVNDVKVLREDRITPLLEENGDLAMAGRISKETIDFLTHQIDQIERRIDKGVRLKGAYRFLQTLPGVGKILALTIMLETGPISRFETVGDYVSYCRKVPSQWMSNGKWKRSGNTKNGNRYLSWAYAEASDYARRLHPEPRAYYQRKMQKTNAVVAHSALAHKLARAAYYVMRDQVPFDPEKLFR

SEQ ID NO: 159755 - protein, 316 aa, unidentified
MNTQDHNEINVGIDTGQACLDVFIRPSGEIEIFQNNPDGIRKAIRFIRQFKPTRILIESTGRLEMAFFCAAHKAGLPVCICDPVRVRKFAQSTGRLAKTDKLDAQDIAYFGEIMKPDPSELKPEKLRLLSDLLTVRSQCLEMSTMQKNRLQRMPKTVQQPIRSILKKITAEIVNIDLKLDQLIAEVPHYKKRVDQLISAKCVGKVLAYTLLSDLPELGQLNRKEIAALVGVAPFNKDSGKHKGKRKIRGGRHKVRTVLFVSMMSAIQCHPKIKPMYERMVAAGKPKKVAIVACMRKQLTILNTMVKNGTYWDENMA

SEQ ID NO: 159756 - protein, 402 aa, unidentified
MRVTFGIDVSKATSEIAIVVNGQAVSHFKITNNQPGFNKLQKSLNDFQNPEIVFEATGLYSRRLRVFLDDYGYRYTQLNPLASKKQLDRLRPNKTDKNDALHLAETQFEIRRALTYQQDPIYQQLLDWSRFYDEITCDSVANKNRLHKALQCTFPEADCVLNSPTGHLYWHLLQAFPIASMVRQSSSMELSQHIRKFCQLSVPNSQALAARLRQLASESYPCVGEDSGVVMQVRYLATELLRLDDLKNDIIQKMARLAQDLPELAILESIPGISVNTAVRLIGELGDIRRFTSANKLNAFVGIDLRHFESGEYIAVDHISKRGNPYARKILYRTILNMMVSARTKPSHINDYCRERKKQSSGKADFKKIAMGAISRLNRTIYHLILNNQKYDYLKTRPKAES

SEQ ID NO: 159757 - protein, 340 aa, unidentified
MTGKALHFIGVDISKLYVDASLLSVVDHVKKEIVSDRFENTHAGMKTFSKWLKNNKVSFNGSTLLVIENTGIYHRLLWAFCCNNNIPIHIGNAAHIKWSFGIARGKNDKVDSVRLSLYAFKEADMLRAAPVLNPVLMQLKDLVTARTKLLSQINSIKVYIKELKNVSDPGIQKTLERAHRQAIAGMAASIKTLEAEIKLILAKNIDLKKNYDLLISVPGIGHLTAIYLICCTNNFINKISGKQLASYAGVVPFEYSSGTSVRGRNKVHPMANKDLKKALHLCALTAMKNYAEFKIYYQRKKAEGKHSMSILNAIRNKIALRAAAVINKQMPYMTFENKAA

SEQ ID NO: 159758 - protein, 347 aa, unidentified
MSKIKLVGIDLAKRCYQICAVSEHNKVLYNRKYTAKKFAEAVHQLEPITVAMEACAASHYWGRRLHALGHQVLLVPAQHAKAFRRVHKSDEHDALSIAEAAQRPNLHCVPVKTLTQQDLQILGGLRERCVAQRTSLINQARGYAREYGVNFPVSRPALMRELPLAIEAANNDLTPIAREALAGVYEEIKQVSTRIDDLLARMTTLAQEDPAHKGLQTIPGVGPVLAPTLLAKLGHAQQFDSGRDCAAWVGLVPKQNSTGGKTQLGGISKNGDRLLRTLLIHGARTVIRWADKHDHAQSRWIKQLVERAGKNKAAVALANKMMRMIWAVLTQGVTFDMNKAFRPQPAC

SEQ ID NO: 159759 - protein, 436 aa, unidentified
MRGCRCSMIMGFTKPIEHFNLQRKKVITMNTLYVGIDVSSKSNVVYLMLPNGDKHSNFSVANSHEGSTLLVKKIYSALTSHSLDTVLIGLEATSVYGDNLVYFLREDATLAPFNRKIHVLNPKQVKKFHDTYNDLPKNDYVDSFVIADCLRFGRINKEVYMGDYRYKALQNLTRARFFAVQNLVKEKQRFMNVLFKKYSTMTQEKVFSDAFSTTALAVYDEFESAEALANMDLHELTDFIIEKGKNRFPDPDAVAKAIQKAARSSYRLPKTVNDSVNQVLSISITSMKALESQIKEFDKAIIALMELLPNVLISIPGIGPVYSAGIMAEIGDINRFDNQAALAKYAGLAWKQHQSGGFEAEVTRLIPSGNRFLKYYLCEAAFSLVRCDKEYSDFYHLKYKEVNRCQHKRALALTARKFVRLVFRLLKDNRLYCPAK

SEQ ID NO: 159760 - protein, 383 aa, unidentified
MKEATTMVVVGTDAHKYSHTFVATDEVGRQLGEKTVKATTAGHATAIMWAREQFGLELIWGIEDCRNMSARLERDLLAAGQQVVRVPTKLMAQTRKSARSRGKSDPIDALAVARAVMRETDLPLATHDETSRELKLLTDRRDVLVAQRTSAINRLRWLVHELDPERAPAARSLDAAKHQQALRTWLDTQPGLVAELARAELTDIIRLTGEINTLAQRISARVHQVAPALLEIPGCAELTAAKIVGEAAGVTRFKSEAAFACHAAVAPIPVWSGNTAGQMRLSRSGNRQLNAALHRIALTQIRMTDSRGQAYYQRLQDAGKTKRAALRCLKRRLARTVFQALRTVHQPSSEHTQPAAACHRSYCSSAHRPPAQLRTHPTRGRLP

SEQ ID NO: 159761 - protein, 413 aa, unidentified
MEILYKCCCGLDVHKKFVVACLLKIDPYGEETRQVRTFQTDTEQLLGLSDWLVTADCEAVAMESTGVYWKPLYNILEGGPMQLLVVNAQSIQGLPGRKTDVQDAEWIAELLQHGLVKSSFIPSRFQRDLRDLTRSRTTLVQERARVVNRLQKVLEDANIKLAGVATDILGVSGRAMLEALVEGKTDPKQLAELAKGRMRKKIPQLRQALAGRFGPHHRFLISEHLSHSDFLDESIERLSREISERLRPFEQELQLLDTIPGVNRQTAEELAAEVGLEMNRFPTGHHLASWAAMCPGHHESGGKRYSGKTRKGNRWLKLTLTEAAHGASHTKNTYLSSQFHRLVGRRGKKRALLAVGHSILVIAYYVLKHQRAYTDLGSNYFDELHRHRLQRNLTHRLEKLGYKVTLEALAPAA

SEQ ID NO: 159762 - protein, 349 aa, unidentified
MTIVGCDLHTRKQQVAVLHTDTGEVVEQELLHSGDAVEQFYRALPRPVTVGIESTGYALWFHELMQRLGHTLLVGEAAKIRAMVVRKTKTDRRDAQHLLDLLKHERFPAVWIPDPATRDLRALVTHRVRLVRIRPMVKNGLQAVALNRRLALGSKLWSQRGRAQLTALDLPRHTAQRREDSLELLTWLETHLDSLDARILDAAHAHPGARLLLTHPGVGALTALTTVLVLGPPARFPGSKHVVSYVGLAPAVRASADTCHLGPITKQGSALLRWVLGQAAPLAARADDDLHRLYRTLIHRRGRPKARVAVARKLLVRLFIMVRDQIDYAEFRRRGRLPPPRRDLHPSPA

SEQ ID NO: 159763 - protein, 319 aa, unidentified
MFVGIDVSKDRLDVAVHGRKENWQFNRDENGLGRLVDHLQSLGESITLVVLEATGGLERDVAASLAVAKIPAAVVNARQVRDFARATGKLAKTDGIDATVLAHFAEAIRPAVQTVADELAQALEARITRRNQLIQMFVAEKNRRAMLLIQRTASSAMAKSIDVHIQWLEKQIASLDDELDKLIKNSPVWKEKDDLLQSVPGVGPVTSRTLLGYVPELGTLDRKKIAALIGLAPFNHDSGHLSGRRAIWGGRAEVRSVLYMAVVAALRCNPVLRAFYARLIAAGKVPKVAITATMRKLLTTLNAMVRDGASWTPPSALRA

SEQ ID NO: 159764 - protein, 349 aa, unidentified
MKILAIDLGKYKSVACNYVTATGTARFATVVTHANELDRLLSQESPDLVVIETCSIAGWVHDLCCQRGVKCQVANPNGEAWKWKNVKRKTDRDDALKLAQLAALEQLPTVYVPAPETRQRRALLKYRQSLITRRVAIQNHLRAIVQREGILLDRGRRAWTVAGLEMIRQLAKPLEQCSADELWRGEAALELQALQAVTKLLREVECKLEVFAASNERVKLLRSIPGVGRCTAEVVVAYLDNPQRFENGRQVSAYAGLVPKQFQSGETDRQGRISRRGPSLLRKLLVEAGWVLLRYNPWAQRLMQRLSRGQKTRRKQAIVALARKLLVRCWAMLRDNTEWREPPPATATA

SEQ ID NO: 159765 - protein, 374 aa, unidentified
MQHFIGCDVHTRNQMVAWIEEETGEIKKRRLEHEGQEVKEFYALFPRGTVVGIEATFPVYWFERLLGELGHELWVGDAARIRASEVRYQKTDSRDAEGILDLLRTERFPRIWVPSLGERDLRQLLVHRMKQVRARTQVKNQLHALAISQGVCRKGKLWSAKGRKELESLALLPWAARRRKELLESLDRLDEQVRELDRAVEEAGRERAEVALLRTHPGVGMVVGLAFVLTVGPIERFSNSRKLVSYWGLNPRENSSGGRQRLGAISKQGNTMMRWLLVEAAQTAARLDPQLRRIYQRLKKQKTSAVAKIAVARRLAVRLFWMLRTRNNYAQLVHMSGSPSSAVVPPPAEPTVWAPGLPARGRGGRTLNHGARRP

SEQ ID NO: 159766 - protein, 449 aa, unidentified
MLMKRETAKKSVVNLPLVNPNAAGIDVGDTMHAVAIPNGRDEVQVRSFGTMTCDLQTIAGWLKRCGVDTVAMESTGVYWKPLFSVLVKAGFEVYLVNSKQVRNVSGRKNDEDDAMWIQKLHSCGLLKSSYLPDDEQETLRALVRHRRTLTMDCNRFILRMQKSLEMMNIKVHTVIRDITGKTGTLIVEAIINGERQPENFLAYVDKNIKANRDTIVKSLEGNWRPEHVFILTECYHGYKYYKQRIAICDAEIERQLAQYQTDLFTATKYDSESKSKKRATKNKPNFNTTAYLKAILGVDTLAIYGISDISALEILAETGTDLSKWETEKHFVSWLNLCPNNKISGGRMISSMLMKKKPNAASQAFRQAANAVQRSDHWLGDYFRRMKAKGGNKYAMVATANKLATIYYKMVRFKQEFNPPDLQEYQQRYKRAKIAYLERKLVDLKSEVA

SEQ ID NO: 159767 - protein, 330 aa, unidentified
MNYSHFVGLDVGKKSFDACLFSLDKELSHHTFPNTPGGIEELLHRVKQHGVEVETALFCAENMGSHVIDLCLSSYQFHFPLALECPLTIKRSIGLQRGKNDRIDARRIARYACLHYRKLRLYQLPDKDLVRLRNWMVIRDNLVKQKVSSRKLLELPRETSGLADLVTAMTFLEKQLSLVKEKISYVEQEMEKIISSNIALLTNYQLLTSIKGIGPINAIVLLCVTGNFHRFSDPRKFVCYCGVAPFEHSSGTSIRGKTKTSNLANREVKVYLTRAAITAISWDPQIKAYYKRKTGEGKHKASVINAVRAKIIARCFAVIKRKTPFVTLRA

SEQ ID NO: 159768 - protein, 387 aa, unidentified
MSKQNDLSRCLTTLEQDTTLIAAIEMGQASWLVAGIVPGLERNPLKKLAADRDALLQLLLRWRSEAAKAGRAINRIAVAYEAGRDGFWLARWLRSQSIEAYVIHPSSVPVSREHRRAKTDRLDTELLKRAFLGWLRGEPKHCSMAGIPTLEDEDARRPGRERQTLVGERTRILNRLKANLARLGIRGFRPNLARAQSQLATLRTPEGMAIPTNTLAEMRRDMDRLRFVKQQIKEIEKTRAERLAKAPEERRHAAARALTRVVGVGVETADMLVQEVFSREIRDRKALARYAGLTGAPDESGQRRRERGLAKAGNARVRRGMIELAWGHLVHQKGSSLSAWYRRRTADARRGLRKTMIVALARKLLIVLWRLATTGEAPEGLLLRPEV

SEQ ID NO: 159769 - protein, 343 aa, unidentified
MDHFAGLDVSVKEISVCIVDDAGKIVREVKVASEPQALLAVLRNPAYCFKRIGLEAGPLSQWLFSALAEAGLPVICVETRHMRAVLKAQINKTDRNDARGMAQMMRAGLYRPVHVKTLRSQKLRMLLTHRKLLQSKAIAIENDLRGTLRNFGLKVGMAGKVKFEARIKELVENFPDLAALVEPLLIVRRVLREQIAILHRRLLAVVRDDGVCRRLMTVPGVGPVVALTFRATVDVPARFRNSKAVGAVFGLTPSKYQSGEIERGGAISKCGDDMMRVMLYEAAQSMLFHSTKWSWLRAWAIKIARRRGMKKAIVALARRLAVIMHRIWVDGTEFRWTREAATA

SEQ ID NO: 159770 - protein, 316 aa, unidentified
MNTQNGTPVNIGIDTSQDQLDIFVRPSGEFFSFPNSPQGATEAAKAIRAFKPDRIIIESTGRLEFNFVYAAHKAKLPVAVCNLGNARNFAKSIGRTAKTDKLDAMDIAHFGELTQPRLTELKPEKLRLISDLLAVRSQCMEMSTIQKNRLKRMPKTVHKPIKAVLKTLQTQIADIDKTIDKLATEVPEWKAQRDLLMSAKGGGKVLAYTLMSELPELGRLNNKEIAALVGVAPMNRDSGKYQGKRFIRGGRHKVRTVLFMSMLSAIQCHPKLKPMYERMVAAGKPKKLAIVACMRKQLVILNTMVRNGTEWDPNMV

SEQ ID NO: 159771 - protein, 339 aa, unidentified
MKLYAAFDLHSSNSYLSVIDEEGKRRLEKKLANDAEAIVTELSPYRKNIAGVVVESTYNWYWLVDLLMAKGYEVHLANPAAIQKYKGLKHADDRHDAGWLAEMLRLAILPEGYIYPKEERPIRDLLRKRSHLVRLRTSLIISLQHIITRNCGIMVSVNDVKRLREDRISPLLEGNKDVLMAGAVSKETIDYMSRKIKSIERTVEGKIRLSSPYQQLLSIPGVGKILALTIMLETGPISRFQKVGNYVSYCRKVSSTWVSNGKRKGKGNEKNGNRYLAWAYSEAAELARRFDAQARAYFQRKQQETNRMVAHQALAHKLTRAAYYIMRDDVPFMAEKLFA

SEQ ID NO: 159772 - protein, 355 aa, unidentified
MVRRRKPVGKKKEAAMLDLYCGMDLHGDNVYCTLMDRNYKPVFEQRLPNDLPTVLSALAPYRERLAGVAVESTYNWYWLVDGLQSNDYETKLANPARMQENIGLKCANDKTDSRFLAKQMVMGVLPEGYIYPQADRPTRDLLRRRMTLVHMRTGEWLRLEGLVARHSGKDLGVQALSNMEPEALNELLGNNPLVIEAAQASYRHIAFLDREIQGIERRIEPLIKLHDNYKQLLGVPGIGRILAMTIMLETGPITRFGGPGNYASYCRAVKSTHTSNEKKKGEGNSKSGNKYLCWAFIEAANFAVRYSPELRAWYQRKAARTKRVVALKALSNKMAKACYFIMRDGVSFDVKKLTG

SEQ ID NO: 159773 - protein, 354 aa, unidentified
MSSEKYIGLDVHQATISVAVMDSQGKLIMESILETKASTILEFLAGLRGALSVTFEEGTWAAWLYDLLKPHVAKLVVCNPRKMAVLKQGNKSDKIDARKLADRLRLNDLKPVYHGETGVRMLRELARSYLTVVKDLSRVMNRLKALYRSWAIPCAGRDVYYTRHRSQWLGKIPEAGTRRRAEQLYQQLDVLQHLRQQARRELLAESRKHTITAKLKQIPSLGPIRSALAVALIQTPHRFRSKRQLWTYSGLGLETRDSGEYHFVKGQVRRKKQVWIRGLNKDYNHDLKGLFKAAAIRASVLPGPFQDFYQRSLAKGIQPTMVRLTLARKIAAITLTLWKKGENFDIEKLKSQAA

SEQ ID NO: 159774 - protein, 311 aa, unidentified
MKEYFIGIDVSKKSLDVALLPDNQRWSLGNNETEIPSLVERLKQLAPSLIVLEATGGLEILVAASLGTADLPVAVINPRQARDFAKAIGKLAKTDAIDAGVLALFAERIRPKPRPLKDQDLQELTDLLTRRNQLVAMLTAEKNRLSSAPKTTRKDIQEHISWLEQRIKESNGILEKLIQKTPIWREKDALLQSVPGVGPVLSVNLLSGLPELGSLNRKKIATLVGVAPLNCDSGTFRGKRIIWGGRADVRSTLYMGALAAIRFNPVIEAFYQRLIATGKKPKVAITACMRKLLTILNAMIKNSTPWNPKLA

SEQ ID NO: 159775 - protein, 341 aa, unidentified
MKLKTITIDLAKNVFQVCGVNEHIKPQFNKKLKRNELLDFMRQQSPTVVVMEACYSSHYWGREIAKLGHDTKLIPAQHVTPFVRGNKNDHNDAFAIAEASQRAHIRFVPVKSEHQQEISCLHRIRERLIKNKTAMSNQARGLLSEFGVVFPCGHKALLNGLTSVIDNLQYSHRLQDIVIDMLSEYEITLKRLKDIEKQLGEFVDASESGKILRSIPGIGVINASAFLAAIDKGQAFNNPKEFAVWLGLMPKQHASGNMSKMCGITKRGDRYLRKQLIHGARAFVSRAAKSIDPLALWATKLRVIKPFNKVAVAVAHRLARLIWILLSRQEHYRVTPANLSA

SEQ ID NO: 159776 - protein, 308 aa, unidentified
MMYVGIDVGKRYVDVAFGSDGKVERFPNDDEGAAQIEQKLRGVSVGRIVLEASGGYQRQLLTVLLTAGLPAVAVNARQVRDFAKAVGRLEKTDAVDARVLALFAERVRPEVRPAVAPELEELQAWLARRRQLVEMLVAEKNRAQQASGGVRRDINDHIDWLKKRLRDMEKELSGMMEKCPVWNAQVELIDAEKGLGRLTSMLLVAEVPELGTLSRRKIAKLVGVAPLNRDSGQHSGRRTTWGGRSDVRAALFMATLVAIRYNPMIKTFYKRLVARGKLKKVALVAAMRKLLTILNAIVRDGARRTSAN

SEQ ID NO: 159777 - protein, 493 aa, unidentified
MKAPACSSAAKRRARNVRKLQRQSRRPAPVPAQPLEDLTPVHRRAAGIDVGSAENYVAIPVEGLAPGESAVRVFGVFSAQQDALVEWLQQHQISTVAMEATGVYWLSPYDKLEAAGIEVYLVDPHGVKAVPGRKSDWLDCQWLQKLHTYGLLAKAFRPDLPVRRLRTLTRQRAELVCCGVVHQHHMDKALVAMNLHLSLVVSDLVGDTGRRIIQAILEGQREPKELVKLRDVRCTKSSVAEMEAALNGSYDPEYLFVLQQSLESWQFYQKQMAQCDQRIEQALAAIPKAPPAVKAPPLRPIPAAAQARATQRPKRPRTGNNAPTLDFSQALIRICGMDLMKVCGLNVLSVLMLIGEIGVDMSRWRSARAFCSWLGLCPGTKISGGKVLSRRTRKVNNRAATLLRLAAWAAGRTDTWIGRFHRRIKARRGAPKAVTATARKLACVIYHLLKYQQEFVLLDTEVYEAKAKTHRLSRLKKEAKAMGYDLVELQEVA

SEQ ID NO: 159778 - protein, 332 aa, unidentified
MSVYVGIDVHRKRSQVAVIDQDGEVLANRNVPNGVKPILGVIGGLPAGTPAAFEAAFGWGWLVELLEDYGFSPHLVHPLQCKAIASARLKNDKVDAAILAQLLRADLLPEAWIAPPAVRQLRAMLRHRAQLVRLRTLLRNRIHAVLADHGYGRPEGCWSGPGREWLASLELPAVSREVIEDGLALIDALQEPIDRLDWEVHQRARSEPAVKVLTQLPGVGVFTALVLLAEIGDITRFGSARKLAAWAGLTPTVRGSDRTVRHGHISKQGSVWVRWVLCEAAQTAKRHPDFAASYQAIARRRGKKIATTAIARKLLTRAYHLLTDASSGGAPH

SEQ ID NO: 159779 - protein, 392 aa, unidentified
MPCASAVQEVGMTEREEASLGPDQHNGTLARYFGVDLHKEQITWHCIALKANGETERTTGKMATTRLEAEFIPILDSSNCYLIVEASCSTFFFYSLVEAHCTKAFVINPSAFRELYMTGRKTDRIDARKLADRLKYHIETGDPDDGFPAVFVPDDETLKIRKLVTTYELLVKQMTQLKNQLTAVFRSKLIVGYEDILDEGVERIEDDLRLDNADRLMVRALAAAHASLRQEKDSIKQAILDIGVHRFRREAGLLVSVSGVSVMGAVVFMSDIVDINRFRSAKKMTAYLASVGKVDASGNTTRNGGLNKRGRRTSYRFILQGLEHIVHGNEGFQKFRERHASKKANKVRAAIVRKTFVAMYYMLKNDEPYRFMDTRIYSRKTREIEKILENVA

SEQ ID NO: 159780 - protein, 321 aa, unidentified
MNKDKEIYGIDISKVVFDVYSQGSGHHQFNNDEKGFKALLKYISKDALVVMEATGYYHYRLAQYLYKKGIAVSVVNPLSVKRFIQMKLAKVKTDKSDAKAICEYGQLNAVPLYNALSEVQAECLQLFSLWDIYLKQRTATKNKLKGEEALGIPSRFVYRSLKRNLKHLDYEIASLEQRLLELVKQEQQEQLTLLKSIPGMGVKTALFLIVITDGFTKFENAKQLCSYVGITPTIRESGSSVRGRSRISKVGNKKLRNLLFLCAFSACKHNKACKALYERIVAKGKSKKLALIAVANKLLKQAFAMAKSGLPYDESFVSKLT

SEQ ID NO: 159781 - protein, 380 aa, unidentified
MDVHRSFAQIAVVEDGVCRDEGRVGVRPEELRAWASGLRPDDEVALEATTNSDAIATMLRPLVRRVVVSNPRKTRAIAEAKVKTDKVDARILAQLLAADFLPGTWVADDRTRMLRRLVMRRTHLVKQRTRVKNQVHAIMARNLVPTCPHADLFSGIGQRWLDRQDLPADEWRSVEALLRQLDFHGEELVQVDRDIALEAIDDPIVARLMTVPGIDVTVAISILAAVGDFNRFDSPDRLVSYLGLNPRVRQSGNSPATHGRITKAGPAQARGMLVEAAFSAARAAGPLRAFYRRVKERRGFQIATVATARKMTVLCWHLITNGRGLRLRPPQPQRAQAPQARARRRRQLKTRTRPRRKPRLPRQAAARPGTSDRRARRTLL

SEQ ID NO: 159782 - protein, 432 aa, unidentified
MHNRLQVGIDFCQKRADFCLLLPDGQPLESHVAFDNSYLGYSRAKQLLLDALDDYAFDGIDVSGEATGYLWLPFFLQLAADPDLNLHDLRLHLLNPRWVKWFKKCFAQDDKTDQKDSYYIAERTRTRRPDVAWSADPGILALRFYTRLRFHLVQNLAREKCYFSAFLFLKASAYRRLKPFSDVFGVTSRLVLTQQPSLDELADLPVEDLAMHLHEMSGHHLRDPLKNARKLKCVAQESFSLDERLALPVQRILDLTLQHIHFLEAQVEQVEHWIATELHAHPSIRQLATIPGVGPVFSSGIGAEIGNTQRFLQAHKWDAKHKRYRPRNLRDAEDAVAKIAGLWWPRSSSGDFEAEDRRMAKTGNRYLRYYLIQAANQMRTHIPEYAAFYARKYQEASKHHHKRALVLSARKSVGLVVGLLHRNEPYRSKERR

SEQ ID NO: 159783 - protein, 353 aa, unidentified
MHTHQKSSDAVATIGIDIGKNTFHLVGLDKRGAIVLRIKLSRSQLERRLANVPCCLVGMEAGCGSHHIARQIRALGHDVRLIPAQYVKPFLKGHKNDYRDAEAIAEAVQRPTMNFVAIKTPEQSDLLSLHRVRSRLVGQRTAVINQIRGFLIERGITVRQGPAPLRKALPEILSSPTEVLSPRLVRLIADLSEDWRRLDERIAAVSAEIETLAENDGSCQRLMTVPGVGPIISSAVVAAIGNGGGFRQGRDFGAWLGLVPKQESTGDRTKLGKISKRGNRYLRTLFVQAAHVVLVRRPAAAMRGLWPWIERAARRLAHRNLLAIALANKLARIAWAVLARGRDYEPRITTNAA

SEQ ID NO: 159784 - protein, 370 aa, unidentified
MTDYIITGCDLHDNGIVLKISRNSDEPESRSFRNTISGRKGMIAELKKRAKAAGGAKIVFAYEASSQGFGLCDELTDAGIDCRVLAPTKIPRSTKQKKSKDDDRDALQILEILRAHLLAGNDLPEVWLPDKQTRDDREVMRARLDAGEKTTAIKAQIQSLLKRNSIRKPEYVGGSWTVRHRAWLVSLLKGKSALPFGAGVALGSLLRQLEAMEEETRQMNVMVEYLSQQPRYVPAAGKLMEEKGVGLITAMVFLTEIGDMGRFANRRQIAAFLGLVPACYESGDKNDRKGHITHQGPFRVRKVLCQAVWARVRFDKKEKEVYERIVRRNPKHKKIAVVAGMRRLSIKMWHIALACKRPRFAGVAPENEAA

SEQ ID NO: 159785 - protein, 344 aa, unidentified
MSQATTIGLDIAKTVFHAHGADERGAMVFSRKLSRAKLLDFFVKQPRCLVAMEACSGAHHWARELMQMGHEVRLIPPAYVKPFVKRHKNDAVDAEAICEAVQRPGMRFVAVKSEEQQAAGMVFRTRDLVVRQRTQLINALRGHLAEYGWVAPRGLASVAMLADLLDEEEMASSLPEAARAMLRLMTDMLAGFDARVADLDKEIARRAREDEVARRLMTIPGIGPIAATAIVALAPPAETFTKGRDFAAWLGLAPLQHSTGGRQKLGRISKMGERTIRRLLIIGGSSIVRQATVRGAPAGSWLERMLARKPRMLVSVALANKIARIAWAVMTKNEDYRAPAAVAA

SEQ ID NO: 159786 - protein, 345 aa, unidentified
MLTIGLDVHQRSFALCILDQHGKQIKQLKQRGDWHDLLEVLRQLRQPFRICFEASLGYGHLYDRLVRVARQVVVVHPGHVRLIFHTKRKHDRIDARKLATLLFMNLAPAVHVPKLDVRSWRRLIEFRQRLVAQGVRAKNCLRGLLRGHGLQGVPGKGLWTRQGRAWLAQVEFPEPTAAAQRDMLLEDLQHVELQRKRAEGLLKDIAQQHPGVRLLLTIPGVGPRTAEAVVAYIDDARRFGSSRQVGCYFGLVPCQDQSADRNRLGHITREGPASVRKLLTEAAWQGLRRDARLQQYFERVRRNDPERRKIALVATAHYLVRAMFAMLRSGEVWRKLEQPAAQPAA

SEQ ID NO: 159787 - protein, 484 aa, unidentified
MKNRSLYGSGSQEVRACFERAGGPDGVLVVPMDLAKDEHVAMLCLGGGQCLCRPFAVRNSAEGAAYLLERIEGVRRQRGIERQNVLIGGEDPAACTVNFIHRLRLEGLAFLRVNAAQASRLRNNRRAVSDSLALDGIGQALIQQRGRMLESFDGLYCGLKSAARSRRRLVRDETAWKNRIHRNTDILFPGFLDRGLTGIVPFSQASLALMEEDFSCLKIRRCRLDTLVRQLQRHGTRKPEEAAARLKALADEVLPPAPLLIPAEAAGLAVRVRMLRAVREAIAMEENQMARCLVQTPGFYATSIPGLGVVLAGHIMAEYGRPDLWPAADNMASYGGIVPRQTQTGGPSCPARIGHLPLDANRILKDYLLQAAFQTGNTGEHRLRQHYLSVEHRDGKSRLSTAKLLVRILKQVVGSETAYLPLEILRPGPDLPQGRVVACLGDITARLLAKWKPYDLSGIDPSVNRLQQWKESFDDLAASSPSEE

SEQ ID NO: 159788 - protein, 335 aa, unidentified
MNNYIGIDVSKATLQVYIPSGQLDLEFSNTKAGLSSLYKKLKLAYKEELHNLVFVYESTGSYSRPLEQFCEKKEINCFKVGAYQSASFSKTIKNRNKTDTVDARMLSAMHILVNEGDIKVPHRDKDAHQLRSYIKYYQSLNKEKTRLKSYLEAAIFNQEDHYVLNQVKKRIQQIDKEQDKLMALSMVVIKANNDYFTAYENITSIKGVGQKSGIVLLYLFLRYPNASRQQITALTGLDPVQNESGTSVKRKTRISKQGISLVRGILYMPMLCVVQHNDEMKCIYDRLIGAGKPKMSAQLAIMRKVVLLAHSLYKNNQKYDDTKYLEYISPVKKAA

SEQ ID NO: 159789 - protein, 315 aa, unidentified
MTTIGFDVGKLELVGVRIGKDAKVRERYYIANQPKAIDNLLSILGNKYKHIRIGSEATAEYHRLLALSCIDKNIPFCLINPIVTKQFTRATVRKKKTDVSDALVIAKLIRQGEGRLVSKDDFMASKAILRTANKLSSMHQALSLIKRRFEDNYHNETTTIKIVDHCLSVVEDSIGQIRKQAQAEDEELLKLLCSLPGVGKITANALIAEIGNIERFKNSKSLIAYAGLDPRVRQSGKLLHHNTRLTKRGSPYLRKVLFTATSIGLRHDKELGDYYTKKRNEGRSYKEAVIATARKLTNRAYAVWKERRVYVKTQT

SEQ ID NO: 159790 - protein, 318 aa, unidentified
MTQDLFIGIDISKAKLDVAASPGEHSWSVSNTEEGIQELIAKIRQIGTPKIVLMEATGGFERRPLAMLGAAGLPVAAINPRNARDFAKSLGLLAKTDKVDAKALALFAEKIQPPCRPLPDAQTRALQDLIVRRRQMVDMISAEQSRLAIVENPKVRRELVQHIAWLKKRIHIADYDLDQAIKNSPAWQPKSDLLKSVPGVGPVTTSTLLALLPELGALTNKQVAALVGVAPFNRDSGTMRGRRCIWGGRTSVRNVLYMATLAATRFNPTIRAFYQRLCKLGKLRKVALVAAMRKLLGILNAMVRDQTPWRSDNVEISS

SEQ ID NO: 159791 - protein, 412 aa, unidentified
MEVVHPRCCGIDVHKQTVVACLLCSTADGTPSKEVRTYGTMTADLLQLADWLTSTGCTRVAMESTGVYWKPIYNLLEGTLEVLVVNARHIKNVPGRKTDVRDGEWIAELLRHGLLQPSFIPDRPQRDLRELTRYRTTLVRERAAEVNRLQKVLEGANIKLASVATEIMGASGHDILAALVAGNTQASELAQLARGRLREKIPSLEQALAGQFQAHQRFLVAQQLVHIDFLEGLIERVSAEIAERVRPFEEAVALLDTIPGVGRRIAEIFVAEVGVELRRFPTAAHLAAWAGLAPGNNESAGKRRPATTRKGSPWLQAALVEAAQAAGRTKSTYVGAQYRRLLPRKGKKRAAVAVAHTLLVMAYHILTRHEPYHDLGANYFDERDRQAVERRLVHRLEALGYTVSLQPPGSAA

SEQ ID NO: 159792 - protein, 357 aa, unidentified
MVMIAFDSHKHYTLASVQTKAGKIVEETRIPHVRGNIRNFLERWEKGSPVAVESIGNWYWIIGEIEEAQMQPRLVHARKAKLLMGSYKKTDKLDARGLNRLQQTGTLPTVWIPPQELRDQRELPRTRMVFAAQRTRLKNRIHSVIDKYGLQDEFTDLSDLFSKQGRVRLNGCICELPEQTGYTLEKLLHHLGFVEEQIQQVEKRMQEVTKTSEELQLITTLPSVGFILGVVIVQEVGEVHRFPSPDRLAAYSGTVPRVHASGGKAHYGRLRPDTNHYLKWAYCEAGNVVALHQKHHPQRHVSQLYQRIRQRRGHGTAVGAVARHLAEATYWMLMKKEPYLERGMSRMVHGSLSACVS

SEQ ID NO: 159793 - protein, 281 aa, unidentified
MEHTTIAVDLAKSVFQVAVSHRAGHVDEERRLSRDRFLAFFAQRPPATVVLEACGSAHYWARQLQPFGHTVRLLPPHDVRPYVRRNKTDRTDAKGLLEANRNEEIHPVPVKSMAHQAIVSLHCLRSTWLATRTARLNTIRGLLREFGVFIPVGAHHVVPRVRALLGEPATVPLLLHTTLQAACDEIDVLEANMRTVERQLAALASDMADVTLLQTVPGVGLITATALVALVTDIRRFPSGRHFASFLGLTPPGETKIPSSARFAGLVRRSALESTSTSAWA

SEQ ID NO: 159794 - protein, 464 aa, unidentified
MIHSVGIDLHQGRHRARCLDEKAQPCDSFSFETTPEGLTTLEEHIFRDGANPIIVLEAAGLPWLMVAVYLRSRHSGCRLVKAKTQKVAALRRYLRGPAKSDRLDALTLAKMPFIDPEHLDEIYLPPAEIHALQRLTRQRKQLEGDITRRKVRVGSIIDGYLPGVRNAFTDTWSPQARAFLSSRLNPLAVVRDGEAALYAFLRPAVPRSKGLKAEIHLVFMVCQRVAKVCEHSLLAGTINEEFFMNLQDEIAREIRLMEMEEAESASLTRHIAELYRKLHPSDNLGSIPGVGEHTAPVFLAMVGYPLRFPNQSAFANWEGVVPGARQSSNMEAKGLRMTKAGPAIIRMALYQAGDIGRRYDPQLAAVYYREMVYHGKNHKQAMGAVMSHLGARVLKVMKDNRPYELRDIDGHPVSKKAARELILNKYFVPEDIRRERRRRNSKGAKNREAATYSTNEAAKAPQPV

SEQ ID NO: 159795 - protein, 379 aa, unidentified
MDSMTSFDRGVVVGVDAHTDTHDAAVLDDCGRLLGTGTFTAGPAGYRQLLGWARRFGRISALGVESTGSYAAGLTRYLRTEGLEVREVNQPHPHTRRRRGKSDPIDAELAARHVLADNRVVIAKDTTGVVESIRQLRVARDGAVKARSAALHALDGVVVSAPDELREQLMIRKTSRGRATLCARFRPDPTRLHEPAVAAKAALRSLARRIIDLDAEIALLDRQLKHLVASAAPETTSRIAVATGHAGTLLVTAGQNIERLRSEASFAALCGASPIPVSTGRTDRHRLNYGGNRDANRALHMIAVCRLRYCERTRAYAERRTAEGKTKTEIIRCLKRYIAREIYHSLIADLHPQPSSPPLPTPIVSIACGAGPIGQTTRT

SEQ ID NO: 159796 - protein, 337 aa, unidentified
MEKYKIFVGMDISKSWIDVVILKEGQSMHRQFNNSKKDYKVMLSWLKNFAGINDMLLCMEHTGVYALPLWNYLAQHKVSYVVETGLQIKSSMGIKRGKSDIIDAGVIARYIKLHHTETRLHKVPDKIISRLKILYSYRARLLKVKHQLFVANKEITGFVDKSMRKEMSSETNGLVTIIEHRIDKIERIIRNVIAGDAETKRIYELIESVPGIGLVTAVYLIIITQNFTILNNSRKLANYAGVAPHEHSSGSSIKGKNQVSHLADKKLKALLSNGVKTNLQYDTETKEYAARKTAEKKHEGIIINNLKNKLLHRVCAVVQRGTKYVDIKKYAAKKKVA

SEQ ID NO: 159797 - protein, 322 aa, unidentified
MLSMNKSTLFFGIDISKDSFDVYSDKMGYSSYSNTKDGFKAFLKVLNRTSHCVMEATGCYHHKLAMFLHEKGIIVSVVNPLVIKRFIQMKLRRLKTDKSDAFMIYSYASEQSVEEWQPEKEYIERGKELLSLIQTYLRQATALKNKLHASESKGQTKGVIISSMKRQLRNLKRERQFLEQELESLIKTHEAKLITRLTSIPGIGKKTAVLMMVSTSNFNSFNSYKQVSSYLGLAPNERSSGSSIRGKSRISKTGDGLLRNHLFMCSFTASVHNPQCKALFDRIVAKGKSKKLALIAVCNKLIKQAFAIAKSGLPYDSNYAVK

SEQ ID NO: 159798 - protein, 337 aa, unidentified
MERQYVGIDLHRRTSTIYRMSPEGEMLGCVKIPSQPLELAEAMAEAGEAPEVVLESTYGWYWAADLLKELGANVHLAHPLGNNWGNRRVKNDERDAKDLAAMLRLGRLAEGWIAPPEVRELREVVRYRFHLVSHRSSCKAQIHGVMAKNGVLPARKEMWGPGGTAQLDALELPTGYAIRIDSLRDLIDIYDGEVAVIDTYIHGQLKDHPGYRTIQQIDGVGKVIGAIFVAEIGDISRFDSPKKLCCWAGLTPKHRESDDKVHRGPITKQGCPLVRWAAIEAVSKMRGGPKLRADYHQIAERRGKFKARVAVARKLLTLVYYGLRDNEIRCLEAPEAA

SEQ ID NO: 159799 - protein, 387 aa, unidentified
MKKDNKQKQESKGPSVVRKQESKGPSVVAMGMAPVDGKGEVLVAGVDLGDKDSHYCVIRGSTGEVVEEGRMRTREEEIRAWVGERARMRVAMEVGTHSGWISRLLEGLGQEVLVANARKVRLIYANPRKNDRVDAQTLARLARLDPTLLAPIRHRSAEAQSHLSILRARDGVVAARTQLICTVRSLVKGTGQRLPRCSAESFSKVQEIPSSVSEAIRPLLTQIRSLTRTIQRYDKMVDYLARTQYPVTQHLQQISGVGPLTSLAYILTLWDADRFTKSRQVGPFLGLTARQDQSSDSNPQLGITKAGDEYLRRLLVSSAHYILGPLNKQDSDLRRWGLRLCQRGGKNAKKRAVVAVARKLAVLLHHLWVTGEVYEPLRQPTVQTSVA

SEQ ID NO: 159800 - protein, 349 aa, unidentified
MYYVGVDYHKRYSVATVLDSAGEMLARRRLDNRLEAFRELLGSYDKAEVEAVVEATRSWGIPVDMLEQLASRVILANPGEVKLIARGRIKTDKVDSLALAKLLRVGWVPEAYLRPRANREHQLILRVRCFLVQLRTRVKNRIHDLIDRQDEPIRETAVGFSDLFGKKGMVWLKGLDLGHPCGTLLCRLLAAYDALDAQVRQSDRLVAELFAADEDCQRLVKTPGIGTFFAVLIKTEVGTIERFASSVRFCSYAGVVPSTESSGGKVWHGRIIKQSNRWLRWALVEAVIPATRADAGLRAHYEYYRRTKGSKVAKVVTARRLGCIVYRVLKEKQPFYERPVPSRGYRQAG

SEQ ID NO: 159801 - protein, 359 aa, unidentified
MIVIGIDPHMKTHTAVAIEAATGVVLEEVTVTTDEAGHDRLLSWARKLSSDRYFAVEDCRHVSGRLERHLLPRGETVVRVPPKMMAGARASARTYGKSDPIDAACVARAALREPSLPHATLTGPEHDVRLLVDHRDDLVEERQRIQKRLRWNCHDLEVGLELPPRVLDRYVWLDRLQAVLHSLPESMRRRIALEQVDRCRDLTRSIRDLEREIRDRMRVLAPELMEIAGCSALSAAHLVGQTAGASRFRSDAAFAMHVGTAPLPVSSGKSDRHRLNRTGNRSLNSTIHMIAVTQARMHPPAIEFMERKRGEGMSKREALRCLKRHISRTLYKTMLRDEHAHAATVVQADFTGGIVAVAV

SEQ ID NO: 159802 - protein, 338 aa, unidentified
MATNISMLAIDLSKGSFQVCAVGPDGTVLYNRALSRTRFAALLADQPACVVAMEACATSHHWGRVAQKSGHEVRLVPAVYVKSFVKRQKNDRADAEAIAEAALRPTMRFVAVKSAETQGRAVAFRTHQCLVRQRAQLINAVRGHLAEFGVIAPKGPANLKVLEESLADEASDLPVAVRAMVAIYLDQIVRLTDVIERLADELETASRTDTDLRRLCTIPGSGPVTAGAVAAFAPDLDTFDSGRNFAAWLGLVPRQRSTGGKAKLGSVSKMGQTDIRRLLIVGAMSVIRWVVRKGGSANRWLTSLVARKPKMVAAVALANKMARMIWAVTTRQEDYRMA

SEQ ID NO: 159803 - protein, 372 aa, unidentified
MNYNTVYVGMDVHKESFSLCTYTIDADKCSNHQKTEASYKNVLKYLDHLRTIYGDDAKFICGYEAGCLGYALYHQLTEHHVDCKILAPTTMLEQRSRKRVKTDKRDSEIIARCLAQRNYSPVHIPTQKDEETKEYLRMRDDHKLALKKVKQQILAFCLRHDYRYDGKNYWTATHLKWLKSLNVQGMYKEILDEYLLTYDSLINKLERFDKRIEELASDDTYKEQVKKLSCFIGIKTHTALSVIVEVGDFNRFPSAEKYASYLGLVPGEDSSGDKVGRLGITKAGNRHVRLLLTEAAQCYGRGQIGFKSQALKARQAGNTPQVIAYADKANERLRRRFYKMVLGKGKKHNVATTAIARELACFIWGMMTDNIA

SEQ ID NO: 159804 - protein, 410 aa, unidentified
MELMHRRCCGLDVHKETVVACLRLVADGKVTTEVRTFQTTTADLLRLSAWLAANECTHVAMEATGVYWKPVWHILDDGEFALLLANAAHVKNVPGRKTDVNDATWLAELLAHGLLRASFVPDTQTQEMRTLLRTRKQLVREQSSHVLRVQKTLEDANIKLDSVLSDVMGKSGRAMIEALIAGETNPTKLASLADRRVKGSQDELREALRGRVTKHHRFLLRLHLTQIDALAAAMATIDAQVEESLEPFRTAVELITSIPGIKNLSAHVIVSEIGIDMSRFPSAAHLISWACLCPRNDESAGKRRSNRVRKGAVWLKTTLVQCAWAAVKKKDSYLQAQFFRIRARRGQKKAILAVAASMLTAIYHMLKDGTLYQDLGRNYLDRRSTDQQKKRLVKRLADLGYAVALTPLAA

SEQ ID NO: 159805 - protein, 415 aa, unidentified
MSDQKRWYAGVDWASESHHVRLIDEAGRDIGEKIFKHAGEGLAEMVAWLLATSGAAEPGQIHIAIEVPHGPVVETLIERGFAVYVLNPKQMDRFRDRYSMAGAKDDSRDALVMASALRTDPHCFRRLAATDPIIVELREWSRITEDLGSERTALTNRLRQQLWRYFPAFLDLEADLAAPWLIELWQAVPTPDKAKRIRQASIAAILKRHRIRRLDAAQVLDILRQRPLAVTAGTTEAARAHIVTLVARLQLINRQLAHAHHQLDALTAKLGASQDTEPGQIKQRDADILASLPGIGRIVLATLLAEATDALQRRDYPALRTLTGVAPVTKQSGRSHFVVRRHACHRRLANAVYHWARTATQHDSTSRAKYAALRARGHSHGRALRSVADRLLNVACSMLRSGTTFKPSLATQNAP

SEQ ID NO: 159806 - protein, 319 aa, unidentified
MSSELVYVGLDVAKATLDVALRPSGECWQAANDDAGVADLVARLRALAPTLIVCEATGGFERPAVAACAAVGLPIVVANPRQVRDFARSTGQLAKTDTLDAGILALFAERVRPTPRPLPSAAAQLLDALLTRRRQLLEMLVAEKNRLGFAPRPLHRGIRQHIQWLERQLDDVTAELAALIEASPVWQAKSNLLQSVPGIGPIVSAVLLGELPELGALSHKQIATLAGVAPLARDSGTLRGKRMVWGGRGGVRTALYLAALCGRRWNPQLRVFYERLRAAGKPKKVALIACARKLLTIVNAMVRDHARWASPTLRVQHSC

SEQ ID NO: 159807 - protein, 426 aa, unidentified
MAYRIAGIDVHKKMVAVAIADVEVVGTWRFERRQIGTSPTQLRTLAQWLVACEVDEVVMESTAQYWRPVWEALERDWQPQRRRGRSDPRAGALHLAQAQSNEGHRGRKRDFPDAERLVKRLVAQELTLSFVPEVTQRLWRTVARRKYQSTCNRVQLQNRLECLLEEMHIKLSSLVADLIGPSARRMLRAIASGEMDPDAVVALGSRRLHATPDQLRDALGACTNLHPVYRRLLTLTLDELDVIERHLQQLDEELAQLLRGHQDAVERLAAVPGLGVDSAQQIITEVGPTAATFPTAKRLASWVGACPGHDESAGINHSHRAPNGNRQMRRLLNQAANAAVKAKGSIFELVYRRLVVRLGHAQAIGAIAHRLCRLVWKVLHDGVTYEERGPAVTKHRAQRRAAKMIRELRSLGYRVEPALPPASALA

SEQ ID NO: 159808 - protein, 455 aa, unidentified
MAHNVARKLISSEVVSISPGDQSLSAYNYKSQEVFLLSFKIIKNNCCGLDIHKTWIYACIGITDANQRTEYKQARFSSFTKGLNELCEWLAKYNCTDICMESTGKYWIPVFNILEKHNLWVTLSHPKYTKPMKGNKTDRKDAKWICDLYMCGMVKPSFIPPADIRELRDLVRYRFKITCMITGEKNRAHNCLTVSNLKLDDVFTDIFGKSSRSITEQILQHPGETFDVTPFIDNRCKTPIEEIQAAVDGAISDEQAVKLRQCLDHIDELEKHKTEIEREIFRLSEKYDAVLNLIRTVPGFDKNPMTAIQVLSEIGGDMSVFPTAKHLVSWAGCCPRNDQSNQKIKSTRISRAGSYFKPVLVQVANALIKSKKHPEFTTRYRRIKARRGHKKAIIAICRMILTAIWHILSDLKPYTSDGFLESRPVNESKILTTSQALNLLKQRGYTIKDDPVIAS

SEQ ID NO: 159809 - protein, 421 aa, unidentified
MKSTVARKLRQVPQGYLVIGVDPHKKKHAAVAITQDFTTHVKFKFDNSREGLEMMLQRVRMEMVKTGCHGVSFAIETGGHYWRNLAYFLDERGIPFHFINQFTLKRRREGKDLNRRKNDYRDSEVAAQLLCTGEFTDSKLPQGVYAELRAAHNAYRRLVKEKTRITNLVKGLLDALFPEFTQVFKDPFGLTALSVLSTCLIPGVISGMTEEEFVAIIKARHQGRLMRNKLRALHCAARTSIGIEASAWSVSLEISFLVEKFNLIKRHIRIIEGALVRLVDETEEGKYLLSIRGLNYIAVAGLLAELGSFKQYRSAKQLIKMAGSNPTESESAGKRGARTPMSKQGRPVLRYCAWTSVIPMLRLNSDFRAWAKKMRERPVHANPLNGREVVGAGLNRLLRLSFALVKKQTFYRVAEPARIAS

SEQ ID NO: 159810 - protein, 346 aa, unidentified
MEQIIRIGMDTSKHIFQLHGVDAAEQPVLRKRLGRKQMVAFFAKLPPSAIGMEACGAAHYWAREFGKLGHEVRLIAPQHVKPYVKRNKNDGRDAEGLCEAMSRPTMRFVPVKTAEQQAALMLAGQREQMVARRTQLGNMIRGYAAEFGVTEAKGLDKIEPLLARVAQDECVPALARELFAVQGREYVQLQVELKAIEIKLRAWHRANADSRRLAEIPGVGAIGATGLVMKTPDPRAFPSGRHFAAWIGLTPKDHSTAGRTRLGKITRAGDERLRSVLVAGATAVIKQAKQGRGHPSPWLLALLKRKPAKLAAVALANKIARIAWKLMVTGESYDGARMLGASASAA

SEQ ID NO: 159811 - protein, 382 aa, unidentified
MKQAPPTVSAKLTAQSLISVGLKGGAMAPIYIGVDFHARQQTICYLKTETGELVISELKHQNKEQVRAFYQQFQEPVIVGLEASGYSPWFEALLEQLGCEVWLGHATEIRRRARWRQKNDRRDAELIWDLMVHDEFPRLHQPALSSREVLRMLRYRQKLIKLRTMTKNSLQAIALQAGLAKGPQLFTAAGQEQFKAAEMSPVLQWQRDHWFELLKPFNQQLLETVVWFKAQSKDDVQIQRLLTHPGIGLLTALCILHTLQPVSRFRNARKVAAYVGFDPVERSSAERQHFLGISKAGSRMLRYLLVEAVQTAVRHDEDLKRFYKRLAERRGRPKAKVAAARKLLIRAYIMLRDEIDYAEFRRRAVAARLARHGQGPTKCPRY

SEQ ID NO: 159812 - protein, 414 aa, unidentified
MRIIYSNVAGLDVHKKTVVAAVIVQTAAGSWQQEKRTFGTMTTDLLALSDWLMGQGVTHVAMESTGEYWKPIFNILEDGFEVILVNAQYLSRVPGRKTDQSDAEWIAELMQCGLLKASFIPPVGQRELRELTRFRSTFVRERATLVNRVQKVLEGANIKLGSVASDVMGVSGRLMLAAIIEGQASPEEMAELAKGRLREKREALTHALTGRVKPHHRFVLTELLCQIDNLDDTIARFDEEIVGYCRPFEAAVTLLDTIPGVSREVAEIIVSEIGVDMDRFPTADHLAAWAGVAPGNNESGGKRRSGRTRKGNKPLGAALNQAAHAAARTKNTYLAAQYGRLAARRGKKKAIMAVSHSILVIAYHLIQRNEAYHDLGANYFDQRRPEATAKRLLKRLEQLGYQISIQSASLATAA

SEQ ID NO: 159813 - protein, 343 aa, unidentified
MTYYAGIDVSLETSSICVVDQAGSLVREFKVVSDPEALAAALIGLGLVFGRVGLEAGPMSQWLHGGLAAAGLPVVLLETRQLRAATRTMPIKTDRTDARAIAHMVRTGWFRAVHVKSPLSQELRALLTARKLLVTKLHDVDNGIRGLLRGFGLKVGKVGERGFPARVRELVGGRRSLGVVIEPLLQVRDVLLAEREGLHRVVMSATRHDETCRRLMTVPGVGPVTALTFCSAIDDPMRFARSRAVGAHFGLTPRRYQSGETDRTGHISKQGDGLARQALYEAANVLLTRTSRWSSLKAWGIGIARRAGMRRAKVAVARKLAVVLHRMWCDGTEFRWGKEAAAA

SEQ ID NO: 159814 - protein, 398 aa, unidentified
MSRIWAGIDGGKGHHHGLALDADGKTLLSRRVANDEPELLKLIGDVLDLAGGRQVTWAIDMSGGEPALLLALLLSHGQEVLYLPGRLVNRASDGYRGEGKTDARDAYVIADQARMRRDLRPIRPGDEAAVELKLLTGRRSDLVEDRTRVVNRLRGTLLSMFPALERAVDVTNTGPLRLLTGYQTPAAIRRTGTARLTKWLANRKVRNARTLAEAAVEAAERQHTAIPGEKTIAKLVHTLAEEVMALNEQIREIDKLIEGRFREHELADIVLSVPGIGATLGAEFLAAVGGSLDDFSSPDALAAFAGVAPAPRDSGKVSGNLHRPIVYHRRLQRVFYTSALVSIQFDPNSRKFYDRKRAEGKKHVQAVLALARRRVNVIWALIRDRRSYEVAPPLTAVA

SEQ ID NO: 159815 - protein, 344 aa, unidentified
MDVSGLGVDLGKDVCSVVGLDASGTVVMRRKVRRETLIALAEKLPPCVVGMEACCGAHHLGRVFAAHGHDVRLMSPEYVRPYIKAQKNDDRDAEGIAEAATRPTMRFVELKSQDQLDMQTLHRSRDRLVGERTALINQLRAILLERGMVAPQGKRKLEQFLAVLMDEQGGAGLSSRMIVLVADARAQWAELDRRISAFDAELVRWVKENEEARRLTTIPGVGPIVASALVAAVGRAESFDRGRDLAAWLGLVPRQFTTGGKPKLLGISKRGNKYLRRQLIHGARAALPYVAERDTPLGRWVKGLMSRTHRNVVVVALANKLARIAWAVLQRGRPFDAKAVSVAA

SEQ ID NO: 159816 - protein, 397 aa, unidentified
MGEGMVAGIDWASEVHVACVLDGHGAVASRFSFTHDGPGIAAMAGRLRAADVAGVAIERGDGPVVEALMEAGLAVFVVPSRQIKGLRSRYGSAGNKDDRFDAYVLADTLRSDGHRWKPLRPDTDPTRALRAACRSRKDLVETRVQVLGQLRANLELAFPGAIGLFTKLYSTISLAFLQRFPTAAKAAWLSPKRLASWLRSMGYTGGVSARILHDRLAAAAPGLAGAEGEARGQITLALVTVIGTLNTQIAALDAEIGRLFAAHPDQHIFASLPRSGTIRAANLLAEIGDCRQRFPTDDALAALAGACPSTRQSGKRTQAVFRWSCSKKLRAAVMDFANGSRMADPWAAGIYAAATGRGCRHSHAIRILARAWLRIIWRCWQDGTAFDPALHRSRHLT

SEQ ID NO: 159817 - protein, 339 aa, unidentified
MGLEDSKTTWKIAVRCQKMVIHRTSMEARYEVLIQYLRNKFPECTIHLIYEAGFKGFNLYDRLTEDGIHCVVIPPHMVTEPKVNKVKTDKRDANRLAFILENDDFKDPCHVPDKERREDRQVTRTLIAIQKDIIRTRNRIRKLLDFHGIEVPFPDRWGRDEFRALKKLSLSEPLRISLDVLLSQLEQLWVHQTSLRTALRALCKKERYRKAFDIARSLPGIGWYTAIRFVLELGEDLSRFTSGKKIASFVGVACREYSSGETEHKGGITGMGSGFIRTTLIENSWAAIRKDPVLLAKFTRVWRASGNRKKAIVAVARVLIVRLRACLLSGTPYACGVVK

SEQ ID NO: 159818 - protein, 453 aa, unidentified
MEQPQEIEDEEYERTWERVAAIDMAKGSGVVCTRVPDEDRPGRRRSHVWTVTATRQAVIELADHLRGLQIQIVTLESTSDYWRIWWVVLEAAGLKVQLVNARHVKNVPGRAKTDKKDAVWLAKLTERGLLQPSFVPPPEIRRLREFTRLRTDLVHERTRYWARLEKLLERALIKISVVLSKLTTDTARAMIEALIAGQRNPKILAELAIGKARSKRAELAESLDGDWQPHHSELARILLDQIDALTKQIDTLTDRVSELIDQVPAAWGVDGDGATGPQAGAGPDAVILPAVARLDEITGCGIIAAQAIIAEIGLDMTVFGTSGRLVSWARRSPQTRQSGRKTTTGRAGKGNPYLNGMLGEIAASASRTDTFLGERYRRIARRRGKRKALAAIARSILVIIFHLLADRTARFHDLGPGWYDTYIDKQRKVRNLIRQLEALGYPIPPAAAEAAAA

SEQ ID NO: 159819 - protein, 404 aa, unidentified
MRCITMFYCGIDIAKYKHEASVIDMSGKALSNSITFANDRQGCEKVLAIFEKSEITPDNVVIGMEATGHYWLSVYTFFLELGYTVKVINPIQSEAFRKMYIRQTKNDSKDSYIIAQIMRFGEYSATTLSEDNIIALRQLSRYRLALVDACGDCKRRVIALLDQVFPEYDKLFSDTFGKTSSELLLNCPTPEDMLAVSTRKLTNILNKASRGRFGKEKAEELKDAAKNTFGIAFAKDAFSFQIKQLIQQIIFTEKQLSELEEQIANLLHETNQYITTITGIGDVLGAIIVSEIGDINRFERPNQLVAFAGLDVTVKQSGEFSGTKNRISKRGSPYLRRAIWLAAQRAAFCDPILSEYYQSLKARGKHHLTAVGAVARKLCNIIFVILKENRPYLPIPPKKSQNLS

SEQ ID NO: 159820 - protein, 349 aa, unidentified
MTEQRRSYAGECVYVGVDVHKETYTVTCVCHKQIVKPATVQAEPGGLAVSLPRGFPGATLYSVYEAGFSAFVLHRVLTKAGITNMIVNPASIAVAANDKVKTDRRDSKKLAIDLADGRLRGIYVPTEAAELARLLPRTRAQIVEHRATIARQINAKLHQFGLIAPSSRRMISNRYLREMATWTLPPELSVSLTLLAEQWRFATRQLIEMRRLLRDQAKAQEEIEKVYRSVPGIGEVVARTFATELGDMTRFANERALFSYTGLTPSEHSSGTAVRRGSISRQGSSRVRHLLVETAWRAIPRDKALKEIFDRIAATRGKKRAIVAIARRLTGRIRACFRQGTTYAVGTAA

SEQ ID NO: 159821 - protein, 343 aa, unidentified
MEIIGGLDVHRKQITFDYIEIDTGEVKTGQIRPATRENLRNWLSRFEGEEASFALEATTGWRFVVEELQRAGCEPHLAEPADTRTMRGKKKRAKTDRLDARHLRDLLHQGRLPQSWIPPSHIQDLRLLVRMRKNLVDERTAFLQRIHAQLFHHGPPQERNLLSSDRRGQFEEMELPGAARKSIELSLKMIDHINEELGPIEEEIRSFARRQAGCKALMGHYGIGELTSVAILAELGDTRRFRSSRHAVRYAGLDVTVSQSDDKRAAGKLSRQGPPTLRWALFEAAQCAWRKGSPDHDYYIESKERLGGNRACLSIARKLVRKAHHTLRELGEEALLEPVGTVE

SEQ ID NO: 159822 - protein, 355 aa, unidentified
MNEAEYIGMDVHQATISVAVRDSRGNLVMEAILETKAETILQFIRGLRGSLYVTFEEGTWAAWLHDLLQPHVTRVLVCDPRKNALLKVGNKNDRVDARKLSELLYLNKLSSVYHGEPGIRTLKELARSYIAMTRDLTRVMSRLKAIYRSWAIPCAGQQVYAPRYRAEWLAKISEAGVRRRAELYYQQFDALAALRQQARRELLVEARKHPAMRLLRQIPSIGPIRAALLIALMQTPNRFRTKRQFWAYCGLALRTYTSGEYRFVSGQLKRSKKVLAVRGLNINHNHDLKNIFKGAATRAASTVGPFQDFYQACVARGVKPHLARLTLARKIAATTLLVWKKGVRFDAEHLKQQAA

SEQ ID NO: 159823 - protein, 372 aa, unidentified
MEHHTEAFVGIDTSKLRNAVAIADSGRGGEVRYLGEFPATEAAIQKLVAKLAAKYRHLTFCYEAGPTGYGLYRLLKSLSHECLVVAPSLIPKKAADRVKTNRRDAVSLAKLLRAGELTAVWVPDERHEAMRDLSRARHAVKKDLQGKRQQISSLMLRLGRIYPGKTTWGPAHMRWLTSQKLEHREQRIAFEELLEGIRQESERVERLEKAIREVVPEWSLAEVVAALQAMRGIDLIAAVGVLAEIGDLSRFQNPRELMGYLGLVPTENSTGDKVKRGGITKAGNGRARRILVEAAWSYRYPPRVSRDKQPKVEAAPRRAREIAWKAQTRLCGRFRSLERKGKRRTVIVTAIARELSAFIWAINRELMPLRQA

SEQ ID NO: 159824 - protein, 347 aa, unidentified
MKQVITIGLDLAKHVFQVPGADAEGSPVFNRKLRRSEVLRFFEKLPPCLVGMEACGSAHYWAREIAALGHEVRLIPPAYVKPFVKRGKTDAADAEAISEAVTRKTMRFVPIKTAEQQAAAMVLKTRALLVRQRTQAVNALRAHLAELGIIATVGLAKVEALVAIIRDETDARLPAAARFALMAIADEIEASADQIERLERAIVVEAKRDEDMRRLTTIPGVGAITAATIKALVPDPGGFKSARHFAAWLGLTPRPHSSGGKERLGRISKMGNPELRSILVVGATAVLRVVRNDARARPWLKALLARRPFKVAAVAQANKTARIIWALLNKGGIYRRPDPLAVTAVTQ

SEQ ID NO: 159825 - protein, 364 aa, unidentified
MTTSAAAVIGGVDTHKHTHYAAAIDAHGRLLGHQEFPANDRGYAALLGWLRGHGTVQTIGVESTGSFGATLTRSLTKAGVPVVEVNRPNRSARRIDGKSDRLDAEQIARSVLGNTATATPKTKNGGVEVIRTLRVTRASAVKSRTQAFNTLFGVMIGAPSPLRDELVVLSKRTLVNRCLRLRPETEDLLELTDDPDRLLLAGVKTALRDLARRWKTLDAEIKALNCQIEALVTLAAPDLLDLHGVGAELAGQFLMTAGDNAERIRNEAAFAKLCGVAPQPASSGRTTGRHRLSRSGDRAANSALYIVTIVRMRHHAATRAYVERRTAEGLSKREIIRCLKRYISREIYSALTRQPHTQPRPTTA

SEQ ID NO: 159826 - protein, 372 aa, unidentified
MLYAGVDVSKDKVSMAVLTSGGTKLTSRDFDITTEGLKLLELTLKHLKDEISMFIEQTGTYSIPVIFYLMKRVENLRIYLVDGLNFSRFIKLEGRKKQDKTDAVSLAEYGRRGLKARIITDKDIKAYELKVLISEREHLLKVKNQIENRLRQLIETIFPDSKTLSKPVFWSEVRKGWGLIDWKRLTDKPEVLSTILRERKIWLEIIHSLEETEKEINTFLRLNYPEDVKILKSFGFSDTTTAYFISVYVDVERFKDVKAFKSYMGLGLRIYQSGKKEKNVVNSYTNKYIRKLLYMYVIQAIREKSNHRKVKDYYLRQVEKSGSKKKAIIKTAGKIIEWVYYCLKHREPFNWEVKHETQQEDISQAYSGQAED

SEQ ID NO: 159827 - protein, 376 aa, unidentified
MIKTDVQYPTVHLAIELSRSVWLVAARLPGVEKPSLHRIGGGDTAALLALAETLRARAAAKLGAPVRVACCFEAGRDGFWLHRLLTAEGLAAHVLEPTSILVSRRARRAKTDRLDALGMLRVLAAYLGGDRQVCSMVRVPTPEEEDAKRPHREREDLVRERVRLENRIAALLATQGVRERPSLRNWERDLAALRTGDGRPLPPHLRAELDRLRRRLVLTLELIRELEAERDAALAAEPRDAVGRKIAALCRIRGVGPNFAAVLTREVFYRAFANRRQLAGYVGLTPVPHQSGEADRDRRISRAGNPRARTTPIQLAWLWLRYQPDSAPARWFRDRVGALRGRTRRIAIVAMARKLLIVLWRYAETGLVPEGVEVAA

SEQ ID NO: 159828 - protein, 315 aa, unidentified
MTKQLLPVNAGVDVSKHKLDLYLLERDLALSVPNDEQSIASLLKRLARYHLERIVVEATGRLEHAFVSAAIAKGLPVVVVPPLKVRRFAEAAGQLAKTDAIDARLIARFAAALKPTTRPVTDANSKLIKDLVVRRRQLTSLRTTEKNRRGVMPEALKPSIDRIIASLDREIASLEQLIQDAVEQHAAWRHKRDLLTSMPGIGPSVASTLIGDLPELGSLSRRQIAALTGVAPFNRDSGTFRGKRRIRGGRAHSRTALFLSAMVAIRYNPDIKRFYERLLQTGKHKKVALTACIRKIVTALNAMLRDDKPWHSSFA

SEQ ID NO: 159829 - protein, 346 aa, unidentified
MKITTIGIDLAKIVFQIHGVDERGKVAVRKQLKRAELSSYFANLEPCLIGMEACGSAHHWARKLEGYGHTIKLMAPQFVKPYVKTNKNDMADAEAICEAVSRPNMRFVAMKTVEQQAILSVHRARQGFVRARTAQANQIRGLLSEFGIVIPQGIGAIAKRVPEILEDGENGLPGTMRNLIERLTENLKEMDRQAKELEAQIQIWHREHAASRKLAEIPGLGPITASAIVATVGDAREFKNGRQLAAWMGLVPKQNSSGGKQNLLGISKRGDTYLRTLMIHGARAVIRFAEHKAEPESWLRQVMARRNKNVAAVALANKNARIVWALLAHDRMFRPDYTPAAVVAGM

SEQ ID NO: 159830 - protein, 410 aa, unidentified
MEVLHPHCAGLDVHKDTVMACVRPMAGGTVKREVTTFKTTAKDPMALSEWLAAEGCTHIAMEAAGIYWKPVWHVLSDGDFELVLANAAHVKTVPGRKTDVNDATWLADLMAHGLIRGSFVADEQTQEMRDFLRTRKQPVRERSSHIQRLQKTLEDANIKLDSAVSDIMGLSGRVMVEALIAGETDPAALACLAHRRIKAPRDELCEALRGRVTKHHRFMLQLHLQQIDALDAAIARIDQEVDANVEPFRQAVNILSSIPGISELSAQVILAEIGTDMSRFPTDGHLKSWAGLCPRNDESAGKRRSNRMRKGAPRLKTTLIQCAWAAARTKGSHLQAQFHRLRSRRGAKKAIGAVAASILAAAYHMLKDGTCYDDLGHDYFDQRAKAVQTNRLIVRLQNLGYTVEITPVAA

SEQ ID NO: 159831 - protein, 393 aa, unidentified
MIYVGIDVAKDKHDCFIVNSDGEVLYDVFTIQNDMDGFEDLLFKIKTASKDLSKVKVGLEATGHYSCNILGFLHNKGLTTIVINPLYTSLSRKSVSLRKTKTDKVDARTIASMIMSDVSLKPYSDTVYHNEDLKSLSRYRFDKVSDRSKLKQSVSRLVNILFPELEKLVSTLHAKAVYALLSEFPGAHQVASANLKHLTALLSTASKGHFGREKANEIREAARRSISSYLPAKSLELRHTIKLIHELNAEIAEIETEIKKIMDSIDSPTLTVPGISYALGSVIVSEVGDFSRFDNPDKLLAFAGCSPSTYQSGQIYSTHAKMEKRGSKYLRWALLNAAKYVCKWEPTFAVYLRKKLAEGKHYNVAVSHAAKKLVRLLYHLETTGEKYIPQTLS

SEQ ID NO: 159832 - protein, 402 aa, unidentified
MTNPTPHAGLVGGIDSHTDTIHVALIDGLGRDVADHEFATTGTGYRAAVAWLTGHGPVAVVGVEGTSSYGRGVTTALAGAGILVVEVNRTRPAERRRAGKSDRLDAYRAARSVLSGEATTPTKDGSIESLRALMVARRSALKAQQAAWRQIGALLINAPARIRDTHRDLPPARLLATLAGCRPAQVADADHADVLYSLRTLARRHRHLTTEIADLTARIGARAAAANPALLAIKGVGPVIGAQLLLSAGNNPERLRSGPSFAALCGTAPVPVSSGRTDRHRLSRGGDRAANSALHLIVNNRMSNDARTRAYRDTHLARNWTKKDVYRSLKRAVAREIYQALIGRSTVPDYSDLRPARHAKNLTLAAAATDLHVWPTAISQIERGKRRDDQLAQAYREWLNAA

SEQ ID NO: 159833 - protein, 463 aa, unidentified
MWYVGLDWADTHHDVVILDEAGRRVGSQRFVHSPEGLNELKQLMLRIAGSPEQPACIVETNHGLLIAFLLEAGFPVYPVNPKTANQLRKAAGAKTDQIDAYLLAKTGRFDLAELRRLEPDRAIVAELKTLTRDQDTLIQTQTRLVNQLTACLKEYYPAALHLFAKLQQHSALVFLQTYPTPQAAQAASLEEIIATLHTGKHTKSRQVAPKIFEELHRPQLVATAVIVRAKSRLMLALVKQLVVVIQEITSYDKQISTLFLTHKDQQIWRSLPRAGQRLAPRRLSEWGEDRSRYADASSVQSLAGTAPVPFQSGNYAKAHKRFACLKPLRNALHQFAWQSTLHIRPRRLKPPSWLMRLDNTPPEARPRLPAAPLWLLRALRVLSAVQAAFAPTESPKRFPWRLFCRPAPVPAEVLACPTSAAARHRVPDSRCGLLATDHTESRPCRGQWGCGRAWLASARSSWP

SEQ ID NO: 159834 - protein, 377 aa, unidentified
MQALYIGLDVHKASITVALAFGDGGPARIHGSSSSDADRFVVVLGQILKKYGLERSQVRLCYEAGPCGFVLARHLRRLGYAVEVVAPSLIPSKPGERVKTDRRDARKLARLLRSGDLTAVHIPEVADEVIRDMCRARTDAVDDHMRNRQRLGALLLRNGFHYQGKSPWTQAHLRYLRELVLQDPAQKLVLEEYLQGIDRAGERVQRLEQSMQMQLETWSRRPLVKALQGLRGFQLVASMVVASEIGDFSRFKHPRSVMDYLGLVPSEHTTSDRRRQGAITKCGNSHVRWILVEAAHHYRLPPKVSKELSKRQEGLSREVRELSWRAQHRLHRRFMKLTMRGVHYNKVVVAIARELAAFVWELALLVDREQTAKRSVA

SEQ ID NO: 159835 - protein, 387 aa, unidentified
MAGQSLKQGGRVVNNYSEAFVAFDTSKLRNAVAIADGGRVGEIRFLGEIENSGAATAKLVKKLAAKYQRLTFCYEAGPTGYGLYRQIKSLGHECIVVAPSLIPKRPGDRVKTNRRDAISLAKLLRANELTAVWVPDRGHEAMRDLTRARETTMMDLRSKRQQVSAFLLRQGLHYSEGKKTWTKTHMNWLASQKLEYAEQRLVFEEMMLAVRQAQERLERLEQAIRVAVPDWSLAEVVTALLAMRGLDLISAATFLAEIGDLSRFQHPRELMGYLGLVPSEDSTGDKIKRGSITKAGNRRARRMLVECSWSYQHPPRVGQEKQEKVAAAPRAVREIAWKAQCRLHRRYRALVRRGKLKTVAITAVARELAGFIWAVSREITAARAAAQ

SEQ ID NO: 159836 - protein, 397 aa, unidentified
MSQVVGIDIGAYKHVAAVCRSGEAKADKQVFRYAATRPGFNELDLWLERQGPLERVVMESSGHYWWPLASHLYRRGIPVAVVNPLEAKYFAKSRLQRSKSDPADARTLAALGMAEQLRTREPLLGAEVKEAARFCMRLVRDQANVCQRLTRLIEIGFPELKEAFEDPTCDTALAVLRQAPTARAAARRRLGTLADAIRPGGSRRLGETKAHRIQELAKQTIAPPEMDEQMAFEVGLLIQQYDLLAKQIEQAEVRVAGLLDSELALRLQTIPGVGAATAATLIAEIGDIWRFDDFDQLAAYAGTHPKEQSSGRHGEKAQTSWRMAKTGNSYLRSALYRMAVVGIQHNPIINEHYRRKREQGKAPMNAIGHCMAKALAIVWGVWRSGQSFDPNKRGRKP

SEQ ID NO: 159837 - protein, 417 aa, unidentified
MKSIKAEKIKTINEKTLVVALDIGKKVHYGYFRTPKNQDVKSFPFYNTGQSFNKFWEKLCRFKEKHMLDEVVIGFESTGPYAEPIANYLRKKPVKLVQVNPMHTKRIKELTGNSPNKTDKKDPRVIADVISLGHSLTVVVPESAAAQLRRLTHARERAMERRTAMNNQLQDLVFIIFPELGNIIKPSTKTGMYLIKHYPDPERIVSIGIATLFNIVRKISRGKFGIEQVEELYNAAKESIGITEGKESILLEISHLVFNIEAENRYIESLEEQMIVYLDQIPYSHSILSIKGIGNITAAGLIGEVGDFKRFKTISEVMKLAGLDLFEVSSGKHKGKHRISKRGRALIRKLLFFVAINTVKSHGIMHAKYQKMLNNGTPKIKALIAISRNLFRIIFALARDNTKYAENYKIHEFKLAA

SEQ ID NO: 159838 - protein, 340 aa, unidentified
MHTTIIGLDIAKSVFQLHAEDASGKVLWKKRLRREELEPFLRKLPPGLIGMEACGSAHHWGRVISADGHEVRLMHAKYVKAYVKRGKSDVRDAEAICEAVQRPNMRFVPIKSVEQQIDRSLERARDLLVKQRTQLMNATRGLLAEFGVIARVGLRGFKTLSDKVDAGDAAIPKPLLTAVKPLLEQWRGLHASIDELEERLVKRARSDERMCRLMKIPGVGPFTAHALVTAIGDPRRFSTGRDFAAWAGLTPLTDSSAEKTRIGHISRQGDHSLRRLLVLGAANMARHAKAKPSEARAWLLGVIGRRPVKVAMVAQAAKTARIAWTLLRSGENYRGSMVAA

SEQ ID NO: 159839 - protein, 356 aa, unidentified
MQTQVTKKIDFSDKDLYIGLDVHKKSWSVTIVVDGIEHRTFTQPPDPNALFNYLQRMFPGGIYNSAYEAGFCGYGIHRELNSQGIKNIVINAADIPTTQKDKLQKRDPVDSRKIARSLEKGSLHAIHVFDRELEELRTLNRTRFYLMRDLRRSKNRIKSFLQYYGEPIPLEFDNNQWTLKFVSWLKQVKMKTGSGQDAFLNLISSYEYHRGQLLTLSRQIRQRIREYDNELYSLLKSISGIGPLTSSALITELGNINRFNNIDQLSSYVGFIPRIRESGETTHTGGITFRCNTFLRTLLIEASWQAIRMDPAMMQYYHKHLVNNKGHKVIIKVARKLLNRIRYVMKNRQPYITGVA

SEQ ID NO: 159840 - protein, 453 aa, unidentified
MEKSSTDDQLMNLEVLHPNAAGIDIGNAAHYVAVPPDRDTEPVRRFACFTQDVRAIADWLKQCGIVTVAMQSTGVYWLPVYEVLVERGFEVFLVNARHTKNLPGRKSDVQECQWLMKLHTYGLLNNSFRPTEEICVLRTYWRQRDEHVKAASAVIQRMQKVLTEMNVQIANVISDISGVTGMAILDAILKGERDRYQLADLANPRIQASKEEIARSLEGNWRPELLFVLRQQRDLYHEYQKRIGECDEVIQLHLRTLEDKAQPENKPENPKRGKRAGGNAPRFDLRGELYRITGVDLTRIDGIHVMIAQTILSEVGLDMSRWPTEAHFASWLGLCPDNKITGGKIYHRGSRHVENRAATALRMAATSLWRSKTYLGAKFKRLRTKLGAPKAITAMAHHLARLVYRMLKYGQEYVDKGMEYYQQRYQNQQIKWLEKKAKDLGLTITLAPASVAR

SEQ ID NO: 159841 - protein, 408 aa, unidentified
MKRYYIGVDWGDRLHQVYVGDEEGEKVKEVKVQESPEGLAEIGRWLDERRAEGIELWAAIEKPAGRIVDFLLDHGVEVYPVNPKAVDRVRDRHRMSGSKSDAFDAYVLAEFLRSDHAHLRALRPSSEKAQELKLLSRDQRRVGRHKTRLLNQITTTLKEYYVRPLEVFEDLETEIALDFLQQYPTPAHLSALKRKQFNRFATTQHHLSKQRCEELWEKLQKPQLRVPEHVVRAKAQLLEVLIEQLRASIKAVKIYHHKVESFFASSPAAEFAKTLPGGKSGTLVAAIWAELGDAQGRWESSRHLQAEAGAVPVTKASGKSRVVHFRFACNKHLRYTMYWFSFVSLNQSEWAKLYYRGQRDKGHSHPQALRALGAKWLKIIFVMWRDHTPYDENYHLANIARQKMRQAA

SEQ ID NO: 159842 - protein, 369 aa, unidentified
MQKVLYVGLDVHKVSISVTVAEDGREGAISFIGAVPNTPAALSKLSKRLSKDGHRLDFCYEAGFSGYGIYRQLTSLGHGCTVAATSLIPRKPGERIKTDRRDSQKLAILHRSGNLTRVWVPDEGHEAMRDLTRARMDASMHLMRARQQLLAFLLRHGRTYDTGKHWTQRHRSWLAGQTFDQPAHQIVFQDYLEAVWTTQERRDQLVGRISTMAADWTMGPLVEALRGLRGLDLISAATFVAAIGDLARFESARHLMAYLGLVPSEQSSGERIRRGGITKTGNGEARRMLIEAAWSYRYPPRVAKEKAEVIVRLPKAVRDIAWKAQLRLCKRYRTLSAAGKKPTIVVAAIARELCGFVWAIGREVKPVTT

SEQ ID NO: 159843 - protein, 346 aa, unidentified
MNGIHIAVDLAKTVFQIAECSASGKILSRKRLNRTQFQRYLIEPRENATIIMEACGTAHHWGRVAQAAGHRVVLLHPHYVKPYRRRNKTDRNDSDAIFNASRAIDINPVPVKTGLQQQIQQLHCLREMWKRNRNQRINLLRGILREHGFDNAAKTEVFLCQCSAAIDSAELKALAPLIHIVLAEIQHLSEWMATCEQQLNQLVAQDEIIDRIDSVSGIGLLTASAFVAAIGTPERFKNGRTVSAWLGMTPKEFSSGNRRKLGAISLAGNVYVRTLLIHGARSALLAAKRCAARTPEKLTRLQQWAIQLCARIGHNKSVVALANKMVRISWAIWKHARQFDGNYVPA

SEQ ID NO: 159844 - protein, 356 aa, unidentified
MKQVKTLSFAGQDIYCGIDVHKKDWSVCIRDDERELRSFSQPPQPAVLTDFLGRNYPHANFHAVYEAGFCGYWIQQALSHQGIDCIVTHAADVPTSDKDRRQKTDAVDCRKLAKELSEGSLKGIYIPSRQIIEDRSLVRGREQLVQDQTRYKNRILSWLHFFGIIIPEGYKKNTHFSRRFISWLEQLQLNESTKLALQVKLGGLQCIRQQLLLANRNLRKLALSDRYQKQVELLRSIPGIGITNAMIFLTELDNIARFETFDHLCSYAGLKPDIYSSSDTIIVKGITHRCNSLVRESLVESAWKAVAKDPALLMAYKQYKKRMNYNNAIIRITKKLLSRIRYVLLHQTCYVTGVVG

SEQ ID NO: 159845 - protein, 373 aa, unidentified
MSFTSDTILVALELSNSLWLVGTRLAGARSSQMHRVSAGDTVALLRLLDGLLANGREKGTSSTIAVCFEAGRDGFWLHRLLTARDIPTYVVEPTSILVNRRAKRAKTDRLDAEGMLRVLAAYIAGDSQICSMVHVPTPDEEDGKRVHREREYLVQERTRIENRISALLITQGIGSRPSLRSWERDMALLETGDGRKLPQHLASELNRLRRRLVLVRELITELDTERDEHLAATSGDAVTTKVTALSEIYGIGDNFAAVLTREVFYRHFGNRKQVASYVGLAPMPHQSGNVDKDRRIGRAGNARARKTLVQAAWLWLRYQPKSELTSWFHQRVGDLKGRARRIAIVAMARKLLIALWRYTEHGEIPAGAVLRPA

SEQ ID NO: 159846 - protein, 367 aa, unidentified
MSKAETGRLCVGVDLHKTQFTICALNEDGEYLLEKQYPTKEEGYSEFAREMHRFEEQGCSIELAVETTGNARFLKNRMESEFFAVKVVNTNRFKVITMSTKKTDANDAATLAFYLMKDMLPEAHLCSQTSEEIRRLLKTRSVLVQSMVKIKNQIHGMMLGYGIETKAAQLQSKRKRQELINDLEDHNFSAYTAPSLKVMLKILDDLSAEIKGIEKLLEEMVTSNEDVALLMTVPGIGINTATVIAAYTAELERFEGNYKKFASYVGIIPSVHNSNETTHYGRITKHGPQELRTAFVQAALGMIRLTNVSSEWRIIKEYQRRKGDKGSGRAIIALARKITRIVFVMLSKREGFNPTLMRYEQEIQQTA

SEQ ID NO: 159847 - protein, 339 aa, unidentified
MIYYGAADVHSDNTCLGILDESGKKVFSKRVLNYKALILEELSSFQDKLAGIVVESTFNWYWIVDALMEAGYKTHLAHPAAIKQYEGLKHTNDYDDTFHLANLLRLGILSEGYIYPKEQRAVRDLLRKRLMLVKHRTAHILSFQSLYCRQTGFKLSGNDVKRLSERGLEDMSSLELVRQAGQANLQVMRFLSNQIEAIEKMILADMQINPQFQKLLTISGVGRILALTIALETGDVCRFATVRNFSSYCRLVSSQRSSNQKKKGENNRKNGNKYLCWAFIEAANITKRYCPLAQRFYQRKLAKSHKVLAIKALAHKLARAAYFIMRDQVDYDPQKAFGQ

SEQ ID NO: 159848 - protein, 403 aa, unidentified
MNSVGIDISKGRSTVAVMRPFGEVVISPFEVRHTDSELSELARQLKSLDGETRVVMEATGNYHTPVAKLLHDAGLYVSVVNAKLVHGYGNNDLRRVKTDKKDSVKLANYGLDRWLALTRYVPEEDTRLLLKNCYRQYRQYSKVQTVLKNNLISLLDTVFPNVNRLFSSPAREDGSEKWVDFVAEFWHCRCVSEKSEKAFANKYQRWCRKYGYNFNEAKAHTIHAEASGHIGVMPMSETTKLLVEQAVAQLRATSTALAALKHEMQALTSMLPEYPVVMDMFGVGPTLGPQLIAEIGDVRRFYSKKALVAYAGLDAPPNDSGDVTGRHKSMSKIGASSLRRTLFLVMSVYLQTAPLDEPVYQFMDRKRAEGKPYRVYMMASANKFLRIYYATVKAYLESLEHTA

SEQ ID NO: 159849 - protein, 391 aa, unidentified
MSMYFIGIDISKYKHDCCIISAANQKVVSKVIIKNNKAGFNELLTIIHSLANPADIRIGFESTAHYALNLELFLENSLLIFMEVNPVLISEYKKSKTLRRTKTDSVDCESIARWLMTVEYKPHSKGFYHAYSLKSLTRLRDKLIRQRSFYLVKITNVLDHTFPEFKPFFNERLSKTALYLLENYGSAEKMARMNSASYEKLRSVSRGKFSPQQFLRLKELAVNTVGVNNSIFDVELNSLLSLYKSLVKEIDTIKKEINQLIEEVHPHYMSVPGIGPLSAAVIYSEYGDISNFTNPGQMLAFAGIEPGINESGTESHGGKMVKRGSSQLRYTLINCCLPLIRFDMTFATYYAKKRGEGKPHRVAITHVAKKLIRVIYALESQDIDFNAQELR

SEQ ID NO: 159850 - protein, 334 aa, unidentified
MAQITTAGIDLAKKVFALHGIEGSGNVALRRTVRRDQLLGVVASLPPCLIGMEACSGAHEWARQFQKFGHTVKLMAPKFVVPYRKSGKNDGNDAEAICEAVTRPSMRFVPVKSAEQQALLALHRVRKGFIVERTSTINRLRGLMTEFGVVLPLRSVTVRRQAAQAAEALPEIARRSVHDLLEHLRRLDERIDAYDRELEVQARQSEAAQRLMQIRGVGPTTALAIVATIGDAREFKNGRQFAAWIGLVPNQHSTGGKSRLGHISNKGDAYLRALLVQGARSVLHSAKGRADGISRWALLLQERRGYYRTLVAIANKNARIAWALLAKNEELRTA

SEQ ID NO: 159851 - protein, 410 aa, unidentified
MRRMKGKRSASSIVGCAPKCAEPHAETPEGVLPQTFRGGRPVSKPITSFVGLDVHKDSTAIGEAEAGRENPRFIGTVGSDLGQLLKALKSLGKPETMLVVYEAGPCGYGLARQLRSRGYSCEVVAAGKIARRPGERIKTDRRDALTLARLARSGDLVKVMVPDERDEAMRDLSRTREDAVKARLKARQQLKALLLRHGHRYGGKSSWTLAHERYLATVGFAHPAQDIAFAEYRQAVREGHERVERVTQALRTQTEQWRLQPLVAALSSLRGIDFVAAVTLAAEIGDFGRFAHPTELMGFLGLVPSEYSTGDTRRQGDITKTGNSHARRVLVEAAWNYRFPARISRVLQIRQEGQPKAVREIAWRAQLRLAHRYRRLSSRKLHPNKICVAIARELAGFLWDIARQVKVAEA

SEQ ID NO: 159852 - protein, 347 aa, unidentified
MSKRSHPLQSKRSDPLPPTVFGGVDVSAATLAVAILQDGQPLEQREFPNTDSGHKALIACLHKRKARARVSLEATGIDSLNLARALDAADEVEVAVLNPKVVNRFAQTLRRSKTDSADAQVLAEYSRRMDFVAWRTPSRKGLQLRTISRHIDGLTVEHTREQNRLHAALGSAATPGCVVQDLKRSLASLQRRMVRLRREAMALIASDAILAQRFELMISIPGIAEISALQVLGELATLSPEMSVRQWVAHSGLDPVHEDSGTSVHRPSRISRAGSRPLRRALYMPALVAAQCDPHLRAFYELLQSRHKAKLQALIAVARKLLHAIDGIFRSQTPYDGHKLFPALIPG

SEQ ID NO: 159853 - protein, 302 aa, unidentified
MALTHYIAMDTHSYSTEICVKTRANKPGRHWSVATTIPALRQVIDSIRRPRHMVFEEGPLASWLYRNLKEDADTVTVCDPRKNALIAKEGDKDDPIDANKLADLFIGGYTRSVHHTEEVSRDVFKQLVGAYHERVEHRVSEANKVIGALRRWGVVVRESAFADKIDRAPLLAKLPEGAELEPARFNLRLMWEGYDQAVKQETKLRQQLRSLAKKQEVIVRLTELPGVAWVRAATFFAYLDTPWRFHSKQALWKYMGIGLVRETSGKGPVFVRVELAANRRLKSMIIGAAESAVIQGDNPFAE

SEQ ID NO: 159854 - protein, 326 aa, unidentified
MKIVGCDLHAKQQTIAMVDTETGEFTEKTLAHEGNKVREFYAGLEGSVVVGIEATGAMQWFLQLLEELGIECRVGHPAKIRAKETRKQKHDRRDARLELELLMEDRFPTIWMPSSEQRDLRTLLRDRHQWVKVRTRVQNTLQAIALNHALRHGHALWSPAGQKALQALALSRYSSQRRDELLHLYLQLQKRIKELDRQVEEEAKRRPQALRLLTHPGVGPITALATDVFLGDAHRFATGNQVASYIGMIPCQHSSGKRQRLGKLSKQGNALLRYLWTEAVMHAAAKDPELKRFYRRKLIQKGMGKARIAAARKLGIRLWIMNARPD

SEQ ID NO: 159855 - protein, 438 aa, unidentified
MSNKVFFNLDDLFISVGIDVGADFSWMSIALPNQQFVGKPYKILHNSIDSLTTAVSKIKEAEELYSLESRIFLESTGIYHYPLFCYLRDKGFNCSVINPIITKNSTNINIRKVHNDRFDSKKAALVGLKPDLKVSLMPSDLALNCRNLCREYYDLMDNRSAYVNKLQGELRMAFPQYLGIFSKVTINTSLTLLETYTSPSAFLKADKQEIIDIIKSTARFGLTYAQNKYNAIIQAATDANQFGYIIDSNIKRIRLYISFIRKYDEEINNILESLHELVDANEDADFVKQIHLIETFKGAGFLSAVSIMGEIGDFSAFSKPKQLFAYFGLDPAVKQSGKFEGTKVQMSKRGSAIARRVIHTLTLQSISISRNGEAKNPVLREYYLKKCDSKPKLVAMGAVSHKVCNMIFAILRDNKPFKIIAPQEHIKQYNSAKCDIAA

SEQ ID NO: 159856 - protein, 411 aa, unidentified
MRLFVGDDWAEDHHDVELMDQSGRVLAKRRLPEGVAGMARLHELIGEYLGEDADGAEVLIGIETDRGPWVAALVAAGYTVYGVNPLQASRYRERHGVSGAKSDGADAHMLTDMVRTDSHQLRAVAGDSAEAEGVKVLARTHKTLIWERTRAVQRLRHQLREYFPAALEAFDDLDAPDTLELLGKAPDPARARKLTRAQVSAALKRARRRNIPDKATAILAALRSPQLGQPAAVTAAYAATVRSLIAVITVLDEQVKALQGQVEENFGRHPDAEIYRSQPGMGAVLGARVLGEFGDDPHRYADGKARRNYAATSPITRASGKKKVVAARFIHNDRLVDALNAQAFAALNASPGARAFYDELRARGIEHNDALRRLANRLVGILHGCLKTRTLYDEATAWSHRENLPQSSVAA

SEQ ID NO: 159857 - protein, 334 aa, unidentified
MSFTNFIGIDISKHSFDLALIKENSPEKILTAKFSNTHKGIVALEQFIRKQDLVKQQILFCIEHTGLYCRVLSNYLVENQYAVWLEMPVQILRSLGIQRGKTDQLDAKRIATYAFTFKDKARLWQPPREEVQKIHDLLVLRDRLIESRKSILTPIQELEATGLSEVADTLRKHCKQSIESLDKEIKQIEKELEEIVDKDTNLKNKYKLARSVPGIGKITAMVLLYYTNEFTLFRSAKQLACYCGVAPFARESGTSVRGKTRVSNFANKTLKKLLHMASMAAISTDKQLKAFYDRKVAEGKNKMLVLNAIRNKILQRLVAVIQRDTPFRAVYQIK

SEQ ID NO: 159858 - protein, 336 aa, unidentified
MSFRFFIGIDVSKSTLDVGLLDAESPGSVSHQQASNDDGGIAAMLKWLQKQNEFSFENSLFCLEHTGMYNYPLLQFFSQQNASVWVENAVQIKKSLGLQRGKNDKVDAMRIAQYAHRLRNQVRLWKPVREVIDRLKHFSALRERLVETKKRLLTPVEELSKLGNESMAKVLKKSMSKTMKGLEKDLLAIENQMKDIIDKDDDLKRLYELVTSVVGIGFVTAVNLLVYTNEFKLFSNHRQFACYSGVAPFEYRSGSSIRGKTKVNPMANKKMKRYLHMASLTGIKLDEGLKNYYERKVSEGKNKMSVLNAIRNKLLARVFAVVNRGFIYQKNHLVLS

SEQ ID NO: 159859 - protein, 353 aa, unidentified
MFYIGIDIAKKNHEASIIDSSGKSLSKSISFPNSTKGIEKFNNFIAEFSVTTNNCIIGMEATGHYWISLFSYIVDLGFTCYVINPIQSDAFRKMYVRQTKNDSVDSFIIAQIMRFGEFSISNFSDENTFALRNLTRYRFALVDECSDWKRKLIAILDQVFPEYSSLFSNIYGVASKELLSKYPLPEDMLSIPAEELGDLLCKCSKGRLGINKAEEIQSCARETFGIKFAKRSFSFQIKQIISQISFLEEQLKEIEIEISCLLEDICPVITTITGIGSVLGASIVSEIGNISRFERANQLVAYAGLDTRVKQSGDFSATNTKLSKRGSPYLRRSIWLAATVAAFKDPALSIYYK

SEQ ID NO: 159860 - protein, 328 aa, unidentified
MFPVGIDVSKNTLDLCMLYDGIKGRIKTRNIQNNRHSVENILRWLRLQHCSPEDVHVVMEATGVYHERLATELHDAGFRVSLANPHRSREFARGMGIMTKTDKVDAYMLACYAFLKKPHRWEPPAPEIRYLGALLRRRDVLLGDALREENRLKKYLSTDTPADIISSCRRMAQLLREEVSNIERQIKAHIKASPALRRDYTLLTSIKSVGPQLGMHMLVVLRSHNFVSAEQAAAFLGVVPIEKRSGTSVRRRPRMSKIGPPQLRAKLYMSALCGKIYNKRMRNIYDEMCLRGKPKMVAIGALMRKLVHWCYGVLKTGTVFNDEDGFVE

SEQ ID NO: 159861 - protein, 360 aa, unidentified
MKIQRTSVGLDVHARSVVACALDGDTGELFERRLTPDHGEIVAWLNDLPGPVAATYESGPTGFVLARSINAAGMRCSVAASSKLQRPVGDRVKTDTRDARHLARLLHLGEIVEVEIPSVEQESARDLYRAREDCRQDLMAARNRLSKLLLRRGIVYYGGTPWSRNHERWLRGQRFDDPALKMVYDTALDTVVAITDRRDRLDAAIVAMAADSSFTAVVTRLGCLRGVSTLTAFGLAVEIGDWHRLTGRTIGAYLGLVPTEYSSGATRTQGGLTRTGNTHARRLLIESAWHHRKPYRPGEVMRRRWNAASPAARTRGQTANRRLHARWLRFDERRKRPVVANAAIARELAGWCWSLAVMDD

SEQ ID NO: 159862 - protein, 338 aa, unidentified
MKLYGGIDLHSNNSVVALLDEEDRVVYRKRLPNDAAGVLAALAPHREAIVGLVVESTYNWYWLVDALMEAGYAVHLANTAAMVQYSGLKYSDDDSDAAWLAKLLRLGLLPEGYIYPKGERAVRDLLRRRSRLVQQHTANLLSVQNLFARNRGRSLSANEVKRLNSEAVSRLLPDPNLALAVQGTLLVMRAQEGAIDLLEREALVQTKLRPAYRHLLSVNGIGQVLGLTILLETGPVERFAQVGHYASYCRCVGSERLSNGKRKGRGNTKSGNKYLAWAYLEAANFAVRYNAVINRYYQRKRAKTNGIVAIKTVAHKLARACYYMLRDGTDFEVGRAFA

SEQ ID NO: 159863 - protein, 394 aa, unidentified
MKLVGIDVGKNSHHFCVMDKETGEFNVAPSSFSNNKEGFDFLINSLKPYSKKSILIGMEDTGHYHVALLKFLLSNGYTVALINPKTTDLTRKMEGGITKNDKLDTITICDVLDTPERKKQYRITKVDRFDLYEQRQLTRHHHNLKEELNVYCNRLQKSIDLVFPEFNTLFSSKYSIVYMNLLKTFGSAEAIASTDIRTIRKCFEIKGRGNRISLTPEKLKECAKNSIGISSEVETIQIKHLVSQITLIKEQIAEIDKKIEEFSITNNSPILSIPGISHFSGTSILAELGDIGNYSKPSQIIKFAGVAPYHYESSQYNAQHTGITKKGSKYLRKTLYQIILTVINNNPVFKKYYLLKISQGKGHRCAQGHCIRKLLRIIYHLLETGQSFDPALLR

SEQ ID NO: 159864 - protein, 341 aa, unidentified
MRGPRARIRKDEPRPTRRPPTAKELPNPVELFVGIDVSKATLDVAVAPTGETWSVPNAADGMRQLVQRLKELSPKLVVLEATGGLERRAVAAIAGAGLPVVAVNPRQVRDFAKAMGRLAKTDAIDAAILALFAERIRPEPRPLRDSQAQELEALVVRRRQVVDMITAEKNRLAAEPPSKRVRTDIGKTIKWLQKQLEDIDVDLDKSVKQSPAWREKDDLLRSVPGVGKVLSRTLLSLAPELGSLSRKQMAALIGVAPINRDSGTQRGRRCVWGGRAHVRAVLYMSALAASRFNPVIRAFHARLIAAGKLPKVALVACMRKLLSILNAMVRTNSRWTHEATS

SEQ ID NO: 159865 - protein, 406 aa, unidentified
MAAVMIGVDPHKGSHTAVVTGQAERALGQVRVRACVAQAERLLAWAQAWPERTWAVEGAGGLGHLLAQQLVAAGERVLDVQPKLAARVRLLAAGDVNKNDPNDARSVAVAALRSAACPPVRADDHAMVLKIWAKRHRDLSRARNQVVCRLHAVLCELIPGGVSKQITAGQAARILEAAEPCGAAGAARWVLAAQYLTDLRRIDIQRRDMQKKLAVAVRASGTTVTEIFGVGPAVAAAVIGDAGDIHRFASRDHFAAYNGTAPVEVSSGGRVIYRLSLRGNRRMNHAIHMAAVTQIRYRHTKGRAYYVKKLAEGKTSKEALRALKRQVSDAIYQHLKADARRAAGPGGHPGNGSVASAAGSHPADRLFGQATPGPEPTLRPRRGPSKATRPGSSRPARRPAPGHTPA

SEQ ID NO: 159866 - protein, 414 aa, unidentified
MLKIVHPICCGMDVHKSFVVACIATTNERGVTTYKSKRFSTFTGDLRRCAAWLAENNCKDVCMESTGKYWIPLYNILERTCNIALAHPKYVKAIRGKKTDKRDAKWIADIFKHDLVTGSFIPPADIRQLRDLVRYRWKLTSFTTGEKNRAQNCLTVSNFKLDDVFSDVFGKAAFAITTRILNNPAEKITDVSNFRTKGMKATDEQVLAAVDGAMCEEQAEKLRIIRSHMDSLHLCKLNLESLILATAEKYLPQLNLVMTAPGIQSFAAIGIISEIGVDMSVFPTSKHLCSWAGLTPQNNESAGKKKTTRISRAGAYIKPLLVQCALCAIRAKQFPEVRNRYLALKKRRGHKKAIIAITRILLTAIYNMLKKNEPYNPELYRKGDRPPTHREVSVGEAIFILQRQGYLVTAPPTP

SEQ ID NO: 159867 - protein, 346 aa, unidentified
MMIIGCDFHPSWQQIAWLDSVTGETGERKLMHASGEAQRFYQQLAAPALIGIEATGNSQWFIELVEDLGHEIWVGDAAQIRASYVRKQKTDKRDAAHILRLMVQGRFPRLWTPDREQRDLRQLVVHRHKLVEIRSRVKNELQHLALNKGMQKKRTLWSQAGQTMLRELPLKAWASCRREDLLGLLAMLNQQVGQLDVAVQEAAEQNSQAKLLMTQPGVGPNTALAFVLTIGDVSRFPRGKQVASYLGLIPQENSSGGKQRTGAISKQGNRMLRSLLVEAAQIAVRFDPEMKKQYWHRCHQKPKGVAKVAAARKLAVRLYWMLRTNVAYPEVVRIESSPRVPLVGAS

SEQ ID NO: 159868 - protein, 312 aa, unidentified
MDALYIGIDVSKDRLDVAATSPSMATFHVPRNHDGLADLVERLKPLGAERISIEATGGFETVVVAALAAAALPVVVVNPAQVRAFARALGKRAKTDPIDAAVIARFAEATRPDLRPLANAETEALADLVTRRRQVVAMIGAENQRLKRATTRTAKSIRRLLKALEKELADIDLDIDDSIRRSPNWLERVELLKSVPGIGDQIARTLIAELPELGTLDRRQIAALVGLAPWTRQSGQWRGKSFIGGGRAAVRSALYMGALVAARYNPNLKAFRDRLVERGKPKLVAIVAVARKLITILNALIRDNQPWREQTA

SEQ ID NO: 159869 - protein, 332 aa, unidentified
MTAVSTLGIDLAKNTLSVHGVDAQGVVTVRRTVSRAKLGELVARLPPCLIGMEACSGAHEWARRFSGAGHTAKLMAPKFVTPYRKSGKNDGNDAEAICEAVGRPNMRFVPIKSVQQQCDLSLHRVRLGFVEERTATLNRIRGLIAEFGYVVPLGTERLRREVRDLLERLPARAASCVRDLLEHAERLRSKALEYEREIRSSLQHNELALRAHTRPGIGLITASALVATVGNGHDFRNGRQFSAWLGLVPRQYSTGGKTRLGHITKRGDPYLRTLLVMGARSVLQRAYRETDPLSRWALALQQRRGYHRACVAIAAKNARVAWALLAKGAAAA

SEQ ID NO: 159870 - protein, 328 aa, unidentified
MFYLGMDVAKAKLDCCLLLDATSDKRKTKVVSNTKSGIVDLLAWVAKQNISPEALHVVLEGTGVYHEQAALALADAGVTVSIVNPAQVKDFGRGLAVRTKTDGVDSFVLARYGALLKPKAWAPPAPEARILQALLARRVAIAQDLQRERNRQEKADATDTPDRIQKSLADSIGFLVKQLAELQQVIDEHIDKHPDLQKDMALLQSIPAVGPQVGGNMLSVMHSHNFNSAEQLAAYLGLVPVERQSGSSVLGRAKLSKAGPARIRAVLYMAAIVATRCNPHVKAVYERLLARGKSKMSALGAAMRKLVHLCFGVLKTQQPYEHDHTKNA

SEQ ID NO: 159871 - protein, 351 aa, unidentified
MDKITRIFIDTSKNVFQLHGVNQAEEVVLRRQLPRSKMAPFFSKLPPTVIAMEACGGAHHWARVLRALGHEVKLIAPQLVKPYVKRGKNDLTDAAGGCEAMSRPTMRFVPVKTVEQQAALMLAGVREAVVKERTQLSNMIRGYAAEFGVVAPKGLCAIEPLLVEIAEDTSHPALMREVFAGLGEQYAQLRAKFEAIDAKLLAWHKANQLSRALTEIPGVGPIGGSLLVMKTPDPHAFKSGRQYAAWLGLTPKDHSTAGKARAGAITRAGDETLRSVLVVGATSVVKMAQQNRGPGASPWLVELLKRKTPKQAAVALANKIARIAWTMMATGELYDAKRMQAAPAAIAATAA

SEQ ID NO: 159872 - protein, 341 aa, unidentified
MAVVVLGIDLGKNVCSVVGLDASGRVVVRRRLKREAVLGFTQQLAACKVAMEACCGAHHLGRELAAQGHEVRLMSPEYVRPYVKSQKNDDRDAEAIAEAAGRPTMRFVVVKSEGQSDLQSLHRARERLVAERTALINQLRALLLERGHVVPQGRRKLAIRVGEILSGEAAALSSRIRRLIGDVRAEWQALDQRIAAFDDEFAAYAKTNEAAHRLTTIPGIGVINATALVAAVGDAGSFARGRDMAAWLGLVPRQASTGGRPKLLGISKRGNRYLRKNLIHGARAVLPRLSESDTSLGRWLKGLLARAHKNTVVVALANKLARIAWAVLAKRQAFDAVHAVG

SEQ ID NO: 159873 - protein, 341 aa, unidentified
MMIIGCDFHPRFQQIAFVDQDSGEYGERRLSHPEEAERFYRELAGRPVRIGAEATGSFRWFRHLMQELGHEFLLGDAMAIRAACPRRQKTDKRDARHILTLLVEDRFPAVWQPSAENEHVRQLLLHRCRLVRMRTRIKNQLDAMAKNEGLLSSRVWSPKRRSEIEALPLPGWYAHRRADLLGLLDQLDERIRPLDEAVHEAAEDNREARLLMTHPGVGPTVSLAYVLTIGDWRRFPRGKQVGSYLGLIPAEESSGNMRRLGQVSKQGSVLVRWLLVEAAVHAQRHDASWHRQYVRLSINKHHGVAKVAIAHKLAVRLYWMLRSGDDYSKVMERGSHAGQSV

SEQ ID NO: 159874 - protein, 319 aa, unidentified
MTTLPKVFVGVDVSKKYLDVHIIPTNKTFRAQNTHNGIGKMITELKDYDVQQVVCESSGGYEQLMLTMLQKSNYKTWVVQPQRIQAFIASNGIKAKTDAVDAKWIARFAAQYTCDYEKPELIEKCEELKTFVARRQALVGMITMENNRIKHPQHESSSCKKLIEKHIRFLNKQVAEIDEIIQKLMSSQAIQKQANIITSVPGVGDVTASMLISFMPELGHVSNKQAAALAGVAPYTRQSGEWRGKSLISGGRSMIRKVIYMAALVAVRFNDQMKAFYQRLVDAGKVAKVALTAVMRKLITILNTLLQNGTVWKHNKQIA

SEQ ID NO: 159875 - protein, 337 aa, unidentified
MLHYGLDVHKKYTNICVMDDAGAILAEGRTATGELPCHPAFSLEGRKRVVMEAGANWPFVYDILEPAVEEVLLAHPLRVRAIAAARVKTDAIDARTLAHLLRSDLIPAAYIPPAPVREARELFRFRLDLVKQRIALKNRVHALLTKEGLTSPVTDVFGREGRRWLDELPLSCEKRARLDSFLRVLDCLTTEIKEADSRIKVAVDDDPRANLLTTVPGIGYRIALVILAEIGDISRFPDANHLVSYAGLAPRVRSSGGKTKLGNITKQGSSALRWALVEAIHVAVHRPGYLQEMHERLRRGKNNAVATTACARQLLVAIYFMLSRGEAFRPTGTRTIY

SEQ ID NO: 159876 - protein, 343 aa, unidentified
MRLTDKTSLAKGRVTMQAGEGIVGIDISKNSFDVVLRGTGGERHRVFSNDQKGFNALAGWVEKGPERVVQICMEATGSYWEGLAEHLYQGGYKVSVVNPYQIKRYGDHLLNRNKTDKADASLIAEYCEKDRERLRAWKPLLPEIKALRSMGRRLDELQGMKQQEQNRLKSGVKDLVVIESIQENLKQLGAQIKALWKKIREHVDQHIDLREQQRLLTSIPGIGKLTAIKLIAEIGDIKDFDEASQLAAYAGLAPQQFRSGSSVHKQTRISKQGRTELRRCLYMPAVVATEHNPIVMDLKRRMLASGHVMMEVIVAAMKKLLHLVYGVLKSGRPFDPEYGMQFR

SEQ ID NO: 159877 - protein, 319 aa, unidentified
MAMKIQPIHIGIDVSKSTLVIADEDDSISEIPNESRSIRGWLKTLPGPARIGVEATGIFHVELIERAHQAGHAVYVIDGYKLNRYRESVGGRAKTDASDARLLRRYLAKELDQLRPWSPPPKGYRALQNLLLRRAKLVQCRTRIDQSLRGLTELGPSRRALLRQIDHLDRMIQRRILKVLRSQNWFVEARTVQDIEGIGVMTTAALVMVFRRGRFRTSDAFIAFLGLDVRVRDSGTMKGRRKLTKKGPPELRRLLYMAAMTASRSATWAPIYHRYLDRGLATTEALIILARKLARVAFALLKNGTQYQPKSVQGACMGT

SEQ ID NO: 159878 - protein, 318 aa, unidentified
MKNAELFVGIDVSKASLDVALRPDNSHWSCGNDDAEISALVKRLRKLQPTLIVLEATGGLEIPVVAVLASAALPVVVMNPRQVRDFAKASGKLAKTDRIDAGVLAWFGEALRPEIRPFKDPETQELAALLTRRRQLSDMLTAERNRLHSAPKCVRKDIKAHIAWMERRFKDVNNDLNGAIKHSPVWRENDEILQSAPGVGPVLSVTLMAVLPELGTLNRRQIAALAGLAPFNRDSGKFKGKRAIWGGRAEVRSVLYMSTLTAVRCNPIIRSFYQRLIKAGKEHKVAMTACMRKFLTILNVMIKDGVLWHYQPATETLK

SEQ ID NO: 159879 - protein, 416 aa, unidentified
MKIVRPICCGMDVHKNIIVATIGITNKKTRITEYIQETFSTLNPDLLNLKQWLINHKCFDACMESTGKYWIPIFNTLEDEINIYLTHPKYVKAIKGKKTDKKDSKWICDLFKHDLIKFSFIPPKEIRALREISRYRHKLVGMRSSERNRYQNCMTVSNIGIGSVFSDPFGKSAQAIMKEVLESDIIEDEKILKCIHGSCKNKDKILDSIKHCNIETDQRFKMNESMTHMEELQVHIDNCEIEMMKRAAPMFDQFMHITQLPGISTLSAILIISEIGVDMKQFESDKQLTCWAGLAPANNESANKKKSVRISKAGQYLKPLLVQCALGAIKDKEGYFGIKYSRIKKRRGHKKAIIAIARMMLVSIYHMILTGETFNPSDYESFRNPKPPIKQQDLTEESAIEFLKKSGFDVSKLTKP

SEQ ID NO: 159880 - protein, 470 aa, unidentified
MNSKAKTVKTQVTNEDLNAKTSAIQKNLVAKTWLELESHGKFDKNGKLDFIKEDMLIVGCDVGSDTHYLRAIDTRGKELSKTAFRFENNEAGLKAAFDWMLSLAAVNVKTQIVMGLKPTGHYWFCLTAWMLSHGITVVQVNPYAVNRTKEVEDNSQNKNDRKDPKVIANLVKDGNYGVPYLPEDDYATLRSLSTLRSELVENRTRATNRLHRELKIHVPEYKGMFGTPDGAFALTLLKEAPVPEDIVALGPDGIKKVWKDAGLRGRGYSTIDHIIELAKHSIGLTSDVVAAKESIKIWIEEIQSLDENIKRIEAMLEEICGKIQFADNIQEIPGIASIIKAGIIAEMGDIRRFDDVKELQKLSGLSLVACSSGQHKGETKISHRGRKRLRSWLYMAAGCAVASSEEFAKLHEYYTTRPDNPLKKKQSLIVIACKILRIIFAMLRTGKKYDPQKMMADIKRHETVSPAAAA

SEQ ID NO: 159881 - protein, 345 aa, unidentified
MKITTVGVDLAKNVMQLHGVDGRGKTVLRKQLKRSQVASFFATLEPCLIGMEACGSAHHWARKLQGFGHTVRLMAPQFVKPYVKTNKNDVADAEAICEAVGRPNMRFVPLKTTEQQGVLAVHRARQGFVKARTAQANSIRGLLGEFGIVIPQGMSPLAKRVPEILEDGENGLTGSFRQLLQRLMDHLKELDRQVGELEREIQVWHRENAASCKLAKVPGIGPITASALVASVGDAKNFANGRQMAAWLGLVPRQHSSGGKPTLLGISKRGDSYLRTLLVHGARSVVRYAEGKTNPVAAWLTSILARRNTNVAVVALANKNARIVWALLAHDREFRSDYAPARAKA

SEQ ID NO: 159882 - protein, 446 aa, unidentified
MDVVFTHCAGLDVHKKSVTACRLVSDSTGQHPEGVAELRTFGTMTHELLALADWLVEAGVTHIAMESTGEYWKPVYNLLEGLVTIFLVNASHVKNVPGRKSDPADARWLAKLMRYGLLQASFIPPVAQRDLRDLTRYRTKLVQERAREVNQIQGVLERANIKLASVASDVLGVSGRAMLEALIAGQTDPATMAALAKRRMRSKIPMLEQALTGTVRDHHRRLLALQLAHIDFLDEQIEALTSAIASCLTTLSQEAVADTALSTPTLADVPAPTEPLPPLTFTRAVELLDTIPGVNQRGAEMIIAEIGIDMARFGTASRLAAWSGVAPGNDESAGKQRSGKTRKGNQVLRAGLTQLAHGAVRTKGTYVSALYRRLAARRGKRRAILAVAHSIMVSIFHMLTRNEPYRELGANYFDERRRHYTVDRLLSRIEHLGYRVHLEPVAAPTV

SEQ ID NO: 159883 - protein, 337 aa, unidentified
MKYSGIDLHSNNSVVTVTDETDKVIAEKRLPNDLSKIVGFLQPWREEMFAVVVESTYNWYWLVDGLQEAGFVVKLANTGAIKKYDGLKHSGDEADARQLAHLLRLGILPTGTILPPEQRAVRDLARKRMQLVRSRTSHIIAIENIAARQRGMKISSNQIKRLTTDDVDQMNFPADVGLAINSNLAVVTTLGEQIDLLEKRLQEVMDERPEYGLLTSVPGIGRILASVILLETGSIDRFASVGNFASYARCVDSQHMSNGKKKGEGNTRNGNKYLSWAFVEAAYYAQRFCAEAKRFYERKKAKTNTAVATKALAHKLARACYHMLKEQKPFDAGRCFA

SEQ ID NO: 159884 - protein, 340 aa, unidentified
MTEIATIGLDLAKNVIQVHGADETGAAVLRKRLRRREVLAFFTSLPRCLIGMEACATAHHWARELIAVGHEVRLMPPQYVKAYVKRNKNDLADAEAICEAVKRPSMRFVPVKTSEQQSALMMHRARDLLVRQRTMLVDALRGHLAELGLIQAQGLHRVAGLTAIVMDDTDERVPRMARQVLKVIAGQIGELQGRIAALEAQILAWHKSNPVSQRLATIPGIGPIIATAIVATVTDPSMFHSGREFAAWLGLVPRQNSTGGRAKLGGISKRGDGYLRRLLVSGAHTVLLRSKTAQADPWLISLLGRKPRLVAAVAVANKTARVAWAIMNRGDTYRRVAAAA

SEQ ID NO: 159885 - protein, 365 aa, unidentified
MSTIYFGVDFHARQQTICYLKTEDGELVTIGLKHQNKDEVRAFYAQFSGRVIVGIEASGYSPWFEQMLTALGHEVWLGDATEIRRRARWRQKNDRRDAELILDLMLHDEFPRLHRPSPKSSEILRMLRYRQKLVKMRTIGKNSLQALALQSGLSLRTKLFTKVGKQELCTATMSPVMEQQRAQWLALLETLDQRILETMLWLRQQSQGDERISRLRTHPGIGLLTSLGLVHTLWPVSRFRNQRKVTAYAGLEPMERSSAERKHFLGISKAGSRLLRYLVVEAAHTAVKKDEELKRFYQRLSARRGRPKAKVAAGRKLLVRSYIMLRDEIDYAEFQRRAVAARLARQSSRPNVPVSLIGQPASPDS

SEQ ID NO: 159886 - protein, 337 aa, unidentified
MKYCGIDLHSNNSVVSVIDETDRVVAEKRLPNDLAKILAFLDPWQAELTGVVIESTYNWYWLVDGLQAAGFIVHLANTTAIKKYEGLKHSGDETDARYLAHLLRLGILPTGTILPSEARSMRDLARKRMQLVQNRTTHILAIENITARQHGMRLSGAQVHRLTAEAIDQMGLPAEVALAMQSSLAVIQTLSTQIGLLENRLAENVEARAEYALLKTVPGIGPILATVILLEVGSIERFDSAGNFASYARCVDSRHMSNGKKKGEGNTKNGNKYLSWAFIEAANFALRFCAEAKRFYERKKAKTNPILARKALAHKLARACFHILKERRPFDTTRCFV

SEQ ID NO: 159887 - protein, 366 aa, unidentified
MAHLAPPRVTIGVDTHLDLHVAHAKDQLGRRLATVSVPTTPAGYRSLLAWARGLGEVEAFGVEGTGSYGAALARFLRAHGQVVVEVNRPDRQARRRRGKSDPLDAEAAARSVQAGEATVAPKAGDGVAEMLRCLRVARASAVKARTQAGNAIKALLVTAPAELREQLRGLPTAKLVATAAAFPAGKPATPTAATMLALRLLAVRHQALTAEVTALDRELERLTAKAAPRLRALFGVGAESAAALLVAAGDNPDRLHSEAAFAMLCGSAPIPASSGKTVRHRLNRGGDRQANAAAWPRARPSERSSAASSATSPGRSSPPSTSSTTTSPKPLDVYRSINPEHRRPRRQHAPTLRRRPEAAAHEVVLP

SEQ ID NO: 159888 - protein, 339 aa, unidentified
MEQNLFVGIDISKLTVDVNVLQISHLKEPHYHQFENTKDGFKAMQKWITGIVKFTKEEALFCMENTGVYSLLFSMNLSTDGYYAWVENPLEIKRSLGIQRGKSDKLDSLQIAQYAYRFKDKAKRFKMPSKILLALKDLEAYRERMVKVKGMLQKAIGELFEEKLTTGFIQDSSKAMIKEFDKTIAIIEEKVMTLMNEDEELKRVYNLAISVKGIGMQTAVFMLIHTHGFTTFTTSRQFACYCGIAPFEHTSGTSVRGNTRVSHLANKKLKSLLHMCARSAVRYEPELKAYYERKKAEGKKENCVMNMIKNKLVSRVFSVVKRGQGFKNLEDYKLFRQAA

SEQ ID NO: 159889 - protein, 346 aa, unidentified
MGIDPHKQTHTAVALDTATGRKVGEITVKARTRGFERLLLWARELDDVDRFAVEDGRHVSGALERHLIAHGETAVRVPPAMMFQARRADRVRGKSDPIDAEAVARAALAHPELPTATLAGIERDLDLLVAHRESLVNERTDKISKLRWLLHDIDPDLAPPLRSFDRFKVLARVQRNLDSMTPTTAVAVCMDLLARCREITVQANKLEREIIGLVDLHAAALLKIPGYGALTAAKILAETAQVKRFPSEGHFARYVGTAPVPVASGASHRHRFNRRGNRQLNAAIHRVAITQLRIHEPAQAYFSRKRAEGMSKTEALRALKRQITRTIYKTMVSMDQPTDYAAAVAA

SEQ ID NO: 159890 - protein, 343 aa, unidentified
MKLHVLGIDLGKTVFHLVGLDSTGRVVIRKKCSRTQLLAFTANLQVQLIGMESCSGAHFLGRALREQGHQVRLMPAQYVKPYVQTNKSDFLDAEAIAEAVQRPRMRFVPIKTEEQLDLQALHRVRERWVMRRTAVVNPIRSLLLERGLTLPKGRGYVDRQLPRILEDGELRLSGSFRVLLAQLKIELEQLTARIEEMDRVIQKTAKENEACQRLTEIPGVGPVTATALIAAVGNGSTFQKGRNLAAWMGIVPGEYSTGGKQKLLGISKRGNKYLCTLFIQGARSVLQQRDKQVPGLSSWLTQLLARAHQNVVIVALANKMVRMAWAVLCKNERYRALVLAMSA

SEQ ID NO: 159891 - protein, 304 aa, unidentified
MNGIGIDVSKRQLDIGTTDGETLQVGNNRSGFSELDVWLKKRPTRQIVLEATGGYEQPVLDFLHKAGHPVARANALRARKLAQGLGQIAKTDRLDAYALAQMAALVKLPPYQPLQSWQQKMREFVRARRQAMDALTIARQQQEMVLDRELRRLLQGNITRLQTLVERLGKQIVEQVGQQPQLKMLKSMKGVGPVLQAVLASYLPELGRISGKRIASLVGVAPMSHDSGTMRGKRSIHGGRAEIRQVLYMAAMSAMRHEPRLRDFYQSLRARGKEGKVAIVAVMRKMLVILNARVRDAESGVVPA

SEQ ID NO: 159892 - protein, 367 aa, unidentified
MKKVSTAAAKQMRNFSEPKLTIGLDLGDRSSWYCVLDERGEVRREQKLGTTPKAMKEVFGAMLRSRIALETGMHSPWVSRALSELGHEVIVAHARNVRLIGESRKKDDRLDAQTLARLARIDPQLLSPVKHRSAKAQADLTVIRARAGLVRARTALVNTARGLAKSYGERLRGCNVRNMNPEKAEGLSPELQTALEPLLAAIESLSERIRECNQRIEGLAQESYPQVALLKQVKGVGTLIALTFLLTLEDAHRFRKSRDVGCYLGLQPGRRNSGQSEPQMRISKEGDPYLRTLLVQGAHHILGPFGADSDLRRWGLKLAERGGRNGKKRAIIATARKLAVLLHRLWVSGEVYEPLRNNSRATMPAAA

SEQ ID NO: 159893 - protein, 346 aa, unidentified
MIGLDLGDRWSFYCVLDEAGQVILEQKLPTTPEAMKQTFGKIPRSLIALETGTHSPWVSRLLTELGHEVIVAHAQKVQLITKSNRKDDRHDARTLARLARIDPALLGPVRHRSAKAQLHLTVIRARAELVSARTALVNAARGLVKSYGQRLPKCGTYQVSEKLAEGLSAELREVLVPLFKEIESLNEHIQEYDERMEKIAKDVYPEVALLKQVKGVGTQIALTYVLTIEDPYRFAKSRQVGCFLGLRPGRRNSGESEPQKGISKEGDRYLRTMMVQGAHYILGPFGEDSDLRRWGRKLAERGGKNAKKRAVVAVARKLAVLLHRLWVGGEVYEPLRNSQKAMREVA

SEQ ID NO: 159894 - protein, 349 aa, unidentified
MPEQRVSYTGERVYVGVDVHKETYTVTCVCRKQIVKTATVPAEPARLAASLLRWFPGATVASAYEAGFSAFVLHRALTQGGITNLVVNPASIAVAANDKVKTDRRDSKKLARDLADGRLQGISVPTEAEELARLLPRTRAQLVEPRATLARQSKAKLHQCGLITPKGQRMISHQYLQEIATWALPSELRVSLTLLAEQWRLTTRQLIEMRHLLREQAQAQGEIEKVSRSVPGIGAVVARTFATELGDMSRFANERALFSYTGLTPSEYSSGAAIRRGHISHQGSSRVRHLLVETAWRALPRDKVLQESFDRVAATRGKKRAIVAMARRLIGRMRACFREGTLYAVGTYV

SEQ ID NO: 159895 - protein, 389 aa, unidentified
MIAVMRPFGEVVVSPFEVRHTANELSELARLLKSLDGETRVVMESTGNYHAPVAWLLHDAGLYVSVVNAMLVHDYGNNSLRRAKTDKKDAVKLANYGLDHWLTLPRYVPDEDTRLMLKTCYRQYQQYSKVQTMLKNNLISLLDTAFPDANRLFTSPPRADGSEKWVDFVATFWHCECVCGRSEKAFTTQYQKWCRKHGYNFSEDKALDIYASACRHFGVIPKTDTAKLLVEQAISQLQTTSSALAALKQEMQSLAASLPEYPVVMGMFGVGPTLGPQLLAEIGDVRRFHSKKALVAFAGIDAPPYQSGQIDVRSRSISKRGSASLRRTLFLVMSVILQCAPIDEPVYQFMDKKRSEGKPYRVYMMASANKFLRIYYASVKAYLESLEHD

SEQ ID NO: 159896 - protein, 355 aa, unidentified
MSNTIVAGIDLGDTKSLATVLSPSGDVTDRFSFAMNEEGYMFFASRVPRDARIAFEATGISYPVARALRRFGYDVTVAHPRGLAWIVKSKRKNDRVDSLKIAKLHMVSMLPESHLLDREEQIARDLLIQRVKLGVEIGRLKNSITSYLKREDVYQSLPQTTDKFSDARRHAILSLKFNDDRDLVLKTMMERLEFLESQCIPLDDEIRKIARRSDDVKLIMTIPGADFYLASLISSFIRDVNRFPSDDHLASSFGIVPVTRDSADVKRRGRMSRDGPSIARWTLSIMVDTVMKYNEPVREYYQSVKNGTGSGRMAHVATMRKLTRMLYHMLKTREHWRWERKQLTRRKLSNLGGEA

SEQ ID NO: 159897 - protein, 390 aa, unidentified
MRFAGIDIASETHVVAVVDEEGKVVLKATPIAEDATGYGKLLELLGSAADCKVAMEATGHYWQNLFATLAGAGFEIALLNPIRTHNFAKEDLARTKTDAIDAVGIARFAQQKRPVPTRLPDSVTQELRELVRLRDRVVQDLGDATRRLHRMVDLGFPEFTRYVKTLDSELATTLLHEYPTAAAFPAMPRPLAKLVYDGRHKVGPELARQLVDAAKVSVGRHHGDAYRVQVRYSCEDVSIARRRLRELERRIESTLREHEVGTLLTTINGIGPQTAARIVAEVGDFERFTGPEKLAAYVGCIPGIKHSGKTTPKGAMTTIGNARLRCALWMPLLTAVARNPWLRAYYRRLVAAGKLKKVALVAAMRKLMHAVYSVATNHRPFVPRLQEASS

SEQ ID NO: 159898 - protein, 379 aa, unidentified
MRKDIRYVGLDVDSEKIVVAVAEPAGEVRSLGAIPYREESVRQLVKKLGPARRLRVCYEAGPHGYGLYWQLSGLGVHCDVVAPTLVPVRSGDRVKTNRRDAEKLARCYRSGDLTAVWVPDAEHEALRDLVRAREVAKKDQLRARHRLGKFLLRRGLRAAAGMKSWTAKHLLWVKTLRFEHAAQEATYLDYLHEVEHAAERVARLERAIDQAIEALPTQMRAVIAGLQALRGIKKVSAATIVAEVGPLSRFSRPKQLMGYSGMVSSEDSTGSSVRRGAITKTGNAHLRRIVGEAAWAYQYRPAMSPELKKRQEGLSEEVKEIAWKAQHRLCTRHRRLVAKGKLRQKVVTAIGRELLGFIWAIGTQVEREQRSAKLTRRAA

SEQ ID NO: 159899 - protein, 350 aa, unidentified
MLIIGVDYHPGFQQIAYVDSETGELQERRVGHREEAEKFYRDLASRGAKVRVGMEASGHARWFERLLAELNFELWIGDASEIRAKRVRKKKTDREDARHILRLLLKDDFPRIWVASWENRDLRQLLWHRHRMVQTRTRIMNQLQAVALNEGLRWKKRLWREAGREQLVAIRLAPWTSRRRQDLLELLDQLNPSIAKLTEAVEQEAEKCPEAQRLMTHPGVGPLTALAFVLVIGTAERFGCGKQIASYLGLVPSEDSSGERRRLGHISKQGNSLLRFLLVEAAQVTVRSNQEWRSKFFHLAMRRGRKIAKVAMARRLAIRLYWMWRKGWNYEQLTRFGSHAGQPGNPHGVQ

SEQ ID NO: 159900 - protein, 421 aa, unidentified
MTPPSHDTFAAFIGIDWADARHDGCLQAAGTAKRECFQLEHTPEAIDAWVTTLRIRFNGQPIAVCLELNKGLLVSALRKYDFLVLFPINPLTLARYREAFTPSRAKDDPTDAELQLELLLTHRDKLQPLQPQSPPMRALAQLVEHRRRVVGDKVRITNRLTSALKNYFPQVLHWFQEKDTRIFCDFLSRWPTLKAAQLARRSILERFFRDHHVRTADVLATRLHAIKTATPLTTDEGVIAPNVLLVQTLVSQLRVTLDAIEAFDQAIAQRAQHHPDFPLFQALPGAGPVFASRLLVAFGEQRERYASAAALQKYAGIAPVTERSGKKAWVHWRLQCPKFLRQTFVEWSAESMRHSFWAQVYYQQQRDKGNTHQAAVRALAFKWIRILYRCWQEHTPYDESTYLQALMRRNSSLIQNRAKVS

SEQ ID NO: 159901 - protein, 403 aa, unidentified
MNNVAGIDVSKGKSMVSVLRPFGEVVAKPFSVGHTGSELKELADYLKSLDGETRVVMEHTGRYYEPVARFLHDEGVFVSAVNPKLIKDYGNNTLRKVKTDKADSRKIARYGLDNWAELRQHTPMDTIRMQLKTLNRQQSLYAKTKTMMKNNLIALLDQTYPGVNALFDSPVREDGSQKWVDFAMTFWHVDCVRNMSLTAFAERYRKWCKRHGYNFSQSKAVEVHTGAQDLIAMLPKDALTKTMVRQAIDALNAVSASLERLKAEMRTLAAQLPEYPVVMAMHGAGDSLGPQLMAELGDVTRFTHRNAITAFAGVDPGADQSGTHEAKSTRVSKSGPPELRRALFLVMDCLLKTQPQDDPVYRFMDKKRAEGKPYLVYMTAGANKFLRIYYGRVKEYLASLEGN

SEQ ID NO: 159902 - protein, 375 aa, unidentified
MNNNNTLYVGLDVHKESITVAYAINSEPVELMGKIGTSPTDIQNLCKRLRSKSSQVSIVYEAGPCGYGLYRRLVKSGFDCMVCAPSLIPKKPGERVKTDRRDAIRLVRSLRARDLSAVYVPGIEDEAFRDLARAWASARDDLRHARQRLKSFLLVHGVHYVGRADWGPAHRRWLSKYSFESPWRQLAFDEHRRTIEDRQAQCERLESALKEAVTEWRLYPVVEALQAMRGIQFITAVGLISELGDLTRFEHPRQLMSWFGITPSEYSSGGSRHQGSITKAGNSYARKLLVEAAWSYRHPARISPAIQKRQENLPRPVIDRAWDAQLRLCKRYRKLQAKGKNVNITIVAVARELAGFIWDMGRIAMSVAQQPQCHK

SEQ ID NO: 159903 - protein, 369 aa, unidentified
MDHHSVAYVGFDTSKTKHAVAVAEGGREGEVRYLGEIEAAPAAVERLLRKLACKYKILHVCYEAGPTGYGLYRHIRALGHVCDVIAPSLVPTRPGDRVKTNRRDAVTLARLLRAGELTPVWVPDAVHEAVRDLVRAREAAARDLRRKRQQVLSFLLRHGRIFTGHRHWSRAHLRWLAEQAFDHPAQQIVFQDQVDVVADAQARLERLDRQLAELVPTWSMAPVVAACQAMRGVSFLVAVTFVAEIGDVRRFESPRQLMAFLGLVPCERSTGDTVRRGGLTLAGNRRVRRALVEGAWSYRHPARITETIRGRLEGLPKVVREIAWKAQVRLCSRYRRLMAAGKRAPVAVAAIAREMAAFLWAIGRVVEPT

SEQ ID NO: 159904 - protein, 347 aa, unidentified
MTTIVEIERAHVGGVDTHADVHVAAVIDPQGGLLGVESFRANPDGYKELSRWMRNFGTIGMVGVEGTGSYGAGLSRHLRSVGLVVVEVDRQNRQARRRQGKSDPLDAVEAARAAQSGRAFGVAKTRDGSVEAIRALMVARRSARESRTKAMNQIRQLIYTAPDELRERFVGTPPWRLAEGVAVLRVHADANPVRMATKTALATLGRRAVALDEEGSRLDALIARLVDNVAPELVQLVGVGYDTAALLLIAAGDNPSRLRSEATWAKLCGVSPLEASSGKVTRHRLNRGGDRQANHALWRIVLSRMSCHPPTKTYVARRTVEGKSKKEIMRILKRYVAREVYHYLPRE

SEQ ID NO: 159905 - protein, 330 aa, unidentified
MHFIGCDVSKLTLDLAGGDPHRDTRMLIHTVPNSQAGWRQLTNWLEQQWPGPRSEIGIVMEATGVYHTLAARYLHATGFRVVVCNPGRAADYSRSQNRLNKSDALDARSLQRYGARLEQIHWFQPNSPEIEQLRALLALLWQLEKDVRRWHNRLEKARFEPAGDAVCAAIKRQLRNLERELKRTQAGIDTLIASSEALTRDQQLMCSIQGIGPKTSQSLLPLLHQGRFTSARQVAAFIGLTPCHRQSGTSLHPPGRLSGRGDARLRAKLYLPALTAIKWNPALGAFYGTLIERGKTPKQAITAVMRKLVHLCYGVIKNQTPYRADYGCLP

SEQ ID NO: 159906 - protein, 362 aa, unidentified
MVFGHWAQKGLTVKQGITIGVDLGDRESHVCVLDASGEVRERFEVRTTQRGLTKRFGEFERGRLALETGTHSGWASRLLADLGFEVVVANARQVRLIGARDKKTDRLDAELLARLARTDPKLLAPVQHRSAPVQADREILRAREAAVRARTALINHVRGAVKAWGTRLPKCSSRAFARKAEPELPEELRGSLEPLLHIIGDLTQRILAYDLRIEQVSEERYPVTAHLREVPGVGPKTALAYVLAVENPRRFAKSRKLGAYFGLCPRQDQSGSIDRQCHITKAGDAMVRRLLLQCAQYMLGHHGKDTDFRRWAEAKIAHGGKAAKKRALVAVARRLSVVLHRLWITGEVYDPLWLAKRRPEAV

SEQ ID NO: 159907 - protein, 391 aa, unidentified
MIYVGIDVAKDKHDCFITNSDGEVLFKPFTITNNLDGFNELYQKIESVTEDATKVKVGLEATGHYSYNLLGYLIDKGLAAYVINPLHTNLYRKSLSLRQTKTDKVDARTIASMLMSDVNLKSYSDISYHNEELKSLTRYRFDKVKERAKLKTSVSRLVCILFPELEKLVPTLHMASVYALLSEFPSAKHVATAHLTRLTNLLSESSKGRYGKDTAITFRDSARASIGSNMPAKSFELKHTIKLIQELDSEIDEIENEIKIIMDEINSPILSIPGINYRMGAMIIAEIGDFNRFDSPDKILAYAGFSPSTYQSGQLDGAYAHMEKRGSRYLRYALYNATKYVCHWDPTFAAYLAKKRAEGKHYNVAISHAVKKLVRVIYHLEKTKQQYIKAA

SEQ ID NO: 159908 - protein, 376 aa, unidentified
MQAAQVKGYEVNTSLYMAMELSNSKWKLGFGNGTKIRRKSIDARDRQRCLEEVALAKVKLKLPADAAVVCCFEAGRDGHWIYRWLKSEGFEVMEIDSSSIETARGRKHVKTDRIDVEKLLDLLIRFHCFGLRQAFRVVRVPSVAAEASQRLHREDEYLIRQRTRISNRIKGLLVAQGVDEVSLKGDFASYLDRVRLWDGEGLSVELKMELQHMHAQLTLFDGQLKEMVSAYAKELAADTPLAEKRRRLQSLKSLGPKTSRILAAEVFGWRSFANTKQVGAFAGLTPTPSQSGDSDTEQGISKAGNRRVRRIMIELAWLWLRWQPDSALSQWFNRRFAHGSKRMRRIGIVALARKLLIALWRYTEHGVIPEGALLKG

SEQ ID NO: 159909 - protein, 260 aa, unidentified
MSQPDLQCVGIDVAKATLDVAGTETLASFTVSNDGAGFTEITDRLSGRNISLVLMEATGGLEAPLAEYLQSEGFDVVIINPRQARDFARAMGHLAKTDRLDAAMLAQLARVINCHPDRSRYLRLMPDAARQALTALVVRRRQLNQMLVAERNRLYPSHPDGRESIGRVMTVLEAELALVTRQMNRQLRQHFREQARLLTSVKGVADITAATLLAELPELGTLSRREISALVGVAPVNRDSGKQGRRARHTLYGGDHRYPV

SEQ ID NO: 159910 - protein, 428 aa, unidentified
MGATEQAHTKGVGLEIMYPRVAGIDVGKKIVAVAVRTPGDRPGERQQQVRKFKTFYPVLLQMVGWLVGHGVTHVAMEATGVYWRPVFHALCEAEHLELLLVNARHVKNVPGRKTDAKDAEWLAELCEVGLLRGSFIPPAEIAAIREVTRYRKKLTEARTSELQRLCKVLEDSGVKIDSVASSITTMSARAMVEALVAGERDPRVLAELALGRMRKKIPDLAMALSGRFTEQHALLARMHLEHVDHLTGMIQRLDTQVEQMVGPFAQQVRALRTIPGIGERTAQVLISEIGVDMSRFPTAGHLASWAGLAPGNNESAGKHRKAKTRKGNRELREALVEAAWAAGRTNTYLGARFRRLHRRFGKQGGSKAAVAIAHNLIVIVWHVLHDRTDYRDLGADYFTRHDNPDVKKRRLVRQLQALGYAVDLTPAA

SEQ ID NO: 159911 - protein, 454 aa, unidentified
MPKRSRFIRSPRKIIGSMTVVNPDAAGIDAGSDQHWVSVPEDRSEQPVQRFGTFTEDLYQLADWLVSCGIKTVAIEATGVYWVPLFEILEARGLNPRLVDSRSIGKRNKKTDVVDCQWLRQLHTHGLLDGAFRPSEQMLPLRAYMRQRQMLISYASDHIRHMQKALDLMNLKLHLVIDDITGVTGQKIIQAILAGKRDPEQLAAMREPGCKNTVETIAKALMGNYREEHLFTLQQAVDLYNEYRAKVVQCDAQIESALKAFEQRANRSTLEKKKEPKKRKNQPRFDARTLLFEMVGVDLIAIPGFEASTALTIVAETGTDMSPWPSEAHFASWLALATNTPVSGGRPLAKKGPIVHPNRAAQAFRLAAQTIERTQCALGAFFRRIKARHGRKAAIKATAHKLATIYYSIIKNRTPYRDLGVDYYETRYREGLVKSLERKALTLGFQLVPSPEVH

SEQ ID NO: 159912 - protein, 410 aa, unidentified
MQITCGIDWAEQHHDVAVLNADGSVLARARIDTGATGFSRLMSLLAEHVDDADQLASVPIGIETDKNLLVVALQAAGMTVFAINPRAVARYRERHGQSGKKSDPGDAFVLADLLRTDRHQHRPLPSISVHASAIKTLARQHQDAIWSLNQTVSRLRSLLLEFYPQALRAFPNLKHKAALAVLSAAPTPEAGLRLTARRLATLLRRCRRRNDPSLAEHVLSALHSPALRQPTAVEAAYGVTAQTLTAIVVAMQTAVEELEQALAAEFDQHPLATILRSAPGLGPVLAARVLAEIGDDPTRFTTTAGLRAFAGTAPVTRALGRSRYVKARKVRNKRLGDACHWWAFVTITKSAGARAHYDRRRAAGDHHNAALRNLANKLIGRLWWCLQHDETWNENTAWNIDIATPDPRTA

SEQ ID NO: 159913 - protein, 313 aa, unidentified
MKEEKTFIGIDVSKEKLDVGVRPQVDFMTFANTEDGISLMTDFVKSKQPELIVLEATGGLEMAALRSLVVAKLPAVCVNPRQVRDFAKAMGVLAKTDKIDAHVIARFADSVRPEIRPLKTEETEMLDAFNTRRSQIIIMLTAEKNRLTTASKWTKKDVEKSIKGLEKALVKINREVENLIKKSPHWRHMDKILQSVPSVGPVMSLTILADLPEIGTMNRRQIAALVGVAPLNRDSGKYKGRRAIWGGRARIRSVLYMCVISGICHNPKIKAFYNRLISSGKKHKVAITACMRKLMIILNTMIKNDTCWNESGC

SEQ ID NO: 159914 - protein, 312 aa, unidentified
MEKLSYGGIDVSKDRLDVVVLPEERFFSVSNDAAGWAELVARIRPLAVSAIGIEPSGGYERGIIRALLAAGLSVRRINPNKLRQFARARGVLAKNDRLDARLIAEYVAIMPTRVVQRDEAVEKLAEVVTMRRQLRDEHVTVENQAAHIEDAMLRRLNKRRLARLEADTRLLDKRLAEMVATNATLAQRYELLTSMPGVGPVLAFTLIALLPELGQMSRKQIAALVGLAPYDFDSGKLRGHRSIYGGRMPVRNVLYMAALSGCRYNPALKAFHKRLAAADKKSKVVIVAVMRKMITTLNAMLRDNVEWQPKSA

SEQ ID NO: 159915 - protein, 340 aa, unidentified
MAIVGGLDVHRRQITFDYLDTETGQVRRGRIAPADRQLLRRWLMSVTSRPAAFAVEACTGWRFVVEELCRAGIQAHLAEPAETAAARGPKRRAKTDRADARQLRELLAAGRLPESWIAPEQVLEIRGLLQLFKDLRDEHTGWVQRIHAVLFHHGVAAAVGDLLGGDSRQRLQAGTGLSPAGHQAVLAALRVVDMLEAELGPLRKQIATFARRQPACKALQAQYGVGPVTAAVIWAELGDCRRFSASRKAVRHTGLDVTVYSSDDKRAPGRLSRQGSPLLRWALYEAAKCAARSSSPDYAYYSRIKERIGGNRAALSVARKVVRRSHHILRSLGDQALTAV

SEQ ID NO: 159916 - protein, 344 aa, unidentified
MTYYAGIDVSLRTVNICVVDGEGEQVAETKLSSDVQEIIAYLDELECNIDLIGLEAGTLAQYLSYGLQAADFDVVCMEAQQVKAALSAMRNKTDKHDARGIAQLLRSGWYSQVHVKSMESHHIRMLLTSRRAVLDKCIDLENEIRGLFKIFGIKLPPKLGHGSFDKAVRAVIEADEKLSHALLPMLDARLVLYETFRVLENRTRHLARGDSICEFFMTAPGVGPITALTYKAGVDDPTRFKRSRTVAAHFGLTPRRSQSGEMDIDGRISKAGDAEVRRALYVAANSVLTRSSRWSPLKAWGMKLKKNRGHKKAVVAVARKLAVILHRMWIEETQFQWGMEGVRS

SEQ ID NO: 159917 - protein, 380 aa, unidentified
MQETCNQEASAMSTHIIYVAADDSKDSVTFAVQPEESPVCTEVKTLPSEPRKLRRFLETVARQGELRICYEANGAGFALHRQISSWGYHCDVAAPSLTPRRPGDRRKNDPRDARKLVGLYRAGELTLVHVPGEAEERVRDLVRCRETLQREVLRSRHYILKLLSRYGFVFRDGANWTQRFWGWLRKVRLPGEAQLALEEYVALLEYKLARREELDRRIEALAFSDAFRAPVGRVRCFRGFDTQAAMVLITETGDFRRFGSPGELMSYYGLVPSEDSSGSRERRGSITKTGNARCRHVVVQAAWSYRHRPALAAALRKRQAGQPPDVVAHAWKAQHRLYKRFHRLKARKHPNVAVTAVARELVGFLWAAMQDPEAVPSISS

SEQ ID NO: 159918 - protein, 395 aa, unidentified
MSKLILFAGTDIGKKENALTLMLVSDSSYTEKNRVLREKSRAKAQKKVSKNDKAFMKDPSIVYRGMFKNQLSGFRKMTTEINRAIRNLGKDAEVEVHVAMEATGTYYLKLARYFHDLQQKQEEGSNRKYMVYVFNPRQVKHFAGFLNADNQNDKVDSGIIARYIRSAIVARDVEAREWIPAKEGASQMRNLARTRESLIKMKTMEQNRIEALSQNPDHCRIAMKTHKDLVEYLEERIDELEYVIKDNAKQGIYSDMKEDIELLCSIPGISEVTAINILSEIVDIKRFEKAKHFVGFSGMHPSRKTSGTSVNHRGKLSKHGNNRIRHSLYMATMNATQHNPVIKEYYQRLLNREGQDKKKKIVALVACMRKMLHIIYGVLNNKTAFDPEIAMAHCK

SEQ ID NO: 159919 - protein, 345 aa, unidentified
MQIKSIGIDLGKTTFHLIALGIRSQVVIRKKFSRSQLLMYTANLPASLIGMEAGVGSHFLGRALREQGHQVRLIPAQFVRPFVKSNKNDYRDAEAIAEAVERENMRFVPIKTEDQLDLQALHRVRDRLVARRTSVINQIRAFLLERGISFRKGPASLRRQMPEILENADEKLSTAMRRLLDFLWQEWKGLQLQIESLNADLEQIASRDAACVRLQQIPGVGPLVSTAVVSAIGNGAAFKKGREFAAWLGLVPRQWSTGGKAKLLGISKRGNPYLRKMFIHGARAAVLRVKREGSSLGKWMSGLEARAARNVVIVATANKLARISWAVLASGHDYQPRRKALVFSN

SEQ ID NO: 159920 - protein, 441 aa, unidentified
MEEKKSEDFITMDLVYPKYCTPVGITTEKQEIIAHPEGVKRFIGIDLSKQNCYVCIIDLEGWVVLHQNFSLHSKAKSQLYEVFQAGDIALMEASTGTFTIARAINKLPGVVACVVNPHTLVNNSKKKTDKEDALFLAKTLFRIPVSELQLVSIPSDEEMDNRDVVSHYRKINDQRTQTSNRLHALFFDKGFPEAGKTYNLRTQRGRMLAIENCFGNYREYATAKRLAKELSKELTLFEELQARGEKQLAKIVEQNPQMTTILGSIPGVGIKVISTFIAFVGDIHRFSSSKQLAAYCGLVPRVYQSGQKDAARRITKEGQAALREYLVESVFSMQTTKFAFPLKKKYRELRDRMSGRKAAVAVARKLVELMYAMLKNKTLFTVIDPKEKEQLESYYSRKNLVVSGRYNKIRQSCKSFETFQYNSNLLCPNELGVLKILQNGG

SEQ ID NO: 159921 - protein, 314 aa, unidentified
MVLQRRLPNQLQRICEALGRHGEEVEGIAVESTYNWYWLVDGLMDAGYRVHLVNTAAVKQYEGLKYKEDVRDARWLAHLLRLGILPVGYISPKEARGVRDLMRKRGQLVGQRSRQILSIENMLSRDTGGRARANEIKRWQETDVDQLALGESSRLAVKSNVAVMHCLNEQIERLEAEIRKKAKLRPDYQGLLTVSGVGKVLALTIALETGEVSRFATVGDFSSYCRCVGSEHLSNGKRKGSGNAKNGNKYLAWAFVEAANFAVRYEPAVKRFYQRKCARTMPVVAIKAVAHKLARACYHVMRDRVPFDVQRAFA

SEQ ID NO: 159922 - protein, 351 aa, unidentified
MGRFTTPKSEVTFAGIDFHKRFSVVALGDKDGTMAAKQQKLINDEQQIREFFAPYAGIHCAVESCRGYEWFVDLLKSIGLQVTVCDPRRIKLIAETYTKTDKRDARVLMELVAKGFLPACYQPTAEERALREQLRWRVQLMKTSTRHKLSIHALLDKENKGCADPFTLKGRQYLEAVSLTETRRALINKHLKVIDFIQEQLDVEFRWISQEVKNRAAAQLLLTIPGIGAISAMMILAELGDVTRFRKAEQVAAYLGLVPSENSSGDKRRLGGITKQGSKLLRWLLIQDAWQAIRVDPGLELRFKKVCARKGKQVAIVAVARKLSEIAFCVLRDQKPYDAKRLAAGSARVAS

SEQ ID NO: 159923 - protein, 461 aa, unidentified
MKKKRSNFRRRSPGRGRVIEVARKEKELERINHHAAGIDIGAESHFVAVPPASTPTPVKQFGVFTRDLYALADWLAECGVKTVAMESTGVYWVPLYEVLEERGFEVKLVDAHKVKNVTGRKSDVLDCQWLQQLESYGLLAGAFRPADEIVVLRGYTRQREMLVKSAATQIQHLQKALQQMNLRLDNVVSDITGHTGMRIIKAILSGERDVRKLGEMRDPHCHASAAEIAESLVGNYRAEHLFALKQAVELFEVYPQKIAECEAEMEKYLQCLPHKREDEPPPLPEGEKRHRISFNVRDEAWKLTGVDLFRIQGLNAETVLRITAEVGVEVASRFPTEKHFTSWLSLSPNNKISGGKVLSSKTKVSRNRAAAAFRQAAVSVERSESALGAYYRRMKARKGPAQAVTATAHKIARIYYHLLKTGEEYMDSGAQAYEERYRERVVSNLKKRARGLGYELVAVAP

SEQ ID NO: 159924 - protein, 354 aa, unidentified
MKDSKYYVGMDVHKAATVITVLNSAGKQIMKSIVETKANTILDVVKGLRGEIHLTFEEGTHSSWLYDLLKSQVYQLIVCNPRDEKLRSSGNKSDDIDSYKLAEMLRLGGLKAVYHGQEEMRKLQELTRSYQYLVEDCTRVKNRIKAIFRARAISYKGDSIYQASKRLDWLAQLKEEGVKNRAQYLYQELDCLLTLCEQSQKEMIAEARKHKAFKILDSIPTLGSIRVALILAAMLTPHRFGNKRQLWCYSGLAVVSSSSADYSIVNGQIKKSKKQVATRGLNHNFNRTLKMVFKTAATSVSKGILKDYYDALLAKGTSPQMARLTLARKLAAIVLSLWKKGESFNPDKFIMQTV

SEQ ID NO: 159925 - protein, 403 aa, unidentified
MVLVGIDWSEKWHDVCLMDEGGRILAQRRIDDSLAGLSLVQSLIAEHASDPAEVVIGIETPHGLMVRGLRAAGYAIYAVNPQAASRYRDRHSVSKKKSDRGDAMMLADLVRTDRHKHRLLAEDSEQAEAIRVLARSHKSLIWTRQQLVNQLRDSLREFYPGALEAFGKHLDHADSLALLKQAPTPARGRSLSQSKIASALRKARRHNVEERAVAIQDMLRAPRLEPPARVAQAHGVVVADLAGLLLDVVARIERHQKELDEALKEHPDAEIYLSLPGLGTVLSARVLGEFGDDPNRYQDGKARKNYAGTSPITRSSGTVHVVLARFVRNDRLADACQWWAFSAISRSPGARRYYDLQRARKKNHNEALRNVANRLVGILHGCLRHHQLYREDIAWPPTEAAAA

SEQ ID NO: 159926 - protein, 447 aa, unidentified
MLWTDGSLRQPVNKRCPMNSSPTPHKIKHVGLDVHAETIAVAIADPSGDLRSYGNIPAHTHSLDKLHRRLAEDGSEIRYVYEAGPTGFALCRHLRSRKIVCEVVSPSHIPKCASDRVKTDRRDALGLARLYRAGELTPIHVPDEADEAIRDLVRCRLAAVEDLRRCRQRIKGYLLRYNLRYSGKSSWTAEHLNYLSRIKLPFPAQQIAFEELLNAVKDPADRILRLEVALEAQARLWARFPLVQALMSLRGFALINAVTWVAEIGDFSRFDHPSKLMSFIGITPSEDSSGQRRQQGSITKAGNAACRRAIVEAAWQYRLPARVTPTIRARHHGQPKAVLDIAWKAQVRLCGRYRHLVASRKKTVVALTAVARELVGFIWAIARVIDGKPVAMREETPAPKRKPKGAKAATSKPETGSKPKTSKGEPKSQAKIVYRLDPTRKYQKRTQ

SEQ ID NO: 159927 - protein, 359 aa, unidentified
MPIVAHAYQFVVGVDTHAGRHAFSIVETRTQTEIDSGEFPVTPAGFARAITWIRRRTKSSPQVLVSMEGTGSFGQTLRLDLEREGLLVVEAPKPPHRAGRITKSDLVDARRAALGVMGTPVESLVLPRCGGAREALRILLQARGALTVENTAQINRLTALVRTHSLGIDARRALGRLQIKEIAKWRTRNEGIDLRTARNEAVRLAQRIVTNRNDLNDNKTVIEDLIRQEAPELLDIKGVGPVTAAQFYLAWSHPGRVRSAAAFVALAGANPIPASSGKNQRHRLNRGGDRALNNALHTVILVRMRHDDETKTYVQKRTREGKSKREIMRCLKRYLARRVYRTLQNANTGASIQPLKKTA

SEQ ID NO: 159928 - protein, 374 aa, unidentified
MIKIARIGIDTSKGSFQLHGVNEKDEVVLRRTVRRRQFLEFMAKLEPTVVGLEACGASHHWARERARLGHRVMLIPPQAVKPYVPAGRKNDKNDAEAICEAMSRPRVRARLVPVKSVEQSASQMLMGVRDSLLKRRTQLCNTLRGHAAEFGLVAAKGLDKIEPLLARIAGDEGLPALAREIFADLGREHAELSKRIAQIDRKLAAFHRSNELSRRLMEIPIVGPVGAGLLITKIINPHGFRSGRLCAAWVGLTPKDHSTGGKQRLGGITRAGDESLRAVLVSGATAYIQQVRRGRIVPSPWLAALLERKPPKLAAVALANKTVRIAWKLMTSGGRYDPTHRVDREGPGASLYGGLRAEPLAPSPTAGHNHAVAA

SEQ ID NO: 159929 - protein, 411 aa, unidentified
MEKVYDKCCGIDVHKKLIVACFRKGNQQEVRDFGATTRELLELCDWLKDGGCEMTAMESTGPYWKPLYNILETCELNAIVVNARHMKAVPGRKTDVKDAEWIADLLQHGLLQASYIPNRDQRELRELVRYRKSLVGERNRELNRLQKMLEGANIKISGTITDINGKSARNILEHILSGKMIDSAEYDILYEKKIIAHNLKASKEQIIDDLNGVLSDLQKKMMRLLLKHLDELDAIIGELDDDIDNFMKPDEKKAAEVIQDIPGIGNTSAQAIISVIGTDMSRFPTDSHISSWSGLCPGNNESAHKRKSGKTRKGNALLRETLVVCANAAVRNKSSYFYAQFTRISAHRGRKRALVAVAHSMLIAIYHILMDGVVFKDLGADYYNQFNKERKINAYLKKLKALGWEAPVVAA

SEQ ID NO: 159930 - protein, 423 aa, unidentified
MRHQSLDMESPIQDAMGPARRCGTVLRCIERSAPMPQKNDLSRSLVAFEQDRTLVVVLEISLSTWLVAGLLPGVARQPAKKLGADEHELLKVIHRWRAEASRAGREIDRICVAFEAGRDGFWLARWLAARGVEAYVIHSASVAVSREHRRAKTDRLDSELLKRAFLGWLRGEPGHCGMAAIPTVEEEDARRPSREREKLVGDRTRIINRMKATLVRFGIRGFKPTLRKSSERLEEVRTAEGVPLPENTRAELGRDMARLRVVLDQIKAIEADRLRKLEATSEIESGPSAMIRLIARIVGIGVETADMLVREVLSRDLRDRQAVARYAGLTGSPDESGSRRREKGLARAGNARVRRGMIQLAWRFLQFQPESGLATWYRERTADRRGSTRKTMIVALARKLLIGLWRLVTTGQVPEGVLLRQGA

SEQ ID NO: 159931 - protein, 356 aa, unidentified
MSYDVKYIGMDVHKEAIVIAVLNEGGKLVMESVIETKANSILQFLHGLRGELHVTWEEGTWAAWLYDLLQPQVQHIVVCNPRRNALLKEGSKSDKVDARKLADLLRTGMLRPVYHGENGLRTLRELGRSYQTISKDLTRVMNRLKALYRGWGIACAGTQVYAARSREEWLSKIPQAGVRRRAELLYQQLDGLQALRRNVRPEFLAESRKHKAAKLLRQIPCIGPIRAARLLALMQTPHRFRSKRQLWTYSGLGVETHDSAQFRFVSGQLQRSKKPQQIRGLNRNHNHEMKEIFKSAATRASAGRGPFHDFYAGLLAKGMKPEMARLTLARKIAAITLTLWKKEERFDAEQLKTQAA

SEQ ID NO: 159932 - protein, 352 aa, unidentified
MDHIGIDVHKRDSQIYILAEGGEVIERRIRTEPERFDAVLGTRPRARIVIEASTDSEWVARCLEALGHEVIVADPNFAPMYATRTRKVKTDRRDARALAEACLLGAYRPAHRLSDPQRHVRGRLVVRDALVRTRTRYISIIRALLRQHGYRVPSGSAEHFVQRVQRLPLPGRLRSVVAPLLALMRPLNAQLTYSDATIEHLAVQDPRLPRLRSVPSIGPVTAAAFLAAIDDAQRFPHAHQLEAYLGLVPGERSSGETQRRGAITKAGHSRTRWLLIQAAVSILRRRPPQAEDLRTWAMRIAARRGKQVAVVALARRLAGILYALLRDGSVFEPQCVRSPRHPAAAAAAPVSM

SEQ ID NO: 159933 - protein, 408 aa, unidentified
MDKVNPRCAGLDVHKDSVWACARVDGGKPRVEKFGTTSRELLRLGDWLADQGVTVVAMESTGVFWKPVWNLLEGRFELMLVNARHVKQVPGRKTDVRDCEWIAQLLEHGLLKASFVPDRPQRELRDLTRQRTQLLNDRARVVNRIQKTLEDANIKLASVATDITGKSGRAVLDALVDGRLSPEQMAELVHKRMEAKKPLLREALAGRVTAHHRFMLEQLLDQVDHLDGLVGTFDARIEEVMNPLGREAVRRLDEVPGFDVRTAQNVLAEIGTDMTRFPSPRHLASWAGLCPGNDESAGKRRSGRTRKANRWLKGALTQAAWGASRTRRSYFSVRHRRLTARRGVKRATIAAAHSLLVTTHCLLCDPKPYADLGAGHFDTLQSPEQQAQRMVRKLQRLGYAVELKRPAA

SEQ ID NO: 159934 - protein, 272 aa, unidentified
MKKVRFVGLDVHAQTIAAAVAEPNGEVRHLGTIANRVESVRKLLKKLGTPGQLKVCYEAGPTGYVLYWQLTQLGVPCEVIAPTLMPRKAGDRVKTDRRDAERLARSYRAGDLTAVWVPDRAHEALRDLVRAREAAKKDQLRARHRLSKFLLRQGRRAPEGTTAWTGKYLKWAQEQRFEHAAQEATINDYLHEVEHMRERVARLEQAITEAVKLASPALQQVIHDLQALRGIADISAVTIAAELGQVSRFGSARQLMGYCGAVPSEDSSGKRT

SEQ ID NO: 159935 - protein, 343 aa, unidentified
MDHFAGLDVSVNETSVCIVDDTGKIVREAKTASEPEALLAVLTNPGYHFKRIGLEAGPLSQWLFSALAEAGLPVICVETRHMRAVLKAQINKTDRNDARGMAQMMRAGLYRAVHVKTLRSQKLRMLLTHRKLLQSKAIAVENDLRGTLRNFGLKVGIVGKLKFEARIRELVENLPDLAVLVEPLLVVRRVLREQLGILHRRLLAIVQDDEVCRRLMTTPGVGPVVALTFRATVDVPARFRNSKAVGAVLGLTPSRYQSGEINRTGAISKCGDEMMRVMLYEAAQSMLVRSAKWSWLKAWAMQIARRRGMKKAIVALARRLAVIMHRIWVDGAEFRWSKNAVAA

SEQ ID NO: 159936 - protein, 430 aa, unidentified
MTTLQSMPIDAILVAIDISKHRHEVLIEVPGRTRRRRLTVLNTRQEHDRLVDVLAAFEAPVVVGFEATGNYHRALAHRLFLEGFDLRLISSMSLARTREALNNGWDKNDPRDAQVILHMLRIGACQTFHDPLAHGINDIQELSKTHDMVSRAKTELWHRLLSHYLPLYFPEAERFRGNARSDWFLAFLKAFPTPSTIQRLTKEEFIAAAWDVIGRKVSKQRLLSDIYETANSSMGLPVDPRSDAVAMFRMVLAEGRSLIRQRDRIERLAVERLSGHADYQRLMTIPGIGPINALTVLAEAGDLRRFRHHRQFLKFCGLDLSTHQSGTFRGRTKLSKFGNARLRRTFWMAGQIAIRQRDNSFRDKFERYVEADRTSLDRRRKALTAIAAKMARTAHAIVKSGSDYRPFFEGAVPGGRTPLCQGRGGATATS

SEQ ID NO: 159937 - protein, 332 aa, unidentified
MYLGIDVHKRYAQVAVMDETGEIVEEVRVENANLDDLAQRYAGADAAIEATSNYYHIHDTLSEHLDVTVAHPKELNQIADSDKKTDRVDAKELARMVRLNSVPESYVPTDKIREARALVRGRQTLVENRTKYANKIHGLLSDHGITEDVKPLSVEGREFLRELSLPTPWDALLASYLEVVETLTEEIQKLEKTIEERAGSLKETQLLMTIPGVSYFTALTIYAELGEISRFDDDKAVVSYVGLNPVIRESGDSRIEGSISKRGSGRVRWLLVQAANTAVHTCNDEYLSQFYERIASRKNSQKAIVATARKMLVSIYHMLDRGEVYDPPGVTA

SEQ ID NO: 159938 - protein, 388 aa, unidentified
MDRNARVLFSQAVGNDPAAIVSLIGEIEALEAENTRTAIDMLGGAASLLCAMFAEAGLPLVHTPGLAVNRARQGIRGGERKSDPKDAVVIAELARTRPDLRAVEPPDPLDAEIRLLVSRRRELVTEQTRRAARLRDLLSGLFPALEAHRPTTRTGLVFLSHYAAPEDIRAAGAKRITRRLTKAATGLRGLEALAADAAQAAQAQTVTIPGAQLRAEIIADIAREALAARDRLKATDHAIRERLANHPDTALILSMPGMGATLTAEFIALVGRIDRFDSADALAAAAGLAPVLRQSGKTSFLRRAAGGDKALKRVFYQAAFTSLGRPDSRAFYDRKRAEGKRHHQAVIALARRRVNVLWAILHKRQPLPRKLQNGRLTEALGCRLNAAN

SEQ ID NO: 159939 - protein, 454 aa, unidentified
MQQPSHAVEEIDGDESERILTVAAAIDVAKASGMVCVRRPHPSIEGRRTSTVWEVASTTNSVLALGEDLVAHGVQRVVLESTSDYWRPFFYLLEAAGLVVWLVNARDVKQVTGRPKTDKLDAVWLAKLNERGMLRPSFVPPREIRALRDYTRLRTELVEERSRHKQRLEKLLEDALIKLSSVATNLLGVSARAMIEALIAGQRDPKVLADLARGRLATKRAALIEALTGRFDDHHGDLAQLLLDQIDACSDKVDRLTARIEALVAELPEPTPPTDGPAPSDVPVGHDPEAQRLSTVERLDEVPGIAERAAQVIIAEVGIDMTRFPTPAHLVSWAKLSPQTIQSGPRAKAGKTGKGNRYLKGVLGEVATAAAKTDTFLGARYRRLIRRRGKQRALVAVARSVLVIVWHLLNDPDARYLDLGADYHTTRLDPDRRARDLVRQLQALGHTVTLAPAA

SEQ ID NO: 159940 - protein, 358 aa, unidentified
MAGKVTETAVVGGVDTHKDLHVAAVVDQNNKVLGTQFFSTTRQGYRQMLAWMTSFGALKRIGVECTGTYGSGLLRYLQNAGLDVLEVTAPDRMERRKRGKSDTIDAECAAHAAFSGIRTVTPKTRNGMIESLRVLKTCRKTAISARRVALQIIHSNIISAPDELREQLRNMTRMQLIRTLGSWRPDASEYRNVTNVYRISLKSLARRYLELHDEIADLDVMIAAIVDELAPELIKRNAIGYESASQLLITAGDNPQRLRSESGFAALCGVSPVPVSSGKTNRYRLNRGGERAANSALHIIAIGRLRTDDKTKEYVARRVAEGHTKMEAIRCLKRYISREVYTLLRNQNRQINSIPITA

SEQ ID NO: 159941 - protein, 317 aa, unidentified
MNNSKVQIPVNIGVDVGKVNLDIALHPTGEFYSIPNSEAHIRRFVKILKGYSIERIVVEATGRYEHALVQACDQASLPIIVVNPTSVRRYAQAIGVLAKTDRIDAQVIAKYAATLKPEFKPIPDKTSQKIKDLLTRRSQLLDMSTMEKNRLQILPKTLHRSINSLLKMLQSQVKTITQQIDQEVAKVDHWRVKAEILTSVPGVGKVLTYTLLSELPELGSLNRKEIAALVGVAPINRDSGKLNGKRRIRGGRHRVRTVMFMAMLSSIQCNPVFKRFYEHLKAQGKLPKVALIACMRKMIVVLNTMVKNQEPWREIMA

SEQ ID NO: 159942 - protein, 447 aa, unidentified
MEEEQISMEIVNPHAAGIDVGSRSHWVAVGQKETDIREFGVFNQDLFEMADWLFDKRVKTVAMESTGTYWQNLYAVLISKGFHVILCNGKFTKNIKGKKTDVKDCQWIQKLHSLGLLSSSFLPDGKTEELRTYCRQRANLLHQAASTSRKMQKNLRLLNLRLDVVVKDICGLTGLLIIRAICNGETNPQKLAALRHGNCRKSEEEIAKALQSNGRKDYLFALRQELDTYDHLQKKIQQCDVEIEKMLEEIIASDDNKRQHHIEPKPYKRINKNTPENIDLNLKSYQMFEGTDLLAIEGMSYSTVLSLMSEVGIEGIRKFPSAKHFCSWLRIAPNNKVSGGKVLSSKVPKGSNRLKIALRNAANAIGNLKDSTPLRDFFQRINFRKGRVSAISATARKLAVIIWNMVVKGTPYNNPEGYLFLDQKRKRIQKQIAKFELKPEDLNFATN

SEQ ID NO: 159943 - protein, 398 aa, unidentified
MLYLAIDQHRKQLTVNLRNEAGDVIVKRQVSTEWKRVREFLDELRNQSVPEGGVAIILEVCGFNDWLLKLLAEYGYQQIVLVQAEKRDRHKTDRRDANALGELLWTSRHRLAAGKKVLNVRQVVPASPRDAEDRQLTTLRHRLCRLRTRTLNRVQHLLLKHNLQRDCPTKGIKTKAARKWLSELTLGPIDRLELDQLLAHWELADKQLAELEPKLAERQALNATARLIATIPGAGAFGSLTLASRIGAIERFAHAGSLAKYWGLTPRSNNSGDSKQRLGSITKEGSALARFILGQMVLHVLRRDAATKEWYRRIKKRRGAKIARVAVMRRLATILWYMIKRQQPYKLSAANDPAAACATVPPDVNAFFKASQGRSKEEKKKAAATRKAPAAKASLTRP

SEQ ID NO: 159944 - protein, 458 aa, unidentified
MAHRKKKIPAQLVEDEDYQLRHEKVAGIDIAKDKGDVCTRLPAAREGGRRRSRVEENVPARARDILELGARLLADGVELVVMESTSDYWRIWYYLLESLGLAVALVNSSHARQLAGRPKTDRLDAQWLARLAEMGLLRPSFVPPPEIRALRDLARTRLQLVRDRTREWQRLEKLLEGALVKLSAELSSLAKVKSARVILEALAGGERDPKSLAGLALGSLRGRRGDLEAALEGMMPRGHHARLIRIHLDHITFLDRSVAAVEDDIAASLEEIPAARGIDAAGVASPDPGPGAAVLPADARLAEIPGVTLDLARAIIAETGLDMSAFPTPGHLVSWAGLAPVTRQSGPRQRKPAKGQGNGYLKGYCTQAANGAGGTATFLGERLARLSRHLGGARARCAVARSILVIIWHLLNDPEARYTDLGADWHARKTDRDKKIRGHLRGLQALGIDTSSLTATAA

SEQ ID NO: 159945 - protein, 421 aa, unidentified
MKPQVPEAFAAFVGLDWADAKHDICLQVAGSTRREFLRLEHRPEVIDAWVCTLRTRFNGQPIAVCLELNKGPIVSALQNYNFLVLFPVNPLTVAKYREAFTPSRAKDDPTDAELQVELLLKHRDKLTPLVPQSPTMRALAQLVEHRRRLVGDKVRLTNRLTSALKNYFPHVLQWFQDKDTAIFGDFLSRWPTLKAAQLARRATLERFFRAHHVRSVDVITARIEAIKNAVALTTDEGVIAPNTLLVQALVAQLRVTLQAIADFDTAIAQRAQAHPDFPLFDALPGAGAVFAPRLLVAFGEQRERFTSAAELQKYAGIAPVTERSGKKSWVHWRLQCPTFLRQTFVEWAAESIRHSFWAQVYYQQQRDKGKAHQAAVRALAFKWIRILYRCWHERLPYDESTYLQALHRRGSSLIQNLAQAS

SEQ ID NO: 159946 - protein, 349 aa, unidentified
MEIDTIGIDLGKTVFHVVGLSRAGEVVVRRKFSRTQLLRFTANLRVRLMGMEACGGSHFLGGRLREQGHEVRLMPAQYVKPCVKTNKNDYVDAEAIAEAVGRANMRFVPIKSNEQLDMQSLHRVRDRWVARRTSVVNQMRGLLLERGITFRKGRRHAEASLPGVLEDPENGLSGLLRMLLAQLQSELRQLQSQIDEADTLIGKAAGDHEPCRRLMGIPGIGPLTATAVAASIGNGTEFRKGSSFAAWLGLVPKQESTGGKQKLLSISKRGNHYLRRLFVSGARAVLQCRDKQSPGLSVWLGQLASRVHTNIAAVALANKMARVAWAVLAKSEAYRPPLAVISTEALVCN

SEQ ID NO: 159947 - protein, 385 aa, unidentified
MLSKGGEKTQNREGRGRSNTLEANKPGGEQDRRATTKPAESPNSRWGHKVEPELRKAGSGPKSKWVKVMSQYAELYVGIDVAKRTLEVALSSGELLSVVNDDAGIADLVQDLVKRAPALVVLEATGGYERKVWLALLEAGIPTARVNPRDTHHFAQAHRQLAKTDRLDARGLMLFAAQMRPRPDVAPAAADERLKELVGRRQQLTTMLAAEHNRHQQAISPANRRSIQTVIRFLERQRKALDQAIEKHLSKTAQAQELNELLQTAKGVGRVVSATLIARLPELGTLTRRQIAALVGVAPYDRKSGDWDGRSHIFGGRADVRCALYMATLSAVRRDPHLRAFYRRLREQGKAKKVALTACIRKLAITLNAMVKNRTPWRPSCPTLA

SEQ ID NO: 159948 - protein, 344 aa, unidentified
MINRNLIAIDLAKDIFQVCRVSKQGQTLSNKPVTRKKLKEQLINTAPSIIAFEACGSSHYWGRFASLYGHEVRMLPAKAVKAFRQGHKTDETDAQAIAIAAQHQPIRSCAVMNIEQQTLQSFETSRRYISKQCRALSNHIRALAYEYGLTIPKGNGHLLKRVSVILEEAENGFPHALRIILHSLCEQLKIQQALLKMIEKEKNQLVKGIEPCKRLTALEGVGPVGASMLYSCLGHGEMFKNGRQAATYLGVTPKQHSSGGKTIIVGIDKKGGNKALRAVLFQGALSVISRLPEKPLTLKQQWLIQLVRRVGVKRACIALANKTVRTAWALLSSGEAYNPKPLTV

SEQ ID NO: 159949 - protein, 347 aa, unidentified
MDKELYIGVDVSKQTLDLAYYDGESIDWKNAHIKVSNNNAGFKKIGSWVAKVSKRFDIVLFCMEYTGLYTQNFRLWLEEKHYIYRMVEPRKMHRFEPDLDDGLRSLDRIKTDELDSFRIAIYCEQNHRKILRNPSKLPPPVYFKLKRLLAERKQTVKQSVLYKQQLHDICAYDTDLSVERKNGQLKTLNDALKGIDNEIDMYIKEDADINKNFSLLTSIPGIGRVVALETIVLTENFMAIDNPRKYACYIGVAPFKKESGTSVRKGSSVSKKGFKQAKADLSIACLVCMQHIPNIRDYWERKRKEKCSGIVFNAIKFKMILRMFAVIKRGTPYVETDNYRNGKNKQP

SEQ ID NO: 159950 - protein, 386 aa, unidentified
MHHPTTLPVSEQTCSREDCATLFVSLELSRSTWVATSLALGSRKMSKHTLVGGDARKLLDLLARLKSRAEQRIAAPVKVVAIQEAGLDGFWIHRVLEANGVESHVVDPASIAVPRRHRRAKTDAIDGETLLRTLMAWQRGEPRVCAMTVPPTPSEEDRRRVSRERATLLRERIRHTNRIRGLLFGQGITNYNPLHKNRREGLEKLRTGDGQPVPVHLKAEILREIDRLELVLRHINEVEAERDEMLRPGQASSPVALLMRLKGIGPEFAAVLYLEGLFRHFENRRQLAAYAGLAPSPWKSGSVDHEQGISKAGNPRLRTTMVELAWMWVRYQPASALSCWFRQRVGSERGRIRRISIVALARKLLIALSRYINHGEIPAGAVVKPV

SEQ ID NO: 159951 - protein, 412 aa, unidentified
MQDILTCAMGLDIHRDVIVACLAKGELGTDPEIEIRYFSTLIPEMRKLRDWVLEAECRYVAMESTGIYWQPIYEMLEPCFDGQISILVVNARHMKNVPGRKTDMRDAQWIATLLRAGLLKGSFIPDKTFRELRHLTRYRKSIVRDITAQKNRIDKFLQSSGFRFTAFLSDAFGASGRNIIRHLMEYGNISREALDRCLKTQTRKRIDEILIALNGSLSEHQRGFLRMIFGHLEALEQHRHTVEDAITKEITKHEEALSLLCSIPGIDVTAAAAIIAEIGTDMSAFPDSQHICSWAGLSPGNNESAGKRKSAHINKGNPYLKSMLCEVGWVISGKRSLYLSGWYWRIKQRKGAKRATIALARKLLALIYTMLKTGSPYNEDCFEIRRKQSERKRASRMVNELQKLGYFVVAPG

SEQ ID NO: 159952 - protein, 351 aa, unidentified
MIIIGVDYQPSDQYIAFVDTETGEYGERQLSHSEGEAEKFYRELAARGVSVRVGMEATGYSRWFERLLAELGIEVWIGDAAEIKTKRVRKQKTDREDARLLLRLLRENNFPRIWVPSPENRDLRQLLWHRHRMVQMRTRIMNQLQALAMNEGQRRKKKLWSEAGRAQLEKLLLAPWASRRRKDLLELLDRMNPTIEGLTATIEQEARKRAEVLRLMTHPGVGPITALAFVLIIGTPERFKCGKQIGSYVGLIPCEDSSAGHQRLGHITKQGSSLLRFLLGEAAQAAARWDADWRRRYMHLALRRQRNIAKVAMARRLAVRMYWMWRNSWEYSEWVKFGSHAGQLGLRHGVN

SEQ ID NO: 159953 - protein, 402 aa, unidentified
MYNAVGIDVSKGKSTVAVLQPAGVIIRKPFNVNHTSSELDELAKYIGSLEGETRVVLECTGRYHEPVVKTLSEAGLFVSAVNPHLIKNFGNNSIRKVKSDPADAKKIARYTLDNWIELRQYSSMDNTRTQLKTLNSQFSFFMKQKVAAKANLIALLDNTYPGVNKLFDSPVRDDGSEKWVDYAYSFWHVDCVRKIGLKTFTERYQAFCKKHHYNFQPAKPAELFLAYKDLIAVFPKEASYKLLIRQSIQQLNLASSHVEELRSKMNELASTLPEYATVMGMYGVGKTFGPQLIAEIGDISNFSHREALTAFAGVDPGVDQSGTHNSKSNKASKCGSNRLRKTLFQIMSTLLQTAPEDDKVYQFLVKKRAEGKPYYVYMTAGANKFLRIYYGKVKECIRNLEQ

SEQ ID NO: 159954 - protein, 334 aa, unidentified
MVARTQGSFDKDGATKMTNSTILTAGIDTSKAKLDVAIHGLKRGKVFINGPAGWRDLQAFLTEHGVARVGIEATGGYERGVIQQLRQAGFIVVLLQPLQVKAFGQLHLRRAKNDRIDAMLIAACTDMIDAHNKLPPDPRFQGLGDHLTYIEQTEEDIVRCKTRLEHIDEKRLRRTIDADIRRLERRRQEEIKRLLAAVRKHADLARRLDLVLSIPGIGARTALSIVLRMPELGQVSREQAASLAGLAPFVHQSGKRQGETHIGGGRGRLRRALYAAALPAAFRWNPALKAFYARLTARGMSHTSALVACARKLLIYANTVVARGTPWCNRTADA

SEQ ID NO: 159955 - protein, 316 aa, unidentified
MSSPSVFVGIDVAQAELVIALRPTEDSWTVGNDEPGIAALIRRLRPLAVTLIVLEATGGYERALVAALATAGFPLVVANPRHVRDFARGTGQLAKTDRVDAQILALFAERVHPTPRPLPDAATQALEALLARRRQLLDMLTAERNRLAHAGPPIARDLHRHIRWLERRLGKLDDDLDQQIQRSPVWRTQDDLLQSTPGVGPVLSRTLLAALPELGHLTHKQVAALVGVAPLARDSGTRRGHRRVWGGRAAVRAVLYMGALAAAHHNPVIRAFYQRLVTAGKPKKVALTACMHKLLTILNAMVRSNTAWRANVAQTT

SEQ ID NO: 159956 - protein, 337 aa, unidentified
MEQITKNEIYKHYIALDWSKVNFALASIRDTGTKYKVVEHPADLKLLKQCLKQLPGKKILTIEETTTAQWLYVELKDHVDKILICDPFHNSLLQSGPKNDKIDARKLCTLLRNGSLKEVYHTTDELYKLRKLVSCYDDFVTASVRMKNQRSSMFLSEGKDHKKEKILSGNTINKFITGKQNSAIEHIELVRKEFEQLFGKIQKENQTVKQLVKVSGIGAKLAVTILAVVTDTKRFENKYKYFAYCGIVKHKKDSGKKNYGKRDARHSRILKRCYKTAANAAIGGNNDIREYYEYLLQNNYSLEDARNQIARYIAKVTYGMMKHQTDYRPYQWREGKQ

SEQ ID NO: 159957 - protein, 433 aa, unidentified
MPTNHPYDLVIGLDRSDRKADLQLIDTRNTNTQKQTIATSPEELHDWLARLRQDHPQARVAICLEQPAANLILFLETYSWITLYPINPITLQKFREAFVTSRAKDDGKDAEYLAQLLLSHHDKLKAWQPDDSQTRQLQQLVSHRRAVVDERTGLSNRLKALLKQYFPQALDLCGEDLWRPLATAFLLKWPTLQSLKKAREESLKQFYYLQGSRSQKLIEQRLERIGKAVPLSDEIALLQSYTLRVQLICKELQLLLRTIQQFEEQIAKVFQQHPDRQIFEAFPGAGPILAPRLLASMGSERKRFARRENLQCFSGVAPVTKQSGGKCHIHRRYLCPKFLRQSFHEYAKESILHSRWAASYYGQQRNKGCSHHTAVRALAYKWQRIIWKCWQSHSIYKEEIYEAALKKSRSPLIGLLDQIELGKFPVKTRVKKT

SEQ ID NO: 159958 - protein, 399 aa, unidentified
MKNVYASVVGAGVDVHYKFSTVALVDAGGRMVRRERLDHTDRRALRQRLSQWPTGLTAVLEASFGWGWLSDVMEEAGIKVRLANCFKVEKMRQALGEAKTNDKDAALLAPLPMQARNWWEVWRAPRQVRDRREWMRHRMDLVGLQTSTKSRIHAIFHRHGIFHEFSDLFGGGGRRFIAALCQGSDPQARHLSQGAIEALRDDMTVLVHLRLALARIANVLRKELERSPQAGWIMSVPGFGLILAHVVLSEIGDIKRFPKSRSLANYSLLGPRSHDTGEDLPPGQAPLGRHLGQRGNRVLKWAFIEAAHGAVRHGGLWRQMFDRATDNGRRDRGRGYIKVARSLVDVVYAVLRDQRTYQEQRPKRPQEAMTHSEKASRPGTGRLYRPMVAAVKSGRRTSS

SEQ ID NO: 159959 - protein, 341 aa, unidentified
MREFIRIGVDLAKNVFQLHGIEREDGSPFQRKLTRTKFREFFSRVTPCRVGMEACGSAHYWARVLRAMGHEVVLIAPVYVKPYVKRGKNDAADAAAICEAMSRPEMRFVPVKSADQQAVLMLHKTRDLLVKQRTMTVNALRGHLQEFGLIAAKGVQRVRELVVLAEADQELPEEAKQAVALLAWQSEQLAMKIDELEKTIAAAGAKRPESRLLQDIPAIGPLIASALTASLPDPSAFKSGRDFAASLGLTPSQHSSGGKERLGAINKKGNRYLRKMLVVGCTSVLRVAHKRKGALAEWIVALKVKKPERVAAVALANKLARICWAVLSTGETFREELYARA

SEQ ID NO: 159960 - protein, 341 aa, unidentified
MKHDMHVLGIDIAKRVFHAVGMDDRGNIVYRKRLSRHDLMPFIATLRPVLIGMEACGGAHYWARRFREHGHEVKLMAPQFVKPYIKSNKNDMRDAEGIGEAVTRPTMRFVPTKNVDQQDIQALHRVRERLIGARTALVNEIHGLLHEYGIVVPKGVAKFRQTVVGKLEADKAKLTPLSQEMFGKLIDEFAALERQLAYYQEKLATVATTHPECQRLMTIPGIGPFTATALVAAVSDASAFKNGRQFAAWLGLVPRQHSTGGKERLLGISKRGDSYLRKLLVHGARTTIRWVDRKTDRRSQWIRQLVERRGKNRTAVAVANKNARIVWVLLTSHQDYQLATV

SEQ ID NO: 159961 - protein, 349 aa, unidentified
MNHYVGLDVSLEETAICVVDGTGRIVKEARAASEPEALIAALREIDWPLERVGLEACSLTAWLHDELHSAGLPAVCIETRQANAAMKTMPNKTDRNDARALAQIMRTGWYRQVHVKSRQCRLWRSLLVARRTVLNEMRSMENVVRAVLREAGLKLGVPGRAAFAGRVRELTEGDARVTTLVEPLLAILATMLDQLAHLTKQVQDIVRQEAVCRRLMSVPGVGPITALAFRATIDRPDRFRRSRDVGAHLGLTPARYQSGETDIQGKISRCGDELARTALYEAAHTLLVRSRKWSALRAWGMKVAKARGMARARVAVARKLAVILHRMWSDGAEFRFSKEPSAGVARVSA

SEQ ID NO: 159962 - protein, 413 aa, unidentified
MTKVGQTLIKSEFSNHVIGCFDIGKNKQYAYAEAPNGKYLKVFNFNNDLAGFQACYDKLENFRKEENLEGILMGSESTGSYGEPLGAWLTNMGVKMVGVNSKHVRRYKEVIDNSPLKSDKKDPVVGTRIVQQGAYYNPLPSKGLPGELREQTKHRRMLKIKINRVVNQLESQIIRVFPEFITVMKSIDLKTSMSLLTDCPLPEDIIAMGERKLTRKMEKISHKRLGKERAKELLKTANESIGITECSASISMIIRDLVDEYKFLNNQLERIEIAIKTLLIESSEAQILMSHPGIGFITAAEIIGETGGLNNYSNSGKLMKLAGLNLYEVSSGIRKGQRRITKRGRCDLRHTLYLAGLRMCKKGSPYRAQYERYIKTMKKPQAVIAIAKKLLRVLHTLVKKNEIFNPAYAVIKA

SEQ ID NO: 159963 - protein, 356 aa, unidentified
MKVTTIGLDLAKNVFQVHGADAAGTPVLRKQLRRCQMAEFFAQQRPCVVAMEACGGAHHWGRKLRALGHEVRLIAPQYVKPYVKSQKNDAADAAAICEAATRGHMRFVSLKTVDQQSVLALHTVRSGFVKQRTALSNQIRGLLAEFGLVLPQGLSKLSGQLPVAVADQHNELPDTMRDLFRMLHAQLAHIDDLVARLERQIRVWANQDEAAKRLQQIPGVGPITASALAASVGDARQFEDGRQMSAWIGLVPRQHSSGGKSVLLGITKRGDKYLRTLLIHGARAALKAYQRAPGKIPEHLAQLLQRKHPNVVCVALASRNARVAWAMLSRREHYQGGHAVKSHALPELPALPAALA

SEQ ID NO: 159964 - protein, 313 aa, unidentified
MYTNEIFVGIDVSKETLDIAVRPTGEQWQVANAKADFPALVTRLQALAPTLIVLESTGGWERPAAHALLYAGLPTSVVNPRHTRNFARATGALAKTDKLDAHHLAHFAAAILPKLSVPLDPASEALQAAIKRRRQVINIRTAELNRLGTVSDPAMRESLNHHIAWLSAEQEALEEYITQLVTRNPRWQAQVEHLLTVPGVGMVTATTLIARLPELGQINRKAIAALVGLAPFNRDSGRSRGPRSTWGGRADVRAALYMATFTAIRWNPKIKAFYERLLAAGKVKKVALVACMHKLLIILNTMVKNGTAWDPAM

SEQ ID NO: 159965 - protein, 352 aa, unidentified
MEQFIGCDAHKRYSVFVAVGEDGGCSPAWKVSHSEGAFEAFLEKLPEGSEIALEACSSYYWMVAAMERTGHHPHLAHPLEAKHRMGKTHKTDKLDASGLGILLRNGTLPEVWIPPAELRDQRELLRLRMQFVQQRTRWKNRIHGALTRYNEHVGVTDAFGVRGREQIARQLGELPGHTRQSVEQQLAVLDFVERQIEDCERRLAGLLEPSEEVRLLRTLPCVGPILSAVLWLEIGDVNRFPDAPHLASYAGVVPRVRASGGHTRLGPVGRDVNHHLKWAFVEAANLVAVNQRRLGPCHVLELYQRLKKRKNHQKAVVAVGRHLAEAAYWILKKREVYREPKTPRQAVSSTHG

SEQ ID NO: 159966 - protein, 506 aa, unidentified
MKVQASKPTFTIGYNPIGQYGSNICRQDIGRKRPYRSLLRQRYWAWSFTSKLITMAKVAKRKQTSKGLRLEVVNPNAAGIDISPKEMQVCVPSDRDGECNRTFGVYTEDLHYIAEWLKACCIDTVAMESTGIYWLPVFRILKDSGFDVILVNASDVKNFSGRKTDASDAEWLMMLHSYGLLKPCFQPENIARTMRNLVRHRDNLIRSASREVLHLQKAMEQMNLKLDNVFSDILGKSGQSVIKAILNGERDPKVLADLADPRCRTSKEEIEKSLQATWDEEHLFEMRQSDSLYQFYQQLIAECDAKINEIAMQYSATVDAPKTELLRSEKYNAKKNRIGFDVEKVAFELWGVNVMRIPGMSRGALLRLVGELGADFTTKFVDIKHFVSWANLVPNNKISGGALLSSKVPKKKNPVGIIFRQAANTLKAAKNPLGNYFRHMRAKGGHLQAMVATGKKLASIFYCMVQRKVEYNEKVYCNHRKQELQNKVAYLHKRLQRMESELANCG

SEQ ID NO: 159967 - protein, 390 aa, unidentified
MQPTQEQDVTRDEGVLAVSLELASKSWKVGLDDGRRRAPAVHGVNQVTPEGRLAEAIAVIEKTKKKWGLAAGVRVVVVYEAGQEGFWIQRALTARGYETLVVDAASIPVERRARRAKTDRLDAIRLVVTLRAWLRGERDRMKVVRVPAVEAEGQRHLVRERGTLQKEVGQHRDRMRKLLRTVGCWESIEGDLKGRLERGEVTGYGGSALPAELQERLVRECARRALVEEQLAQLEKTLPEQLPEAVRQRMVQLMQLKAVGQVGAQRLALELYWRQFNNRREVGACVGLVPQPYDSGESRVDQGISKAGNRRVRALLIEMAWMWLRWQPRSELAQWFVKRTRGAGSNKRGKRIAIVAVARRLAILLWRFLKDGVLPQGVRLKPVKAKLAAA

SEQ ID NO: 159968 - protein, 355 aa, unidentified
MNATTVAVDLAKNVFQVAVADRNGKIIERARLTRSQFERWFDNRECGTVVMETCGSAHHFARWLTGLGFDVKLLPAQYVRAYVKRNKTDAADAAALLEAARANDIKPVGVKSVEQQALQALHRTREAWKSTRTRRINTLRGFCREFGLVVPEGAATGLAQMARYLADEHSGLPAMLRSSMRLMIEEIRLMEARMAQLETQLADVAKHSPACQVLLTVPGIGLITSTAMVAAVGNPGSFDSGRRYASFLGLTPREYSSGNTRYLGRISKKGDRYIRTLLTHGARSVLRSATVARRAGREIDRLKHWALEVQGRTNHNKAACALANKLARIAWAVWVKHEAYRGQALPASQSPLCSA

SEQ ID NO: 159969 - protein, 394 aa, unidentified
MRYFAGIDVAKTVHWICVIDANAEVLLDRAVTNAQEDMDRLVGELRPFAPDLTICLDVMGSIATFVEAALIEAGFRVVHVPGIAVNRARDGFANREAKSDPKDARVIADYARTRPTLRPVEHDDETTIAIRLMIGRRRNLVEEQTRRIARLRRYLGSIHPELEIALDINGLGSAHLLTRYVTPTEIRRAGPKRILAHLQRLPHLHKREEMAHKVFEVAQRQHTIVPGEATFASLVRELAEEIILTREKLARLDKGLETLLARHPDAALIRTLPGMGAILTASFIAAAGSIARFKSAGAIAATAGLAPVMRQSGYSRVFRRTYGGDKDLKRVFFQSAFCAYAKGDPVCRAFYNRKRREGKRHTQAIIALARRRVNVLWTMLKSRQPFDPERAITS

SEQ ID NO: 159970 - protein, 403 aa, unidentified
MNAVGIDVSKGKSTVVALAPGGKFLSRPFDVLHTKSGIKELVSFVRTLDGDTRIVMEHTGRYYEPLLQWLVASDLFVTAVNPKLIKDFGNNTLRKVKTDKADAKKIARYALDNWCDLRQHTGMDTTRTQLKTMNRQFAFCMKQKTACKNNLIALIDQVYPGANTYFESPARADGSQKWVDYVLTFWHVDYVCSMTLSTFTERYRKWCHRHGYNFQPDKPGLLMEKAKDLIAMLPMDKTTKMLVQTSIAQLNVLSKTVEALRTQMIALAEQLPEYPVVIDMNGVGPTLASQLIAEIGDITRFPRRGSLTAFAGVDPGAKQSGTMQVKSNKTSKAGSPHLRRALFQIVSGLLMRAPDDPVYNFMDKKRSEGKPYYVYMTAGANKFLRIYYGRVNEYLASCPKDHE

SEQ ID NO: 159971 - protein, 345 aa, unidentified
MQPMYYIGLDLHKRTISCCVKDVSGTIHAEGTIPAIRFHLDQWMNTLPQPWTAAMEATVFTGWIYDHLQPHAAGLKVAHPLMLRAIAAAKKKNDRIDARKLSDCLRCDFLPECYMAPTAIRERRRTLRYRNLLVRQMVQMKNKIAVLLMEAGVSYNKQRLHKAGYFRELLATNPDINEGLCSLLRVCRETVVRLQRTESALVRSLERDSLLKERVERLMTIPAVGPITALTWALEVGDVWRFSSIKKAISYCGLCGAEKSSANTVQRTPLSKQRNKHLQTTLIEAAKMAPRYSPHLALLYDKEKQKGSANRATLAVARKLVAYLMAVDRGQRPFELVEASYSTAA

SEQ ID NO: 159972 - protein, 354 aa, unidentified
MEDYDGRQVVGMDLHRRRSVLVRMTEDGRRLGAVRITNSPAELRREIARAGKGPRVVLEATYGWYWAADVLAAAGAEVHLAHPLGGKAFTYRRVKNDVRDSADLADLLRMGRLPEAWIAPHEVRELRELTRYRAKLVRLRTSCKDQVHGVLAKLGIPVTCSDIFGAAGSAWLDGLRLPQPYAGKVTSLRHLAGEFTAEIDMLGEVIADLLAGHRGYQVIQQLPGIGPVLAAVIAAEIGDITRFKNPGQLCSWAGLTPRHRESDTKVARGHVSKQGSRLLRWALIEAIQRIPKDSVIGAVKDGIITRRGKEARNIAKVAAARRLLTLVFYGMRDHQIRCLARPAGPAAAAPAKAA

SEQ ID NO: 159973 - protein, 368 aa, unidentified
MNKSEPTFLPCGIEISSQVLVIDLSGKAPCEFSNTPAGHESLIRWLQRAGLEIRVCMEATGLYGLDLALALHAAGIAFMIVHPRSARNFARAMMQRSKTDRLDARVLREYAARMPFEPWHPPSPQALHLMAIAHRLQALTRMITAEKNRLHAASLSRALPAVVRYDLARSIQSLERALKRLTLAALELVLSDPQLARRNQLLLSVPGIGVTSALNLLAELLRLGPDCGVRQWVAFAGLDPRHYTSGTSVAKKTIISKSGNAHLRRALYMPALVTVQHEPHFRGFYQHLVARGKTKLQAIVAVMRKLLHAIFGMLRWHTVYALMGSLLLEPPDMLHKFATLNWSTERNWNFSDGIEEQLAWFTVVNERF

SEQ ID NO: 159974 - protein, 423 aa, unidentified
MKLTYKVCCGVDVHKTFLVATIITSSFVLPQYQQKRFSTFYSGLLAFKQWLLDNDCKDVCMESTGKYWVPVWNVLEDSIHVVIANPKWVSAVKGNKDDKKDSKWIGDLFRMGLVPGSYIPPKDIRILRECTRYRSKLVSMRSSEKNRFQNAFTVCNLTLDAVVSDMFGKSATDILNYLLDTDTIDPDHCVSLLRRSLKKKASDVIEAVNGFNMTAEQKERVRIVQGHFADIDKRISQIDQIIEKLTAEYEGTVSLLCTIPGIDRRLAITIISEIGTNMTEFGSSKRLCRWAGLTPGNNESAGKKKSVRISRAGVYLKPALVEAAHAAVKATQKCPYFRIKYERIMKRRGKKRAIIAIARMILTAIYAMVSTGETFNPCDLQKYDMPEELKKKQMVSAAKEALKLLVSLGIVPDGAISLESFAS

SEQ ID NO: 159975 - protein, 429 aa, unidentified
MNYNTQNAKIASITEKTLIVGIDVGSETHYARAFDWRNYEYSKKPFAFNNDEAGFAAFKAWMEDMADKHGKEAVIPGMEPTGHYWLNLGAYLQEQGMKPVHVNPHHVKKSKELDDNNPNKNDRKDPKTIAGLVNEGRFSYPYIPTGIYAEIRNLSNLRIQTQEELTRIKNRIARWFSIYFPEIKDVYKNPDAVSGMMVIKKAPLPCDIKELGVDGVNQVWRDAKLKGAGLKRARTLVSAAEHSIGSTEAPGSARIEIRNLLNDYEVYKNRMDDLMREIEAKLSEIPYIDKLMEINGIGLKTVSCFIAEVGDIRRFDNPKQLQKLAGYAIVADSSGKHNGESRISHRGRKRLRYALYEAAISVIGKNKEFREIHDYYRTRKQNPLKKMQSVIAIACKLIRIFYTILTKGVDYDGQKMLSDIVRPETIMAA

SEQ ID NO: 159976 - protein, 436 aa, unidentified
MSPIAYRRCCGLDVHKKLVVAHVLPPDGSLKAEAKKRTFRTFTRELERLRLWLGQCKVTDVVMESTGPYWRPVWNVLEDSVENLVLMNPQHVKGLRGRKTDQADAEWLAGHLGRGELKGSFVPPRWVRELRDLTRLRVRLLQDLNRVKNRIGQLCETGNLKVSSVATDLFGVSGRRMLRGVVKGDRDAAWMADWAQGSLRKKRAELKLALEGRFSDHQRRLLERMLAQVEDLEQHIKELEQEIEPRLAGHEELLQRLLTIPGVDRITVWCVLAEIGTDMRVFEDAAHLASWAALCPGNWESGGKRFSGRTRKGNPYLRRILCQAAWAASHQRGSYLRALYHRLRSRRGHQKAIMAVAHHLLIVIYHLIRDGGVYRELGYDYYDQQRKPQLTRRLVDRLERMGFQVTLKPLCPHPVEPGWESANSLNQNIINPGSFS

SEQ ID NO: 159977 - protein, 327 aa, unidentified
MNKCHSNTELSSHEGTRCQFNGSTGAIKFAEGRIRPVCGLGIDVHQDFYVVVMQEGGANPKPPQRFQKAAFLHWAAKLKRDGAEVHAVYEACGFGFTLQRNLSVLSIHCHVVCPQKLDDLNKRVKTDGLDAKALCLKLDRFVQGNRDALARVRVPTEKEEQLRALHRQREQLVKVRKQLEAQGRSLMVNHGFEPVKSWWKLRTFAELQVPQWMRELLQNSQPILLALPQKIGALTLQLQIAADPKQPRGLGLMTSVIIDREIGDWNRFNNRRQIASYTGLCPGEYSSGNTRLQRCVTKHGNPRLRAALVELACPESLRGSSPITNQL

SEQ ID NO: 159978 - protein, 355 aa, unidentified
MDSIKYIGLDVHQSTISVAVLDADGKLAMQSVIATHAATLLDFLHGLRGTLHVTFEEGTHSAWLYDLLVRRVTKLVVCNPRKNALLKAGNKSDTVDARKLADLLRAGLLSPVYHGQNSTAAVKHLGRSYAALTEDTTRVMGRVKALYRSQAIACAGKKPYGARHREEWLGQLTDSGLQRRARRLYQEFDLLQQLRREARHDLILECRQHNESKVLRTIPWLGPIRVALLIGRVQTPHRFRSKRQFWAYCGLALETRSSADYGFVNGQLERKKKPVFIRGLNLNHNHDLKNLFKSAATSASGSQGPFRPFYENLLGKGMKPELARLTLARKMAAITLHVWKKGEAFDAEYLKPQAA

SEQ ID NO: 159979 - protein, 540 aa, unidentified
MMIEDIQWFVGIDWATQSHRVCLLDVEGRHVNERDFAHGGAGLTELRDWLLEKTKAVPGQIAVAIETPHGPVVEMLLDHGFCVFAINPKQLDRFRDRFTVAGAKDDSRDARVLGSSLRTDRQAFRRLVVDDPLVIELREWSRLADELQQKRTRLANRLRQQLWRYYPQAAELTDDVADDWFLALWQQVPTPATAAKVSEKTITRMLKDHRIRRLDATTVLQTLRKTPLFVAPGTTEAACVHIRSIAARLCLVNQQIKEAHQALDRLCAELEASMESPSGQNCEQHDVTILRSWPGIGRIVLATLLTEATEPLQRRDYHALRALAGTAPVTRRSGKQCFVIRRLACNKRLRNAVHHWSRVAIQHDATARRRYDALRRRGHGHARALRTVGDRLLYALCTTLERQTPYNPNYQTAQVTAARKPHSFVRPQAAIPSSRPADRQSAAHRCCPGCRSAPAQPARSVLDSSEHGASLASNGLRSLLTKGRRSYVLYQRCLRDTDRCGTGRNANRDGPHILRRAGYAVHAGPDCGGMIGSPRGVNGR

SEQ ID NO: 159980 - protein, 342 aa, unidentified
MTQYKRIAIDTSKAVFTLHGIDHADRPVLRIELRRAQMIPFFKKLPPTEIAMEACGGSHYWARELTALGHKVLLIPAQYVKPFVKRGKNDRIDAEAICEAAGRPGMHFVAVKSAEQQAQAMLLKVRETLVDQRTMLVNTLRGHAGEFGVIAAKGISNIVRLLEAVEADTSIPSEAREMMTLLGEEIDRLDTRLNEMEARLMKAHKANPVSRRLATMPGVGPIIALTVAVEIDPAAFESGRHFAAWAGLTPREHSTGGKQRMGGISRAGNERLRRLFVLGAMSVIKVAERPGNKLATEWLLNLLRRRPRKVAAVALANKMARIAWAMMTSGENYRRAPAARVS

SEQ ID NO: 159981 - protein, 353 aa, unidentified
MRKVQNFIVKGKQIFIGLEDSKRTWKLCVRCEGMIIHETSMPAKYDNLRSYLKNRYPGCRIEVIYEAGFGGFWLHDRLESDGVACVVTPAHKVTQEKVSSVKTDKIDARRLARNLEYDDYTRCHVPDRERREDRQISRTLDQIQKDIVVTKNRIRRFLDFHGLNEGFPAGTWTEAAYELLKALQLPVSLQLSLDAYLQLLTELKRIRAALKAQLKALCEKDRYRALVASKAGCVGIGWLSAIRFTLEWGELSRFGSGKQFASFTGLTSREYSTGETIHRGHITGHGNGQVRGWLIQCAWRALSRDPVLLEKFNAVRNNSGSKKKAIVAVARKLAVRIRALELTEQPYCVGVIE

SEQ ID NO: 159982 - protein, 423 aa, unidentified
MKSIATPSFAAYVGIDWADTKHDICLQAAGSDQREFTTIPHKVPCIEAWAKGLHQRFGAPIAIALELANGPIVYALQKYDFFVLFPINPLTLAKYREAFTPSRAKDDPTDAELALDLLLRHPERFAPLEPQSVAMRTLLSLTEHRRQWVDDKRRLTNRLVNTLKQYYPQTLEWFEHRDTIVFCDFISRWPTLEQIKRARQATLTAFFHDHNTSRPYLMEARLKAIKAAMSLTNDPGVIVPCRLQALALVNQLRTTLQAIDQFDRAIAELAPTLPDYGLFEELPGAGPHLAPRLLAAFGEQRQRFHSADEIQQYAGIAPVTERSGKKQWVHWRWRCPTFLRQTFVEWAAQTVNKSFWAGAYYRQQRDKGSSHQAAVRALAFKWIRIIYRCWKTRTPYDESTYLNALRKRGSPLLNDLMTHTQNA

SEQ ID NO: 159983 - protein, 394 aa, unidentified
MKLVGIDVGKNSHHFCVMDKETGEFNVAPSSFSNNKEGFDFLINSLKPYSKKSILLGMEDTGHYHVALLKFLLSNGYTVALINPKTTDFTRKMEGGITKNDKLDTITICDVLDTPERKKQYRITKVDRFDLYEQRQLTRHHHNLKEELNVYCNRLQKSIDLVFPEFNTLFSSKYSIVYMNLLKTFGSAEAIASTDIRTIRKCFEVKGRGGRISLTPEKLKECAKNSIGISSEVETIQIKHLVNQITLIKEQIAEIDKKIEEFSITNNSPILSIPGISHFSGTSILAELGDIGNYSKPSQIIKFAGVAPYHYESSQYNAQHTGITKKGSKYLRKTLYQIILTVINNNPVFKKYYLLKISQGKGHRCAQGHCIRKLLRIIYHLLETGQSFDPALLR

SEQ ID NO: 159984 - protein, 350 aa, unidentified
MEFFVGLDVSLDETHICVVDEGGRIIKETRSLSEPQATAKAIRHKGRRIEHVGLETGNLSQWLYEGLVKEGFSVSVIEARHVRAAFAAMRVKTDRNDARGLAQLVRLGWFKRVHVKSLDAQETRALLTTRTFLIEKIGATENSLRAALRNFGLKMGPVTRKTWEPRARELAEGNELLEGIVDAMLRIRTLLREELARIDGQLTALAKSDPVTRLLMTTPGVGVGVALSFRSSVDDPDRFPRSRDVGAWLGLTPRRWQSGKTDIVGRITKAGDARVRTMLFEAAASILWRVRVMSPLKAWGLRIAQRTSMKKAIVAVSRKLATILLAMWKSGTAYWATRHPPASAADLAQA

SEQ ID NO: 159985 - protein, 445 aa, unidentified
MLNFYLGCDVSKGYADFIVLDSGKKIIEPVFQLDDTFEGHNRFYNFLQNLFNRFPDATLFCAVESTGGLENNWLALFKRLADIMMIKSARINPVGPNALHKASLTRNSDDAISAKLIAEYLITYPEKVNYNTDDPYISLRKQWNLIEMYNKQKTQFLNQLNIHLYTSMPFLMKYTRNGITNWLLQLLYKYPASSQLAKAKETSLVKIPYLSHKRACTLISEARLSIGSANDQDTAFLIKSLVKQILHLSTLIKQHKLYMLKGCNLPEVKLLNSFTGIGVHSAIGLVLNIVSVDRFPSAKHLSSYFGVHPVYKRSGDGSWAFRMSKQGRSAPRQILYLVARCAIVYNPLIKEVYINHIKKGMRKSAALGACMHKILRIVYGILKHQKEFDPEIDKQNRNKTRTTGKVENKPEKKRRYQENAEDAPVSRRQSIKRRKRKQSQNLLEV

SEQ ID NO: 159986 - protein, 327 aa, unidentified
MNNTFYIGIDIACKKFDVAIYKENKKALHNTFDNDKKGFESLLKWINKDTQNLHVVMEATGIYWEELAYFLYDKKAKVSVINPKCIKAYGIGQNLRNKTDKIDAMLIARFAAKEQPQAWQPPPKAQRALLLRLRQLEHLKQAEQKERTRIKMMSDSESIASAERLANFLREEIKAFEKQIDETIKTDTMLKQNAKLLSSIPGLGKKSVAWLLAYLGDGSRFKNGKAAAAYAGLTPMHHQSGSSINGKPRISKIGQTDIRKILFMPAVAYSFGNYKDRIYKTFVDNLLAKGKDKKVIIVALMRKLVAIAQTVLKNQMPFDASLHQKTM

SEQ ID NO: 159987 - protein, 419 aa, unidentified
MKTTKTKKVKIINEKTMIAALDIGKVAHYAYFRAPNSKDIKPFPFYNFRKGFNKFWMKVCQFKSEQKLDEIVIGFESTGPYAEPLFHYLMKKPVRLVQVNPMHSKRLKELTGNSPNKSDKKDPRVIADVISLGHALTLVVPEGPAAQLRRLTQARERAIKNRTAMSNQLQHLLFVVFPEFLRLFKKVLTKTAMYLIKNYHTPEGIVYIGLESLSSIVKKVSRGKLGQARAEELFQAGKNSVGIHEGRESILLEIEHLVSKIENENQFIDGLEKQMDRYLDQIPYSRSILSIKGIGIITVAGLIGEVGDFKKFNTISEILKLAGLDLYEISSGKHQGQRRISKRGRSLMRKLLFFATINVVKSNGIMHERYQQMLDRGMPKIKALIAISRKLLGLIFALARNNTVYVENYNEVHYFKLAA

SEQ ID NO: 159988 - protein, 364 aa, unidentified
MNEIIKQCVGIDISKDTFTVCVCRRDLSGKEYLSETVDFKNLKTGFNQLVKWSRKITDPSIETLFVMEATGIYYENLAHHLHRLNLPVSVLLPNKVKHFAKSLNVKTKTDQVDARIIARLGAERKLLLWKPPPEIFKLLKDLTREYAELIRERTAFKNRLHAMSSGYKPHPAIIRSNKAIIKKLTENAEKIKEEIEKLIYSEEWLGSKVNKVLTAKGVGLMTVATILAEMQGFEFVSNIRQLCSYAGYDVVQRESGTSVRGKTRISKKGNGRIRAALHFPALQSARHSPRMKSIYDKINQNKPSKMVGATAIQRKMLVLIYTLWKKDEEYVEDYENKAGRGLSNLPAQDELPTSSQKLSFVCEI

SEQ ID NO: 159989 - protein, 415 aa, unidentified
MSFTVVSPRCAGLDVHKKTVVACVLLTAPSGKVTREVRTFSTTTAGLLALREWLGSQGVRQVAMESTGVYWRPVFNLLEGFCEVLLANAQHMKAVPGHKTDIKDSEWIADLLRHGLLKASFLPPKPIRDLRDLLRTRKSLVRQRAQAITRVQKVLETANIKLASVASDVLGVSGRAMLEAMLSGVSDAETLAQFARKRLRAKLPALREALEGRVEQTHRILLRHLLDQIDFLQGKLDTLSEQIEPLLAPYEEQLTRLVQIPGIGHAAAASLLAEIGTDMSRFPSAKHLASWAGLAPGNKQSGGKRHRASTTKGNTHVQAVLAEVVWVISHTKDNYLSAQYHRLAHRIGKQRAIVAVSHSVLVIIYHMLRANQDYHDLGPHYFQTLDSTRQRDWAVRRLQALGYQVTLEDTKEEGS

SEQ ID NO: 159990 - protein, 366 aa, unidentified
MAPIYIGVDFHSRQQTICYLKTETGELVISELQHGDKEQLRAFYQQFQGQVIIGLEASGYSPWFEALLERLGHEVWLGDASEIRRRARWRHKSDRRDAELIWDLMVHNEFPRLHQPLSESREVLRMLRYRQKLIKQRTMTKNSLQAIALQAGLAKGQQLFTSAGQEQFQSAEMSAVLQWQRDHWFELLKPLNQQLLETMVWFKAQSKDDSDLQRLRTHPGIGLLTALCLLHTLQPVSRFRNQRKVVAYAGLDPVIRSSAERATYLGISKAGSRMLRYLLVEAVHTSIRYDEDLKRFYQRLAARRGRPKAKVAAARKLLIRAYIMMRDEIDYAEFRRRAVATRLARQGQGPTKVPVVLIGQPVSPGA

SEQ ID NO: 159991 - protein, 359 aa, unidentified
MDATTVAVDLAKSVFELAVADAHWKVTERARLTRRQFERWFVNRSVGCVVMEACGSAHHWARYLQGLGIEVRLLPPKYVRAYVKRNKTDAADAAALLEAVRCADIQPVRIKSVEQQALQGLHRIRSLWMATRTSRINALRGFCREFGLAISVGSRLGVEQISRALADPHSSIPQLSRPAMNALIEEIRLLEARVAALERQLSEAAGHSTACTTLLSVPGIGLLTATAMLAATGGGVSHYKSARHFASWFGLTPKEHSSGQSRHLGRISKRGDRYLRMLLTHGARSVLRAATVAQRCGKPLDPLRAWALALQSRSNHNKATCALANKLARICYATLRDQEPFSKTRLSHKMQRSTYAIAH

SEQ ID NO: 159992 - protein, 426 aa, unidentified
MRVLYDRVAAIDVHKDMVKVAIRVPGAKRGTRKTDVLEFRTFYGVFQAMARELRGRGVTHVVMEASGVYTDPVYYALRELDFEEVMVINPAHAKALKGHKTDAKDAIRLLDLYECGLLSGSYIPDPDLREVRDLARYRMKTVQARTSEIQRLQKTLETAGIKLSSVVSDVTGTSATAMIEALISGERRGTVMAGLAQTRLRAAGKMADLSMALTGRFTEHHALMCRLHRDRITIFDDAVKDLDAKIAPLVARYAREADLLKSLPGFGDVIVAGWLGAIGPAPHRHFATASRLASWATLCPGNYMSAKKSKGGRTGDGGAYIKPLLIQAAWAAVRVPGRLQARFGRLVRKFGGPRNKGAQKRAITAIAHTLLKIAYGVLKTGTPYADLGADFYTRRESPDARQDYLMRQLQKLNPGCVITITPTEAA

SEQ ID NO: 159993 - protein, 364 aa, unidentified
MVRKGAGERIPTMLGIDVSSKSLATALWLDPRQDKPNWEQEFPNSVAGIDQLLALAPASAPWVVEPTGRFSMLVVQRAHEAGRSVLLAPTRKAKAFLWSLSGGRAKTDKIDGRGLALFGHSQPLLAYRLKSENVDELDQLLSARRGLSRSVSRLKLQAASLPKAQTALLPAIEALCKELKLLDKRIAAIVKTQPEFAMAAKLQKVTGIGPVSAAAIASRLTAKQFVHPDQFVAYVGLDVGVRQSGMRKGNTGLTKQGDAELRRLLYMCAQATLRNKDNPFAERYKKERARGMATTAALCVVARKLAHVCWSMHKYETDYDPERVGKPPAKERDPKERDREDRATLGSDPSARSGATPPEASRPT

SEQ ID NO: 159994 - protein, 365 aa, unidentified
MIVIGADTHKSSHTFAAVDAVSGALVGMLTVSSTAAGAEQALVWARRLGRERVWAIEDCRHVSGRLERGLVARGEQTVRVAPKLMAAARRGARERGKSDPIDATAVARAALREGVERLPGAHLDERALEIRLLLDHHDDLVADRGDEQRRLRWHLHDLFENLEIPAGALDRELWLGRLDRRLRAHPPTARVRIAREQIRSIRAQSKRIRALEAELAALVSDYAPQLLDEIGCGPLTAAKLIGELAGAERFATDAQLARTAGVAPIPVSSGRRDRHRLDRGGNRQLNLALHRLAVNKGRLDPQTADYLKRKQAEGKTRMEALRCLKRHLARRIWQLLRGPRPARNTHTHMTHNNNVNAPAQALALT

SEQ ID NO: 159995 - protein, 438 aa, unidentified
MRIEKIAPGYAGIDIGQEQIFIAVSGQAVKVFGTHMADYRLAAEYLQGHGARQVAMEATGVYWIPLHDLLQAAGLAVTVFNGAYARNMPGRKSDVSDCQWHAMLHSHGLLVPCFIPPEEIRQLRCFYRLREDHLGIGAAHIQHMQKALDLMNVRLHVVLSQIHGVSGLRIIKALLAGERSALALAQLCDAQILKHKREAVLKSLEGNWQAHHLFALQQAVEGYEFCQRQAVACDKQIAALLGRLTAAKPPPPPPAAGRKPKVVRHNAPQIDNLHGQLVGLADGRDATRLPGISPLGFLKLLGEIGTDLSAWKSEKHFTSWLGLAPGSNQSGKRRKRLPRKKTVAGQIFREAVLSIAKSKYLALGAAYRRLKARKGAPIAITAIARKLAVLYYRLMTKGLDYVERGIADYEKKYQEQTLRYLNKMAAAHGFSLSPKLAE

SEQ ID NO: 159996 - protein, 317 aa, unidentified
MNEKLPTVYAGVDVAKATLQLHLHGRQHCLDNTPKGCAQLLQQVQAVGQVQIICEATGGYEKGLLAACHVAAQPVSRLNPAQVRHFARAQGQRAKNDPLDAAVLTDYGTALQPAATPPTDPAHEALRELVQWRDHLQEQLTRARQTLEHGVPAFVARKQKQLVAHLEQQLQAVAREQTAALKRAPQLQAQVQALIQLDGVSTLTALSVLSRMPELGTLDRQATAALAGLAPWVRQSGPWEGQRHIGGGRALVRRSLYMPAVVLARMKHTPLGKFYARLRAAGKPAKVALTAVMRKLLLQMNRVLKDLANQNQTLQTA

SEQ ID NO: 159997 - protein, 431 aa, unidentified
MKKSSQAQPVLPRGRAVVGIDIGKGKHAATALSAQGEVIAQLASFPNTRQGVDQLEEEVLRKAGGPSKVLVGMEATGHYWMCLYHELTRRGYACVVFNPLQTNARSRARIRKTRNDKIDSKTIARLVLSGEAKATRVPQAKITELRLLVRHRHRLLQAAGDMERYAHTLVDRVFPEYTGVFSKPFLPSARKLIRQIGIAPDKLVENAEQVRELLRTAGRKQIAAERIEHLLKAAQESIGIRQAEEVIEGQLRSILDYLDTVRQQIAEIDQQLDERAQEIDSPLYSLGITSPMVATIHAESDPISDFTTPEQYVAYTGLDPSRHESGDTIEWRGKISKRGSPLLRSTLYLVAFAVYRRHDYFARIYRKHRAKGKKHSNALVIVARRLARVIWRLLTDDRGFTKRAPKPVSPSNKPRNSAKSINTRKAPKASV

SEQ ID NO: 159998 - protein, 370 aa, unidentified
MAQGSRLFVGLDVHKETIAVASVAEEREAEVVFLGTIGTRQCDIDKLSRKLQAKGKKLHFVYEAGPCGYWLYRYLTKKNLLCWVVAPSCIPKKASDRVKTDRRDAVQLARLLRSGDLTPVYVPAMEDEASRDLVRAREDALKDLKTAKVRLKAFLLRQDIRYEGRATWGPAHLRWLANVVCPTPAQQIVFQEYVRAVSEHTERLQRLEAELPALVQSWRWAPVVEAIQALRGVQFIAAVTLIAELGDLTRFENPRQLMSYLGLIPSEHTTGERRRQGSITKTGNSHARRVLVEGAWAYRYPAKVSRHLQLRLAKVPKAIQDISWKAQVRLCKRYRRLVARGKNVNQVVVAIAREMAAFVWAIAREVTVAH

SEQ ID NO: 159999 - protein, 343 aa, unidentified
MTIIRIGLDTSKSVFQVHGVDEQERPALRRQLRRGQIEKFFAKLPPTRIGLEACGASHHWGRVLRDLGHEVVLIPPQYIKPYVKRGKNDAIDADAICEAMSRPGMRFVPIKSREEQAALMLLKVRDLLTKQSTMLSNAIRGHAAEFGVVGAKGPQKIKQLLERIAEANMPEPARELLNSLANQLAAIEVRLAALEAKLMAHHKADPRSQLLATIPGVGPVTAVNIALKVPDAAVFRSGRHFAAWLGITPREHSTAGRQRLGKISRQGDEALRRLLVLGATAVIQQVDRRRKANKTTGSDSPWLLQLLARKPKKLAAVALANKMARTIRAMLVSGELYRRPQAA

SEQ ID NO: 160000 - protein, 402 aa, unidentified
MTYDYVIGMDACKYFHHACVLDIDGTQVLSKRINQNEQSLRALFSAFSAHDHKVLVVVDQPNNIGRLTVAVAQDIGIDVRYLPSLAMRQLSRIHAGNAKTDIRDAYIIAHAAKNLPESLRSVDRVEEAFLQLKVLNGIDEDLARSYTRLINQIRSALVGCYPQFEQALRGQIIHRKWVLHLLARYGGPTKIKRLGKAKAAAFARRYKARNPEPVLDAIFAAISEQTVTIAGAHYAEMGVAMSAKDALLKLEHRQQIEKEVIELINDIPHTQFLLSMPGIGPKTAAQILMTAGDMSDFPSAGHLASYAGLSPRTNQSGTSIMSNSLNRAGNKKLKNALWQSSFASIRFHERSRQFYERKRREGKRHNAAVVALARRRLNVLYAMMRNHEHYHDPAPSQEDLAA

SEQ ID NO: 160001 - protein, 436 aa, unidentified
MQQDSEIYVGLDTSKLKISVALAEAGRGGEIRFFGDIDSTPEAVARLVAKREKRHSRLAFCYEAGPTGHGLHRQITTLGHACTVVAPSLTPRRPGDRVKTNRRDAVTLAKLHRAGELTAVWLPDPGHEAIRELVRAREAAMAELRRARQQLQSFLLRQGRIYTGRAAWTKAHARWLSEQAFTQPALYLVRQEHRQAIEDAEKRLERVTRQVTEATQTWSMAPVVAAYQALRGVAFLTAVTFVAEIGDVRRFDSPRQLMAYLGLVPPESPTGEQVHRGRITKAGNSRARRVLIEGAWTCRHPARMSRLLQERQADLPPAVREIAWKAQVRLCGRYRKLMARGKRQTVVTTAIAREMAAFLWATVAKVPAAQRVECQRRGSGTRSRRWMVRSTDPQRRSQMMARHGKPRCEGQFRPSHHHDRDGQIFGDTPGWAGGVV

SEQ ID NO: 160002 - protein, 348 aa, unidentified
MRFYTNSHAHYCGIDLHAKTMYLCILDREGQILLHQNVRSRPEAFLAAVAPYREDLVVAVECMFTWYWLADLCRREGIAFVLGHALYMKAIHGAKAKNDKVDAFKIASLLRGGNLPKAYVYPPEMRATRDLLRRRLHLVRRRGNLLAHVQNTHHQYNLPAPAAKVAYRANRAGVAEAFAEPDARKSLEVDLQLIEHYDQILRELELHLVRQAKQHDPQAFHRLRSVPGIGKILALTILYEIHEIGRFPRVQDFLSYARLVKCDHTSAGKRLGTGGAKIGNVHLKWAFSEAAALFLRNNPEGQKHLRRLAGRHGKAKALSILAAKLGRAVYFMLSKERAFDRERFLARS

SEQ ID NO: 160003 - protein, 346 aa, unidentified
MKINRIGVDLAKNVFQLHGTDHKGKAVWKRKLSRDKWLKVLFETVEPGTVIGMEACGGAHHWSRVLIEKGYEVKIIPPQFVKPFVKSNKNDANDAQAICEAMVRPNMHPIKVKTIEQQDLQAVHRIRDEIKSHRIAKANQIRGLVTEYGLVAPRELSSLRKAIPQWLEDADNGLTIFFRQLLHGLWGDLRSLDKRMSELDKQIAVIAQENPVAKRLQQLRGVGPLIATALVATMGDAKQYRKGRDMAAAIGLTPRQHSSGGKDRLLGISKRGDAYLRCLLVHGARSAMRTAKDKDDRVSRWITNLQDRRHANVAACAMANKIARMAWVMMSKGVDYDPNFKPVMSN

SEQ ID NO: 160004 - protein, 387 aa, unidentified
MSQLFDASKSLTSLEQDSTIIAVIEMSQAKWLVAAVVPGVERQPLKRLDADEAALLKLLHRWRNEASQAGRQIKRIVVAYEAGRDGFWLARWLRVHGVEAYVIHPASIAVSREHRRAKTDRLDTELLLRAFLGWLRGEKRHCSMVAIPTVEEEDARRPNRERGNLVTEQTRIMNQIKAILTRFGIRTFRPTLRKAEEKLEGLRTAEGAPLLENTRAELRRHLARLRVVREQIRAIEHSRLGKLATTPEKGPHAMVRLLARVLGVGVETADMLVNEVFSRRWRDRKAVARYAGLTGSPDESGKRRRERGLARAGNARVRCGMIQLAWRFLRFQKDSTLAQRFQARTADGRGGTRKTMIVALARKLLIALWRLATTGEASDGIVLRPAS

SEQ ID NO: 160005 - protein, 295 aa, unidentified
MNKFSKYVGLDVHQETIAVAVADTAGELRYMGEIVNTPEAIAKLVAQLRRGTGRLAFCYEAGPCGYTICRQLLELKQDCQVVAPSLIPKKPGERVKTDRRDALSLARLHRAGELSPVWIPDEAQEALRDLTRAREDMKHLQRQAKQRLLSFLSRHGHRYAGRSRWTQAHWRWLEGIRFARPEQQIVLQEYIDTVQACGRHVASLDPEVETAAHASTLWPVIEALMALRGISLLAAVTVLAELGDLTRFADAPQLMAYLGLVPSEHSSGKRERRGGITKTGNSEHEHVSRWEFGAF

SEQ ID NO: 160006 - protein, 347 aa, unidentified
MEKVIRIGMDTCKSVFQVYGVNASEQVVLRKQLRRSQVLEYFARLGPTKVGMEACGGAHYWARELRALGHEVVLLPPQYVKPYVKRGKNDRADAEAICEAMSRPTMRFVAVKTAAEQAALMLAGLRDQMVRRRTQLTNAIRGYAAEFGLVAARGLSKIEPLLVRIAEDESVPELAKDIFAAYGQEYAGLEGRIAKVEARLMAWFRHSEPSQRLTQIPGIGPIIASMLVMKIPDPGAFHSARHFAAWLGLTPTDHSTAGKTRLGVITRAGDEDLRRLLVSGAMSVIQQAERGRGSPSPWLLGLLKRKELKLVAVALANKMARIAWKLLVSGENYDPRRAKAMALDKAA

SEQ ID NO: 160007 - protein, 423 aa, unidentified
MMRIVYPICCGLDVHKNVIVATIVITNKAGISEYLQESFSTINSDIQKFHDWLIEHNCYHVCMESTGKYWIPIFNYLENDIDVCLTHPKYVKAIKGKKTDKKDSKWIADLYKFDLVRCSFIPPKDFRQLRELARYRFKLVCMKSSEKNRLQNCMTVSNVGIASVLSDPFGKTATEIMAYLLEHTSDSIDEKAVRKLIKKGAKAKSDEIIEAIKGYKIETDQAKKYELAHNHLEYLNEMITQTEVELYVRIKPYYEFVEFVSTMPGMTELSSTIVLAETGVDMSIFDDAAHLCSWCGLVPANNESAGKKKSTRIAKAGDYLKPMMVQCALAAIKCKSQPYFAIKYGHIKKRRGHKKAIIAIARMMMVSIYHMISEKKPFQPSDYDELLNPHSRNERVVLNDKNVFAYLESKGYDTSQLVKCNDN

SEQ ID NO: 160008 - protein, 339 aa, unidentified
MTVKTVGLDLAKDVFQVHGISENGRIIFNKAIKRAKLLSFFETLPPCTVGMEACGSSHHWGRQLRKLGHDVRLMPANYVKPYVKRGKTDAVDAEAICEAVRRPTMRFVEIKTEDQQAILSIHRTRDLAVRQRTQLANMIRSLLREFGHILPIGIEAVTAFAKRHLDGDHPDMPEIANGMLGIQCYQFIGLNERIEGYSKMIEQHALLNADARRLMRMPGIGPVTASAIVATIGDAKQFRTGRDLAAWLGLTPLNKSSGGKERLGKITKQGDRYIRKLLVVGMTSRAVMAKRAPEKVDLWTAKIIADKPFRLATVAMANKAARSIWAMLTKKQEYRQPAF

SEQ ID NO: 160009 - protein, 343 aa, unidentified
MQITTIGLDLAKHVFQVHAVDAAGAVALRKALRRAQVLPFFAKLAPCLIGIEACGTSHYWARELIRLGHEVRLMPPAYVKPYVKRGKTDAADAAAICEAVTRPTMRFVPVKSRDQQAALSMHRARNLLVKQRTQLVNMMRGLLAEFGIDIPQGLGRALLMAQRVVEGATPDVPEAAAKIVGMLAQQALDTDAQLREIDRALVALQRTDDVARRLATIPGIGPVGATALAAAVTDPGQFRSGRQFAAWLGLTPLQNSSGGKERLGRISKMGDKYLRKLLVIGATSLVRRARHKPETVDPRLADLLARKPVRVATVAMANKMARIVWAIMTRGEVYQASHSPMLG

SEQ ID NO: 160010 - protein, 406 aa, unidentified
MMNAVGIDVSKGKSTVTIRRPGDEVILPPCDVRHTRSSIDTLINEIKSLEGETKVCMECTGRYYEPMATWLTDAGLFVSTVNPVLIKDFGDDSLRAPKTDKADSKKIARYTLDRWTKLKQYGLMDETRNQLKTMNRQFGFYMDQKTSMKNNLISLLDQTFPGANDFFDSPARSDGSQKWVDFVYTYWHVDCVAGRTLDVFTEHYRNWCSRKGYNFSAAKAKTIYDVSKDLIAVFPKDDVTKMIIHQAVDLLNAASETVETLRAKMDETASTLPEYPIVMDMNGVGPTLGPQLMAEIGDVMRFEKRGSLTAFAGVDPGKNESGQYAQKSVHTSKKGSPHLRKTLFQIMDGLIQRSPVGDAVYDFMDKKRAQGKPYYVYMTAGANKFLRIYYGRVKEYLESLETNESE

SEQ ID NO: 160011 - protein, 338 aa, unidentified
MTIVMGLDQHRAQITADWVDTWTGEVSRARVAPADRAGVRRFLERFGDQELEVALEATTGWRFVVEELRRVGAGVHLAEPAETAARRGNKQRAKNDRADARHLRELLMVSRLPESWIPPDHILDLRARVRLRHTLSAQRGEWQQRIQAVLYHHGCPQRRNLMTGEGQRWLAAQPLPACAREQIAVALAMIDALDLQLAPLNKELRAYARRQPGCRALMAHYGIGELTAVTILAELGDAGRFSSSREAVRYAGMDITVHQSDQRRAPGHLSRQGPPALRWALFEAAQSAARAGSPDRDYYRHAADRLGANRACLSVARKLLKRSYHTLRELGEEALQPA

SEQ ID NO: 160012 - protein, 392 aa, unidentified
MYIVGIDIGKNHHEASIVSPEGKQIGHSLRFATTHKGADSLMSFIFKNIGNSPCVFGMEATGHYWYPIYSFLKAKGYTIYVINPIQSDSLRKMYIRQTKNDSIDSFLIAEVIRFGQFTTTSMADENILAMRQLCRYRDSVISSRTEIKLRISTIMKQIFPEYEKQFSSLWVSTSMGILEKYLTPENIENAPIDELFEIIKDKSHNRLTKAKAISIKEAAADTFGIKIAQDAFSFQLKQLIDRMNFLDKQIEALDCQILEYYEKFDCYLHTIPGIGMIAAAAILAEIGDINRFKSSSALVAFAGIDPTVRQSGEFSSTHNHMSKRGSPYLRHAIFLAATTCSFHNSPLNAYYKKKRDQGKHHLTATGAVARKLTSVIYAVLRDSKPYEPKSFC

SEQ ID NO: 160013 - protein, 357 aa, unidentified
METAYDGRQIVGMDLHRRRSVLVRMTEDGRRLGTARITNSPAELRAQIARAGQSPKVVLEATYGWYWAADTLAAAGAEVHLAHPLGVKAFTYRRVKNDERDAADLADLLRMGRLPEAWIAPAEVRELRELTRYRQKLVHLRTSCKDQVHAVLAKLGVPVTCSDIFGVAGSAWLDALGLPQPYAGKVTSLRQLTGELTTEITMLSEVIAGLLAAGRGYQVIQQLPGIGPVLAAVIIAEIGDVTRFKNAGQLCSWAGLTPRHRESDTKVARGHVTKQGSRMLRWALIEAIQRVPAHTVTGAVKTAIIARRGKEARSIAKVAAARRLLILVYYGMRDGQIRCLSSPPKAPPPANQAARAA

SEQ ID NO: 160014 - protein, 387 aa, unidentified
MSRNARVPVPVTMLDQDSTLVVVLELSARSWLVGARVPGIGRMSRYALAPSAEALAAWLGTAKARAGAAGRTVVRVVLAYEAGRDGFWLARYLEARGVEVYVIQPSSVLVDRRARRAKTDALDVEMLMRTLLAWLRGEPGVCSMVPIPEVAEEDGRRPVRERQGLIGERLALLNEIDGLLATLGITGYRPLRRDRRAQLAALRTPEGDPLATNAAARIGRILDRLELVMQQIAELEQVRDAVLAKEVASGEAETMIRGLARLKGIGAELATVLVWEAYVRSFPNRKALGAYAGLTGTPFASGSTTREQGISKAGNRRLRSSLVELAWLWLRYQPDSKLAAWFRSRTGSVGSRMRKVMIVALARKLLVALWRFCRDGVLPEGAALKAT

SEQ ID NO: 160015 - protein, 337 aa, unidentified
MKRYFGVDLHRNQFVVCRRSEDGSEEVRTWRMSELSQFCQQLQPSDELAVEATGTTALFHQAVYGRVARVVVVNPRQFRLISASVKKTDRHDAGLLAFYLEKDLLPEVRMKSRQHRELGHLAETRDLLVRQRSALKNTINNLLAMHGVELKREALSSRVALERVLAAPLSGMPKLELRVLVEQVRGLNAAIEELEQELNEEGRQLDGYASLTSIKGIGGLSATVLLAAIGEVRDFADENKLAAYLGLVPRVDNSNERQHSGAITKQGNKLARTALVQCGLVAQRFSPYLHDFYERVKQRRGAGKAKIALARKLATIVFKTLRNRWIFADFPSFTLAA

SEQ ID NO: 160016 - protein, 355 aa, unidentified
MRRTTKYVAFDVHQSTTVSSVRDEAGRVIARTIIPTEAESLLAFVRSIRGAVHVAFEEGTQAQWLSELLTPVVQRVVVCNRRGDTTPGNKNDQHDADDLSDRLRLGRLRAVYHGRGDHAGLKELTRTYANLLQDSKRVMQRLKALFRARGIKTPGMSVYHPQQRERWLAQLTESGARFRAETLYAQLGVLQALRPRVKAAMVQEAQRDPAWPVLRSIPYFGPVRIALLLATLQTPWRFRTKRHLWAYAGLAVVSRTSAEYEIANDRPVRRRKRWVQTRGLNRNHNPVVKDVFKSAATTAATRSGALQDWYKGICARGLSADLARVTLARKLAAVTLHLWKTGARYDPTQLSVQAH

SEQ ID NO: 160017 - protein, 409 aa, unidentified
MYDKTKFIYVGLDLHKEQHTAVIMDCFNEKLGEITFQNKPSEFSKLLVKAKRYCTDGKEIVFALENSYGYGRALAAWLIERNYIVKDVNPALSYAYRKSVPQYKKNDSYDAQCVARVAINELNKIPDAMPEDMYWTLSQLVNRRANLKTHHIRLKNQLHEQVCVAYPSYKQFFQDIGRPTALYFWEHYPSPRLLRGKTVEELAEELIPVSHNQFSTRKCQKILDAVKSDGDTTRDYQPERDEITRGLVRDVRHYVNQLEEVDKAITNFLPRFGCTLNTIPGVSNTTVAKLLSEIGDIRRFPNANKLANFAGIAPVNFSSSGKGDDKPSKQGNRRLQGTIYFLAIQMIQLSSKGLPRNPAFYAYYQRQLARGKTKPQALILISRRLISIIYGMLKNKTEYRMPEVPENLN

SEQ ID NO: 160018 - protein, 430 aa, unidentified
MKSNTQNAKIEVITEKILVFGIDVGSETHYARAFDYRGIEYSKKPFKFSNTENGFVTFKEWIQDIKEKHEKDKVVPGMEPTGHYWFNLGKFLQDNEMKPVLVNPHHVKKSKELDDNNPTKNDRKDPKVIAGLVREGRYMIPYLPDGVYADLRTASNIRFQLQAELTRIQNRISRWFNIYFPEYKTVYGKPDAKSGMLILKKAPLPEDIMTLDIDGVNQIWRDAKMRAVGKARAKTLIEAAEHSVGNKEGAVSARMEIRMLLEDYEFRNIRIQEVMTLIEELVKRIPMAEKLLAIKGVGIRTVSGFLAEVGDISRFNNPKELQKLAGLALVENGFGKHKGKTTISRRGRKRLRYLLFEVAMSLVAKNSEFRELHNYYTTRRLNPLKKMQSLMAIAAKLIRVFYAMLTKGVDYDPKKMVGDIRRPAAYIQAA

SEQ ID NO: 160019 - protein, 433 aa, unidentified
MKIIHPICCGVDVHKKFLVATIAVTAKSGVTRYITETFSTLNPDLFRFRTWLTDNNCLNVCMESTGKYWIPVFNILEAAGIHVLLTHPMYVRAIKGKKTDKKDSKWIADLFKHDLVRSSFIPPPEIRALRELARYRYKLVCMRSSERNRFQDCMTISNIGLASVLSDPFGKTATDIMNHVLSSDVFDEQLCQKLIYKSAKKKTDLIIQSIRDCKIESDQRFKMTEVNIHMEYLDHSILRTEAELYTRIQPFMPIVQHLSTQLPGISELSAAMIIAEIGADMSVFESPKHLVSWAGLAPTNNQSAGKKKSVRISKAGQFLKPLLVQCALAAVKSKKQPYFAIKYQRIKKRRGHKKAIIAIARIMMICIHRLISTGEDFCPSDYHAVIMPSQPRKQVLNDKNVFAYLAAHGYDISSLVKLNADAPISVTEKPASA

SEQ ID NO: 160020 - protein, 323 aa, unidentified
MAKPITICAGIDTGKRKLDVAIDGSPERLQVENTSEGHRALVQWLRCHRVKRVGIEASGGYEQAVVAELRRKRFVVVVFQPAQVRAYARFQLQRAKNDKIDAALIAACTAAAKKIHPAPDPRLQPFAEHLTMIDQIGEDISRLKNRLETCRDERIRQAWKQEIARLEKNERIERKALVAAIRKHSDLARRLDLIHSVSGAGLPTAVAVLVRMTEIGQISREQVAALAGLAPYDEDSGDRVGGRHIWGGRERLRRALYAAALPASMRWNPQLIALYKRLIAAGKEHKRALIACARKLLIFINTVVARGTPWQDKPEAAAIAASP

SEQ ID NO: 160021 - protein, 410 aa, unidentified
MELLHPHCAGLDVHKEMVVACIRHMADGKVTTEVKSFETTTQELMELSDWLSSQGVTHIAMEATGVYWKPVWHILSDGEFELVLANAAHVKNLPGRKTDVNDATWLADLMAHGLIRASFVPDEPTQQMRDLLRTRKQFVRERSSHTQRIQKTLEDANIKLDSVITDIVGLSGRRMIEALIAGQTDPEALAALAHRRIHATSAELEAALRGRVTAHHRFMLQLHLDHLDAVNAAIARIDKEVDGNLEPFRVAIEMLTTIPGVSSLAAEVMVSEIGIDMSRFKTEGHLISWAGLCPKNDESAGKRRSNRMKKGAPWLKTTLIQCAWAASRTEGSYLQAQYLRIRSRRGPKKAIGAVAASILTAAHHMLKNGTLYQDLGSNHFDNRDKGKQALRLVHRLQSLGFAVQITSMAA

SEQ ID NO: 160022 - protein, 403 aa, unidentified
MSPEHSIDIFLGLDVGKSEHHACALDRDGNKVFDKPLPQLESELAGVFHQLQKLGTVLVIVDQPNTIGALPIAVARDCGCEVGYLPGLAMRKAADLYPGRAKTDKRDAFIIADTARTMPHTLRAVDRNDEVLSALKMLSGFDDDIARDCTRTVNRLRSVLTQIYPSLERVFAGSTLTRTPILELLIHYKGPQGLKRAGYQRVLNWMIKRTRKDPTPLVDDIFAALKAQTVTVPGSDAAELVIPQLAANIQALKEQRNTIAEQVEEMLADFPLCEVLMSMPGVGIKTAAQILLAIGDGSDFASAGHLAAYAGIAPVTRRSGSSIRGEFPARSGNKRLKNALFYSAFAVIRSHEPSRRYYERKRAEGKRHNAAVICLARRRCNVIYAMLKNKEFFREIPPRPVAA

SEQ ID NO: 160023 - protein, 336 aa, unidentified
MEKIAVVGVDLAKNVFQIHAVGDDGNIVVRRSLRRSQFLAFFARLEPCLIGMEACGGAHCWARELARLGHQVRLMPPSYVKPYVKRGKTDAADAAAICEAVTRPSMRFVPIKSEEQQSILVAHRTRDFLVRQLTQTMNALRAHMAEFGIVTAKGAHNVGRLLQLIDEAALPNTARDAIHLLVTQFAELQTKVDAISMEIRKLAMADETARRLQTIPGVGPITASVLTATLPDASGFKSSRDLSAWIGLTPKPHSSGGKEKLGGISKMGNRYIRKLLYLGAMGVMIARRRQPAGDDWLWKMMERKPMKLAAIAVANRMARTVWALLRTGQSYRPAVA

SEQ ID NO: 160024 - protein, 383 aa, unidentified
MRHGGILIEANDSEGEAMKKHTTINQSLSADVVACTTVAVDLAKRVFQLAGEDALGRVLFEDRIKSREAFQTFLHKLPASVTVLVETGPGAQAWGRLLQTQGNPVRILPAQLVANHRSGPKNDRNDALAILRAGRDIKISAVPLKSAAALAMQALHRARQGYVRRRTAVGNQMRGLLLEHGVALAQGETAVSQRVPRILEDATQPLPDLLRELIAELLGEWSQLGERVNVLTGRLETAAKEDETARRLMTVRGVGPIIATALLAKQTQPERFANARLFAAYFGLVPSQHSSAEKVRLGKMSKHGDAYLRSLTIQGAHAVLKQLRPDSQQPDDQRLQRWISRLGRKEAAVRLANRNLRILWVLLQNDQTYRRQPGAAQEAAMSH

SEQ ID NO: 160025 - protein, 353 aa, unidentified
MKRPKDRLIAGLDLHSNNVMIGVINQDGKRVAHRKVDCDLGEVIEFLKPLKAQLQSMAVESTFNWYWLVDGLRAQGYPIDLANPAKIEQYSGLKHADDKDDAFHLADLQRLNILPQAHVYDPELRPVRDLLRRRTNLVHQHTALLLSFQSLYARTTGQRLDLGDAKKMEPKQAPKLYEHPANQLIAQVQTEHIGALAKSIQRIEKAVLSCAREIPLYEKLLTIPGIGRILGMTITMEVGDISRFKTAGDFASYCRMVDAKRLSNGKCKADNNQKCGNQYLAWAFVEAAHFARRYDESCRRWYDRKAAKAGKIIATKALACKLAKAAWHVMAEQCNYDAQRIFPELANKPMKTS

SEQ ID NO: 160026 - protein, 344 aa, unidentified
MEYYAGIDVSLECSSACVVDASGKIVRETKVASEPEALVDWFRSLGLDLARVGLEAGPLSQWLYPAMKKAGLAVELLETRHVSDAFKAMPVKSDRNDARKIAQLMRLGWFRPVHCKSMGAQEIRAMLTARKLIQAKLQDTENSLRGILRGFGLKVGKTTKRSFAARIGELVTGHPALETIAAAMLAVHMVLLREFNGLEKRVRATSRLHEKARLLMSTPAVGPIVSLTFACAIDDPSRFTSSKRAGPHFGLTPKKYQSGETDYTGRISKNGDASVREALYEAAHLMLTKPIKGCAQLKSWAMRIARRAGMNKAKVALARKLAVIMLRMLKDNVPFNPVAKAAMV

SEQ ID NO: 160027 - protein, 348 aa, unidentified
MTIVDAPRPVTGGVDTHLDVNVAAALDLAGGLLGVAEFPATLAGHRRMVAWLAGFGPVARVGVEGTGSYGAGLARHLRAAGIQVTEVDRPNRQARRRAGKSDPLDAIEAARAALPGRASGAAKTRDGNVEAIRALVVAKRSARSTKIKTLNQIRHLGFTAPEELRARLKDVSRQHLAARAAALRPSQREGADPVMAATKTALRILGRRVLALDEEKARIDALLTPLVTQTAPQLLTVFGVGVDTAAALLVTAGDNPGRLRSEAAWAHLCGTAPIPASSGKVTRWRLNRGGDRQANAALWGIVITRLRHDPRTQACMTRRLAEGRSRSEVIRILKRYIAREIYRYLPRP

SEQ ID NO: 160028 - protein, 339 aa, unidentified
MIHLGINLHKKYSYVTGIDGAGQVQFEAKVANHQDTWSQVLEGLGGDCQAVIEAGYHWGSLYDLLEGLGVDVQVAHPTRLRAIAESQIKTDQRDSRTLAQLIRANLIPQIYIPPKDIRELKNVLRHRMFLVKLRTMTKNRIHQILDRNHIENPGVTDLFGKAGRRYLNQVKLGETEQVLLEGHLGLLDHLLKAISEVEKQVKTHLEDDWRAKLIRSIPGFGLTLATVVALEVDAIERFRDNGRFAAYAGLVPRIYASGGQSYRGRLVSSANHYLKWAFIEAAWKAQIASPYCRALFQKIRKRKGANVAVVALARRLSEIVFKILKEKREYRELGVLSHG

SEQ ID NO: 160029 - protein, 347 aa, unidentified
MTIVGNPDAVVGGVDTHADVHVAAVVNHLGGVLGVESFTTTSNGYRQLVSWLRSHGELVLVGVEGTGSYGVGVSRYLQREGVTVVEVDRPNRQTRHRKGKSDPVDALAAARAALSGSATGSPKSRDGNVEAIRVLMIARRSAVDARIETLNQLRHVVFTATPEIRSKFTGLTAIGLVNKASTLRPREGDDPVRYTTYMTIRALGHRVQYLREETKRLNGMLRPLIRQTAPTLLEVYGVGYDTAAKLLVAAGDNPERIRTEAAWANLCGVAPIPASSGKTKRHRLNRGGNRQANSALYHVVITRMRHDQRTRDYVARRLSEGKTMGEIARILKRYVAREVFKHLPHPA

SEQ ID NO: 160030 - protein, 359 aa, unidentified
MQSQITTINSEKQNVYVGLDVHSKNWKVSIVLNNTVFKTFSQDPCAKTLGLYLRKNFPGSGYYSAYEAGFSGYSTHRKLQEEGITNIIVNPADIPTTDKERKQKEDKRDSRKIAKALRNGELEGIYVPSMTSMEFRTLVRFRNTLVKDVSRNKNRVKSLLKFQGIIIPKELHSASSRWSARFTKWLEEEAKFSSDYGNITIRSLIEVTKHNRQKLLELTRILRQIPKDSHYGRLIKLLCTIPGVGLITAVTIIAEIEDVNRFKTLDKLCSYVGIVPSTNSSGDTETVRGITPRSNRPLRNVIIESSWVAVRNNPALAKQYNELCYKMESNKAIIRIAKKMLAIIRYVMKHEKEYKIDVN

SEQ ID NO: 160031 - protein, 404 aa, unidentified
MYYVGIDVAKEKHYVCILDSTNEFAVKPFWIYSDVLGLRELLKRLSSLSLNNDDFIIGVESTGAFSENLYEYITDADYKVILLNSYQTAKYRDFSTMKKIKNDAIDAYVIAELLSSHKYKESHISSEDYHSLKVLGRLKRSLDDKIKSIKREISTVMATVNPEITLVFKNIFTKTALEIIKAYPTAVELQKATPKKLTKLFRHIKGNNFNDEKAKYLIELAKSSIYGGRANESRALMIKTNIKILELLSQEKQEIEAKIDTLIKSGISKELDAPIENLKSIPGVSDKTIAAILGECGDLTRFKSAKAFIGYLGLYPTQYQSGNSMSVGTLAKRGIPIAKHALYMAAVSSVLHNQELKKIFRDKVSSGKSKKEALIIISKKLATIIYSIFKYNTPYNAKRVLISL

SEQ ID NO: 160032 - protein, 322 aa, unidentified
MSEPVLGIDIAKQKFDAALLIGGKLKHKSCKNGTEGFELLSQWLRKQGVDHLHACLEATGSYGDELALYLHEAGHTVSIVNPARIKGFAQSELIRTKTDKIDSGIIARFCLAMKPQSWIPPSPELRALRALVRRVESLVDMLTQEKNRLGTAHESVIPLIKEHIDYLGKEIEEVRRQIADMIDRDPNLKRKRDLLASIPAIGKVTIASILAEMDDLGRFTHVRELVAFIGLAPKETLSGSSIKGKPRLCKTGHPRLRRALYMPALVSLQCNPLMIAFYRRLKDKGKNGKVIVCAIMRKLVHVIFGVLKSGKMYDPNYKPAFA

SEQ ID NO: 160033 - protein, 437 aa, unidentified
MDGRAKRRKSQKQQQKTMNDSKQWQQHRAFGALDWASEKHSVIVVDQTGKVIEDFEIEHSALGWKKFREKLQPYGSIPFAIETSQGVAVEQLLEAGMLVYPLNPKSAQAYRERKAPSGVKDDWLDAWSFADALRVDGQDWKALRPEEPLIKELRLLCRDEVSLIEQRTAFVNQLRHALAEYYPAALEAFEDWTSISAWMFLQRFPTPELLAHGGKRQWQKFLHSRRLWGSDQGPRRMEIFAHATEFAGTAPTVKAKSLLALSLVQMLFAIEKQLALYRQRIEELFARHPDHDLFGSLPGAGPKIAPRLLSEIGDDRQRFGGDPQNLQCLAGSAPVTKRSGKQRKYWHVHHRWACDKHLRHAIHLFAEQSLSRCVWAEIYYQHHRQKNQSHANALRRLAHRWLKIIYKMWTDRTPYNAELHHRNQLQHGSWIFQLQKS

SEQ ID NO: 160034 - protein, 310 aa, unidentified
MDRIIVGIDVSKNRLDVEVRPTGEAFSVSRNAAGVEKLVARMRELSPHIIALEATGGFENVVVAALGAAGLPVAVVNPAQVRAFAKAIGQRAKTDPIDAGVIAHFAEATHLEPRPLPDEQTRLLADLVGRRRQIVAMIGAERQREQRLTAPRLRKSIARLLKALEKELASLDADIEDAVKGSPAWRAKEELCTSVPSIGPVIARTLVAELPELGQLGHKQITALVGLAPFTRQSGQWRGKSFIGGGRTAVRAALFMGAMVAKKHNPVLKAFFDRLVAAGKPKMVALIAVARKLLIILNAIVRDNQPWQTT

SEQ ID NO: 160035 - protein, 344 aa, unidentified
MQITTIGLDLAKSIFQVHGVDATGQVVVRKSLRRSQMLAFFTKLPPCLVGIEACGTSHHWARELIKLGHEVRLMPPAYVKAYVKRGKTDAADAEAVCEAVARPTMRFVPVKSPQQQAALSMHRTRDLLVKQRTQLINMIRNLLAEFGVDIPKGLERALLMARQIVDGKAPDVPIEAAKILGTLSQQVLTTHVRLREIDRDLAVLLRGNEVARRLMTIPGIGPVGATALAASVTDPHQFRSGRQFAAWLGLTPLQKSSGGKERLGRITKMGDKYLRKLLIVGMTSLVRRAKYNPGKIDPRLADLLTRKPTRVATVAMANKTARIIWAIMTRGETYRAGHRPTLAA

SEQ ID NO: 160036 - protein, 357 aa, unidentified
MESQEVKYVGVDCGKKSIEVVRINSENSLERRQFSTTESGINNLLQWLTLNDIVGLEAGSQSFRIAKSILNKGVQVIVLNPGNLATIYQSLKKTDKEDSLKIARLIQRFPIEELPTVPIPNDEEEDNRRLCTEQENWTRQLTQSKNRLHSLFTQAGLTHITKKHLRTKANREISVALLPSRYQKEAERILKVLDLVEQNLKLIEKEIQEALKKNKAYVQTIMSMPGIGMITSLAIMSYMGDCKRFSSAKQAAYYAGLVPRVDISGDTVRYGRIINRGCHSIRRVIVQAAWSLVRCQHGGKVKEFYQRLYLKKGAKKSIIATSRKMIEVLYVMIRTGKLFDSMPENILNRKLTQYGLM

SEQ ID NO: 160037 - protein, 342 aa, unidentified
MKKVVAGMDLHSNNVMIGVMDMDGKRLASRKTACDLKEIVKFLAPYKNRLKQVAVESTYNWYWLVDGLQALKYPVVLANPAGMEQYSGIKHADDTNDAFFIAELLRLNILPTGHIYDAHLRPVRDLLRRRLMLVHHRTALMLSFKSLYARTTGLEMTLGFLKELEVKEAPALYQHPANQLIAGLQIKQIDQLTESIQKIEKAVLDSARELPSYAKLTTLPGVGKILGMTITMEVGEIKRFAGPGEFASYCRTVEAKRISNQKKKGENNSKCGNKYLAWAFVEAANFARRSPECLAWFNRKAAKTNKILAIKALACKLAKAAWYLMAEETDYDSKRMFGQQTK

SEQ ID NO: 160038 - protein, 342 aa, unidentified
MHAITMGLDLAKHWFQVHGVDAAGKIVVKRRLRRAEVVAFFRDQEPCLVGMEACATAHHWARELIALGHEVRLMPPAYVKAYVKRNKNDAAYAAAIWEAVTRPSMRFVPVKSVDQQAVLMMHRARNLLVRQRTMAVNALRAHLAEFGVVAPQGLRHVECLVAAIEEDADLPALARSILRLIVAQLNDTQAKVRQIEARLSQWHRNSRLCRLLATIPGVGVMGASAIAATVSDPSLFRSGREFAAWLGMTPRQNSSGGKERLGRTSKRGDKYIRSLLVAGALAVLRHARERATKDGEWVRAMLARKPAKLVAVALANRTARIVWAVMTRGDGYRAKDIVGQAA

SEQ ID NO: 160039 - protein, 416 aa, unidentified
MSLALPEALFFTGIDWATETHAVCVMDAGGTITAEFMIEHSADGIALLVRRLARCGEAARMPVAIERPNGRLVDLLLEAGHPVVPVSPNAIKAWREGEVLSGAKSDAGDAAVIAEYLRLRQHRLKTAAPYSDETLALRTAVRARGDLVEMRVAATNQLSALLEAHWPGAKAVFADVESPVSLEFLTRYPTPAAAAHLGEKRMAAFLVKHGYSGRRTAAELLARLRAAPAGTAREALTEALRDAVLAAVGVLTALNASVKSLDRSVAAHLGEHPDGAIFTSLPRSGQVNAAQVLAEWGDCRQAYDGPDSVAALAGCTPVTSQSGKHRDVQFRWACNKRFRAAMTTFADNSRHASSWAAKIYTDARARGKDHPHAIRILARAWIRVIWPCWVQGIPYDPARHGAAAALAEQPAKQIAA

SEQ ID NO: 160040 - protein, 361 aa, unidentified
MQLEDTFSNPKIFIGLDIHKKSWTVSIQTDLFFHKTYSMPSNAEDLYQYVERTFPNHAVDLVYEAGCCGFSAARFFLNLGWNVLVVNPADVKTGDKERYQKTDALDSKNLSNQLKSGVLKGVHIPTEEQDQFTTLARHRTQITKKLRQTKSHIKSMLLFHGIKVPEEFDNPNWSKAFIGWLEQIKFSTSCGDLALQGKIRMFKFIKSEYLEIANQMRAHCRKTNKKDYNLLKSIPGIGGYLSSVILAECGDLRHFNNEGQFSSFVGLVPGIYNSGGSEKCLGITPRSRSQLRSYLVEAAWVAIRKDVEMQNYYRKHQGKNVKSVIIKVAHKMARRILSVIKTETAYQINRNLVSIAIAIEK

SEQ ID NO: 160041 - protein, 475 aa, unidentified
MNLKGTKKKNQVSNANIFEQQELLKKIEVVRENLTASTWHELETKGKFDKNAKLSFICDDMLILGCDVGNETHYLRAIDTRGRELSKSAFSFSNNVDGFSKAKEWAVKIAAEYDKKQIVLGLEPTGHYWFCLATWMISNGISVVQVNPYAVNQTKELEDNSQMKDDTKDPKLIANLVKDGNFGMPYLPEQLYADLRRLSMFRDQLNEDRIRSINQLHRELKIYFPEYKEALGKTEGTFSLELLKQAPFPDDLAALKEDGIRQIWHNAKLRGRGYSRAGEILEYAKASVGIREGKETGKLVVQWFVQKILELDEELALIETQINQKCLEIPHTDKVLEICGIGENTLSGMMAEMGDISRFDDVKETQKLSGLGLVASSSGKHKGETRISHRGRKRLRYWLFQAAKSAVAHAEEFKELHVYYTTREQNPLKKMQSLIAIACKLLRIIFTILKKGIKYDPQKMLKDIRRKSRQESLAA

SEQ ID NO: 160042 - protein, 357 aa, unidentified
MLALGDSAPRKGADAMTFVGCDLHTRMQQVAVLDTETGEVSERQLAHDGSAVEEFYAALPGPVTIGIESTGYATWFHTLIQRLGHTLLVGDAAKIRAMVVRKTKTDRRDALHLLDLLRHDRFPTTWVPDPATRDLRALLMHRMRLVRIRTMVKNGLHAIALNYRLTRGSTLLRQAGLAQLHALALPPHTAQRRDQSLELLAGLTTQIRALDDAITAAALAHPDAPRLITHPGVGALTALATVVVLGPVARFHDSKHVVSYVGLAPALHASADKYHLGRITKQGSPLLRFVLGQAAAHAARMDPDLKRTYGALVHRRGRPKAKVAVARKLLVRLFIMLRDQIDYDEFRRRGRTAPAAA

SEQ ID NO: 160043 - protein, 346 aa, unidentified
MTIVEERTAITGGVDTHSEVHVAAALDPVGGLLGTREFPATAAGYAALLCWLGTFGDVALVGVEGTGSYGAGLARYLAARGVRVVEVDRADRQDRRRKGKSDPLDAVSAARAALSGRAAGMPKGRDGAVEAIRALMVAKRSARNERTQAINQARALILTGPDQLRARFAGLRAAALAEAVAALRPRPGDVADYAVRTALRELGRRIGFLDAQIERLDDLIIPLVTIRGPGLLSLYGVGPDTAALLLIAAGDHPERLRSEAAWAHMCAVAPIPASSGKTSRHRLNRGGNREANHALWRIVITRMSAHPATRAYVQRRTAEGLSKKEIIRCLKRYVAREVYPYLRPGA

SEQ ID NO: 160044 - protein, 465 aa, unidentified
MTAGKRLWRNRKERKEWARRLQSEDPGLEVVHPHAAGIDVGNSVHYVAVRPDRDPEPVRRFECFTADLHRMADWLHSCGVKSIAMQSTGVYWIPLYEILDERGFEVYLVNARHTKNLPGRKSDVQESQWLLKLHTYGLLSNSFQPVSEIRGLRTYWRQRGEHVRGAATCIQRMQKALTQMNVQLANVISDISGLTGQAILRAIVAGERDPRKLAALSHPSVHASPEEIAKSLEGNWRPELLFVLQQEVDMYDTYQKRIAECDQQLQKQLARLTGVTPPGKAPTPKPKAKPAAAKNAPRFDLSSELQRITGVDLTRIDGIDVMTAQTLLSEVGLDMSRWKTESHFASWLGLCPDNRISGDKVLARGTRRVVNRAATALRQAANTLIRSRSYLGAQYRRLRTKLGAPKAITAMAHRLARLVYRMLKYGQAYVDKGTAYYEERFRQQQIQLLRKRAAKLGFQVAEIPA

SEQ ID NO: 160045 - protein, 333 aa, unidentified
MKNEPIKEFVGIDVSKLTLDVHLYVKNLHCVFSNDSKGHRLMFSWIRKQCIKNEELRFCFEHTGIYSLELAMFLKKNSQVIYIVSGLAIKRSMGLKRGKSDKTDAKEIAKYLFQNHYAIKPTELASDAIQELQMHLSFRSNLVKKLASFKMHRKEFGKINESKGYDQIEQVTAEIMDALKKGIKEIEKQIQEIIYTDEALKNTFENISSIKGVGPILAATMIVITRNFTSFETSRQLACYAGIVPFEHSSGTSYRGKNRISSLGNRDLKSLLTMAAISSITYNPELKIYYQRRISEGKSKMSTINIVRNKLVSRIFACANRNSKYVEIYKFAA

SEQ ID NO: 160046 - protein, 309 aa, unidentified
MEAITVGIDVSKDRLDVAVRPDGATFVVERNGAGLDDLVARLAALRPFRIGLEATGGFETVVTAALAGAGLPVVVVNPAQVRAFATALGQRAKTDPIDAAVIAHFVEATRPELRELPDEETQLLADLVQRRRQIVAMIGAESQRAKRAPARGKKSIARLLKALEKELASVDTDIDDGVRGSPVWRENEDLLQSVPGIGPTIARTLIAELPELGRLDRKQAAALAGLAPFTRQSGQWRGKSFIGGGRVAVRTALFMGAMTAKRHNPILKTFFDRLVAAGKPKMVALIAVARKLVTILNAILRDRKPWQTA

SEQ ID NO: 160047 - protein, 369 aa, unidentified
MGKTTAYVGLDVHKDTIAVALAEVGLRGEVRVYGKIANTPAAVKTLATKLAGRHGELWFCYEAGPCGYGIQRQLSSLGHDCQVVAPSLIPRKPGDRIKTDRRDAAKLATLHRAGELTPVWVPDQAHEAMRDLVRARQAAVRSVRQARQQLSSFLLRHGHHYQRPAWTKAHRRWLSGLKFEQPVHYIVLEDAIAAVEAATARRDRLEAQIEAALPEWSLAPVVEALQALRGIRLVAAATLVAELGDLSRFTNPRQLMAYLGLVPSEHSSGNTRRQGGVTKAGNGMARRMLIEAAWSYRFPARLSREQLLRQEHLAKAIRDIAWKAQERLCRRYRKLMRDGKLPTVVTTAMARELAGFVWAIAQEVQVKAG

SEQ ID NO: 160048 - protein, 344 aa, unidentified
MQIARIGLDLAKYVFAIHGVDAHGKTMLRKTLRRHAVSTFFANLPPCLIGMEASNGAHFWAKALSDLGHDVRLISPQFVTPYVKSNKNDRNDAEAICEAVGRPNMRFVPVKSAEQLAVQAVHRIRSRLVADRVRLVNQVRGLLGEHGIVVAKDIGNLRRSLARIVGDDEDRVLNPLVRALMAELREELTELDARIEGYDRKIRELYRNSEICQRLGKVEGIGPVTATALVAAVGDRSSFKNGRQFAAWLGLVPKQRSSGGRARLFGISKRGDRYLRTLLIHGARSALGRVRDKQDPRSLWLGKMRQRRHPNIVAVALANKNARIAWSLLASDSAYDASLSVGAA

SEQ ID NO: 160049 - protein, 323 aa, unidentified
MSQPNLQCMGIDVAKLSLDIATTDTIEPFTVGNDEDGFAVITDKLKHTKINLILMEATGGLEAAIACKLQSEGYDVVVINPRQARDFARSMGYLAKTDKLDAAMLAQLALVIDRHPDRSRYIRHLPDEARAVLAAMVVRRRQLNHMLVAERNRLYPSHPQSRKSIDNIIDALQNELDRINEQMKQHMTAFFQELARLIGSVKGVGDITVASLIAELPEQGKLNRREISALTGVAPLNRDSGKMRGKRTTFGGRAGVRATLNMAALVATQFNPAIKLFYQRLLAAGKPKKLALVACMRKLITILNTMLRKGEEWNASFQSQVIS

SEQ ID NO: 160050 - protein, 357 aa, unidentified
MTNCIGVDLHLRNATVCHQVDGSERSLHTLELHSAEWHAFWKAIPAGSDVFVEMSRTTWWFTRWVQEQGHHAHVVDPTRSRAMAAGRPKTDRCDARWLAEMGAKDVLHEVYVIEPRTEHLRELVRHRALWVRDQTRIKNRIHYQLAREQRRCPHRSVFTLKGLRWLKNQELPEPYARSIENHRVHFEFVHQELEQATEQLLAAEIDGSALTLLLSIPGIGDLTARTLLAEIETIRRFPNPEKLISYAGLAPRVRQSSTMDRRGALTKRGSVWLRTALVESAQIAVRRPNQFQRIFRRVSFRRGRNVGVIAAARRLAEVIWHVWSKGVLYQEPARPESGESHNHELPAATASAPHTSE

SEQ ID NO: 160051 - protein, 452 aa, unidentified
MEEPQEVQDEEHERVWERVAAIDVAKDSGVVCTRVPDEDRPGRRAAHTWTVTARVNAVIELGDYLRARQIQIVTLESTSDYWRIWHAVLEAAGLKVQLVNARTVKNVPGRAKTDKKDAVWLAKLTERGMLRPSFVPPYEIRRLREFTRLRADLVHDRTRHWARLEKLLERALIKLSAVVSTLATKSARRIIEALIAGQRSPKVLAAMADAHMKASPAELAEALTGQFDDHHGEIARILLDQIDALTAQIDQLTGRITALIEDIPAAWGVDADGTTGPQAGTGPGAPVLPAIIRLDEITGCGPYAAQAIIAEIGLDMTVFGTAGRLVSWARKCPATRQSGPKTSHSRQPKGNPWLGGILGEIAATAARTDTFLGHRYRRLARRRGKRKALAAIARSILVIIFHLLASPEARYHDLGPGYYDTRTDKDRKIRNHIHQLQALGLDVTITPIEPAA

SEQ ID NO: 160052 - protein, 452 aa, unidentified
MVRKTQRGSCKSKMLRIIKANAAGIDIGATEIYIAVPVDRANQSVRRFGTFTEDLHEAAKWLKSCGCDSIAMESTGVYWIPIFQILETYGFDIVLVNARHVKNVPGRKSDVQDCQWLQYLHSVGLLSGSHRPVQEICVVRSLLRHRSELLTHCVSHVQHIQKALTQMNLQIHHVISDITGVTGLAILDAILSGERDPKKLVALKNQRIKADDVTIIKALVGDYRPEHLFTLKQSLQIYRYYHQMLAECDQEIESQLNSFASQINLDKKPLPPPTSSPRKGKRNEPNFDLRGQMYRLIGTDLTQIDGISAVTAQIFFSEIGQNLDKFPTKENFASWLGLCPSNKISGGKILSSRTRPGLNRFAQALRMAAMSLWHSQSYLGGYFRRMRAKHGGPKAITATAHKLARIIYVLVKTGKQFDKSVFNIQEDVYQKQVLRNLENKAKTLGFQLVPCQ

SEQ ID NO: 160053 - protein, 308 aa, unidentified
MSKLSKPVRATVFCGVDVSAATLAVAVQQQDQPIDQRQFANSASGRKSLVAWLRKRKAAARVSLEATGIYSLDLALALDAAEGIEVAVLNPKLANRFAQTLRRSKTDKADAKALAEYSRRMPFVARRAPDRNGLQLRSISQHIDGLTVQHTRELNRLHAAEGSEAAPRCVAQDLKRSLASIHKRIQRLRREAMVLVRQKDELQQQFNLLIGIPGIAPVTALQLLSELATLPAGMTVRQWVADSGLDPAHQMSGSSGHRPSRISRHGNCHLRHALYMPALVSVARMASIVGSSQGPIPCGTRAVSLNAG

SEQ ID NO: 160054 - protein, 415 aa, unidentified
MKAWKEITHYAGFDWAKTHHDVIVIDAAGKIVADFRIEHTAAGWQQWREQLEVFPALAVAIETSQGAAIEKLLDGGCTVYPVNPKSAQRYRERKVPSGNKTDKVDAWSLGDALRVDGHGWKALEPQDPLTQELRLLCRDEVALIEERTALINQLQQTLYEYYPAALEAFEDWTKPAAWAFVEAFSTPEILTKAGKRKWQNFLHAQKLYYSETNAKRLEIFARADCFAGSPATTRAKSRLALTRAKQLALLQRQLDQYRAEIEKLFAQHPDHDLFGSLPGAGPKLAPRLLSEIGDNRDVFSDPQALQCYAGTAPVSYQSGKIHMVRLRRQCNKRLRSAVHLWANLSRQTCPWAQTYYTHLISKGKSHACALRCLGQRWLKILWKMWQTRMRYDAELHQKNQLLHGSWVLKIKPAAN

SEQ ID NO: 160055 - protein, 343 aa, unidentified
MGEVSTIGLDIAKSVFQVHGVDVDGAVVIRKRISRAKLLEFFATLPTCLVGIEACPSAHYWSRRLQGLGHTVRLMPPSYVKAYVKRSKNDANDAAAICEAVTRPSMRFVATKSEEQQCGLMLHRSRQLLVCQRTMLSNAIRGHMAELGIISAKGRNGTAELLKIIADEQDDRIPAAARFSLNVLARQYAAIREETVAIEKRIHAWHRSSEESRRLEEIPGVGPIVATALVAEVGDWNEFTSGRSLAAWIGLVPRQHSTGGKERLGRISKQGNRHLRWLLVAGAMAVIRYARQHGTKRPWLARLMDRRPIKVAAVALANKIARMAWAMMVHGERFKEPKLLPAG

SEQ ID NO: 160056 - protein, 372 aa, unidentified
MRHHSEAFIGIDTSKSRNAVAIAEGVRGGEVRFLGEFPATEAAMRKLVAKLAAKYSRLTFCYEAGPTGYGLYRLIKSLGHECVVVAPSLIPKKPGERVKTNRRDAVSLAKLLRAGELTAVWVPDERHEAMRDLSRARLAAKKDLQGKRQQISSLMLRLGRCYPGKTTWGPAHMKWLMSQKLEHREQRMVLEELLQGIRQEGERVERLEQAIREAVPEWSLAEVVTALQAMRGIDLIAAVAILAEIGDLSRFQNPRELMAYLGLVPSESSTGDTVKRGGITKTGNGRARRILVEAAWSYRYPARVGREKQPKVAAAPRRVREIAWKAQTRLCGRFRALLRKGKLPAIAVTAIARELSAFIWAISREVVGTRQP

SEQ ID NO: 160057 - protein, 467 aa, unidentified
MALSATTKDENPFGCLEGLDILHILVPQNMKRSKTMPSKRNNSSVVSVVHEVCCGLDVHKKSITACLVYTNASEGERSEVLEFDTFTDDLIRLRDWLLDSECPVVAMESTGPYWTPIHNILEGYFQVILVNARHMKNVPGRKTDISDSRWLAGLLRYGLVKGAFIPPKHQRQWRDLTRMRKNYIASLGDFKRRVHKLFQEANIKIDSVLSDLFSLTGRNLMSLLISKESSPTFSEVQDCLRGSCKDKANEVYRSVKGFFEEHHRCLLVMLLETIEKLQKQIEDLQVRISQGQRASKELIERLKEIPGVSEISAHSLLAELGSSLEAFPTAAALSSWCGLCPGNNQSGGKRFNGKIRVKKHHLKTIMVEVAWSAIKTKGSYYKAKYYALKSRLGPKKAIIAISHRILKAIYYMIKNGVCFKDLGEAYLLERNRASRIRYLSKQATLLGLKLTPVTQVATTPTMEMSSI

SEQ ID NO: 160058 - protein, 376 aa, unidentified
MGTPSAQTLDDVGVREIFQKLEEVPLMTMVGGLDVHRAQITFDYVDDDGLVHWGQIRPATRKTLRGWLAEHCPDGDAEFALEGCTGWRYVSEELAGAGVGVHLGDPAEIAVLRGPKKRAKTDRADARLLRTLLLQGRFPESWIAPAHVLEIRTLGRLYCTLMDERRAWQQRIHAQLFHQGCPPVRALLSVTGRAALAGAELSAVGGQYVDTALGRIDELSTEIEPLRAQLVNFARHQTGCQALQRHYGIGWLCAAIIWAEIGDARRFSSSDQLVRFAGLDVTVYSSDGKRSPGHLSRQGSPELRWAAFEAAKCAARRGSPDYGYYRKLAAKRDGHNGKNPTLAVERKILRRCHHTLRELGDAAVALPVAEPQEVAA

SEQ ID NO: 160059 - protein, 348 aa, unidentified
MLADQLDYVVGVDPHRDVHALAVVHVLSGAVVLEETVAANSDGYALALKFVEVHASGRRAFAVEGTGSFGAGLTRFLSGRGERVLEVSRLRRERRSGGKTDALDAVRAARSVLAQERPATPRAGGERQALQALVAAREGAVNAKCAGLGQLRDLLVTTPEPLRSELRPLTQARLLRRLAATRPDTRRDPELRGSMLALRSIARRVLELTAEERALGREIEALTRKLAPQLLEQPGVGPHAAAQLVLSWSHQGRIRSEAAFARLAGAAPIPASSGQTVRYRLDRSGDRKLNRALHMILVTRKRLHPPTIAYIERRLQEGKTRREANRCLKRYLARSLYRLLEHGAPLPT

SEQ ID NO: 160060 - protein, 345 aa, unidentified
MYRTRVGVDLAKKFIQVCIYKNKKVQSNIEMTPEAFLYWLINNKPVTIIFEACSSSNYWKQKAIEAGHDARLISAKLVSVVRQNQKTDKNDALAIVQTTFMPDVTYIGGKTVEQQQLQSIKRLRELAVKQQDASQKQLIALLFELNIKISSRKGGIILAIEGVLEDATNDLSAECRRAIFLAKEHLRGLFESARHYDDCINKSVAAHPACQRLMKLEGVGPMNAINLYIALGCAEIGTFSKGKDASACIGLTPIQHSSGGVVKLGSIGKLCKNSRLRSQLVCGATAAVQHAVKRKAKTKKDVWIQGLVERRGKKCAAVALANKTVRTAFAMLTHGTEYKAELLAA

SEQ ID NO: 160061 - protein, 425 aa, unidentified
MLLFLLIKVVILMMKLKYSICCGLDVHKKVIVATIVTTNKDGISEYKQKSFSTINSDIQRFHNWLIENDCYHVCMESTGKYWIPIFSYLENDIDVCLTHPKYVKAIKGKKTDKKDSKWIADLYKFDLVRCSFIPPKDFRQLRELARYRFKLVCMKSSEKNRIQNCMTVSNVGIANVLSDPFGKTATEIMSYLLEHTADSIDEKAVRKLIKKGVKAKSNEIIEAIKGYNIASDQAKKLELARGHLDYLDDMITQTEVELYVRMKPYSAFVEFVSTMPGMTELSSTIILAETGVNMDIFDDAKHLCSWCGLSPANNESAGKKKSVRIAKAGDYLKPMMVQCALAAIKSKKQPYFAVKYGRIKKRRGHKKAIIAIARMMVVCIYHMVSEKKPFCPADYEELMAPQNPVTHVVLNENNVFAYLESLGLR

SEQ ID NO: 160062 - protein, 307 aa, unidentified
MFVGIDVAKDRLDVHVRPAGEAFTVARDGEGVEELANRLNAIVPSLVVLEATGGFETIVAAGLAAAGLPVAVVNPRQIRDFARATARLAKTDALDAAVIAHFAEAVNPPARPLADPQQRLLGELMARRRQLIEMMVAEGNRRRLLTARRIQKSVDRVLAILKAQLEEIDHDIDIAVRGTPAWRQAEDLLISVPGIGHKIARTLLAEMPELGRLDRRQIASLTGVAPFNRDSGTLRGRRTIAGGRPVVRGALYMSILVSIRRKLPLAETYHRLRAAGKPAKVAIVACMRKLVTILNAILRDKMPWATA

SEQ ID NO: 160063 - protein, 358 aa, unidentified
MNTRRIQDFVVKGKEVFVGLEDSKKTWRIAVRCEKMLVHQVSMEAKYPVLIQYLRNKFPECTIRLIYEAGFKGFNLSDQLTEDGIDCVVVPPHLVTEPKVNRVKTDTRDAKRLALILENNDVPSVCDVPDRERREDRQANRTLIAIQKDITRTRNRIRKFLDFHAIEVPFAGKNKWDRKEFRALKELPLCEPLKISLNVLLTLLEHLWMHQTALRAYLRQLCHKERYKKAFEIAKSAPGIGWFTAIRLVLEMGEDLTRFTSGKKIASFVGLTPSEYSTGETTWKGCITGMGPGFIRATLIENSWIAIRKDPILLGKFMRIWRGTGSKKKAIVAVARMLIVRLRACIVSGTPYVMGVGR

SEQ ID NO: 160064 - protein, 409 aa, unidentified
MDVVITRCAGLDVHQATVVATVRVPDDQGGRRVVTDTFGTMTADLLALRDWLHAYGVTHVALESTGVYWKPVYYMLEDAFTLLLINMQELKRVPGRKTDVKDSEWLAQLLECGLLRPSFVPPPPIRELRDLTRYRVQQVRDRSQEVNRLCKVLEDAGLKLTTVITDVMGKSGRAMLQALVDGTTDPAVLAELARGKLRKKLPELRRALQGRFRSHHAFLIEQIFAKIDFLDEALERLTTEIDQRLVPFEPMLTALDTIPGVDRIGAISIVVETGGDMTRFLTAGHLCSWGAMCPGQNESAGKRRSGKTRKGNRYLRGTLIQAGLGAMRKNGSALQARYHRVARHRGHKKAVVAVGHQILEIAFYIMRDGVTYEELGADYFNRRHAEKAVRRHVRQLEALGFHVKIEKAA

SEQ ID NO: 160065 - protein, 395 aa, unidentified
MHESWRGIELGKVFTFSNSREGFEAFKAWMQHLQDKYRKSDVIVGIEPTGHYWFDLGAYLEDEGILLVMVNPYAVKQTKELDDNSQSKNDRKDPKVIAKLVTEGRYSAPYTPDGVYADLRIMVANRKRLIREMTQIKNRFARWFAIYFPEYTDVFGDYEAQSSMLLLKKVCTPEAIVELGAEKINQIWRDAKLRAVGMKRATTLCETAKRSIGLKKGSSAARYEMKLLLEDYEYKKAQLDAVMEEIEKLCRKIPESEQMLAIKGIGVITVAGFLAEVGDVRRFESPRQIQKLAGLSLRESSSGKHKGQTTISKRGRSKLRAVLFNAAIPLIAKNPEFKSLHEYYTTRANNPLKKKQSVIAISCKLIRVFYAILANGVTYDPQKMLSDIHRQPQAA

SEQ ID NO: 160066 - protein, 327 aa, unidentified
MNYVGIDVHKRYSVCAAQDEQGRELGVVRIEGNTRSGFAQFLERLGGSATVAIEACWNWGKIYEVLEELPQVSELVVGNPLKTRLIGEAQIKTDKIDARALATLLRGHFIAQVHVPAKVTRRRKDQLRQRLYWSRLRTRIRNRIHALLDRQHDLALPQCSDLFGVKGLAYLRRLELPEPDGTMLGEDLALFDLLSMQIKAQEKRIAQANAADAMTRRVQSIPGFGPILAALIATEIDKITRFADAEHLCAYAGLVPMTRASGGHTRHGSCVQPTAGCVGPSSRARGWPSVAALTSARSTAETVSEGRQRTPPSPSSRGACAASSSTC

SEQ ID NO: 160067 - protein, 342 aa, unidentified
MQISTIGLDIAKNVFQVHGIDAAEKVVVRKRLRRRQVLEFFKALPPCLIGMEACATAHYWARELTKLGHRVRLMPAKDVKAYVKRNKNDTTDAEAICEAVRRPTMRFVQIKSAEQQGRLMLHRTRDLLMRQRTQVINALRAHLAELGIVAAQGREGIKELLNIIASEHDARLPVDAHTSLVVLGAELQAMQTLIGSIEKRIMAQHRGNEASQRLESIPGIGVIGATAIAATVPDPKVFRSGRDFAAWIGIVPREDSTGGKQKLGPISKQGDRYLRRILVVGACAVLRYARHRPEKYPWLAQLLARKPFKVVAVALANKMARTAWALLAKGGTYRAPALAAAA

SEQ ID NO: 160068 - protein, 400 aa, unidentified
MRSIGMDVHRSFAQVAIWDAGEIADSFRIDMEHDAVVAFGRSLKSDDDVILEATGNTSAIVRLLTPFVNRVVIANPLQVKAIAHARVKTDKVDAKILAQLHAAGFLPEVWAADDDTLHLRRLVSERDATVRSIRRVKSRVQAILHANLVPKYAGHLFGKGGRKWLDKVPLPKSERDLLGRHLDELDWLVHKLEKLEKDLIRISLDDPQARKLMSVAGISSVIATAVIASIGDISRFQTPQKLASYFGLTPRIRQSGERGAIHGRISKQGNATARTMLIEAAWSAASVPGPLRAFFLRIKNRKGANVAAVATARKIANLIWHLLNKDAPYQWARPAFVAMKMRKLELRAGAPKAHGKAGPGRDYWIKELRHREMELVANAEASYAKMVEAWREKPPKPQKN

SEQ ID NO: 160069 - protein, 402 aa, unidentified
MNFFVGLDWASQAHAVCVLDATGQVCWQGSVEHSADGLAELLRRLARFGPPASLPVALERPSGLIVDTLMDAGYRVVPIHPNALKASRPRYSAAGGKSDPGDAFILGDLLRTDGHRFRPLQPLSDETRALRALVRGRDDLVAERVALANQLRALLDRFWPGAAAIFADVDSPIALAFLSRYPTPHSAERLGEKRLARFLVQHAYCGRRPAAELLARLRSAPITQTSELEAEASGEIVRALVTVLLPLVTQIQQLSTAIAAALPQHPDGPLLQSFPRSGRVNAAQILAELGDDRSRFATDEQLAAEGGVAPVTRESGKHRGVAFRRACNKRLRQALTSFADHSRHASPWAAAIYAAARRRGCHHPHAIRVLARAWVRVLWRCWQDRRPYDLTLHRAAQRVAAA

SEQ ID NO: 160070 - protein, 431 aa, unidentified
MNSSDTSTNEPFAALVGLDWADEKHAVVLMAAGSHIKEHATWEHTPEALSDWVAQLHQRFTGGKIAIILEQSRGSLLYALLPHAHLVLYPINPQMAAKFRKAFYPSGAKDDPLDADLLLEILVQHRDRLTAWQPDEPVTRQLQLLVEARRRFVADRVRLSNRLEQALKSYFPQALQLVGESLTTPLACAFLQKWPTLAAVQKAGASRLRKFYYGQHCRAEELIQQRLQLLAQAKPLTTDAAVVLAQSLLVKSVAHELAALPTILAEYDQQIAALFAAHADYEIWDSFPGAGPALAPRLAAAWGTQRARFESSDAMAAYSGIAPVKQASGRSVWIHMRWACPKFLRQTFHEVARTSLSFCVWAQCYYQMQLDRGKGRHAAFRALAFKWQRIMWRCWQDRTPYDDAKYLASLKRDNHELYTRIIAFQSAPAGA

SEQ ID NO: 160071 - protein, 268 aa, unidentified
MEDKMCLGIDVSKKTLDCCLYDGNDYKHKIFNSNNASIVSKIIKNYKLTKACKVVMEATGVYHTSIFKSFYEKGFNVVVENPLKIKSYSKMKLCRVKTDKADAKLIAEYGYMQVTERTIPHEPYQDELAALLKLIDGYQCDVTRCKNRLEALNNYSINTSIHIASLNRQIISLNKEIQTLKVSIREIIASTCEEQYQLYLSVTGVGPVTASSIIANFGNFSRFEQSKQVANFIGICPSPFSSGTSVKSSGSISKKGTRCLERRCIWPL

SEQ ID NO: 160072 - protein, 360 aa, unidentified
MSFNGTSVGLDVHALSVVAHAVDEESGLVERARLCPDHGEVLRWLGQLRGPLRVAYEAGPTGFGLARALAEARIECVVAAPSKLIRPAGDRVKTDVSDAAHLTRLLRLGEITPVTVPEADVEAVRDLVRAREDARADLMRVRHRLSKLLLRQGRVYSGGQAWTGPHQTWLRQQRFTDAHTAAAFNHHFEAVLSATAARDHLDEQIVAVAASPRWANTVDRLGCLRGISALTGLALAVEIGDWNGFTGASIGAYVGLVPTEYSSGASRVLGSITKAGNAHVRRLLIEAAWHHRASYRHPGPTMRARWAKVDPALKARGHAGNRRLHQQWCRFLERKKHPAVANVAIARQLAGWCWSLATLD

SEQ ID NO: 160073 - protein, 277 aa, unidentified
MLFIGLDLGDRHSHLVSLDQDGELVEEARLPTTQASLARKFSGIPACRVAIEVGAHSRWVSALLTRLGHEVLVADARKLRLIYHNPRKHDRADAEYLARLARLDPKLLSPIHHRSPQAQAHLAVIRARDSLVRARTQLINHARGLVKTTGARLPSCSAASFHTKTASAVPQELLPALSPILATIGSLTQSIQAYDRQIQQLALDHYPETRLLRNVPGVGPITSLAYILTLEDPQRFRKSREVGACLGLVPRTDQSGAQDPQLHITPGLARQGRQDRR

SEQ ID NO: 160074 - protein, 324 aa, unidentified
MSDSILGIDVSKETLDAYCARGQRKQGRTFANSPDGWKLVRAWLKAMGSKQAHVCMEATGRHSLGVALALHEAGHVVSVVNPAQIRDFARTKLGRNKTDKVDAALICEYAELFKPEPWTPPSPAMRRLCELQTMRAGIIRSRAEWKNRIGSGLGDSTATKLAAATIDHFTSQLEAIDRAIGETIEQDAELRGRRDLLLSVIGVGETLAASLMAEMPEPGVLRRSGEMVAYAGLNPSHHRSGTSIDRPTRISKIGNATLRSSLYMPALSAMRFNPAVAIFVARLKSAGRLKPKQIVVAAMRKLLVLCFGVLKTGKRFDLAIAMPA

SEQ ID NO: 160075 - protein, 321 aa, unidentified
MQSFNLGIDIAKAKLDCALRLPAGKYKHKVFENKQSGFIALIEWLDKHDAANAHVCMEATSVYWEAAAEFLANKKMIVSVINPAQIKAFGASRLVRTKTDKVDAQLIAEFCCERRPQPWQAPSPGEQALRALVLRLDALQAMHTQESNRLEVAREVVKADIASHIEWLDSEIKSLIKKIRDHIDADPDMKSKQELLDSIPGIGERTIALLLAFCMHPGRFANARQAAAFAGLDPRQHESGSSVRAKPRMSKVGHAFLRKALYMPAMVTLYKTDWGRRFRERLAASGKPPKLIIGAMMRKLIHVAFGVLKSNNTFNPALQNA

SEQ ID NO: 160076 - protein, 504 aa, unidentified
MVHLTQPKVRIMNTPPSSRSTKRHVRNARKLKSQSAKARSEAPALLSDELKPVHRRAAGIDVGSAENYVAVPAEGLAPGESAVRVFGVFSEQQDALVEWLRGHQISTVAMEATGIYWLSLYDKLEAAGIEVYLVDPHGVKAVPGRKSDWIDCQWLQKLHTYGLLQRAFRPDPPIRRLRILTRQRAELVLCGVAHQQHMHKALIAMNLHLHLVVSDLHGETGMRIIEAIVAGQREARELVKLRDGRCHKSTLEEMEAGLKGTYDEEQLFVLEQALKAWKFYQEQMAQCDVRIEKVLAQLPTAQPAQAPVPPKPVATVPAPKQALRKRTQHGPNAATIDFRAALTRICGVDLIKVCGLNLMSVLMLIGEIGTDMSQWRNAGAFCSWLGLCPGAKISGGKVLSRRTRKVNNRASTILRLAAWAAGKTDTWLGRFYRRISARRGAPKAITATARKLACIIYHMMKYGEEFVWLDANQCEGRAREFRLRRLRKEAKMLGFEVQELQQVA

SEQ ID NO: 160077 - protein, 339 aa, unidentified
MELHCGVDLHGDNGYYGIVDKSGNRVFKKRLPNDLNEVLQALAPFRADLKHGIVIESTFNWYWLVDGLKENGYQPRLGNPAAMEQYSGLKNTDDETDAFFLAEMSRLEILPEGYIYPKEDRPIRDLLRRRLMLVHQKTAHVLSFQNLIARQRGEGISGNSILKLKPEDAKTFFNDERLALMGQTNISAIRFLDSQISQIESAVLKESKLKPEYERLQTVPGIGIILALTIMLETGDVGRFAKVGNYTSYCRCVKSHRLSNTKKKGENNRKNGNRYLCWAYVEAANFIRRYCPEAKSWYQRKLSRSKQIVATKALASKLCKACYFIMKDQVDFDVKKIFG

SEQ ID NO: 160078 - protein, 405 aa, unidentified
MQVLYKSCCGLDVHKKSVTACVITPEGKEIKTFGAMTEDIFALVEWIKEKGCTHVAMESTGVYWKPFYNLLELEDITALVVNAQHIKTVPGRKTDVKDAEWIADLLRHGLLSSSYIPDRDQRELRELGRYRKSLVAERAREVNRLQKVLEGCNIKLGSVATDVTGVSAKAMLKAIINGAGDPVVIAKLAKGRMKNKQKELEKALVGLVGKHQKMLLTAQLKHIEFMDQQIIQLNQEIEERMRPFDEKLSLLETIPGVARRTAEDIVAEIGVDMDRFPSDAHISSWAGMSPGNNESAGKRKSGKTTKGNKSLRTTLVNSARSAARTKDTYLSAQYRRIAARRGGNRAAVAVGHTILVIAYHILKKHEPYKELGANYFDQRKKDMVVNNAVKRLEALGYKVTVEAAA

SEQ ID NO: 160079 - protein, 470 aa, unidentified
MRIIGIDLALTSAHKAVVMDDRGKFLTPVFAVATLPEAMAGLLQQAREGVEASCPVVVVMEPTGLAWLPVTVYMLLHGVTVYLVNSQQVADLRRFYKRHAKSDRIDARVLAKLYVVAPEKLHALRLPAASGYALQRACKQLDWVVTEITKLTNQIIALDRMAWLSDWEDLGLGDLLSPAARWCREHYYNPAAVVQAGVEPIRQAWRASNLAELEEGEAWILALVERAGKVVEVYGDPCPYVDFDALQAEVVMKQKWLGQLEADRNHLRKDVVFPLYHQLHPSGNLETLYGVGEESAAVYLSFFGDPSRFPTGRQMRGWSGMVPNSKQSADSESKGLHISQAGPDLIKKFAYLDAEVARRYDPQLAAIYYDQMVKKGKHHTQAVCAVATHLLDRVWVVLAQDRPYDLRDVDGTSLTPERARKIIAERYIVPEEVRKRNNRRTRRARTENRAERRFTRQERNRESSPELVRG

SEQ ID NO: 160080 - protein, 465 aa, unidentified
MPRKTTGDRPELKPVNVGAAAIDIGSKMHMAAVNPACTDVPVRTFGTFTEDLHDLADWFKACGVTSVAMESTGVYWIPVYEILEQRGFEVILVNARYAKNVPGRKSDVSDAAWLRQLHSYGLLRGSFRPDAEIATLRAYLRQRERLVEYAAAHIQHMQKALMEMNLQLHHVVSDITGATGMRIIRAIVAGERNPDVLATYRDVRCHSSIETIRAALVGNNRHEHVFALTQSLELYDVYQAKMLDCDRKLEALIAALNNKGVKSVGKLSKPRIKTKQVNTPTFDVRAALYGVLGVDLTEIHGLGPSLALKLIGECGTDLRAWPSAKHFTSWLCLAPGNKISGGKVLSSRTRRSSSRAAALLRLAATTVGRSDTALGAFYRRLSSRAGKSKAVTATARKIAVLFYNTLRHGMSYRDPGADQYEQQYRSRVLANLRRRAKSLGFVLQAIPGDAKFLRKAAAFFAKEAT

SEQ ID NO: 160081 - protein, 334 aa, unidentified
MNQKYFIGIDISKGKLDCAVILSDYTVVAENIIPNNVKKIKSFLKGFIKKHNTEFDQILVCCESTGIYNGPLRQVCSDLNIGLWEEHALKIKRASTDMRGKSDRKDAMRIAEYLVRYRDKALLYKQPSDVLKTLDQLNKVRETLLGSKLALQNQLGESKSFDPDGYKVLLKHYKQMIAQIESQLKKIDLEIQEQLNQHEDIQQNINLMKGVPGVGKQTALQLIIYTQNFTAFKSVKHLACYAGVVPFQNESGIVIKRARVSKMASKKLKSVLHMAALAAVRTKSELKAYYVRKIAEGKNKMCVLNAVRNKILQRIWAVIERQTPFLSNENFRPI

SEQ ID NO: 160082 - protein, 456 aa, unidentified
MVVDEEILILFVQEKKKSFLATMTLINFVAANQKNYAFNLLSVFIMVFWSVQHLLQHLLVQTQVSHQLLQPLILILQLPQPPQFRHARPGKFFLPVNGMDYLLPLRLTVRNVLTRRITMNIVFLGIDLAKNVFQLCGLNQAGKPVYTKRTGRKELLQTLANIPACLIGIEASTGAFYWQREFEKLGHKVKVISPQYVKPFVRGQKNDGNDAQAIAVALMQPTMQFVPPKSPEQQDIQALHRARQRIVNHRTATVCQIRGLLLDRGIPIGSAVSRARRAIPLIPEDAENGLSSRMRRTIAELYDLFNDLGRRIHFFDKEIETVFRQSEACQRIAKVKGIGPETATAVVAAIGKGTEFKNGRHFAAWLGLVPRQHSSGDRQVLMNMTKKGDKHLRTLFIHGARAVVRVATNNNDGHMNQWVNQLKERRGFNKTTVAVANKNARIIWSMLRNETGYQVV

SEQ ID NO: 160083 - protein, 317 aa, unidentified
MMEAILERCAGLDVHQESIVACVLVGPLDRSPKSEIRTFGTMVDDLLALADWLSETGCTHVAMESTGIYWKPVWNVLEAFDFELLLANAHHIKNLPGRKTDMKDAEWIAKLLRCGLIEGSFVPSQEIRDLRDLTRYRKKLVQEATSEKNRIHRLLQDANIKLTTHMSDIFGVSGRLLLQKMIDGEVITLDFLETEMKGALRHKSAKLLRALNGHLRRHHRDMLRFSYEHLRFIERAISEVEAEIRAHVADKQEAFELITTIPGINENAAAIILAEIGADMDQFGGDKQLAAWAGLSPGNHESAGKKNGSGHEAETVL

SEQ ID NO: 160084 - protein, 410 aa, unidentified
MLELFVGDDWAEEHHDVELMDPAGRRLARARLPEGVTGMARLHAMIAAQLGEGVEDAVVKVGIETDRGSWAQALIAAGYEVFAVNPLQAARYRERHSVSGAKSDKADAHTLADMVRTDSHQLRPVAADSPRAEAIKVVARAHKTLIWERTRHTQRLRHALREYFPAALEAFEDLAASDTLELLSKAPDPAAAARLSISQISAALRRAGRRKIEEKAAVIQTALRAEHLRQPEVVVAAYAASVQSTVAVLKVLVEQVKTLQGQVESHFGRHPVAEIILSQPGLGPILGARVLGEFGDAEDRYVSAKSRKNYAGTSPITRASGKKKLVLARFVHNDRLIDALAAQAFAALSASPGARAYYDRIRARGVGHRAALRQLANRLVGILHGCLKTGTVYDETTAWPADATDSPAAA

SEQ ID NO: 160085 - protein, 349 aa, unidentified
MRFYNQPHRFYAGGDLHARTLYLHILDDQGQTRFEKNLVAKSETFLEAVAPFRDGLVVGVECMFAWYWLADLCEDEHIPFVLGHALYMKAIHGGKSKNDRIDAGKIATLLRGGLFPQAYVYPRTMRETRDLLRRRTFLVRQRAQFLTHIQNTNSQYNLPPLTKRLSYASNRSDPDLIDRFPFESVQRSIRSDLRMIDALDDEVRELELYLTRHAKIDDPNTYHLLKTIPGIGPIIALILLYEIHRIDRFPEVGNFASYARLVRCEHESAGKLTGHGLRKIGNGHLRWALGEAACLMLRCHEPAKRWLQRKEKKVGKPTALGILAAKVGRTVYHLWRKQQAFDAKKFLTS

SEQ ID NO: 160086 - protein, 346 aa, unidentified
MKKILKQAVGIDVAQKELVVSLGRMHEDLSIEIYAHKVFPNTKNGFSTLVSWTKKRVDSNVKVRYVMEATGVYHESLAYYLAQKDYEVSVVLPNKISNYFRTLETKTITDKTASETIVMFGLERKLDLWKRPKPIFKKLRQLTRERDQIVQERTMAKNQLHADLAEAEPHPSSINRIKKRIALLNKQEKEIQQEIAKMAKEDQEVSRSIEGIRSIPGVGLLTAVTVLAETNGFELIRNKRQLTSYAGLDVREKQSGTSIRGKARISKKGNRYLRKAMHLPALAAIRHSARFKGIFVRLVSKHGIKMKAAVAVQRKLLEMIYTVYKSQTLYNEGYLKINTTKESTII

SEQ ID NO: 160087 - protein, 355 aa, unidentified
MLRFRLMIKRGLNVSVKETSVCIVDESGKLCREKKVVTHPDDLVAVLSDPAFNFERIGLEAGPLSQWLFEGLAKAGFAVVCIETRHTKAFLKAQQLNKSDRNDARGIAHMMRVGLFKDVHVKTLTSQKRRALLTARKLLQEKAIAMENDMRGLLRNFGLKVGTIRAFKFDERIRELVEAAPDLAEIIESLLAARQKLREEFVKLDRKVRGEARVDPVCRQLMTVPGVGPIVALAYTSTIDIPSRFRHLRAVGAVLGLTPVLNQSGESSRIGHVSLCGDGMLRGLLYEAAQVLLIRVKKWSWLKAWAMNVAKRHGIKKAIVALARRLAVVLHRMWVDGSEFRWTREATPTTTDATA

SEQ ID NO: 160088 - protein, 366 aa, unidentified
MHATPETAVATTVAVDLAKDVFELAFADAEHRILERKRLSRRAFAHVLDNRGPLRVVMEACGSAHYWARRFAGQGHTVRLLPARDVRPYVRRNKTDRTDVAGILEADRCAQIDPVPIKSPEQQGVQALHRIRERLKAQRTSTINGLRGVLREFGLVIPLGAAKVRPAVLAALEDGDNDLPMALRHTLGEGLDRLVGLQADMTAIEQRLTAFADSDPTSQRYQSVPGIGVLTATALCASVGSLDRFRSGRHFAAWLGLTPREHSSGSQRHLGAMSKRGDGYLRLLLIHGARAALRAAQVRQRKEQPLDRLQAWALALQARQGHNKAAVALANKVARRVWAMEHHHAAFDGNHCSVRPTVAVAACVIA

SEQ ID NO: 160089 - protein, 411 aa, unidentified
MRIIHQRCCALDVHKKSVVACVLVWDGKQAVEERKKEFGTMRRELERLRFWLMACKVDAVAMEATGVYWKPVWNVLEQQKQYKLKLVNAQHFHGVDGQKTDQADAAWLAELLQCGLLKSSFVPPQEIRELRDLTRMRVSLLEDQNRVQNRIEKILEDANIKLGSVASDTLGTSGTQIIKAIVKGDKDPGWMADYAQGRLRAKRKELEEALRGRVTDHHRRLLDMLLRQSEFLDREVGRIEAEIRDRLASRQELVDRLAGIPGFGEVTAWTILAEVGFDMNVFRTPERLCSWAGMCPGNHKSAGKRKSGKTRKGNRWLRRGLTQTGLAASNSKNSYLRSFYWRIAARRGAKKARIAVGKKQLTIAFFIIRDGVHYREAGADFFDRRQPERTRNQLVKRLENLGFKVSLETVA

SEQ ID NO: 160090 - protein, 428 aa, unidentified
MNYNQNRKISQITENTLIVGVDIAKHKHVARAQDFRGIDLANRLVFTNDLKGFQTLTQWINHLKGCHQKNRVIVGMEPTGHYWMTLAYYLKTHDIKCVVVNPLHVKRSKELDDNSPTKNDTKDAKVIAQLVKDGRYSEPTLPESIYAELRQGMKLYDQMVQDRNAIKAKVHNVLDRYFPEFLTVFKNWEGNAALQILRAGLFPKDIVKMPEEAILFEIKKAAQRAVGMKRVQKLKEAAAKSVGLSVGVRFAKKELRYLMEQYDDLTARIDELAEELSEMVLTIPGAKEISAIKGIGVMTVVGFFAEVGDLSQYHHPRQILKLAGLNLRKNESGEHKGRTTITKRGRKRLRALLFRVAMPLAATNPAFKRLHEYYRHRPENPLTGKQALIALCGKLIRVMFVIGRRQCAFSEERMIQDMPHLQNEKQVA

SEQ ID NO: 160091 - protein, 338 aa, unidentified
MEFFSGLDVSMERTAICVVDDKGQVQAQSEVVTDPATIAAALKPFLPRLRRVGHEAGSLSPWLHPELLKFGLPAVCLETKHVRAAMSAQRNKTDAADALGLAHILRTGWFRRAHIKTESCYRLRLLLTQRRNLKRKVLDLENTIRHSLKAFGIRIKGTGRTGFDKAVREAVADDALTSELMDAMLAARAMLWKQYCRLHELVVKFVARHELCRRFMAIPGVGPVTALSFVKAIDDPSRFRRSRDVAAYFGLTSRRWQSGTSIDVQGRISKAGDPDVRRALYDAASAMRRPAPAISPRAPPSRTAGCWARKHDRLHDKRNPAFRHLDGRRLNRELRCSG

SEQ ID NO: 160092 - protein, 346 aa, unidentified
MEYYAGIDVSLELSSVCVVDGRGKIVKEAKVASEPEALVYFFKELGFPVNRIGFEAGPLSQWLHAGLTQAGFETVLLETRHVKAALSAMTVKTDRKDACGLAQLLRMGWFQQVHAKSIGSQEIRALLVARKQLLGKLLDVELSIRGILRGFGLKVGQVTRKTFEARIWELVTGHTTLERIAEAMLSARATLQAQYEKLHKAVLAIVREDAVCRRLMTVPGVGPVVAVTFKSAVDDPSRIAKSKAVGALFGLTPKKYQSGEKDVTGGITRAGDEMVRTALYEAANVLLSRITRFSKLKRWGMDVAKRRGSKRAKVALARKIGVILHRMWIDGTTYRWAETKPIAAQG

SEQ ID NO: 160093 - protein, 419 aa, unidentified
MNEYAAYLGIDWADTKHDLCLLDATSGQKTHLVIKHTPEAIAEYVTSLRVRYPGRQIAVGLEQSRGPLLFALLQYDFLVLFPINPTTLARYREAFSPSRAKDDPSDAEYAAELLQQHRDRLKAWRPDDEQTRTLRYLVEHRRRLIGDRTRISNRLTSLLKCYFPQVLSWFPDIRTELVCDFLLRWPTLTEVQPVKRATLLKFFREHHSMRSDTLEKRVTAIKQSLPLTTDRAVINSSVLLSKALAAQMKTTIAAISQFDREIQKLCAAHPDFPLFQSLPGAGQVFASRLLAVMGSDRGRWTTADELACLSGIAPVMERSGKSVWIRWRYFCPKFMRQCFHEFAAESVRHSFWARAYYEQQLVRGKKHQAAARALAYKWIRIIWKCWLTRTPYDEVKYLEALRKKGSSLLAFAAAKAKTS

SEQ ID NO: 160094 - protein, 387 aa, unidentified
MSKKIVAPAYVAAMARAEADPASARFWVGLDIGFKSTAVCVVDVDGAVVHQVSMKSHATEIGRYLRRNFKSHVTLIGMETGGLSPHLAGKLREQGFQVAMLDALQVHRVLSVKRNKTDTNDARGIAEITRSGRDYLTEVYVKSNLCFEVRASLIMRDRLVKQRRETEAMIRGLVRVYGGRIEPGSDSPATFRERAIDQLCLIADTESVDLRPRIIPLLDLCERFYIEAGRIERELDLLAASHPVCKRFMEIPGIGTITALSFYSAIEDPTRFRHVDDVAAYLGLTPRVYQSGESLTHGGISKMGNQLTRTHLVGAATVMLANTKSFSTLKDWGMKLSKRVGFNKAKVALARKLAIVMFSLWRDGTHFMAKAADVGPHRDLMQARAVA

SEQ ID NO: 160095 - protein, 396 aa, unidentified
MLRTNLQKQNDFTGQVFHIGLDVHKDSWYVTIRSLGIEVGHFTQVPDAAALHQYLQRNFPGGCYHSAYEAGFCGTGAHEQLCKAGINNIIVHAADVPSTDKQKKNKTDLHDSRAIAEHLERGNLKRIHVLSQEQQELRSLFRLRECRVKETTRANNRLKSFLMYYGIKIPETVSKRGDLTGRALAWLDIELQSAAGTIVLQEYVAELKYQRKQLFQVTKTLREQVMVYDKQTYINLITIPGMGSITAMGLITEIGDFSRFEDPDEYASYLGMFPWEDSSGDCIKTKGMQPRCNGHLRPLLIEASWHSIRKSRNLFAYYSKHAGGKNGKKAIVKVARKLAMIARGVARSGQPYREDYQKKNDNQQVTKNIKTKKVFSGITEQHINKQPSYGRMPMPG

SEQ ID NO: 160096 - protein, 319 aa, unidentified
MSTLPVWVGLDVAKETLDVAVRPSGELWSTPNTEGGITALLARLRSLHPALVVCEATGGFERAAIAALAAAGVPVVVANPRQVRDFARSTGQLAKTDALDAGILALFAERVRPTPRPLPDDAAQLLDAVLTRRRQLLEMLTAEKNRLGFAPKPLHRGIQAHIRWLERQVDDVTKELATLIEASPVWRAKDDLLQSVPGVGPIVSYTLLGELPELGTLTHKQIAALAGVAPLARDSGTLRGKRMIWGGRTSVRTALFMAALCGRRWNPALKVFYDRLIAAGKPKKVAIIACARKLLTILNAMMRHNTHWLLRETQLQYSC

SEQ ID NO: 160097 - protein, 445 aa, unidentified
MFIQSQDDSQCCYSLFIKVVILMMKLKYSICCGLDVHKNVIVATIVTTNKDGISEYKQKSFSTINSDIQKFHNWLIENNCYHVCMESTGKYWIPIFNYLENDIDVCLTHPKYVKAIKGKKTDKKDSKWIADLYKFDLVRCSFIPPKDFRQLRELSRYRFKLVCMKSSEKNRIQNCMTISNVGIASVLSDPFGKTATEIISYLLEHTADSMDEKAVRKLIKKGAKSKSDEIIEAIKGYTIETDQAKKLELARGHLEYLDDMITQTEVELYVRIKPYYEFVEFVSTMPGMTELSSTIVLAETGVDMDIFDDAKHLCSWCGLSPANNESAGKKKSVRIAKAGDYLKPMMVQCALAAIKSKKQPYFAIKYGRIKKRRGHKKAIIAIARMMMVCIYHMVSEKKPFTPTDYEELMDPQNHVESVVLNENNVFAYLESLGYDSSKLVKRNDN

SEQ ID NO: 160098 - protein, 410 aa, unidentified
MLFVGDDWAEAHHDIEIQNEDGQRLGRRRLPEGLAGIAALHALIAEHLPADAGPEQVVVGIETDRGMWVQTLVAAGYGVYAINPFAASRYRDRHATSGAKSDPGDAKMLADLVRTDRHNHRPVAGDSELAEAIKILARSHQNLIWTRQRQTNALRSTLREFYPAALEAFDDLAGRDALAVLAKAPTPAQGRKLRTTQVAAALRAAGRQRNLTGRAEEITAALGSEQLAAPPLVADAFGHSVRALVAVISELVRQIQRLEAELTSSFEQHPDGEILRSLPGLGLVLAARVLAEFGDDPHRYTDPKARKNYAGTAPITRASGTRRVVLARHARNRRLADACYQWAFSALQCSAGARALYDAHRAKGDTHHQALRALGNRLVGILHGCLRRRSSYEETVAWPPLHDPAVTQAA

SEQ ID NO: 160099 - protein, 356 aa, unidentified
MSQKLNAKIAVIGIDIGKNSFHIVGQNLRGAIVLRQKWSRGQVETRLANLPPCLIGMEACVGAHHLSRRLQMLGHDARLMPAKYVRPYSKGQKNDFRDAEAIAEAVQRPTMKFVATKTADQLDLQALHRVRDRLVGQRTGVINQIRAFLLERGIAVRQGPHSLRSELPGILATRTDVLLARMLRIIEDLAGDWRRLDARIEGLSSEIETLARQDQACERLMTVPGIGPIISSAMVAAIGTGDVFSKGRDFGAWLGLVPKQISTGDRTILGKILRRGNRYLRSLFVQAAWVVLVKIGPKHWDRYGLKSWIEAARKRLHHNVLAIALANKLARIAWAVLHKGRAFECVKTEETASRPA

SEQ ID NO: 160100 - protein, 335 aa, unidentified
METVYFIGIDVSKKTLDSALTIDGKSYHQDELENTTNAIQIFFRGLKKMFGMKPSQMIVCMEHTGIYCLPLLDFLIKNSIKVCLESAMRIKKSQGIARGKSDRIDALRIAQYAYKNREELRYWQPQRLVVQQLKGLLVTRERLVKIRTQLEVPIRECEEFVAESIRRDMIKNSRRTLKALDLDIRGIEQAIDNLIRTDPGLAEQLRISTSIPGIGKITATNMIIDSGEFNRISDSKKFACHAGVAPFPHKSGTTIRGKTRVSRLANMSMKKLMHLAAMSAIQCDDELRTFYKRKIAEGKNKMSAINAVRNKLISRVFSCIKSNRVYQKNYQHALA

SEQ ID NO: 160101 - protein, 406 aa, unidentified
MVPNDGRSEMAVAVGIDVAKEFHWAAAVDERGGELVSRRVDNEPAQIQALIDELERVRAECGPVTVGIDVVGGIASLLTATLAEAGFALVHVPGLAVNRARQGTAGGEHKSDPRDARVIADQVRTRSDLRAIEPTGELDVELRPLVGRRRELVTDQTRRIGRLRDLLASIHPGLERIVEPTQKASLWLLSRYVTPAEIRRAGRSRLLNHLLRGGRLPRPQLERLADAALAAAQAQRLALPGERLAADLVRELAREALAVRERLKTLDADLEQALGHHPDAALIRSLPGMGATLTAEFIAEAGGIGRFPTPDRLAAAAGLAPVLRQSGKVRYLQRARGGNKALKRVLYQSAFCSLSHPASRAFYARKRREGKRHHQAVIALARRRVDVLHALLRTRQPYRYREPRAA

SEQ ID NO: 160102 - protein, 284 aa, unidentified
MRTVAEEYDRVVGVDTHTMTLLTATGGVVEHRTFPTSAAGLHRALAWIRDRTQTRTCLVVVEGTGSYGAQLTEHFTQGGILVAEAPTVPAARRRGKDDVLDSARIARAVLGLRLDQLCWPRAGGTRTAIRVLVSARDQMSTERTKIINSLTALVRGVDLGVEARKALTSAQITTIAGWRTRDEDPATAACRREAIRLASRIRTLGRYLSANMAELRRFTAAEVPELLNLPGVGPVVAGTILLAWSHPGRVRSEAAFAALAGTSPIPASSGHTIRYRLTGEATDS

SEQ ID NO: 160103 - protein, 366 aa, unidentified
MRKVMAGMDLHGNNVMVGIVDDQGARLQHRRLACELPGIIEFLAPYKAELESIAVESTFNWYWLVDGLRAAGFPVVLANPAKIDQYSGIKHADDKNDAYFLAELQRLKILPTGYVYDPELRPVRDLLRRRMSLMRQRTTLFLSAKSLHQRTTGRGLELRRLKAMEPEEAAALYTHPANQLIAQIQKEHIDSLDQSIRQIEKAVLKVALQQPYYQRLQTIPGVGIILGLTISMEVGNIDRFAGPGQFASYCRTVDAKRISNGKTKGDNNQKCGNKYLAWAFVEAAHGARRFDATCRRWYDRKAGKKCTTVATKALACKLAKAAWYVMAKGTEYQAGKIFPGLTEPKAEEISGEQASASKGVGPNPED

SEQ ID NO: 160104 - protein, 360 aa, unidentified
MFTERTSVGLDVHARSVAAAAIDGVTGELFQTRLTPAHDHIRSWIQELPSPVAVTYEAGPTGFGLYRSLTAAGIRCEVAAPSKLQRPSGDRVKTDAKDAIHLARLLRLDEITSVTVPSVAAETARDLVRAREDSRSDLMRARHRLSKLLLRHGIVYSDGKAWTGRHDAWLRRQRFDVAATRLTFESDYDTVVTAVARRDRLDAAIAAMAAASEFTPVVRRLACLRGVSTLTAFALAVEIGDWSRFTGNTIGSFVGLVPSEHSSGTSRVQGPITKTGNGHARRLLVEAAWHHRSRYRPGKTMRDRWELATPAARARGDLGNRRLHARWVGFIERKKKDTVANAGIARELAGWCWSLAVMEE

SEQ ID NO: 160105 - protein, 363 aa, unidentified
MKKNTLQVPRWTVGLDVGDKWCHIAVVDRGGKLVEKSRVPTEADALRERFDASKKNRLRVILEAGPHSHWISRLLEEEGHEVIVANPRRLRMIYDSDSKSDDADAEALARLGRLDPSLLRPIKHRSLKSQSDLTVIRSRDALVKARTQLVNHVRGVAKSFGVSLKKCSTESFHRQVPELLPEILTPSLMPILDAIKDLSKKISQFDWLVESKAVKEYPATERLRQVRGVGPITSLSYVLILDNAARFRNSREVGCYIGLKPKRDQSGERDPELRITKAGDQMLRCLLVGSAQYILGPFGEDSDLRRWGLKLVARGGKNAKKKAVVAVARKLAVLLHHLWKTGEDYEPLRNQRYIDQHQKQLAS

SEQ ID NO: 160106 - protein, 345 aa, unidentified
MRPRSRFQVVVSQSRLFFHKSVLMNKYKEIFGVDISKDVFDVYGSKSGHNQFKNDATGFQSFLKSLPKESLIVMEATGYYHYRLAQFLFKQSVLVSVVNPLSVKRFIQMKLAKVKTDKSDAKAICEYGKINEVPLYTALTDVQSECLQLFRLMDSCLKKRTATKNKIHGEDVLGIPSKYVYRSLKRIKKYLDKEILGIEKKLLSLVKQEQQVQLTLLTSIPGIGITTALFLIVITDGFDKFENAKQLCSYVGITPTIRESGSSVRGRSRISKVGNRKLRNLLFLCSFTACKHNKGCREVYERIVNKGKSKKLALIAVSNKLIKQSFAIAKSGNPYDEKYVSVLPK

SEQ ID NO: 160107 - protein, 349 aa, unidentified
MNNNSITVGLDLGDKASHLYVIDNEGRKLYSGRVQTKERDLKATLKAYKGACIAMEAGTHSPWVSRLFADDYEVVVANPRKVRLIYESNKKTDGIDAENLARLARVDKNLLHPIKHRSERVQADLEMLKARDILVKSRTSLINHVRGEVKSFGIKLPTSSTPNFCKKVADILPEILKESLDNVLSIIADLTDKIRNYEKRLKRLAKERYSQAEILRQVSGVGPLTSLGFVMILEDPWRFKSSRSVGAYLGLCPRADQSGERARQCRITKAGNEYLRSLLVNAAQYIMGPFAPESDLRSWGLKRAQRGGPAAKKRAVVGVARRLAVLLHHLWQTGEEYVPVGYSKKVFNK

SEQ ID NO: 160108 - protein, 427 aa, unidentified
MSEKKSLELRVSVDVGYRRHSVAIGLSNGEVLEEFEIVHRPEGFGEFFSRIEKHQRERGCAVAVAMEGYNGYARPLDSLVRQRGYRLYNINSLKLARFKEIFPGAAKKDQIDARKGLELFQLSDHLPLAKEVLQEVTGTPVENEVLKRLTRRRRRLVNERVRVINNLQADLQAVCPGLLEITSEAGNQWFLNFLVSADTLPQLVRLRKPRLLKIPAVGRKYASLILDWQKRAQFSGEVEWVNEMIHEDAQRCLELDDKIKALEAKIKEVARNSRIAKILLSIPGFGTICTSELAGEIGTVERFSKEESLALYLGMSTLDNSSGKYQGTKAPKHVNTRAKAAMMIALDRHRKYIPESQKYYEKKRTEGKAHNQAIRALGRHLCRIIYKMLKEEREYQVRPKKGDTQGRVRSRSCVKTKIRRPKISANS

SEQ ID NO: 160109 - protein, 320 aa, unidentified
MQSDSSAASWVGIDVAQQWVDVVVLAGEQKVCQQRVERSSAALKGLAKTLLKHRPQAVILEATGGLEHVVMSELASAGLAVARMNPKRVRDFARAQGLLAKTDSLDAYALALFGLRMQPQAQTWPKPEQLELAAWQARQQQLIEQRAKERTRLHQCQRPALRKSVERVIAFLDKELALVEEKLATLVSRSDAWKQRDALLRSAPGVGNKTAIALMAGLPELGGASRREIAALAGLAPFARDSGNWRGRRRIHGGRAAVRTALYMASWTTIRLPGRLQDFYRRLVAAGKPRQLALIAVARKLLLALNEMLRSNQPWSPVAA

SEQ ID NO: 160110 - protein, 366 aa, unidentified
MKKISTMQVFGNEILKGQKLTIGLDLGDRWSFYCVLDEAGKILVEQKVATTPEAMKQTFGKIPRSLIAMETGTHSPWVSRLLTELGHELLVAHAQKVELITKSNRKDDRHDARTLARLARIDPELLGPVRHRSAQAQIHLTVIRARAELVSARTALVNAARGLVKSYGQRLPKCGTQQVSRELGAGLPAELREVLEPLLKEVESLNERIQEYDERMEKIAKEEYPEVSLLKQVKGVGTQISLTYVLTIEDPYRFPKSRAVGCFLGLRPGRRNSGESEPQKGISKEGDRYLRTMMVQGAHYILGPFGEDSDLRRWGLKLAERGGKNAKKRAVVAVARKLAVLLHRLWVSGEVYEPLRNSQKAMRAVA

SEQ ID NO: 160111 - protein, 382 aa, unidentified
MNNEISVFCGLDVGKSGHHATALDRDGGRLFDHPLPQDEAKLREVFTRFQTHGKVLVIVDQPNTIGALPIAVARDAGCEVAYLPGLAMRKAADLYPGMAKTDARDAFIIADTARSMPHTLRQVDRDSEVLSALKVLAGFDADLTHECTRAINRLRGLLLQIFPALERVFPETRITRPLVLELFIHYGGPTGLRAAGKGNVLRFARNHSRKDPSILIGEIFTALSEQTVTVAGTAAVEIIIPRVAAQIKELKAQRAILATEVEKLVDDFPLSTVLISMPGVGIKTAAAVLLAIGDGHGFKDAAHLAAYAGIAPTSRYSGTSIHGEHPSRSGNKALKNALFRSAWVASCHDPISMAYYQRKRAEGKRHNASVMCLARLRCDVLD

SEQ ID NO: 160112 - protein, 340 aa, unidentified
MQVTTIGLDIAKNVFQVHGIDGNEKVVIRKQLRRGQVMRFFEELPPCLVGLEACATAHYWARELTKLGHEVRLMPARDVKAYVKRNKNDAADAEAICEAVRRPTMRFVRVKSAEQQAQLMQHRARDLLMRQRTQLINAMRAHMAELGITAPQGREGIKQLVAIIANDEDGRLPVDARASLIVLAAQLEAMQTMIGSIERRIVARHRSSPDSRRLQTIPGVGVIGATAIAATVTDPAAFRSGRDFAAWIGLVPRQDSTGGKPRLGPISKQGDRYLRRILVVGAVSMLRRAKLNPERYPWVTRLLARRPFKVVAIALANKMARVAWALLAKGGTYRPRLAAA

SEQ ID NO: 160113 - protein, 339 aa, unidentified
MELYSAIDLHSNNSHVGIMDGQQNRVFYRKLPNDKRVIENAFAPYRNQLKGIVIEATLNWYWLADHLMEKGYSVHLANPCGIQKYSGLKHSDDKHDAFWLAQMLALKILPEGYIYPKQERPLRDLLRKRSHLVRIRTSLILSLQNIVMRNCAVKVGSKDLKKLTDDPVAELLKDQEELALAGKASKETIDFLTRQIQRIEKAVQKKAVLKEPFSKLLSLPGVGIILAVTILLETGPIERFKEVGHYASYCRKVSSSWTSNEKKKGKGNTKNGNRYLSWAFSEAADHARQVHGPSREFYNRKLSRSNGAVAHNALAHKLARAAYFIMRDNVEFQEDKMFG

SEQ ID NO: 160114 - protein, 425 aa, unidentified
MKIQTIHSKINSDNKLVVAFDVGKDKLDAYCEYGQYCFQDSFANNTLKIEQKLITFSGIAESTGYDGLQIVAEPTGVYHLKLFRTARRLGHQTALVNPESVHKFKVVESNDSGKTDDKDPRVINLLAKYGKTLIDRNIRDEYLLLRQLNTMIIDEEKAYTATRCKIHRVLAELFCDYSFKNDFLYSNTGRIFMKKYHANPYRIVQRGYTAFYKRMKSAAPRIRETTLQRLWQDAKCSVRHQMPADYIQVLESRLNYLWEELLLRESRMAEIQDTMISTSNELRLKDPRIPSPVKGVVRAFRIAQLLAETGPLDDFKSIDQLMRYAGLNIREHKSGYFTGKNKISKKGRSHLRRVLGYIVLPLVKKRSLYGTVYHAKKDLGMVGNKAMVAMMRKFLKMFYGWYKSGVPFDKNRVFSDEINYVQITQ

SEQ ID NO: 160115 - protein, 408 aa, unidentified
MKYYNSTTQFNCGIDLHARQMYVCVMDRQGKKLVHTNVKDNDFDYFLKLVTPYKHDLTVCCECMFGWYWLADACQAAGLTFVLAHALYVKAIHGGKNKNDRIDSEKLTHLLRSNLIPPAYVYPAEKRPLRALLRQRIFYVWRRSELLARIHSHQLAHNRVPPKRTCSTRDPWEEALLAAEPNPLRRLAIQNDMALIRHYDHQLMQLEEELKRQTKKVACREYTLLQTVPGIGENLGLTILHEIGDIHRFPTVKDFLSYCRLVKGTVASAGKIKGLRGAKLGNPYLRWAFGEAAVIAKRDHYLIGPLSQRLEAQMNGNKFKANTVVAIKLARAVYFMLKNKTVFDPERLVASMQKCFSPGRRQPGGLTGCAKKATPPSVADHSSCASGTSVCVGQASNPAIRLGPVASG

SEQ ID NO: 160116 - protein, 406 aa, unidentified
MAAQAPQDTTGTDQTVFGGVDSHTDTLHVAVISDNGGQLADAEFTTTPAGYAAALAFLDAHGSVRAIGVEGTSSYGAGFTRAARLRGHQVIEVNRPDKAERRRIGKSDPIDAYAAARAALSGRASSAPKDDTVTGIRALHNAARSAVKARTAALNQIGSILVSAPEAIRAKYGPLKSTDRADALARLRPAGDALHAAVLTALKTLARRVKELTAEHEALTKALDTAVTAGNPGLRAAHGIGPDTAAQLLITAGGNPERMRTEASFAALCGAAPVPASSGRTNRHRLSRGGDRAANAALYRIALVRMGSDPRTREYTARQTAAGRTKKEIIRLLKRAIAREVFRCLTTTVHVPEIADLRPLRLSKNITLTAAARHLGVWPTRISDIERGTRRLDDLAHAYRDWLQTA

SEQ ID NO: 160117 - protein, 320 aa, unidentified
MMSEIILGIDVSKKTLDAALIFENRILCKQFQNSCDGFKELAAWFAFLKITCVHACLEATGVYGEAIALFLHESGHLVSVVNPLRIKGYAQSNMQRNKTDRLDARLIASFCQTQKPDAWQPPSEEVKQLQSLVRRVEVLAEMLQAEENRLANAASEIKPSIERIIGLLTEEIKELERQIKRHVDQHPNLKEQNQLLQTIPGIGRRTANLLLSEIEFERYSSARSLAAQAGVTPRKRQSGTSLKQTNLSKLGNARIRRALYFPAIVAKQHNKIIREFAERLKKSGKTPMQIVCAAMRKLLHIAFGVLKHRRAFDASLAFSA

SEQ ID NO: 160118 - protein, 332 aa, unidentified
MHYLGIDVSKAKLDCCLLLDVATCKHKTKSVPNTQAGFTELLIWIIKHQIHLTQTHVVMEGTGVYHEQAALTLHEGGLLVSIINPAQVRDFARGLAIRTKNDLVDSLVLARYGALLQPAVWIPPTPQARALQALIARADAIKQDLRRELNRKEKADVARAPALICESLNDSIAFLQKQLKKLQQDIDDHINQHPELKDDVVLLTSIPGIGSQTSQHLLSVMHLHRFDNAERLASYLGIVPVERQSGTSLHGRPHMSKAGPAHVRAVLYMAAIVAIRHNPHVKAHYERLIAAGKSKMSALGAAMRKLVHLCFGVLKSRQPYQANYGLQETCKP

SEQ ID NO: 160119 - protein, 347 aa, unidentified
MNKKWFIGIDVSKKTLDVSIFVADVVINMFPHIQVRNDKEGFKELLRWLKEQGVRPQDALIGLEFTGYYSDALELFLTRKKLCYTMLPTTVVKHYQRGTRDKNDKTDSAKIADYLFRFQGTECIKLRMLPSKAMQDLKALKSERKFYVRHRTDCENRQKVAKSKDEQKNLQKIIDLYDKEIERIEQKMADVVTSDEEIHLTYMRLMSIPGIGPVNAINTIANTQNFTAFETARQYAKYVGVAPSEHSSGTSVRWRGRPSPHCDLQAKADLSMAAMRAVEFSFEMNVYYERKLGNRPDDKDVKRKALNAVKFKLIRQMFSVAKQHRSFKPLEQTQTQAEIHNTDKRVN

SEQ ID NO: 160120 - protein, 341 aa, unidentified
MDHYAGIDVSLEHSSVCVVDTTGKIVREGKVASEPEALIAWFRSLNFGLVRIGLEAGPLSQWLFAAMRAAGLAVELLETRHVHKALEAMLVKSDRNDARGIAQLMRVGWFRPVHCKSIGAQETRAVLTARKLVQSKLRDIESSLRGILRGFGLKVGKTTQKQFEARIKELVVGHPSLQVVTAALLAVRAVLLREFNGFEKRVRATARSDVRARLLMTTPGVGPIISLTYAAAIDDPARFTSSKRVGAHFGMTPKRHQSGEKDVTGRISKIGDKGVRTALYEAAHIILTKPVKGSALKSWAARLSKRAGMQKAKVALARKLAVIMHRMLVDGTPFNPAAAAA

SEQ ID NO: 160121 - protein, 322 aa, unidentified
MKKDRVHAGVDVSKSSLDIAVYATKQQWSFPNNDKGISQAVSLLASLNPTLVVFEATGGLEVPLVAALGVARIPVAVVNPRQVRDFARAIGRLAKTDALDAEVIAHFAAAVNPAPRPLPEAMAQELTAIISRRRQLQQMLTAEQNRLHTARKSMAQRIRTHVSWLEEELASIDDDLGRMVRESPVWRGKDDLLQSVPGIGPATSTSLLAGLPELGSLDRKQIAALVGLAPFNRDSGTLRGKRTIKGGRTHVRGALYMPTLVATRFNPVIRSFYQHLLSAGKPKKVAITACMHKLLTILNAMLKHGTVWNQVAPQFKFIGPCS

SEQ ID NO: 160122 - protein, 337 aa, unidentified
MKFCGIDLHSNNSVVVVSDAEDRIVLQRRLPNELGAILAALVPHREDFAGVVVESTYNWYWLVDGLMDAGYRVHLAHVAAIKRYEGLKHSGDAADAAYLAQLLRLGLLPEGYIYPREQRAARDLARKRIQLVRCCTAQVVSIENLVARHTGARPGCAQVKRMTADQVNALGLPPDVALALKANLAICETLQQQIAILEKRLAECVKLRADYRLLKTVPGIGETLATVIMLETGTVKRFAGVGQFSSYCRCVDSVRQSNGRKKGEGNTRNGNAYLAWAFIEAANFALRQCAPARRFYERKQRTTNRIVALKAVAHKLARACYYMLREQQPFDVTRCFA

SEQ ID NO: 160123 - protein, 350 aa, unidentified
MHATTVGVDLAKNRIELAFADEQFRIVCRERLSRLRFAQRLSNHPPCLVVMEACGSAHYWARRFQALGHEVRLLPAQYVRAYVRRNKTDAADAAALIEAARCADIHPVPVKSLEQQQLQQLHRLREQYKNTRVSRINLLRGFLREFGVYVPVGATAGLRTIRQSLQSPDCDWPELLRASLSEVLEEIARLDGKIEGIERQLSAQARQDPVVQRLMSIPGVGLLIATGIRAAVGDIQRFPTARHLSSWLGLTAREHSSGETRRLGRISKRGDVYLRTLLIHGARSALLAAKVLARNARPLDRLRQWALQTASRMPANKATVALANKLARILWATWKHERAFDGNWAAHPGH

SEQ ID NO: 160124 - protein, 400 aa, unidentified
MNAVGIDVSKGKSTVAVIQPFGVVIAEPFDVFHTDSSLKELVRFIKSLSGETKVVMEYTGTYYEPVANALHNAGIFVSVVNPLLIDDYDTNRVRKVKTDKLDALKIASYALDKWIKLRKYELAETVRKTLQIMNRQCIKLNKILVMQKNSLIALLDCCFPNANTLFTSPRRVSDGHEKWVDFAMKFPHVDSVAKLSLSAFKAKYQSWCKKEHYNYSESKADQIHAYTRTIVSTLPMTESVRKMVSDAAKLLNSTLEALGTLHSEMDALASQLPEYETVMNLYGVGKVFCSQLIAEIGDVTRLKSNKSLTALAGIDPPPNQSGKDDPKSRRISKRGSPALRRTLFLIMTIYLQHQPADEPVYQFLDKKRAEGKPYKVYMIAAAHKFLRIYYARVKEVMPTQ

SEQ ID NO: 160125 - protein, 482 aa, unidentified
MKKRNIYQNQSQELLSLFESAGSSAKVMCVPMDYAKRDHLVMFCNGHGDILRKPFSVKNSPEGIGYLIDQVTRSCRRRGIKEEHVFLGGEDANSFAENFVSTLRFKGWLVAGVNAHDAKKQRVNLQASTDRIDLMGIATMLLNCRANCCPAASGIYRNLRTLVRHRRKLVAMLTEVKNRAHVIVDRLFPGFLNENKSGIVPFTQSSLYLMENRFSPKQIRRRRRQKLIEILKRFGTSKAQETALKLQQYAAKVLHTPDEYIDTLQISLAQHVKHIRCLKESIVVLEKEIAVNLAQTQGAFLTTVRGVGIVLAAGVSAEIGDPYEQRPLNNVVSYSGIIPRVKQTGGVDGKTYTGHVAKRCNRILKDYVVKSAFHLGLHGPQDLMTDYKRRDASGQHADFGMGRRYLRMAISLMRTSQAYLPPNLRKDDYTLEERAGYYLTSWPYLIEKWKKVGALEAAFTKNRPLGLWRQIVQELYDITLKL

SEQ ID NO: 160126 - protein, 375 aa, unidentified
MNAVGIDVSKGKSMVTILRPFGEIVSSPFEIKHTSSDIHSLIKLIHSIEGESRVVMEHTGRYYEALAHQLSAADLFVSAVNPKLVKDFNNDSLRKIKSDKADSVKIARYALDKWQSLEPYSITDELRAQLKVMNRQFHFYVKQKTAMKNNLIGLIDQTYPNANTYFNSPTRSDGSQKWVDFVSTYWHVDCIRKMSLNAFVEHYQNWCKRKKYAFNKSKAEEIYTKTKELVPVFPKNEITKHIIRQAIDQLNSTSVTVETIRTLMNETASKLPEYSIVMQFKGIGPSLGPQLMAEIGDVTRFTHKGALTAFAGVDPGVNESGSYAQKSVPTSKRGSSNLRKTLFQVMDVLIKTMPQDDPVYQFMDRKRTQGKPCLL

SEQ ID NO: 160127 - protein, 380 aa, unidentified
MIAAIIERCAGIDVGKKFIAVCVMTGPADGEARSETRIFGTTVAELKQARSWITEEQCTHVIMESTGSYWKPIFNILEGHVQVALANPQEVKARKGHKTDPKDAWWLAHLLRHGMLTPSFIPPRPQRELRDLTRRRRKLIRAASAEKNRISKVLEDANIKLGNVLSDVFGVSGQLMLEALLQGKTPDAAELADFAHGSAKKKIPALLAALEEHQMREHHRQMIRFSVEHMRFIEEQLAEMDQLIRAKIEEAGYTQQWELLRTLPAVRDNAAVVLAEMGPDPAQFPDEKHLGSWSGLCPGNNRSAGRNKSSHTNTGNRWLRAALTESAWAVSMMKTGHLREKFWRIAAKRPAPKEPPHRRRRRGPRSAKAGLLCPATRHSL

SEQ ID NO: 160128 - protein, 348 aa, unidentified
MIIIGCDYHPGFQQIAYVDTETGELQERALQHREEAEKFYRELAAQGLKVRVGMEASGHARWFERLLAELNVELWIGDAAEIRTKRVRKQKTDRQDAQLILKLMLKDDFPQIWVPSWENRDLRQLLWHRHRMVQARTRLMNQLQAVALNEGLRCKKRLWREAGRQQLEGFRLAPWASRRRQDLLELLDRLNPTIAELTQAIEREVEKCPEARRLQTHPGVGPLTALAFVLIIGKADRFRCGKQIASYLGLVPLEDSSGSRRRLGHITKQGNSLLRFLLVEAAQVTVRSDPGWRSKYHHLMMRRGRKIAKVAMARRLAVRMYWMMRKGWNYEQLKSSVRTRDNSYQAMV

SEQ ID NO: 160129 - protein, 400 aa, unidentified
MSGLKGNFDCIVGIDVSKDKFDACGITGEETKLFQISAAMDRKGFEKLKRHLGTVSVSSVLIGMESTASYHVNLFSYLVAEGYKVILINPLLISNYMKMQLRKTKTDKKDAVVIAQFLLANGDTLIQRATPSLISDLRDLSRQRESLVDEMTSLKIEIKQLLNITFPELEHIVGIFTKSILKLLQQYPSAFSLRDADIGQLSQTLIADSYGHKREEFAQTLIKAARSSVGTNSPAKEMIIKQKIGLLLHLEEALQEITDMLIEMARKLMEEDINIMTSIKGIGDKTAANFLVEMGGDINNFECSGKIIAMAGLDPAVYQSGQHDGRGRITKRGNRHLRRIIWMMTTSVIQYTDIFHVYYLKRRKEGLPYKKAVLATAHKLIRVIYAMLTKRTIFCPQVNS

SEQ ID NO: 160130 - protein, 400 aa, unidentified
MNEFKPEASRIDTVAARLELPGQECYAAYVGLDVHKETIAVAVAEPGRQEPRSEGEIANRPKSIEKLVRRLSDRFGGGLLQFVYEAGPCGYGLYHQLASTGHICEVVAPSRIPKAAAERIKTDRRDALKLARLARSGDLTPVWVPGPEQEAMRDLTRARGDMKVQERKARQQLSAFVLRHGHAWPAGKKRWTQAHYTWLESLKFTHDWQQVVLQEYVDAVKAATQRVADLRAQMERALAQWSLAPVVEALVALRGVDTLAAMVLLAELGDISRFDSPRQLMAFLGLVPSEHSSGGKRRQGGITLTGNGHARRMLVESAWSYRFPARQTKHLKRKAAPASEAAKGVAWQAQKRLCGRYRDLIQAGKNSKLVCVAIARELAGFIWAIVREEMPKVRNAANGV

SEQ ID NO: 160131 - protein, 387 aa, unidentified
MVSRAKISGKQMEAIASNAAGIDIGSERHYVAVDSESSDKPVRSFGCYTPDLDEMARWLLECGVKTVAMESTGVYWIPVYQVLEQHGLDVMLVDARHVKHVPGRKTDVCDCQWLQQLLSYGLLRGCFIPPAEVQPVREYWRQRASHIESISREILHMQKALEQMNVQLHKVLRDITGVTGMKIIRAIVSGERRPLVLAAMREPGCKKSESEIMKALSGNYREEHIFALTQALELYDVLHEKVADCDKRVELCLCSFASKADPATMPPKKSKRGSRRKNQPHFDLEKHLYRITGVDLTMIDGIESLTAQTVVAELGFDLSDFASEKHLCSWLALSPEHRITGGKVKTRRTRKSANRVATALRLAAQSLHSSKTALGAFFRRRKARQRP

SEQ ID NO: 160132 - protein, 321 aa, unidentified
MALGVVWKTATGGPPPYTACVYVGVDVSRARLDVALGDRVYQFPNPDGIPDILALLPQGAVVGMEATGVYGRPVAFALYQAGFRVYVLNPLVVKAYARSLLRRAKTDKADARLIARFLAERHGDLPPYDPTPDVLYQVGLLVRFARGLTAQRVAVLNRLHAWEYAWPQGLGLEVVASVPGHLEALRGQVERVALNMLRSDSLGWRWFQALQSLPGVGEGIALTILAYSGDMRRFRSARAYAAFTGLTPKLYQSGEIPEVGRISRMGPPPLRAAFYLAALRAREVEPYADLYGRLLSAGKPKKVALIAVANRLARHAWAVCR

SEQ ID NO: 160133 - protein, 447 aa, unidentified
MKVMHERVAGIDVHKKMIKVAIRSPGDKPWTRKTEILTFRTFYGVLREMARELRARGVTHVVMEASGVYTEPVYYALLEEDFTEVLVVNPAHVKALKGHKTDAKDCARLAELLECGLLQGSYIPAAELKEVRDLTRYRSKTVQARTSEIQRLDKTLESAGIKLGSVASDITGKGPAAMIEALIDGERRGKVMADLAKGRARAAGKLADLSMALEGRFTEHHALMCRLILDRIRVHDTAIGGLDKQIAGLAAAWQREIDLLKTIPGFGDVVAWSWIAEIGPAPHQWFGSHEKLASWVSLAPGNYISAGKRKHSRTGDAGTYIKPVLVQAAWAAIRVRGRLQARYNRLVRRFGGPKNPAAKKKAIVAIAHTLLKIAYSVLKSGTPYQDLGEDFYTRRETPAQRQAWLERQIQKLHPGCTVTITISPAPRSRPGGRLNTRRLTRQPRPGP

SEQ ID NO: 160134 - protein, 363 aa, unidentified
MHDSITWIGLDVHKESIVVTAVGNDPERIRARFELPNTDKGVNRLVARVQEFGDVRCVYEAGPCGFELYRVLDSRGIPCDVVAPSLIPKKAGDRVKTDRRDAEKLARLHRMGELTSIHVPSTTQEALRDLVRAREDAKEDVLRRRHRLLKFLLRQGRRHEGRSWTQVHWNWIRSLKFDDANTQAVLAEYVLALEQELERVQRFDSRIEEESRHPDIAPAVARLRTLRGVDTITAMTLVSELVDMNRFSNPRELMAFAGLVPSEYSSGGRKCRGRITKTGNAHVRRILVESAWHYRHSPVGAGPGIRKRREGQPPKVLDIARKAEMRLCKKYRKITAKGKSSRVAVVAVARELAGFVWAIGKNL

SEQ ID NO: 160135 - protein, 346 aa, unidentified
MKIVGCDFHPSFQQIAILDTATGEIEERRLGHRNGEAEQYYRQLEALALIGMEAVGNSLWFEQLIAQVGHELWIGDAAQIRASYVRKQKTDRRDAGHILRLLMENRFPRIWTPSAEQRDVRQLLLHRHKLVGIRTRVKTELQHLALNRGLQKQRTLWSVRGRACLENLPLEGWTAQRREDLLAVLALVESQIEKLDEAVGRIAAGDRAARLLMTQPGVGPVTALAFVVTIGDVRRFKRGKQVGSYLGLIPAERSSGSKRRLGAISKQGNVFLRTLLVEAAQSACRYDEQFRKEYQHRCHQKPRGVAKVAAARKLAVRLYWMLRNQTPYASAVHNEGSSSHPVANEG

SEQ ID NO: 160136 - protein, 348 aa, unidentified
MLADQLDYIVGVDPHRDSHALAIVQVVSGAVVFESTVIANNDGYARALELAEQHAPSRRAFAIEGTGSFGAGLTRFLTGRDERVLEVGRLRRERRSGGKTDALDAVRAARSLLTQQRPATPRAGGERQALQALVAAREGAVNAKRAGLCQLRDLLITTPEPLRSQLRPLTRAQLLHRLAATRPHSRPDAELRGSLLALRSIARRVLALTAEERELAHEIETITRKLAPQLLDQPGVGPHAAAQLVLSWSHRGRIESEAAFARLAGTAPIPASSGKTIRYRLDRSGDRKLNRALHMILVTRKRTHPATIAYIERRLQEGKTRREANRCLKRYLARSLYRVLEHGPPMTA

SEQ ID NO: 160137 - protein, 386 aa, unidentified
MQASTVRTPTADDNGTIFVALELSQRSWLVTMHSPDRDKICRHKVTGGEHVELVALIERVRERAARKLGTKPVVVSCYEAGYDGFWLHRLLTAAGVTNHVFDPASIAVEQRGRRAKTDRIDGEQLLRTLMAHCRGEPRVVRIVQVPRPDQEDTRRATRERDRLVKEQGGHVNRMKSLLRLLGMAVGNPRRRDWLEWLARQRDWQGQPVPCRMLAELEREHARLMLVREQLAALEHPPEGVEQTAATAEMARRSDLLVRLKALGPVLARSLTNEVFYKDFRNRREVASYVGLTPTPWRSGATDREQGISKAGNPRARQKAIELAWLWRRHQPDSALSRWFEQRSAGASKRIRRVVIVALARKLIVALWRYLTTGLVPEGAVLKPVTV

SEQ ID NO: 160138 - protein, 313 aa, unidentified
MSKYYVGIDVSRGVLDVYVRPTGRAWQVTNNARGHAALAQRLERLNPKLVVLEATGGLERAAARALTGAGLAVAVVNPRQTRDFARSTGRVAKTDALDASDLARYAEVVQPEPRMLADEETQALAELVRRRQQVVKMATGEKNRLRVCSGELRAGIRTHLAWLEKTREELDREITARVLSDPGWRARANLLKSTPGVGPVLSSTLVACMPELGKVGKKEIAALVGVAPFNRDSGKKRGKRRVSGGRGHVRAVLYMATVTAVRCNPVLRPFYQKLVDGGKEKKVALTACMRRLIVILNAIAQTGTPWDEARAAS

SEQ ID NO: 160139 - protein, 317 aa, unidentified
MKKHIMVCGGIDTGKRKLDVALDGSTGRLQVANTAAGHGELSAWLREHQVKRVGIEASGGYEQAVVARLRRDGFVVIVFQPAQVRAYAKFHMQRAKNDKIDAALIAACTAAAKKIHAPPDARLAPMAEQQTLIDQITDQIARCKNYLESCRNPESRQFWQDEIKRFRGLFRKELKRLVAAIRQHPDLAARLDLIASVDGIALRTATAILVRLPEIGRISREQAAALVGLAPYDNDSGDQNGARHIAGGRKRLRGSVYSAAFAASFRWNPELIELYNRLTAAGKDHKVALVACARKLLIFANTVVARGTPWVSHAAAS

SEQ ID NO: 160140 - protein, 371 aa, unidentified
MNSIVYVGMDVHKEQYTLCCYSYEKDKVEYKQTIPSDYKLVLKYMEQVRSRYDGEVTFVCGYEAGCLGYSLYHQLKEHAVDCKILTPSTMAITNTHHVKTDKRDAANIARCLAFHTYSEVYVPDNDDNAVKEYIRMRDDQKLYLKKVKQQILAFVLRQGKRFEGGKTYWTIAHLKWLKNLELSALQRETLDEYLLTYEYLTEKINRFDERIEELSTAEKYNEKVKHMSCLLGIKTHTALSMIVEVGDFERFEKAPKFAAFLGLVPSEDSSDTKVNRYSIIKAGNSHLRRLPVEATQSYTRGTIGHKSVALKQRQKGNPPEIIAYADKANERLRRRFYKMTINKGVNRNVATTSIARELACFIWGRMTEHVS

SEQ ID NO: 160141 - protein, 386 aa, unidentified
MATPAARRIEQDSFPGPTLYLAFALGKNTWKLGFTIGVAQPPRERMIPAGEVERLQQEIARAKQRFGLPEEACVMSCYEAGRDGFWLHRSLVAHGIQNHVIDSASIEVKRRQRRAKTDRLDVRKLLTMLLRHSAGEKKVWSVVRVPSVEEADRRQLHRALTTAKQDRTRMMNRIQGLLAGHGVQLVLQGDVEAQLDQTHQWDGAPLPSALRSRLKRAWQQVGFLTAHMQTLEAERRALLRHRTDPIIAQVRQLFTLRGIGINSAWLYIMAFFAWRAFQTAKQVGALAGLTPTPYQSGQSRRELGIAKAGNRHIRAMAIEIAWAWRRFQPDSAWSQWYERRFGAGSARLRKLGIVALARKLLIALWRFVKTGVLPEGAVLTTAPPRP

SEQ ID NO: 160142 - protein, 387 aa, unidentified
MEVRIENTPSARTNNDPVHCFVAIELSKSSWVVGFQTPLSKQTSRYQVKACDAEPLLELIERIRTRVAREVGRPVEVTSCYEAGYDGFWLHRVLEAHGIHNHVLDPASLQVSRRARRPKTDRIDADRMVRALIRHLRGEPEACSVVRVPSPEQEDARRLHRERRRLITERVGHVNRIKGLCATQGIYNYEPLRSDRLERLDKLRTGDGRALPARLKTEIVREIKRLEVVLEMISTVEAERDAILKDKKSTHINADKIKMLAKLKAIGAEFSTTLVGEVFYREFANRRQLGSYVGLASSPFCSGSLDRDQGISKAGNSKARAMMIELAWTWLRYQPDSALSRWFQARVGNLKGRPRRIAIVAMARKLLVALWRYLQTGVIPTGAELKA

SEQ ID NO: 160143 - protein, 338 aa, unidentified
MAKITTVGLDLAKQVFHLVCCDGRGKVVGKRQLRRAQVLGYFANLAPCRVGMEACAGAHYWARELEQLGHAVKLLPPRFVKAFVRGNKNDYNDALAIAEAVVRPEVRGVAVKTMAQQDIQALHRLRSECVASRTALGNQLRGLLAEYGVVLPRGVGNLRRRLPGLLEDGENGLSAPFRRLLAQGYQRLCELDAHIAAYIAEVQRHSRQDAACQRLQTIPGFGPIVASVFHSLVGDGRAYRRGRDVSAALGLVPRQHSSGGKTVLLGISKRGDRYLRSLLIHGARSVVQQAAHKDDRLSRWINRLKAQRGHNKAVVALANKLARIGWAVLRHQREYQAA

SEQ ID NO: 160144 - protein, 407 aa, unidentified
MIFVGVDWAEAHHDVHIQSEDGRRLSGGRLPEGVEGIARFHEMVGVHAQEPDEVVIGMETDRGLFVGALVAAGYQVFAVNPMSTSRYRDRHSTSGAKSDPGDAKVLADMVRTDRHNHRPVAGDSELAEAIKVLARAHQSMIWSRGRQTNFLRSTLREFYPAALVAFDNLTSGDALEVLRVAPTPTLGAGLSRSKIAAALKRGGRLRRVEQRAEEIQEALRTPQLQGSAIVATAMGTSVSATAAVIVTMNVQIAELTKELDAGFEQHPDAEVVRSLPGLGTILSARVLGEFGDEPNRYATAKCRKNYAGTSPITRASGTKRVVLARYARNMRLADAIYQWAFTSLTASPGARTFYDYRRAAGDTHHAALRHLGNRLVGILHGCLIHHTSYDENTAWGHRAEIELARAA

SEQ ID NO: 160145 - protein, 368 aa, unidentified
MKRSRAYRAKAVKKVDWKELGRQAMHVGVDMGKRAFLAVVRWEDGRFERPWLVENPGEIREFVDLLRRAGRGRELTVAMEPTGTYGDAMRQALSDGGLRLERVSPKGAHDYAEVFDGVPSQHDGKDAAVVAELAALGKSREWRYEPPSEVDQEMAYWVDWMDAERVQGSMWLGRLEGLLARHWPEATRWLKLSSATLLRILQEYGGPGGLAEDGRAFSRVSSWGRHYLGEEKVGGLLASAADTVGVRQTTIDVRRMQVYAGQALAARREVERSKRRLADLARGNPVIQAQARAVGVATACVLWVHLGDPHEYSCAAAYRKAMGLNLAEYSSGQYQGRLRISKRGASQVRRWLYFAALRWVQREPVKRW

SEQ ID NO: 160146 - protein, 404 aa, unidentified
MLGASNIKEAVFLSRVWVGVDAGKGFHWAVAIDEEGEVLISRKAHNDEADLSALVEEALTFGPDLVWATDQPGGSAALLLALLWEREQRVVYAPGVAVNRARDAHRGESKTDARDARLIAELARMRRDLATLEPGAQLLAELRLLVAHRRDLVLDQSRSIVRLREALVALFPGLERTLDLRTRGPLVLLTRYQSPGALRRAGQKRVEAYLRSKGVRNAARLAENALRAAKAQRVVLPAEGIAAGIVRELAQRALGLKERIAGLDQELEDRFFAHPLSEVLESLPGMGPVLGAEFLVAVGDPTEAFENADRLAAYAGLVPAAYDSGKRVGNRRRMRGGNKLLKSVFYRSAFSSLRHHQASRAFYDRKRAEGKKHRQALIALARRRVNVLWAMMRDGERFDPVRAA

SEQ ID NO: 160147 - protein, 343 aa, unidentified
MTIVAGFDVHRRQITFDALDTETGELTRGRIDATPAAVERWVARFEGREVQVALEACTGWLFVSRALERAGALPHLAEPVETSALRGRKRRAKTDREDARWLRTLLSEGRLPESWIPPEHVREWRSRARLRKTLVEERTQWLQRVQATLFHHGIGGAPAELHSDAGREFLRELELPADARERIAIALAMVDSLDGQLRPLESELRKLARRQTGCRALMVQFGMGELTALMTLTELGDVQRLSASRKAVRMAGIDIGVHRSDRRSRVGKLNRQGSPHLRWALYEAALSATRPKSPDHEDYLALKARGLSHTRASLTIARKLARRSFHILRELGPAALDPITTTN

SEQ ID NO: 160148 - protein, 370 aa, unidentified
MKEYSEAFIGFDTAKKKHAVAIADVGREGEIRYLGEIDSSPLTIERMIRKLAGRYEKLHFCYEAGPTGYGLYRQVRGLGHDCSVVAPSLIPKKSGERVKTNRRDAVSLARLFRAGELTSVWVPDTVHEAVRDLVRARETASQDLRRKRQQLLSFLLRHGRIFSGRQHWSRAHLRWLAQQKFDHPAQQIVFQDAVDAIDDAAARLRRLDEQVAAIVPSWSMAPVVAAYQAMRGVSFVVAVTFVAEIGDLRRFDNPRQLMAFLGLVPSERSTGERVRRAGLTLAGNKRARRVLIEGAWSYRYPARVSQTLQARLEGLPKAVREIAWKAQIRLCARYRRLTAAGKKLPVVIAAIAREMAAFLWAIARHVAPAA

SEQ ID NO: 160149 - protein, 343 aa, unidentified
MKLHVLGIDLGKMVFHLVGLDSTGKVVIRKRCSRRQLLAFTANLQVQLIGMESCSGSHFLGRALRDQGHQVRLMPAQYVKPYVQTNKSDYIDAEAIAEAVQRPRMRFVPIKSEEQLDLQALHRVRERWVMRRTAVVNQIRSLLLERGLTLPKGRRYVEEALPRILEDAELPLSDSFRLLLAQLKLELEQLSARIEQLDVVILQRAKEDEACQRLTTIPGVGPVTATAVIAAVGNGSAFGRGRDLAAWIGMVPGEHSSGGKQTLLGISKRGNSYLRRLFVQGARSVLQQRHRQAPGLSSWLAQLLARKHQNVVIVALANKLVRMAWAVLCKGERYRAPVLAVST

SEQ ID NO: 160150 - protein, 271 aa, unidentified
MHFIGIDLHKKTISLCVMSKGRKVLCEKVLRCDNEAGIIEFFGRWAPFRAVVEATASYEWFVQLIEPLAKRVILAHPKKLRVIAETKNKTDRIDARVLAEFLALDMIPQSYRPTPRLRAYRRLVRYRHFVRGRVTSVRCKIRHILSDYNLDRPNLFTAEGLEYLQGVEVSPADHWVLEQLVLQWQQHRSQVQAANKQLREFAKKAPLAEREHREVLRSIPMIGSVTLDVVLSELGDVRRFPSQKKAVAYAGLDPGVRASADRRKELHITKE

SEQ ID NO: 160151 - protein, 366 aa, unidentified
MGKSSTAYVGMDVHKDSIDIAIAHEKEVRLFGRIGGEAAALDRAIRKLRAVHRDAVFVYEAGPCGFWIYRRLLVQGLRCMVVSPSMTPRRAGDRVKTDRRDALQLARLGRAGELAPIYGPDAHDEAIRDLVRAREDAVNMQRQARQRLQALLLRNEIRYVGKSSWTAAHRRWIAHLKLPDPAQQIAFEEYVAAVEEAGARLERLAGAIAAQLEHWRWRPLVQALQALRGISATHAVRIVAELGDLARFESPRKLMGYLGMIPSEDSSGRRRRQGSITKAGNSSARRALIEAAWAYAHPARVSWVIARRQTGLAKRVTDLAWRAQLRLCARFRKLAARGLNRNKIVVAVARELSGFVWALGQDIKPI

SEQ ID NO: 160152 - protein, 318 aa, unidentified
MAQNRTIVGIDVAKDKVDVALRSAGAEATFANTPSGRRQLVKWVKQHQVDKAVMEASGGYERSWARLLQDGGIEVWIVDPKRVRRFAQSAGQLAKTDRIDARMIAWFGETFADGIGRQPDVAREELDRLVSARTDLMDLRTRLADLGEDDQPDEVRRCYRRIDKTMTEQVSLLEAAIEARVAANARFVELARIIRSVPNLGRISVAGLLAFLPELGLVANKQASALVGVAPYEDSSGKHQGRRFIQGGRRKLRNLLYLPIVGAATRGNPVLKAYYKRLRERGKEPKVALIACMRKLIVILNTMVARGELWDPQKHAVA

SEQ ID NO: 160153 - protein, 425 aa, unidentified
MQKDERIEFVIDKLIVGIDIAKHKHWARIIDCHGRDLRKPFRFENNKEGFDRLAAEIQLVQQKAGMTGVVVGMEPTGHYWKPLARWLQGLGYTVVMVNPMWVKRHKEDYDNSPSKSDRKDTGVVAGLVKDGKYMQVMLPTGVYADLRELIVVRRQQKQALNSGLNRLETVLDEYFPEFHTVFKGTLGLAAQCVLTECPFPSYITALNVEELTDKLKRASNNRVGQKRAQLLRDVAARSIGVTEGLQGARERLESTLAEIRFLKDRLRKTETAMAEKLYQTGLAESLLSIPGVGVATAAGFLGEIGDPHNYENWRQIRNLAGLNLKENSSGNRESHTEITKRGRPGLRSLIYQIAVTAVACNPQLRALYRYFLARDVNPLTKKQALIAVGLKLVRIMHALMMRGQRYDPALALGEVREFQLEKQAA

SEQ ID NO: 160154 - protein, 355 aa, unidentified
MKNQAIQYLAMDVHQATVVATVRNEQGAITMKATVATEARSILSLVRAVGARVMVAFEEGTQAQWLHDLIQPHAEGVVVCNVRGKSELTNKSDRIDADALSELLRLGALKAVYHGAPSMLTLKELVRNYNTVVEDATRAMLRIKALFRARAIPTRGTSIYKVSDRAGWLDQLTIQGARVRAESLFKQLDLLRELRPKAKRAMIAEARKQSGWKSLRSIPFLGEVRTAQLMAIMATPHRFRTKRSIWPYAGLAVVTRSSADQEFADGKLRRRNRPPQTRGLNRNHNPMLKSIFKGAATAAAAKPGPLKDIFDACVARGTKPDMARVTLARKIASIALRLWKKGELWDPTKLTMQTT

SEQ ID NO: 160155 - protein, 415 aa, unidentified
MTEQRWYAGVDWASESHHVFLADGNGHKIGEKIFKHSGEGLAEMAAWLLAASSAGSPSQIYIAIEVPHGPVVEALMEWGFAVHAINPKQMDRFRDRFTLAGAKDDSRDAEVMASALRTDPHCFRLLAPLDPTVIELREWSRIASDLGTERNRLTNRLREQLWRYYPAMLEFEEDLGAGWLLDLWEIAPTPGKAARIREGSVAKVLKRNRIRRFDAARVLTVLRKPPVQVAAGTVEAASAHIKTLTARIRLVNGQIKEANRQLDALTAKLIPAEDAATGQHKQHDVEILASLPGVGRIVLATLLAEAWDALLRRDYAALRSLTGVAPVTKRSGKSWIVIRRQACSNRLANAMYHWARIAIQRDPKSKAKYAALRGRGHSHGRALRSVADRLLNVACAMLKNGALFTPSLEAQNAPC

SEQ ID NO: 160156 - protein, 371 aa, unidentified
MKEFSKFVGLDVHKATIAVTVAEGNGGEVRYVGEIPNTPEAIVKLVKQLRKGDAQLSFCYEAGPCGYVIHRQLTDLGWDCMVVAPSLIPKKSGDRVKTDRRDSITLARLLRAGELTAVWVPDDAQEALRDLSRAREDMKHLEKQAKQRCLAFLLRYGRSFEGKSNWTQAHFRWLAEQKFGQPVQQIVFQEYVDTVKMMGKRVGALDKQIEVTSSESVFWPVIEGLMALRGVSLLAATTVVAEIGDLRRFATAPQLMAYLGLVPSESSSGPTKSRGGITKTGNGHVRRVLVEAAWTYRHPARKTAHLQRRAERTSEQVQEIAWSAQKRLCGRYKLMEGKGKLKVQACTAVARELAGFIWAIGQALPQPTAKA

SEQ ID NO: 160157 - protein, 351 aa, unidentified
MVVVGVDAHKRTHTLVAIDEAGRKLAEKTVAATPDGHLEAVAWARRWPEHVFALEDCRHLTRRFERDLLVAGEAAVRVPTRLMAGARQGGRQQGKSDPIDALAVARAALREPNLPVVRLDGEARDLRLLVDHRDDLVKERTQLQSRLRWHLHELFPGLEIAPRALRRYHVMNEVEERLEGAGGTVARIARELLVRGRELTIRINELEREITVVVRRLAPSLLTLPGCGVLSAAKLVGESAGASRFRSRAAFASWNGTAPIPVWSGNSTRHRLTRGGNRQINAALHRIAVTQLRGVGTIGREYVERRMSNGDTKTEALRLLRRRLSDEVFRRLLADEMAHNTGSSDAFLAAA

SEQ ID NO: 160158 - protein, 323 aa, unidentified
MNTNTLQNINIGVDTGKSQLDIYIRPLDVFFTVPNNEKGIKQALATIKKHNPQRIVIEATGRLEMPFVLACTEAKLPIVRANPVHIKRFAGAIGRRAKNDRLDAQLIAHYGESIKPDLTVIKANNIRLMSDLVIRRNQLLAMQTMEKNRIQILPKHLHSTMTPILTAIKNQVSKIENKLVKLIEDCPEYQTKNTLLQSVPGIGNIAAASIISNVPELGYITNKQAASLIGVAPITRESGRYKGKRVIQGGRAQVRTVLYMAMMSAMQCNPVFKGTYTRLLEAGKPKKVAIIACVRKMVVILNSMLRDGIMWDQNIAQNKGLTP

SEQ ID NO: 160159 - protein, 310 aa, unidentified
MDATVVGIDVSKDRLDVHLHPSAESFAVARNAEGLDALIARLSPLGVAAVAVEATGGFETVVAASLSAASLPVIVVNPAQVRSFAQALGKRAKTDPIDAAVIARFVGATKPAIRALPDADTRLLADLVARRRQIIQMIVAERQRERQTTVPRFKKSIARLLKALEKELNAVDADIDDAVRGSPVWCEKEDLLKSVPGVGPVVARTLLAEMPELGSLDRRQIASLAGLAPWTRQSGKWRGKSFTGGGRSSVRASLFVAAMVAAKHNLPLKAFHQRLIAAGKPKMVALIAVARKLLTILNAILRDNRPWQSA

SEQ ID NO: 160160 - protein, 349 aa, unidentified
MTSLAERVDVVIGVDTHKHTHTAAVIDAGTGGALAELTVPTDAGGYLRLLDWAGQHGTGRVWAIEGAGGYGAGLVRFLTAAGEQVTELDRPVRAARRNGARSDALDAVRAAREALARPHLAQVKTDGPRAELAVLLAARRSAVDAATIAQRQLHAMVTAAPEGLRTLFRGQSTTVMVATAARLRSRASWDRHTATTAGVLRTLARRAQDLGAEAQTHERAITDIVRAWRPDLLHQTGVGPIVAAQVLTAWSHPGRVRSEAAFAMLAGVAPIPASSGLRTRHRLNRSGDRQLNRALHVIALSRARYDPRTRDYIERRRAQGKTDREIRRCLKRYIARDLFRQLEHGQLPA

SEQ ID NO: 160161 - protein, 465 aa, unidentified
MPGSRKNDVSRQGRRRAPSPPEPRRVNVNAAGIDIGAGHHYVAVPEGRDPEGRAVRQFGCFTDDLCALADWLSQCEIETVAMESTGVYWIPLYELLAERGFDVKLVDPRRLKNVPGRKTDVLDCQWIQQLHTFGLLSGAFRPDDQICVLRSYLRQRAMLVRYASDHIRHMQKALEQMNVKLTQVVTDITGVTGMGIIRAILGGERGPKRLAALRDERCKNTEETIARALEGNWRSEHLFELRQAVELVDFYEKQLAACDKAIEAHLRRFEDKSDGQALPVSRKPKSRRGDPGFDARLHLLRLTGVDLTTIDGIEAHTALKVVSEIGVDMSRWRDEKCFASWLGLSPGSKITGGKLLSGRTKPCANRAATALRLAAWSLHRSRSALGAYYRRMKARLGPAKAITATAHKLARLIYRMMKFGTTYVDRGQDYYELRYRDRILRNISRRARELGYTLVKSDELSLVPA

SEQ ID NO: 160162 - protein, 408 aa, unidentified
MNTTLYVGIDVSSRSNVVYLMLPNGDKHSNFSVANSHEGSTQLVKRIHSALSSNFLDTVLIGLESTSVYGDNLVYFLREDATLAPFNRKIHVLNPRQVKKFHDTYNDLPKNDYVDSFVIADCLRFGRINKEVYMGDYHYKALQNLTRARYFAVQNLVKEKQRFMNVLFKKYSTMTQEKVFSDTFSTTALAVYDEFESAEALANMDLHELTDFIIEKGKNRFPDPDTVAKAIQKAARSSYRLPKTVNDSVNQVLSISITSIKALESQIKEFDKAINAQMELLSNVLISIPGIGPVYSAGIMAEIGDINRFGNQAKLAKYAGLAWKQYQSGGFEAETTKLIPSGNRFLKYYLCEAALSLVRCDKGYSNFYHLKYKEVNRYQHKRALVLTARKLVRLVFRLLKDNRLYRSV

SEQ ID NO: 160163 - protein, 358 aa, unidentified
MQKYNISFKGQKIFIGIDVHKKNWDVAVAPEVGFVKRHSQKASAKVLIDFLKKHYPDGDYMAVYESGFSGFSTYYALKEVGIDCIVIHAADVPTTQYEEVMKTDRLDSIKLVKSLKAGLLRGIYIREKENLDDRSVIRIRKSIQKELSRYKVMVKHILHNNGVTLPDCFEKPTTHWSGAFMTWLKRDVTLLSSTRNSLDLLIRQVETIRSNMLNATRMLRSLSRIERYKHRCELLMTIPGIGVVVAMSILTEIYNVNRFHNEREFAAYLGLIPTSHSSGEKIIHGEKTFRGNKQLGPMIIEAAWSSIAKDPGLGSLYLRYRERMKPQEAIIRIARKLSNIILAVLKSEKEYVPYHMGN

SEQ ID NO: 160164 - protein, 344 aa, unidentified
MDHFAGLDVSVKDTSVCIVDDTGKIVREVKVASEPEALLAVLKNPAYRFKRIGLEAGPLSQWLFSALAEAELPVVCVETRHMQAVLKAQINKTDRNDARGIAQMMRVGLYRPVHVKTLRSQKLRMLLTHRKLLQSKAIAIENDLRGTLRNFGLKVGMAGTLKFEARIKELVENLPDLAALVEPLLLVRRVLREQIVILHRRLLAIVRGDEVCRRLMTVPGVGPVVSLTYRATVDVPARFRKSKAVGAVFGLTCAKYQSGEVDWSGRISRCGDEMMRVMLYEAAQAMLRSRKWSWLKAWAMQIAKRRGMKKAIVALARRLAVIMHRIWVDGTEFRWTREQATAAA

SEQ ID NO: 160165 - protein, 321 aa, unidentified
MNKNTEFFGIDISKDVFDVFSLEMGHNQFSNNEKGFKQFIKKLSKGSLVVMEATGYYHYCLAQYLYEKGYVVSVVNPLSVKRFIQMKLSKVKTDKSDAKSICEYARNNEVPLYTAKDKSQAECLQLLRLMDTYVKHRTAMKNKLDGEKVLGIPSKAVYRSLSRTVKHLNKELVLLEARLIALVKEEQQEQLRLLKTIPGIGEKAAILLVVFTDGFSKFENSKQLCCYAGITPTIRQSGSSVRGRSRISKIGNKKLRNQLFLSSFTACQYNKACRELYERIVDQGKSKKLALLAVCNKLLKQSFAIAKSGMPYNENFVSKLV

SEQ ID NO: 160166 - protein, 352 aa, unidentified
MDKYMGLDVHSTSCTLAVISSQGRRLHEAVVETDASALRNAVKAIRGTRHLCVEEGTHSAWIHEILDPCVDELVVTRGLGSRALKSDRRDAFALADALRLRALPAVIFKPSARFAMLRELARTHRTICSDLVRVRNRLKATYRSRGIRVAGRAVYRKGERETWIARLDPASRARATLLVRQLDALVTLESDAQRDLIRESHRHPIARVLETAPGIGPIRAAELLAVVVTPHRFRSTKQFFAYCGLGIVTRSSADWIQVDGTWTRTRVPRTLGLNRNHNRTMKEIFKGAATTVISSRCCAPLCDHYDRLLEEGTKPNLAKLTIARKIAAIVLAMFKTEEVFDPERLGAHSITT

SEQ ID NO: 160167 - protein, 414 aa, unidentified
MEVKYERCCGGDVHKKSVSACVIVPRADWQPVKETRRFDTMTEDLEALSRWLSERGVTHVAMESTGVYWKPVYNLLDGRFEVLVVNPEHVKALSGRKTDAADAEWIADLLRHGLLKGSFIPLELLRELRDLTRYRTKLGDERKSEVNRLQKVLEDANIKLSSVATDVMGVSGRAILNELVQGNTDPALLAELAKGRLREKQDLLEKALQGTLKPDHRFMLAQHLSHIDFLDEAIERLDTQIGEQMRPFEAAIQRWDSIPGINRRIAEIVAAEVGAEFKAFEDADHLASWVGMCPGNNKSVGKRFSGKTRKGSKWLCRALIEAAHGAARTKEKYFQAQYCRLAARRGKQRAAVAVGHSLLVTGYCLITRHETYQDLGANYFDERDREAVKRRAVRRLEKLGFQVQLKPVAAIAVS

SEQ ID NO: 160168 - protein, 310 aa, unidentified
MHDTIGVDISKDTLDIHRLSDGKHIRFGNDKAGLAAMRRWIGKTRVRVVYESTGRYHRDMEGVLDTAGHALVKVNPGRARRFAQAAGYGAKTDRVDAAMLARMGAVLDLDAKPVRTDSMHEIRELHIARIGLVKDRTACRNRLHGARNKVVLAQLRARLKQVESQIAQIDTELQRLVANDPGLAHRFGILMSVPGIGPVAAVAMIVEMPELGTLDGKEAASLAGLAPITRESGVWKGRSRIGGGRRGLRKALYMPALVAIRHNQQLGQIYQRLCSAGKPAKLAITAVMRKLLILANALIRDDRKWADAAP

SEQ ID NO: 160169 - protein, 407 aa, unidentified
MTAPYCVGIDVALHAHRISVLGPDGEAVGPSFTIEATQEGCTELVQTLRARGAVPAATLVGLEATGHYWENLEASLVQAGYRVLLLNALQTRRYRDVLRRKAKTDDIDAYVVAGLLRSGSAEGCFVPDEQIQSLRELARLRARLMRERQDYLRQLVGQLDVVFPEHRTVLGDVSTVRARRLLAGFPTAHHLAQAPPAALRRMAPRGFSLQDATTLRDRARGSAYSGKAAHARGQVVRTLLTQYERLTTAIAELDQAVEALLPPTDATGGPSDATLLQTLPGVGPHTAGTLLGELGSFTRFANARALVAYVGFYPVISQSGERSALPYLSPVGSRIARHVLYLAAVNAVRRSAEWRALYRRKTAQGKTAKQALIVVAVKWLHTAYAMLKHRAPYDPTRLAGLTATLST

SEQ ID NO: 160170 - protein, 391 aa, unidentified
MSISSSGSATALRSSSTVYVGMDVHKDSVMVAVLPERAPQPIAVDRLPNDLAVLRRFFARLARDGAVVQACYEASGAGYVLQRALADWGHACVVIAPSLTPQRPGHQRKHDKRDAIELARLFRAGELVPIRIPTGADERVRDLVRCRQTLQQNVLRARHYVSKFLARRGFVFRDATPWHRAHFRWLHALVAGTGDHALTSEDAVVLGEYLALLEYTLGRRDALDEQIEALALTPAYAEPVGRLRCFRAIDTLSAMVLLTELGDWRRFESPAQLMAYWGLVPTEHSSGPRERRGSITKAGNSHCRHILVQAAWHYRHRPALSGALKVRQRGQPAAVIAHAWKAQHRLYGLYHRLAARRPTQIAVVATARELVGFLWAVMRDVADPHAGGAHA

SEQ ID NO: 160171 - protein, 432 aa, unidentified
MRPNAGGIDVGATEIFVAVPADRDKDSVRSFPTFTQDLHELTDWLKQCRVDTVAMESTGVYWIPLFQILEARGIEVHLVNAQHVHHVPGRKTDVLDCQWLQYLHSVGLLKASFRPEQAVCEIRSLMRHRENLVEMSCVHVQHMHKSLDQMNLQIHHVISDITGVTGLAIADAIVAGNTDPKELAKLRDHRIKASVETVTKSLVGDYRAEHIFTLKQSLTAYRHYQQLIADCDQEVQQRIQAFDSKNAGPSAPADASPSAAADPPRFDLHSHLERIFGVDLTLIPGFECLRIQTLLSELGADLSKFPTPDTFCSWLNLCSKDGSSAGRRIRAPKVKTKNRATQAFRFAAQSLHNNQSYLGDYYRSQRARHGAPKAIKNTAHKLARIFYHLVTTRQPYDETVFAKLEMRKQQQRFRKLQSLANRMGYSLVELHA

SEQ ID NO: 160172 - protein, 406 aa, unidentified
MISVGIDVSKGKSTVCAIKPYGEVLMAPKDFRHTKDDLDSLVKQLSRFKEEIHIIMEATGNYHLPVYQYLKSKGYQISIINPLEMKRYRCQGIRNPKTDRIDSLIIAQYGIDFWYRLKPNDDMDEKRKELRLLGKQYTQYMRIRVIRCQDLCHILDRTMPGVYGLLDDFNRNNGQDKLCDFAEKYWHSDNITKYSEKIFVEKYQTWLKKKGYRQNGKEARQLYSIAKNAIPTLDSKLPSTKLLVQEAVNVLREVDSSLYDILNQLKALSKEMPEYGAVLSMKGIGETLAPRFIAEIGDPRRFHSAKALIAYAGIDAPPYQSGQFTGTKRHISKRGDSNLRKLGYELMDSVNKHKSLYGGDPVCEYFIKKRNEGKPYRVAMIAAFNKFLRIYHSKVSAVLSEYDKKK

SEQ ID NO: 160173 - protein, 411 aa, unidentified
MNPVIGLDVAKGESQVQAYLERKKPYKKSFKIKHDLDGLGSLLDFIKEIEDISGERPPLVMESTGHYHSPVVQYFEDKGYLIIIVNPLISYKAKSSSLRKVKTDIIDANHLCELFYKEDLEPYKKRGIQLMNLRHLTRQHDNITGMFVQTKLQFQAVLDQVFPEYSKVFGDLYSDVSLKTLQAFPTSEEVLIVDTETLATKIKEFCNTRSLKWANQQAEKLMIAAAQNPFQKVLYSSLALSLDMYINMLFEYKKHLSMLENEIDALAKSIEESKIIRSIPGIGEKIAATIVSEIGEIERFNHPKKLVAFAGLDPSVFESGTFKGTYNRITKRGSSRLRQALYMGVKCAIRDCRKQKTTDEILPRNKKLRAFYDKKREEGKPFRVAVIACANKLLHWIYALLKNKTSFQDLA

SEQ ID NO: 160174 - protein, 322 aa, unidentified
MENIALIGIDLGKNSFHVHCQDRHGKAVYRKKFTRPKLIEFLATCPATTIAMEACGGSHFMARKLTELGHTPKLISPQFVRPFVKTNKNDFVDAEAICEAASRPSMRFVQPKTESQQAMRALHRVRESFVQDKVKTTNQMHAFLLEFGISVPRGPTIISRLSTILEDNNLPLYLSQLLQRLQQHYHYLLEQIKELETQLKQKLNEDEVGQRLLTIPCVGTLTASTISTELGDGKHYASSRDFAAATGLVPRQYSTGGRTTLLGISKRGNKKIRTLLVQCARVFIQKLEHQKGKLADWVRELLCRKSNFVVTCALANKLARIA

SEQ ID NO: 160175 - protein, 398 aa, unidentified
MIYVGVDIGKDRHAAAAVNEAGVSAMPPFYFTQDAGGFAALFGALEKLGGPGAVAVGMEATGHYWKVLRHALAKRGYRVDVINPLITSREASADVRGRKSDKLDALAVANVMRKGGYSPAPAAGAADALRTLARHRRALVARRSDAKNRLAAALDVAFPEAAETLGGLSGAAAMAAVRAFPSARLAARADIRAVTSVFKKASGGRLGREDAKRFREAARHSLSLGMDTEGEEFVIPQTADEIRALDGRIDGVERRMQEEPRPEIAARLMSVKGAGRIQPLAIAAEIGDPARFAGVGMAGKVLAYAGCDPRVRESGKWKGRTKMSKRGSPTLRNALYLMATTVRMHTPYFNEIYKKHADKGKHHNVALSHVIRKIVDVMCGMYKTNTDFVSPETEVKPC

SEQ ID NO: 160176 - protein, 366 aa, unidentified
MREQKNNRQERTIIGLDLGDRWHRFCVLGESGQVVEEGSVANNRVALSELSSRYPGALVVMEAGCHSPWVSRHLKQAGCEVIVSNPRKTRAIYQHERKSDRRDALMLARIARMEPALLYPVRHGSEEAQQDLLRIKLRDSLVRARVGLINSLRFTLKSLGYTIANPSTERFHKVIQSALPESVVQMIAPSMQAIEELSLRIKLLDWEIRTLAHTKYPETSWLEQIPGVGPITALYFVLKIGDPARFERVRDVGAFIGLCPRRDQSGENDPQLRISKRGDAYLRRLLVSSAHYILGPFAPPSALRQYGLALAAGATARAKKRAVVAVARKLAVLLLTLWKNNSPYQAFPQQREKMRIHDLERLRCIA

SEQ ID NO: 160177 - protein, 378 aa, unidentified
MTHAQMIQENITTSSERLYIAFELSNSKWKLAFGNGMKIRQKTIAAKDLGALAEEIAKARQKFKMADDVPIYSCYEAGRDGFWIHRYLESAGIQNLVVDSSSIEVNRRHRRAKSDRIDANKLLSMLIRYLNGEQKLWSVLYVPDVEEEDARRLNREIERLKKERTTHTNRIKSLLALHGIVLQIGQNFLEKLEEATQWDGNPLPPRIKNEIQREYQRYELIRDQIKALELERKELRESSKNVGRQMSALEYLKGLGPVSSRILVLEYFGWREFKNVKQLGAGAGLAPTPYNSGDSEKEQGISKSGNPRVRCTMIELSWIWLRWQPQSHLSQWYMKRFGSGGKRMRRVGIVALARKLLIALWKYLETGLVPEGAVLKKI

SEQ ID NO: 160178 - protein, 412 aa, unidentified
MEVLYQTCCGLDVHLATVVACVRHPTKGGRRKSDVRTFGTTTAELLQLSDWLTEQGVTHVAMESTGVLWKPVFNILEGSFAVILGNARHIKAVPGRKTDVKDCEWLAQLLEHGLLRASFIPPPFIRELRDLTRYRKTLIQQRASEANRVQKLLESANIKLGLVATDILGASGRAMLQALVRGERDGAVLAELAKGTLRQKRTRLAEALTGRFTVHHGLMLGEVLAHIAYLEATIARLSEHIEAALQPYAEQVAHVQSIPGVDRIAAETIIAEIGLDMQQFPSAAHLASWAGICPGNHENAGKRKTGKTRKGNTWLKPVLTECGWGAGRARRTYLGAQYARLGQRRGKKKAVLAVGHSILVSVYHILRDGVSYHDLGPEHFDRLATERLTRHYVQRLEQLGHHVTLATEAEAV

SEQ ID NO: 160179 - protein, 345 aa, unidentified
MKQTIIGVDLAKDVIQVCIYSNKKVHSNTEMTPKEFTLWLTNQTASIVVFEACGTSNYWKQKATSLGHDARLISPNLVTAIRQNQKTDRNDALAIVQASQLPEVKFIAGKSNKQQQLQSIMRMRELCVKQRAAMKNQLIALLAEFNIKPSTKNGGLNAVVSSVLEDGDNGLTFEFRIALDTVWNTYKSSILAIERYDECLRSAVEAHPECKKLMKLEGVGVLNAVNLYIALGCSEIGVFKKGKDAAACIGLTPIQYSSGGKTQIGSIGKYVKNTMLRSLLITGAMSVINQVMRRDPKTKKEQWLQSLVERRGKRCAAVALANKTVRTAFALLTQGTEYKAELLSA

SEQ ID NO: 160180 - protein, 410 aa, unidentified
MEVLYPHCAGLDVHKDMVVACLRHVVDGTIKREVRTVKTTTKALLDLSQWLASEGCTHIVMEATGVYWKPVWHILEDGDFDLALANAADVKTVPGRKTDVNDATWLADLLAHGLVRGSFVPNAQTQEMRGLLRTRKQLVRERTSHIQRLQKTLEDANIKLDSVISDVMGVSGRTMIEALIAGETDPNTLAALAHRRIRAPAEELCEALRGRVTKHHRFLLRLHLQQIDIFDAAIVAIDQEVDANVEPFRAAITILTTIPGVSDLSARTIVAEIGTDMSRFPTDGHLISWAGLCPRNDESAGKRRSNRMRKGAPWFKTTLIQCAWSATRKKASYLQAQFHRLRARRGAKKAIAAVAASILTAIYHMLTNGTLYQDLGADHFDRRGKTAQTKRLVAKLQNLGYAVQITPLAA

SEQ ID NO: 160181 - protein, 340 aa, unidentified
MTIITIGLDLAKSVFQAHGVDENGSAVLVKRLHRKQMVPFFSKLSPCLIGVEACGTAHYWARTLAAMGHEVRLIPPSYVKAYVKRGKSDALDAEAICEAVQRPTMRFVPVKTVEQQSILMTHRARSLLVRQRTMLANALRAHLAELGFVANPGIANLGKLAAQVLADKDPLPSYARTALAILIRQIISISGEITALDQQLAAWHAESEASRRLAAIPGLGVITATAIAATVTDPDQFRSGRQFAAWLGLTPQQHSTGGKTRLGGISKQGDRYLRRLLVVGATAVIRHIKDKPTPMADWIRKLLEKKPFRLVSVALANKLARIAWVVLTRKEAYRPYAPMA

SEQ ID NO: 160182 - protein, 419 aa, unidentified
MAFKILRKNCCGLDIHKTWIFACIGITDSNGRTEYKQARFSSFSNGLRDLADWLAKYSCSDVCMESTGKYWIPVFNILEKTCWVTLAHPKYTKPQKGNKTDRKDAKWICDLYMCGMVKPSFIPPPDIRQLRDLMRCRVKLTNMLTGEKNRAQNCLTVSNLKLDDVFSDVFGKSSRSIIQYILEHPGEQFDVTPFIHRRCKHPVEEIQAAVDGVVSREQAAKLKECLLHIDQLNAHRERIEAEILRLAEPYPYQLELIRTVPGFAAAPLTAVALISEIGVDMSVFPSAKHLASWAGCCPRNDQSNKKVKSTRISRAGCYLKPLLVQIANAVIKSDRHPECRERYRRIKARRGHKKAIIAVCRMLLTAIWNVLSKLEPYSAKGYLADKLTEHSVVISKAEGLALLRKRGYIFKDELAVESG

SEQ ID NO: 160183 - protein, 315 aa, unidentified
MEQPSTAPSFVGIDVSKDRLDVHVRPVGQTFSVTRDSKGLEQLTDELRDLAPALIVLEATGGFEITVAAALAGASLPLAVVNPRQIRDFARATGRLAKTDTLDAQVIALFAERIRPEPRPLANADSQSLAELIARRRQVVEMIGMETNRLHQARNTRVQRMLRTTLRTLTGQLAQLDRDIDDTIRRSPIWRATDDLLTSVPGVGDVTAHTLIADLPELGQLDRRRVAALVGVAPVNRDSGQMRGKRTITGGRAGVRGALYMATLSAISWNPVISKHYGSLVERGRPKKVALVACMRRLLGILNAIIRTQIPWQCV

SEQ ID NO: 160184 - protein, 387 aa, unidentified
MHAADQSLAPTTIGADLCAIFISLELSRSTWLVTSLSPGRGEKMSKHSVSAGDIAGLLARFSELRRKACARTGKSFPIVIIQEAGLDGFWIHRVLLSEGIESHVVDAASIATSRRRRRAKTDRIDGETLLRALLAHKRGEPRVCSMVRAPTPEDEDRRRICRERKVLIMERVQHVNRIKGLLFSQGASGYEPLRRDRRARLEALQTGDGRRLPPHLKAQVCRELDRLELLLQQIKAVEAERDALLNAEQTKASAPPPMLLGVHGVGPEFASVLWSEGLSRQFDNRRQVAAYAGLAPTPWQSGSVNREQGISQSGNPRLRTTMIQLAWLWLRHQPRSALTLWFQDRIERNGGRRRKTTIVALARKLLVALWKYVSAGVVIEGAMTRPA

SEQ ID NO: 160185 - protein, 375 aa, unidentified
MREKVRFLGLDVHAEAIAVAIAEADGEVRSLGTIANREESIRKLVKKLGPVEKLRACYEAGPTGYVLYWQLTKLGVECAVIAPTLVPVKAGDRVKTDRRDAERLARSHRSGDLTAVWVPNERSEALRDLVRAREAAKADQLRARHRLAKFLLRTGRRPETKIKVWTGLYMTWIGRLRFEQPAQEFTRLDYLHEVEHMGERVLRLEQAITDAIKLASPEMQEVVRGLQALRGIAEVSAVTIVSELGELSRFGSARQLMGYSGAVPSENSSGKRVQRGSITKAGNAHLRRIVVEAAWSYRLRPGIGPRLRKRQEEVPEEIKEIAWKAQVRLTKRYARLAAVGKDQRKIVTAVGRELLGFIWAIGIKAEAAGKQKMAA

SEQ ID NO: 160186 - protein, 359 aa, unidentified
MTQNTTTASRMTIGIDLGDRYSHFAVLDHAGELVEEGRLRTTPAAFKLRFTSCTPARVAIEVGTSSAWVNELLADAGHEVLVANPRKLRFIFQGDNKNDRVDAEQLARVARLDPRLLSPIQHRTRESRVDLSVLRARDGLVRARTRLVNQVRGLVKPFGTRVAGCSTSTFATRVARAIPKELRPAIVPLLRVVQTLTDKIRRMDKRLESMAAKKYPEVAALRQVNGVGIVTATTFVLTIEDPRRFKSSRSVGAYLGLRPKRRQSGNADPELRISKAGDRDLRMLLVQSAHYILGPFGKDSDLRRTGLALASRGNKTAKRKAVIAVARKLAVLLHRLWVSGEEYEPLRNANRREPEAHTA

SEQ ID NO: 160187 - protein, 379 aa, unidentified
MGWLPPSPDGIAMCQDVVLKEPQNGEDGDMNDTMIGVDLAKSVFQLHGASMTGQLKYRKKLTRPRFRKLMADQPPSVVVMEACGSAHYWTREMVRFGHDVKLIAPQYVLPFVKRQKNDAADAEAIVIAAQRPEMRFVEPKSQEQQARAVLFRARERLVHQRTELVNALRAVLYEFGHAVPKGIGNIKRFDVILEDPNCDLPALVRDECGDLVKQIAEQTIRIDAKTKTAKEMATTANTARRLQTMPGVGPLTALAIEAFAPAMQSFKRGRDFAAWLGLVPRQHSSGGKERLGRVSKAGQTDIRRLLIIGAMSRLNWMGRKTITEGSWLARMLARKPRMLVAIALANKMARGIWAMLTKNEDYRDPVPAVAARSTCAAAT

SEQ ID NO: 160188 - protein, 315 aa, unidentified
MQQYHIFIGIDIGKFNFVVSLYGKKDSQEYDNTPLGHSKFIKDYRKELRTGLCILETTGGCEHALLFTLCQKGFSVHRANTRHVKNFIRSLGQQAKTDSLDAQALALYGYERHQRLDLFVPQSPQSYELFELIQRRNDLKQMLVAEKNRLKSPRLNWAKESVERHIALLSEEIEAITNRVNLIIEQDKALKARKEALKTVPGIGDVVANELLVLMPELGSLTRRQAASLCGVAPRANDSGKRQGYRSTGHGRNAVKPMLFLAAMAARNSKTELGAFYQHLLKQNKKKMVALVAVMRKIIVIANARLRDIALEPSC

SEQ ID NO: 160189 - protein, 377 aa, unidentified
MKKVRFIGLDVHADTISVAAAEPSGEVRSLGIIPNRPESIRKLMKKLGPSAQLRVCYEAGPTGYVIYWQLTGLGVHCDVVAPTLVPVKAGDRVKTDRRDATKLARSYRAGDLTPVWVPDAAHEALRDLVRAREAAKKDQLRARHRLGKFLLRHGRRPATGMTAWTQRHLTWVRQVQFEQPAQEATRLDYLHEVEHVAERIERLERAIDDAVKTAPPRMRAVIEALQALRGIALVSAVTIVAEVGELSRFARAPQVMGYSGMGAREDSSGTRTRRGGITKTGNAHLRRIAIEAAWAYRHRPAVGGALRKRQATLSEEVKAIGWKAQLRLHARYRKLLGRGKCQQHVVTAVGRELLGFIWAIGVTVERQQRQTSSSAAA

SEQ ID NO: 160190 - protein, 372 aa, unidentified
MNYNTVYVGMDVHKESFTLCSCKYEDEKASHYQRTPASYKNVLRYLAFLRTIYGEDTRFVCGYEAGCLGYSLYHQLENFNVECVILAPTTMLEQLSKRRIKTDKRDAEIIARSLAQHNYSPVHIPTETDNQTKEFIRMRDDHKAELKKIKQQILSFCLRQGYQYDGSGNWTAKHVKWLRSLKPAGLYKEILDEYLLTYTILTDKLNRLDQRIEELASKEEYKESVSKLTCFLGIKTHTALSVIVEVGDFQRFVSARKFAGYLGLVPGQHSSGDDRNGLGITKAGNTHVRRLLVESAQSYTRGKIGYKSRVLRSRQAGNSPQVINYADRANERLRRRYYKMVLKDGKKYNIAKTAIARELACFIWGMMTDNIY

SEQ ID NO: 160191 - protein, 350 aa, unidentified
MPKAPLQHVATLGIDIGKNSFHLIGLDARGAIVLHQKLSRGQVEARLANMPSCLIGMEACVGAHHLSRQLLALGHDVKLIPAQFVKPFRKSHKNDFRDAEAIAEAVQRPTMRFVPTKTVEQLDLQALHRVRARLVSQRTAVLNQIRTFLLERGIAVRQGLRSLRQALPDILAKRTDVLTPRMVHLIEGLMQDWHHLDERIDAVTDEIGALVAADEACQRLMSVPGVGPIIASAMVAAIGNGAAFRRGRDFGAWLGLVPKQTSTGDRTILGRLSKRGNTYLRSLLVQAARVLLLWPAKWPQHSFGNWLTAASARLHHNVLAAALANKLARIAWSVLSQNRTYEPRTAAVMG

SEQ ID NO: 160192 - protein, 589 aa, unidentified
MANKLLAISRLKPGQVKTFQIRFALRHFAAGCDIDKPVGTYCVLYPTPNGFQAQVQQFANSPSGCQDALAWVLSHAEKHLPPDEKPLFIIESTGCYHQLPLKTFNDATEVVVVNPHRIKAILRADGKDDVKDALTLTKLVLSFDLKKSVLAVGAQKRLRKVLRMKRKLINNRTQVSNRIGSLLTENSVPLPNVVKVMTVSGRAICRAIAQGQTNRDLLMLLWQGKNLPASGLELVAQGQPFLQVLATFAPTMQNKDVARLKEIHDALFYVADLEQTFLNLLAQQLRLLEMYDQEIELIEQEVVIAVDTYRIELPGGGQRTAQEMIDLIRTAPVFAEESARMLVAEAGLNFSEIYGSADAFTRNFGLTPGNSKSAGKVVGNDTVHGNQYFKPVIVQAATAFLRRHLEQEDNGWFLWLWARRYQQRTDAQHARIAVARKITRSVYFMCRRWQPYDDSQHQCLREDYALQTANRLANTAKELSAASPDIIGLDATSKLKQASFAINQALGLQVSRYKLCPFDHDCPVDTLGLSTRVVNLLLKNNIVSVSQLVLRLVSGTLISVKGLGLISAQEIERLLISKKLIELQISEPR

SEQ ID NO: 160193 - protein, 337 aa, unidentified
MNKSESKVVPCGIEVSRSTLLVALGPKAPRAFPNTSAGHQAILRCLEQAADRVRVCLEATGRYGLDLALTLHGARVPVMVANPRAVRHFALAEMRRSKTDRVDAAVLMEFAARLRFRPWQPPSPTALKLVAVARRLRALREMITAEKNRLHAASLSEALPGSVRLEIARHLQILACHVAKLRQAAEQFIADDRELRERYQLLLSIPGFGPTSALQVLAELSLLAPDLDVRQWVAAAGLDPRHCDSGTSVHKKTPISKLGNAHLRRALYMPALVAIQHEPHLAAFYQQLLARAKAKLQAVVAVMRKLLHAIFGMFKHHQPYDGAKIHALTPLPEVVCP

SEQ ID NO: 160194 - protein, 405 aa, unidentified
MYDELAEVAVPEIWAGVDIGKEHHHCVVIDAQGKPLLSRRVLNDESELLQLMADVLELSQDVLWAVDINHGGAALLLGLLVSHDQHITYITGLAVHRASAGYRGQAKTDAKDAFVIADQARMRTDLGVLRPGDEISVDLRTLVTRRTDLVCDRTRQINRLRAQLLEIFPALERSLDLTRKGPVLLLTGYQTPAAIRRAGAARMTTWLRNRKVYGSAALARAVVQAAEAQLTALPGEKLAATMVARLAKGVMALDEEIAELDAFIEGRFREHPHAEVIQSMPGMGSLLSAEFLAATGGDMDAFGTADRLAGYAGLAPVPRDSGRVSGNLHRPRRYHRGLLRAFYLSAFASLRSCPASKRFYERKRAEGKGHKQALLALARRRANVLWAMIRDGACYQATPPVTATA

SEQ ID NO: 160195 - protein, 477 aa, unidentified
MRPTCRGRLTVVCFNPSTKLTRVRPAELIVARSKELSTRRKFVSYFAPLVGRGSDEERLLREVGTGMQVVHERCCGLDVHKKTVVTCILITLANGEVQRHIRTFSTMTAGLLALSDWLESLAVTVIAMESTGMYWRPVFTLLEEGRSVILVNAQHMKAIPGRKTDIKDSEWLADLLRHGLLKASFIPPAPIRELRDLTRYRKSLVQERAREVNRVHKVLETANVKLSSVATDVLGKSGRDMLSALIEGTTDAQILADLARGKLRKQLPQLQQALDGRVQAHHRLLLKHILAHIIFLEETLEQLQQEIEQHLGPLEEAMTLLMSIPGIAALAAAAILAEVGDDMTRFPSAKHLASWAGVCPGNKQSGGKRLSGKTTQGNATLRAMLAEVVWVISHMKDNYLSAQYHRLARRLGKKKAVVAVSHSLLVIIYHVLSTKQPYSDLGADYFEQRDSTRLTQRSVRQLEALGYTVTLVPKEVA

SEQ ID NO: 160196 - protein, 409 aa, unidentified
MTPTIRYVGLDVHKHYVMVGAVDQTQQTVLPPRKVALADLEGWAEKYLLPTDHVVLEATTNAWYVHDLLEPQVERVVVAHPPQVKLIAAAMVKTDKKDTMTLARLLAVNLVPEVWVPPVHVRDLRALLAHRRRLVSQQTQSKNRLQSVLHRNHLVPPAGKLYHPDQRKWWLALDLAAGDKLRVRQELLMLEQLDTLIDETSDELYHLSLSEPWQEQLPYLIQLPGIGVMTAMVILSAVGDIQRFPSAKKLVGYAGLGAKIHASGLTFHTGGITKQGRRELRAALIEAAWITVRFDPTWRQQFERLEQRIGRRKAIVAIARKLLVVVWHVLYHRRVDRQADPERVVRYFLAWGRQAKAFSRLGLKASEFARQQLDILGIGQELPALITFGVTYRLPPSSLPVVETAATPA

SEQ ID NO: 160197 - protein, 335 aa, unidentified
MKEITTVGVDLAKVVFTVHGVDATGRTVLRKTVRREKLIELIAGLPPCLIGMEACGGAHEWARRFEACGHRVGIMMARFVAAYRKSSKNDGNDAEAICEAVARPNMRFVPVKSAEQQAILSLHRVRQGFIEQRTATINRIRGLLAEFGIVLPQRADQVRRAAVIAAEELPVLARAAIADLRGHLAYLDDWIGRYEQQLVALAKQHEPARRIQQVSGVGPLTASAITASIASGHEFANGRQFAAWLGLVPRQYSTGGKTKLGRITKRGDAYLRTLLMLGARAVLQSATQKTDRLSRWALALRARRGYHRAIIAVAAKNARIIWALLSKNREFALPA

SEQ ID NO: 160198 - protein, 377 aa, unidentified
MNYIGVDLHKDNMTIVGVNEKGDVFVKERMAPKCIGKIEEFFSQESLHPCKIVCESIGFYHWFYDLISQNVDQFILANPIETRKYSWNNPKTDFRDATKLALLLAGGEFERNKSLSCYIPDKVERAFRETTRVRFHLVRRKTSIINSARRIFLKNNLAGPKILNYSTLSQFINKYGDRFNEIHRKFLYIFAEDLFYLEKQISDIEREIHNFLSMERFARIHKILITIPGVGDMVSAVLISEIGNFRRFPDPEFLASYAGMVPKVFQSDQKIRYGKITKEGSVYIRYALVNASWVAVREDERIRRIFGRIAKRAGRKKAIVAIGRKILIWSWHLVIKNETWGSLNNEFPAENRSGMTLERVLNEMKKRDEFIQKNSVA

SEQ ID NO: 160199 - protein, 416 aa, unidentified
MLVQRDKACGVDVHRDSIVATILSRDGTKVQKEFGTTISELFEFRDWLRSNECEALALESTGTYWIPVYTVLEDGFEIIVANPYMIKHIRKKKKDQIDSEWIAELCLNDQIAPSRIFPKDDWALRMLTRTREGLVKTRTDYKNKVHRDLASANIKLASVITDVFGKSGMHCLTGKLLGQDIDEIIRTIPSRRVRKKADQIREAIMANLNQVQILSIRISLSLIESLNQKIEEIDRELQSRILNRQKDLEIAISVPGIDFVSGVTILAEIGHYRDFKSPEQLAAYFGLVPYVYQSAGKLYTGPITKMGSKHLRWILVQVAHAASRVKNSRFRRFFLRVRGRRGHNVAIVGLARKILCILYHLLINQEMYEEEVKKPKPLKHMISETSSSIGMTLEEMIEAVTKSGYVVSRIDMGACG

SEQ ID NO: 160200 - protein, 341 aa, unidentified
MSIITVGIDLAKNIFAVHGVDENGKAALIKPKVSRDQLLPLIAQLPPCLIGIEACSGAHHWARQFREYGHTVKLMAPKFVTPYRMGGKRGKNDAADAAAICEAVTRAHMRFVPIKEEHQQIILCLHRTRQGFVEERTATYNRLRGLIAEFGIVLPQKVACLRKNIGAHLEDIPGYAHQCIGDLLSHADQLDARIAEYDRAIAHAAREDARSKRLMERPGIGPVTASALLASIGGSHDFKNGRQVAAWIGLTPGQHSSGGKAKLGRITKAGDGYLRSLLVMGARSILAGLGDQQDGFSRWARSLVERRGYWRAVVAIAAKNARLAWAVLKYGEDFRLNKSAA

SEQ ID NO: 160201 - protein, 356 aa, unidentified
MNKYIAFDIDSKKTVCCVVQNGKNDLYQTIGPDIQSMKQFLISQKQTGYKTHLAFEISGQAGFIYDSLIDCVDNIKVVNPTKLTWIYRTDKKTDRIDARKMAVLMSINELPTVHMPNKEIRQWRQTILHRKNIVCKVCQVKNRIRATLKSQGYSKPADKGSWWKKLNRLWMESICQQFIGAGDLWRMQAGNLLEELELLERQLKNITEYLDNYLAGKAGGMLLMSIPGVGPRTAEAVLAYTDDVARFGNYKQYCSYFGLTPKLDESGDCRRIGHISKHGPSVVRWVLCESSWKVIQHSKGLRGFYERVMAGQVGRKKIAIVAVSRKLLSIMRAMLLTGELFNEELIDKADKLIEAA

SEQ ID NO: 160202 - protein, 327 aa, unidentified
MNAKGVVRSNEKFKSTQEELDEFLSRFKDAKFVLESTGIWEFIYEGIESKGFEVVLAHPLKVRAIAEARVKTDKVDAETLAHLLRANLIPRSHVPSRDVRNLRQLVRLRAYLVRQSTGFKNRIHAELRRRGIRPPDYLRKIFSGRGVKWIRSLDIPTINASLNCLDGIGEQIDKLNEMLLDEFEQRRNAQLISTIPGIGFYGALLIASEIDDVRRFPHPSRLCAYAGLVPVVRQSASSVRYGSISKDGSKYLRWILTESIHIHKRVCPDSQLSKSYQKIARRRGKQVALIATARKLLNVIYWMLVRDEEYHCHGFNPDEKAAPRSAC

SEQ ID NO: 160203 - protein, 355 aa, unidentified
MDSKKYIGMDVHKESISIAVRNAAGKIVMECIIETKASMILQCIDGLRGDLHVTFEEGTSAAWLYDLLKPHVTKVVVCDPRKNASMREGNQSDKIDARRLAELLRLNHLNPVYHGEHGLRSLKELVRSYLTITKDLGRVMSRVKAIYRSWAIPCTGKQVYAPRHRAEWLGKIGEPGVRRRAEFYYQQLDALRTVRQQVRRELLAEGKKHQAWKRLCQIPSIGPIRSAVLLGILQTPHRFRTKRQLWTYSGFGIETQSSADHRSVNGQLQRAKKQISIRGLNRNHNHDLKNLFKGAAIVASSKPGPFQEFYTALLTKGIRPEMARLTLARKIATIVLIVWKTGACFDAQHLKPQTA

SEQ ID NO: 160204 - protein, 395 aa, unidentified
MPEIWAGLDIGKKHHHAVVIDADDKRLLSRRLMNDETELLQLIGDVLEISRDVLWAVDINTGIAALAISLLLNHGQPVAYLTGRTIQQAPTTYRGEGKTDARDAFIIADQARVRREVSMLRPGDDIALDLRLLTARRLDVVHDGTRQINRLRAQLLEFLPALERALDLTKKGPVVLLTAYQTPAAICRMGVRRLETWLRNRKVQGADTLAARAVEAAQAQMTALRGEDLGAELVARLAHAVVVHNDEVAELDARIEARFRQHRDAEIILSTPGMGPTTGAEFIAATGGDLSAFAPDRLAGFAGLAPVPWDSGKVSGNLRRPRRYHRGLQRALFLSTQVSVFFCPVSKAYYDRKRKEGKGHKQAVIALARRRVNVLWAMIRDQTLFQAAPVLARAA

SEQ ID NO: 160205 - protein, 314 aa, unidentified
MQYIGIDMSKDTFHAAFDEQTVKIFANTIVGVKKFYKEIKDQEVLIGVESTGVYHLLFARTMTSYGFTVMVINPLLTYRMISATVRKVKTDKADAFAIRRTLITGVGYPFTGNTDTLILKALVSQREALVRTRAEFKQRIHVQQITEKALGIKLALSFAPVMITLSKEIKLLEQQMANYAKDTQKLLQSIPGVGRIASAALLAHIGNIKRFQNPEQLVAYIGLDCRVYQSGTSINGKGFITKRGNTYLRFTLFNAAFIARQHIPELKQFFAKKLSEGKHYFSAQCAVERKLVHLIYAIWSRGTPFENRKIQSST

SEQ ID NO: 160206 - protein, 370 aa, unidentified
MLYLAIDQHSKQITVCVRNEEGDTVLSRQVSTRPKKIEAFFKELLEMDPEFMAILEVCGFNDWLIEELRKWNCHEIVVIHPEKPAKRKTDRRDARKLGDLLWLNRERLAANEPVRGLRRVYIVTQREREDRQLTALRKTLGQRRTRTLNKIHRIINRHNLIWDYPTKSFQTQAGRRWLGEVQLPELDRLEMDMLLKEWATWNEQIVEVNEKIVERANHREPDEIVSAAQILMTAPGVSHYSGLTLSSRIGPIERFPRPRSLANYFGLTPGCRNSGKATNRLGSITKEGSTIARFILGQLVLHFLKQDPRMRSWYRRIKKRRGSKIARVAVMRRITTIFWHMLTYQEAYSIGGPPPRLRQRNYPATKNDAS

SEQ ID NO: 160207 - protein, 416 aa, unidentified
MALKIIYPICCGIDVHKSFVVACIAATDKGVTTYKRRRFSTFTRDLRLLAQWLADNGCRDVCMESTGKYWIPVYNMLEPSCKVVLAHPKYVKAIRGKKTDARDAKWIADIFKHDLVSGSFIPPFDIRQLRDLMRYRVKLTQFSVGEKNRAQNCLTVSNIKLDDVFSDVFGKSASAITEQLLLHPDGSFDVIPFIDRRCKASPEKVQAAIDGLLCSEQAQKLKIIPSHMDSLELCKTNLESVILSLAEQFRPQIELVMTVPGIQLFSAISIIAEIGVDMSVFPTAKHLCSWAGLVPQNNESAGKKKSTRITRAGAYIKPLLVQCALTVCKSDKHPEIKSRYLALKKRRGHKKAIIAICRMLLTAIYAILKNSEAYNPNLYRKVVSLPAGRVFTIEQAVAFIQRHGFLVVDSDGVIAS

SEQ ID NO: 160208 - protein, 309 aa, unidentified
MEPKQWVGIDVSGKRLEVFVRPIQRILKVANSPAGLATLVSELLGIDPALIVIEATANWHLAAVAALSGAGLPVAVINPRQARNFARATGQLAKTDPIDARLLAHFAEAIHPPVRVLPDEQTQELAEWVQRRHQLVEMLTAERNRLRAMSGSARADIETHIDWLEKRLVRLDEELERLIADNPVWKDLSALLCSVPGVGSVVSATLIANLPELGSLSHKQIAALVGVAPLNRDSGQTRGHRTTWGGRAPVRTMLYLACVVGIRFNPIIRRFYQRLKQAGKPSKVALVACMRKLLVSLNAMVKTQTQWQS

SEQ ID NO: 160209 - protein, 391 aa, unidentified
MVCVGIDVAKDKHDCCILDSDGTIRADCITIPNNMDGFKQLLQTIRDCTKKSDKIKVGLEATGHYSYNILGFLLDNDLAVYVMNPLHTNLYRKSLSLRKTKTDRVDARTIATMLLSDVDLKSYTDTAYHNEELKSLTRYRFDKVRERAKLKQSVSRLVTILFPELEKLVPSLHIASVYALLSEYPGAKQISEIHLTKLTNLLATASKGRYGKDKAIQIRDAVRTSIGSVMPAKFLELKHTIKLIRELTSEIDEIEVSIQKIMDELNPPILSIPGVGIQSAAMILAEIGDFSNFESPDKILAYAGCSPSTYQSGKLTNCYAHMEKRGSRYLRYALYNATKYVCHWNPVFAEYLAKKRAEGKHYNVALSHATKKLVRLIYALQKSGKAYLVAA

SEQ ID NO: 160210 - protein, 342 aa, unidentified
MDYFAGLDVSVKDTNVCIVDDTGKIIREVKVASEPDALLQVLRNATYRFKRIGLEAGPLKWLFSALGEANLPVICVETRHMRAVLQAQINKTDRNDARGIAQMMRVGLYRPVHVKTLRSQKLRMLLTHRKLLQSKAIAIENDLRGTLRNFGLKVGMAGATKFEGRIKELIENLPDLAVLVEPLLVVRRVLREQIGVLHRRLLAVVRDDDVCRRLMTTPGVGPVVALTYRATVDVPARFRKSKSVGAVFGLTCSKYQSGEIDRNGRISRCGDEMMRVMLYEAAQSMLRSKKWSWLKAWAMQIARRRGMKKAIVALARRLAVIMHRIWVDGTEFRWTREATAAA

SEQ ID NO: 160211 - protein, 419 aa, unidentified
MATVDIVYPICCGMDVHKNFLVACIATTDERSNTTHQVRRFSTFTGDLRRLADWLLENHCCDVCMESTGKYWIPIFNILEKTCNVCLTHPKYVKAIKGKKTDKRDAKWISELFKCDLVRASFIPPADIRQLRDLCRYYVKLTYMNTSEKNRAQNCFTMCNLKLDAVFSDVFGKSATRVIDAFFEHNGPDFDIAPLLHKHCKASAEEVRAALEGELSLAQSEKLNFIKQHQECIDSLQASLESLILKLAAKYQPTIDLLLTVPGISEPLTAIRIMAEIGTDMSVFETAKKLCSWAGLTPQNKESAGKKKTTRIGRAGVYLKPLLVQIALAVGSSNKHPELRDKYQALKKRRGGKKATIAISRKLLTAIWHMLSKKEPYNAELYHKADKPPVNRELTPEQAIDLLRSRGYIIRDAAPAVSA

SEQ ID NO: 160212 - protein, 347 aa, unidentified
MNLVAIDLGKFKSVACLYRSDDDVTYRTIETGPQSVHDLLVEWAPERLVVEVGTVTGWVHDIAVSLGIEVQVANPNTEGWRWKRVKRKTDRDDALKLARLSVLNQLPMVWMPVRRVRQWRSLINYRHELVSRRTAIRNSIRSILDAQGYRMAMGARAWTEAGIAALRSLARSAMDCEPDELWKGQLETELTLLEALGRQIDLVESNFDSLAAQEPRTSRLRTIPGVGPRLSEAVVAWIDDPHRFRNARAVGSYVGLVPRRRQSGTYDRSGRVTKHGPGLLRKLLVEVAWIMRQHNPHAAALYNKLNKGEKTRRKQATVALGRRLLTWCWAMLRDETTWDAHKVGIAV

SEQ ID NO: 160213 - protein, 343 aa, unidentified
MQMVRTVGLDIAKSVFQVHGVDGAGQVVIRRQLKRRYVLAFFQKLPPCLVGIEACASSHHWSRELKALGHTVKLMPPAYVKPYVKRQKNDATDAEAICEAVTRANMRFVATKTPEQQSGLTLHRTRHLFIRQQTAVINVIRAHLAEFGIVAPVGRKGVEALLDVVANPTDKRVPAIARACLAALGAQLCRLKEQILEFDRMIIAWHRSHEASKRLAAIPGVGPILATALVASVADPKAFRSGRSFSAWIGLVPKQHSSGGKDRLGSINKQGDRYLRSLFMAGALAVIRYAKIHGSRHRPWLTALLARRPSKVAAIALANKIARMVWAMMARGERYKEPVALAA

SEQ ID NO: 160214 - protein, 402 aa, unidentified
MNAVGIDVSKGKSMVAALRPMGEVALLPQEFLHTEVGLEQMAYAIVALGEDTRVIMEATGRYHEPIAAALHEYGIYVCVLNPLFIKQSGGGSIRKVKTDKADAMKIAKYGLDNWVELREYTPMDTVRQQLKLCSRQYNLYMKTVVSLQNNLISLTDKTFPGVNELFSSPERADGHQKWVDFVMTFWHCDCICRVSEKAFTDRYQKWCKRKGYHFSTEKALDLYAGSCGHFTTLPKNDNTKLLITTAAQQLLAGKTTLAALRTEMTRLAKQLPEYDTVRAMYGVGETTAAQLMAEIGDVRRFPRRSSIVGFAGVDPAVDQSGKHSAKSVPTTKRGSPHLRKTLYQIVCTYLKRSPADEPVYQFLDKKRAEGKPYFVYMTAAQNKFLRIYYASVKAYLESLEHD

SEQ ID NO: 160215 - protein, 325 aa, unidentified
MNLPALGIDIAKATYQVTLLIGDKAQRGEFENRSKDFPRLARWLEKRGVSQVHACLEATGRYGDDLARYLHDAGHLVSVVNPLRIKAFARSRLTRNKTDPLDADLIARFCQSQTPSLWTPPAPELLELREIQHHYDTLQDARTQTLNRLGAGLHSVVVKAQLEAQLHLLDQQLADLKQQMDNHLDQYPDLKAQRDLLETIPGIGRLTATKLVAEDLRRFEDARAVAAYAGLTPRNGVSGTSVHYRPRMSKVGSPALRRTLYMPAVSAQRHNEVIRQFTERLAARGKCPMTVLGAAMHKLLVLAYGVLKSGVPFDPDYARKYQWAS

SEQ ID NO: 160216 - protein, 341 aa, unidentified
MKKLFIGIDFSKEKVDVAIIFAENLSKTASRVFNEFKTTVSGYKQLVKWVEQNSYGIDSSLWLFCGENTGDYSKGLCNFLYGKGYDMWLENAKSIKDASGLRRLKSDRADASMIAEYAMRNYDKAIIYEPLSESLAQLRELFLYRQIAVRHRCSFQVRRGEKRLTMEKSSVKTMISQSGRHIVSELNKEIEKIDKRIAELIKSDEELTEVYTIVTSVPGIGTQNAVCLMIYTDNFRRFNYNSRKIACYYGIAPFGKDSGTSVHSDPRVHYMANHQIKAMLTQAALAAVNFNPIMARYYMRLVEGGKKKQVALNNVKNKLIHLVTAMVRNRQFFSPEYKISA

SEQ ID NO: 160217 - protein, 411 aa, unidentified
MVKENFIYVGIDLHKETHTAVMIDCYNQKLGEITFPNRPADFPKLVTKVKKCNTDAKEVVYGLENAYGYGRPLAVWLIDKGYFVKDVNTAISHRQAKHRGAMYRKSDSDDAEAIALATLNMLDKLPDACPNDAYWSLGQLVHRRDNIMKQRTRLVNQLHEQLCIAYPSYKQFFNDISRPTALYFWEHYPSRKYLKGKSVEDLRAELVPVSHNKCSTKTCEKILDAVASDKVKNNAYQDARDMVTLSIVSDLQHYDSQLAEVDKMLEQMYKMLGCTLTTIPGVNVITAVKILAEIGDIKRFSNANKLAQFAGIAPLHLSSSGKGKDVATKQGNRRLQATIYFLAIQMVQVSSKGTPRNSVVRAYYEKRKAEGKTSQQALICISRRLISVIYGMLKNGTEYRMPVVENAGENR

SEQ ID NO: 160218 - protein, 384 aa, unidentified
MLEHTPEVIDAWAWTIRKRFEGRPVAVGLELNKGPLVYALRQYAFLVLFPIHPLTLAQYREAFTPSHAKDDPTDAELQLELLLTHRDTLQPRNSQSPALRALAQLVEHRRRLVGDHVRLTNRLTSALKNYFPHVLQWFDAKDTTIFCDFLAQWPTLKAVQLARRTTLEGFFRAHHVRYADVIDQRLRAIKSATPLTTDEGLIAPHALLVQALVTQLRVTLHAIETFDHAIAQRAQRHPDFPFLAALPGAGAVFAPRLLVAFGEQRHRYPSADELQKYAGLAPVTERRGNNTWVHWRLQGPTFLRQTCVEWAAASTPPSFWARTSYQPQRDKGASHQAAVRALAFTWSRLLFRCWQHRTPYEDSVYLNALPRRGSPLIHNLARGS

SEQ ID NO: 160219 - protein, 411 aa, unidentified
MESIISCCAGLDVHKESVEACVRRMEADGRLHQETRHWGTMTRDLLAMADWMGAQGVTHGAMESTGVYWKPIYNILESRFTVLLVNARHLKQVPGRKSDIRDCQWIVQLLQHGLLKGSFIPPRLQRELRDLTRHRTQRVEEKTRTVNRIQKVLEDANVKLASVATDILGVSGRARLERLIAGEQDPVKLADFAPRQLRGKIPELEKALEGHVTEHHRFMLRLLWKELAQPEGLIAELEVKIEEVTRPFAAEIQRLDAVPGVDRRVAEVVLAEVGAEMKPFPTHQHLASWAGMRPGNEQSAGKRQRRRITPGNRWLKRTLVQAAWGASHTKNAYLASQYRRLVGRRGRKRALVAVGHSMLVIFYHMFQEGTTYTELGGVFFDRLEPQRLTCCYVKRLESLGHKVTLEPSVAA

SEQ ID NO: 160220 - protein, 350 aa, unidentified
MPATAQSAIAVVGIDIGKNSFHIVGLDDRGAIVLRQKWSRSQVEARLANIPPCLIGMEACVGAHHLSRKLNALGHDARLMPARYVRPYSKGQKNDFRDAEAIAEAVQRPTMKFVATKTADQLDLQALHRVRERLVSQRTGIINQIRAFLLERGIAVRQGQRFLRVELSRILATPPEVLSPRMVPLIEGLASDWRRLDERIESLSGQIADLASRDAGCERLMSVPGIGPLISSAMVAAIGTGDGFSKGRDFAAWLGLVPKQISTGDRTILGKISKRGNRYLRVLVVQAAWVVLVKVKPNRWAHGLKRWIEAAKKRLHHNVLAIALANKLARIAWSVLAHGRAFEASKLQIA

SEQ ID NO: 160221 - protein, 346 aa, unidentified
MRFYQATHSFYCGVDLHARTMHVCVVDAEGRTQEHVNLPCDAGRFLKLIEPYRERLVVSCECLFAWYWLADLCRAEGIPFVLGHALYMKAIHGGKAKSDKIDSEKIARLLRGGMLPRAYVYPKEMRATRDLLRRRMKLVRLRGQAIAHVTNTFTQYNVAAPEKKLSYRANRVGVAERFADESVQRAVRSDLAFAEHLDEQLRGIELYLTQHAKIDDPQAFSRLQTVPGIGPILAMVVLYEVHDIGRFGSVQQFVSYSRLVKCSHESAGKKTAGHGNKIGNAHLKWAFSEAALLMLREHPTAKSYVARLEKQHGKGKAISILAARLGRTVYWMLKRKESFDEPRFLK

SEQ ID NO: 160222 - protein, 343 aa, unidentified
MSEISTIGLDLAKNVFQVHAVDASGRVVLRRQLRRGAVEKFFAKLPPCTVGMEACGSAHHWARVIGRYGHQVRLMPPAYVKPYVKRNKNDGRDAEAIYEAVGRPTMRFVPVKSVEQQATLAVHTTRALMVRQRTMIGNSLRAALSELGIVAAQGFKGLRELMAKLEAANDEIPETMRSALLMLARHWQALDADERALERQIAQAARCDRDARRLMEVPSVGPIIASTVLAKVPDAKVFRSGRDFAAWIGLTGRDHGTGGKHRPGRISKQGDRMLRALLISGASAHLRQQKARGVSDPWLRELLARRPYKVAMVAFAARTARILWAMLVKGEAYRDRASASAAA

SEQ ID NO: 160223 - protein, 356 aa, unidentified
MNKGSKLDFSGQPIYIGLDVHKKSWSVSIFTQHGEYKTFSQPPEAETLSQYLQHHFPGAQYRSVYEAGYCGFWIHDPLRNKGIQNIVANPADIPTRDKERRTKRDRVDCRKLARGLRGNEIEGIYTPPRWKLEDRSLVRTRLSMGRKQARCKNQIKSMLLFYGVGIPERREMGHWSRPFIRWIEEIRMERASGEMALQSHLEELCHLRQIIAKLNRAIVALARTEQYCSWISLLKTVPGISTLTAMIVLTELHEVTRFGSIDELCSYVGLIPDTQGSGEKEHVGGVTQRRHSQLRWLLIEASWIAVRKDPVMMEAFQQYCKRMRKTKAIIKIARKLLNRIRYVLKNQAEYVTGVIE

SEQ ID NO: 160224 - protein, 332 aa, unidentified
MSDTPALCTPPPAGAAEPLFLGIDIAKASFDAHLLPGGQQWHLPRTAAALAAWLRELQALDAPITLVVMEASGGYENLVAATLAEAGLPVAIINPGQARQFAGALGQRAKNDPLDAALLARFGRDLRPPVRPLPDAQQQALAELLTRYTQLVGMQTAESNRLQTAITQRVRKSIAAHLKWIAAQLKAIDTDLDDLIKGSPLWRDQEQLLTSVPGIGKTTARMLLGLVPELGLCPGRQISALTGVAPFDRQSGKWHGRRFIGGGRADVRSALYMPTLAAMRCNPPLRALHARLKAAHKPGKLIVIACMRRLLVMLNAMLRDHRPWSPQPITNP

SEQ ID NO: 160225 - protein, 309 aa, unidentified
MKKISTAEATQIRNFAEQKLTIGLDLGDRSSWYCVLDETGRVRLEQRVSTTPKAMREGFGGMPRSQIALETGMHSPWVSRLLSELGHEVIVAHARNVRLIGESRKKDDRLDAQTLARLARIDPQLLSPVKHRSAKAQADLTVIRARAGLVRARTALVNTVRGLAKSYGERLRGCNARNMNPEKAEGLSPELQTALQPLLAAIESLSERICEYNQQIEQLAESRYPQVGLLKQVKGVGTLIALTFLLTLEDAYRFRKSRDVGCYLGLQPGRRNSGQSEPQMRISKEGGSLSANLAGAGSAAHSGTVWSGL

SEQ ID NO: 160226 - protein, 343 aa, unidentified
MRYVGLDVHKEFCQACVMDESGRVLSNGRFPSTPEGLDEFLSGFEQAKFVLESTGIWEFIYEGIERRGFEVVLAHPMKVRAIAEAKVKTDKVDAEILAHLLRADLVPRSYVPSRDIRDLRQLVRQRAYLVQRSTSFKNRIHAELLRRGIRRPRQYVKPFTQKSAEWMRSLGIATIDANLDCLDTIQQQIGQLNDELLQEFDRRRDAQLIATIPGIGYYGALLIFAEIADIRRFRDPENLCSYAGLTPTVSQSASSVHYGGVSREGSKYLRWILTESAHIHVWTAPNSRLSRFHARVARRRGKQKAAVATARKLLHIIYWMLMNKEKYHSQGLNPAIKPAARTA

SEQ ID NO: 160227 - protein, 437 aa, unidentified
MEAVYRRCAGLDVHKDVIEVCVLPPAGQSGSPQRRRFATFTSDLIRLRMWLVSLKATEVAMESTGLYWVPVWRQLEGHIGKRLLCNPQQVKALAGRKSDRRDGQRIAEFLQDGRLDPSFVPPKEIQQLRELLRMRVSLVQEHNRLSNRVEKLLQSYGVKLSSVASDILGKTGQRILTALAAGQTDPDRLSWKAVGSLREKEAQLRRALRADFDEHSCWMLGVLLGQLKENEQWREQLEQRITEGMKPYEPIVIRLMTIPGVDRLTAWSMVAELGTDMSVFPDQRHCASWAGVCPGTNESAGKQHSTRTRRGNRYLRRILTQSAWATSRCKRGYLRAAFHRIAQRRGHKKAVVAIAHKILVAAYFIIRDQTTYLELGEDYFDLLHPERTARRLARRLERIGYQVTLTKAAATAPQSSEGQQPKKRGSSEKFVGKLGLG

SEQ ID NO: 160228 - protein, 306 aa, unidentified
MDVSKDTLQLHLRGRQYLLPNTPAGYAQLLQLVQAGGAVQLICEATGGYEQGLVAACHVAGQLISGVNPARVRHLARAQGQRAKNDPIDATVLTAYGQALRPAPTAPADPVQQEMRALVTWRDHLQEHLIRARQTLEHGVPAFVGQQQKKLVAHLEKQLAAVDAAQKAALARAPQLQAQVQALTQLDGVGVRTALHVLSWMPELGTLGRQETTALAGLAPWVRQSGRWQGQRHIGGGRAPVRHALYMPAVVLARMSGTKLGQFYAHLRAEGKPAKVALTAVMRKLLLQMNRVLKELAAPQPAPKIA

SEQ ID NO: 160229 - protein, 375 aa, unidentified
MKEKVRFLGLDVHAETIAVAVAEADGSVRSLGTIANRAEPIRKLVKKLGPVEQLKACYEAGPTGYVLYWQLAELGIQCDVIAPTLVPVKAGDRVKTDRRDAEMLARSFRSGDLTAVWVPDAGSEALRDLVRAREAAKQDQLRARHRLSKFLLRLGQRPAAGVKAWTQLYMAWVRQLRFPQAAQDSTRLDYLHEVEHMAERVLRLEKAIAEAVKLASPELQAVVRDLQALRGIAQISAVTIAAELGNISRFESARQLMGYSGAVPSEDSSGGRIRRGGITKTGNAHLRRIAVEAAWSYRLRPGVGPALRKRQEGVPEEIKEIAWKAQHRLHKRYMRLAAAGKDQRKIITAVGRELLGFIWSIGVKAERATRQPMAA

SEQ ID NO: 160230 - protein, 376 aa, unidentified
MHTSPFEFHHTQPELDALIKYILNSKQSATILMENTGHYHYPVLKAFQEAGLPVCMVNAYQIKKFGDMDLRKAKTDKKDAVRIARYALEKSYSLVPYTSMEQKYEDLRFLARQYNQRMLTLKTNKVFLLNLLDETMPGITNILPLTTRTPETSLSVLFINRFKSYDRIKKMGKSRFLDAFEKIARKSRNRQTKTYGLAIYEAALRNITTRGENEYTLAAQDQCLELVCESQKAADSIILKMQTLAETLPEYAVLRSMAGVGDRLGPLILAEIGDIRRFHSGKALNAYAGNDAPPYQSGTFESHNRHISKRGNAALRKYCFEVMQALKLTRPQDDPVYLFLLKKEQEGKPYNVAKMAGVNKFLRIYYARAMETLKQQ

SEQ ID NO: 160231 - protein, 363 aa, unidentified
MAKKSQIAKAAGPVTGGVDTHADVHVAAAVDQAGRVLGTCSFSADAGGYDRLLAWLRGHGRLARVGVEGTGSYGAGLARYLAGQGVVVLEAPRPDRQRRRRHGKSDPVDAVSAALAALAGQDCGTPKGGDGPAESIRALRAARAGAMKARTQAGNQLRDLVITAPAPLREQLAPLGTPRRARTAAAFTCGDLAGPAEGAKAAMASIAARWLDLDAEVTRLEAAIEALVTRIAAPGYLARTGAGPLTVSALIAAAGDNPGRIATEAAFAALCGASTVDCSSGRQQRHRLNRGGDRQANAALWRIAVTRLRWDPRTQAYYARRTAQGKTRKEIIRELKRYIARQAYRELIRPGFLTTATPPGQAA

SEQ ID NO: 160232 - protein, 340 aa, unidentified
MQITTIGVDPAKNVFQVHGITDDEEVVFNKPLRRAQFLPFFSKLEPCLIGIESCSSAHHWARELTALGHDVRLIPPMYVKPYVKRGKSDAIDAEAICEAVTRPTMRFVAIKTVEQQSLLSLHRARDLLVRQRTQLINNLRGLVAEFGIFIPRGLARVIGFAENITLGEVLDLPDIANEVIHNLCEQLMALHKRVRWYEDRVKQVSKEDARVRLLRTIPGVGAVTASAIIASIGDGHQFRNGREFAAWLGLTPANKSSGGKEKLGRITKMGDQYLRSLLVVGMTSMVRQTRSHPERASKWLTSLLERKPARVATVAMANKTARIVWAVLTRNEPYNPQVAA

SEQ ID NO: 160233 - protein, 349 aa, unidentified
MAMPIVDLSRRVVGGVDTHLDVHVAAVVDSIGGVLGVASFAVDRAGYAALLSWMSGFGTVDRVGIEGTGSYGAGLSRSFAGAGIAVIEVDRPNRQERRRNGKSDELDAIEAARAALSGRARGRAKARGGNVEAIRALLVAKRSARSARIASIVQLRHLMFTAPDDVRERFARLRPEALVREAARLRPRSGADPVRHATKTTAVILARRVQSLDDEIALLDRQIAPLVKATAPALLDIYGVGIDTAATLLVAAGDNAERIRSEAAWAKLCGTSPVPANTGKRDNRFRLNSGGNRQANNALWHIVFTRLGQHEPRTVAYIQRRLAQGRTKPEIIRCLKRYVARETFSALPR

SEQ ID NO: 160234 - protein, 343 aa, unidentified
MNTSILGIDLAKNYFQICGLNQVNKVQFNRKLTRNKLAVFMQQHPPVLVAMEACSSSNYWARKFEEMGHTVKLVPAQHVKPFVKGNKDDRNDAIAICEAAQRPNMHFAMIKTHVQQDTQMIHRIRQLHVKQTTAIANQIRAYLTEYGIIIQKQITPLLHALPTIIANEENDLTPLARQLLSEHYDSLLETRNKAIELKKRIERNNNQNIYCQRLQTLPGIGPIIASALYAAIGNGSQFSQGRQMSAWIGLTPAHFGTGGKNTNVDTTKRGDRYLRTLLIHGARTVVSWIIIKDKDDPLSGWVKRLVARRGKRKAYVALANKLTRAAWRILQGEDYDARKIVAQ

SEQ ID NO: 160235 - protein, 345 aa, unidentified
MEHFAGLDVSVKDTSVCIVDDTGRIVREVKVASEPEALLAVLTSPLYRFKRIGLEAGPLSQWLFSALAEAGLPVICVETRHMRAVLQAQINKTDRNDARGIAQMMRAGLYRPVHVKTLRSQKLRMLLTHRKLLQSKAIAVDNDLRGTLRNFGLKVGVVGASRFEARISELVENLPDLAQLVESLLIVRRTLRQQIGILHGRLLTIVRTDDVCRRLMTVPGVGPVVALTYRASVDVPARFRNSKAVGAVFGLTPSKYQSGEIDRTGGISRCGDEMMRAMLYEAAHIMLVRVTKRSWLKAWAMKIARRRGIKKAIVALARRLAVILHRIWVDGSEFRWTREQAVAAV

SEQ ID NO: 160236 - protein, 306 aa, unidentified
MKGVGIDVSKERLDVAAHGVKKVEGFANTAKGHAGLLKWLKKQGEVQVLVEATGGYEQAVVDHLHGQGVWVCRINPRQARDFAKALNQLAKTDQVDAQVLAQMVAVLGDRLRQYEPPAPWRVRLRAWVQRRSHVVGMIQQEKRQLTWIREASLTAQIEATIKTLTEQKRALERELRSQVKAHASKALETVKGLGDVVKATLLARLPELGELDRRAVAKLVGVAPLNDDSGGRRGYRRISGGRADLRSVLYMATLVALRWEPSIKTFYERLRGAGKAAKVAIVACMRKLLTIINARVRDERLAAASG

SEQ ID NO: 160237 - protein, 338 aa, unidentified
MTKTLVSTNSSTLAFAGIDVGAAELMLVIRKNAVSMKVQKFANTPSDRLRLVKRLSKFPEVTVCLEASGVYHLDLALALADAGVRLMVLNPKAAHNFAKVLLRNSKTDAVDADTLAQYVERMPYQPWVRPATEALMLRALARRINTLTRNKAAAKNQHHALTFSPGTPKAVLRDLKLSIAQLEKRIDHLALEAKILIQAHPSLSRPFALLLTVKGIGETSAIALLGELMLLPAGLTHKQWVKAAGLDPRHFKSGTSVDKRARISKAGNHYIRSALYLPALCAKAHDPYVKGFFEHLIANGKTPLQGVCAVMRKLLHAIHGMFAHNQPFNNSRFYELPA

SEQ ID NO: 160238 - protein, 320 aa, unidentified
MSRTKSKTFIGIDVSKQQLEVAAYESDYQFRCANKANAFGELIAELVALRPALIVLEATGGLEIPIVSALHAAGLPVVVVNPRQVRAFAKALGQLAKTDRLDARVLAHFAAAIKPPLRPIKLKEERELDALTRRRGQLIEMLTDEKNRRRSATSETVRDKIKEHIDWLEECIAELDEQLKALLQSSTCWQAKDKILQSVPGIGPVTSFSMMADLPELGTLNRQKISKLVGVAPLNRDSGQQRGTRHIYGGRARLRSVLYMAALTATRRNPVIKEFYERLRANNKPFKVAITACIRKLLSIINVMVRDSTCWKSKEEPLSA

SEQ ID NO: 160239 - protein, 315 aa, unidentified
MSPTVFVGIDVSKAHLDVCVLPQKGRGRFANDDAGMAELIAWLGDPAGVLVVLEATGGYQTPAVAALAAAYFGVVVANPRQVREYARSQGRLAKTDKLDAEAIAAFAMGHRPAVRPLPDEQTRLLQGLMARRRQLREMLTMEKNRLQQAPQTLAPAIARHIQWLEDELQQLDDDLDQRVRHSDLWREKDELLRSVPGVGPRTSHTLLAELPELGTLNHKQIAALAGVAPLNRDSGRFHGHRTTWGGRAAVRTALYMAIVSAIQHNPIISRYYQRLRQAGKATKVAMVACMRKLLVILNAMLKERQPWQPRLPQTA

SEQ ID NO: 160240 - protein, 356 aa, unidentified
MSEGSWVGLDVQARSVVAGVIDMGSGEVRSLRVPPGSEGTVAWLKTLPAPVRVVYEAGPTGYGLARACAGAGISCVVAAPSRIRAAADRVKTDRRDAERLARLLRLGEITAVRVPEPEEEAARDLVRAREDARGDLMRARHRLSKLLLRHGAVYDATAWTRAHDAWLRRQRFQSGPLAIVFDECYGRMLGAKTRRDALDAAIAELAATPPYVDVVERLVCLRGVSTLTAFALTVELGDWGRFRPESLGPFLGLTPSEHSSGERRRQGAITKTGNTNARRLLIEAAWHQRRPPRMSVTLERRRHGKPAAVQAQADRSARRLHGRWHALEGRGKPRSIIVVAVARELAGHCWALATME

SEQ ID NO: 160241 - protein, 533 aa, unidentified
MSIAKPAPKNLLSSARRRQPFLRFIMPMNLADWPQAIRHAVWQHLRMVLSCPPRRLAPGRCRFIVWRLSSRLEALRLLIASRASTVCVNDSRLPIMLKEINAHAGAVDVGSENFHAAVYGGAIKVFGTFTRDLQNVLEFFGGQGVQTVAMEATGVYWMPLYEVLERGGIKVCMVNGAHVKNLPGRKTDMSDCQWLAELHAHGLLESGFVPEPTILRLRDYQRLRQDHIGMGSQHILHMQKALERMNIKVHDVLSDLTGFSGMQIIKAILKGEQDPEKLAQLCDNQVLNKKRDRLIESLRGHWKEEHLFALGQALEGWQFYQQQIAACDGQLGRILTEMAAVKPEVPGEKLRPLRERKKLHKNSPQITHLYETLVRLCGGNDATQVPTITEYTVLQLISETGTDMSRWPTRKHFTAWLGLAPASRQSGKHRGSQKRFRGRAGRMFCLAAGSLACSKHLALGGFYRRIRATCGGEVANIASARKIAELYYNTLRYGNGYVEKGLKAYEEKYRQDSIRRLKAVARKFGLKITDQNS

SEQ ID NO: 160242 - protein, 445 aa, unidentified
MPSIHPNAAGIDIGSRFHVVAVPLDRTEEPVRTFKSFTGDLHELARWLKSCRIETIAMESTSVYWIPAFEILESYGFEVFLVNAREAKNVPGRKTDINDAQWLQKLHQFGLLRASFQPSENIAELRAYLRQRERLNDYKASHIQHMQKAMMQMNIQLHHVVATITGRTGIEIVRAIVAGQHNPDELVKFRDIRCHNSVEVMKAALTGNYKAEHLFALTQALELFDIYTEKIENCDRIIALVLQRLQQLTPEPQQTMPKAKHQECNKNAPSFDVRAALFNFMGKDLTQIHGLGPYLALKLVAECGTDMSRWPTSKHFTSWLCLAPGNKISGGKVLSSRTRRTASRATALLRLAATTIGKSDTALGAFYRRLASRTGKAKAVTATARKIATLFYNTLKYGMDYVDKGADYYETQYRDRVLINLRRRADAFGFTLQEKVIPGIAVEVS

SEQ ID NO: 160243 - protein, 397 aa, unidentified
MYIVGIDIAKRKHEAAVIDGEGAVIIKPFSFTNNCSGYNRLLAMLTKAKLPLDEVSFAMEATGHYWLALFTRLQKEGFRVQVINPVQTNSIRSFYIRQAKTDPRDALLIAEVIRFGHFSESTLHPENIYELRELCRGRHAIVSMQADVKRKVIALLDQVFPEYETAFTNMFSDTSMAILQTCPTPKELSEMPLEELCHLIEVSSHKRFRMVKAQELQELARNSFGFAMAGDVFSTMIRLYAKHLDFLKQQVREMDRKIAEIMETLDTPITTITGIGPTLGAYILSEIGDISRFSSAAKLAAYAGIDPTMRQSGEYNGVRNRMSKRGSPYLRHAIWLAASSAVLHDPALKLYFQKKRDEGKPYMASVGHACRKMVSIIYAVMRDNKAYTPCIPNEISA

SEQ ID NO: 160244 - protein, 424 aa, unidentified
MKRTQNEKILQIKFETLVVGIDIGKETHYARAFDCRGLELSKLLKFSNTNQGYEALEDWMQTVMKEHSKTEAIVGFEPTGHYWFTLGDHLQRKGHRLGIVNPFHVKCTRELDDNSQTKNDKKDPKTIAMLVKDGRFRDVYIPEDVYQELREAVSERERLLEQLIGLSNQVIRWLDIRFPEFNEVFKDWTGDAAWLTLKNYPTPAKILSAGAPAIVGTWSKEMKKPSIKRAEKLVRLANVSIGRTAGSEAAEAALQNLLTQYEMILKQKQDTERLMQELLMKVPNASKLVDIKGIGMVAAAVIVSEIGDISRFKDPRQIQKMAGLSLRENSSGKHKGKTTISKRGRKRLREGLFRAIITILATNQEFRMLHQKNLGREKNPLNKMESIIALCGKLIRVIFAILTKGSDYDAGKMIEDMKASMKAA

SEQ ID NO: 160245 - protein, 462 aa, unidentified
MRRRDESETLENRREQLEGLPIIRRNVGGIDLGSERHWVCAPTPNAQGREITSFGATTPELIRMAGWLKERHVESVAMESTGIYWIAPHEVLEAQGLQVLLVDTRQLARVPGRDKKTDPTDCEWIQRLHSCGLLRGSFRPEEAVCMLRTLVRDKANLVAESGDWVRRMQKNLDQMNVRVHRAVSDIDGVTGMAILRAIVGGERDAQKLAKLRDRRCSKTEEEIAEQLSGHWREDHLFSLQQALKMYDAVQERIAAYEKEILRKLGDMERDEHHERTAPPLPNPNKAKTIKHRGQEAKRQALYRMSGVDATHIDAIGVETVEVVLSEYGPDLSRFPTEKQFVSHVTLAPRVPKSGGKPVKKKKRNSASTRVAAALRMAALSLRHSQTALGAYYRKMAQRRSGDIAVFATARKLAILIYRLLRWGQTYIDEGAEAYEDRYRQRRIGHLTATAKQLGYQLIPVNA

SEQ ID NO: 160246 - protein, 341 aa, unidentified
MGEVTIIGLDIAKSVFQAHGADAAGSVVFRKKLGRGRLLAFFASQPRCVVAMEACAGAHHWGRELEALGHTVKLIPPAYVKPFVKRQKNDEADAEAICEAAQRPTMRFVPVRSREQQASGVVFRARDLLVRQRTQIMNGLRGHLAEFGYVAPKGVMYVERLIAEIEDPHSQLPQAARVSLQVMVRMLAGLETEIASLDAEIARRSKEDPVARRLMTIPGIGPVTASAMVALAPGAETFRCGRDFSAWLGLTPVQRSSGGKQKLGQITKAGERTLRRLLVIGASAVIKQALIRGAPPGSWLAQMLARKPRMLVAVALANKTARIIWALLAKGGVYRAPALAA

SEQ ID NO: 160247 - protein, 421 aa, unidentified
MLQETQDREEIIERVAALDIGKASLMACVRVPHETKPGARLQEVRTCTTTTRSLLGLRDWLVCQGVTRVVMEATSAYWKPPFYLLEDDIAECWVVNARDVKNAPGRPKTDKLDAVWLAKLAERGMVRPSFIPPRPQRQLRDLTRYRRTLTHERTREMQRAEKLLEDAQVKLSSVISNIFGKSGRDMLAGLIAGQRDPYALAALARGKMRAKTSLLQEALTGHFTEHHAFLLTMMLARIDALTAQIDTLTTRIEQAIAPFAHQVAQLDEIPGIGIIGAQEIIAEIGTQMSRFPTAGHLVSWAKFAPRARQSAGRAKAATTGEGNPWLGGTLGEAAISAARTSTFLASRYRRIVKRRGKKRALVAVGNSILTIAWHLLSDPGTRFTDLGPYWHDHLAPLRCKRQLIAELERLSGMKVTLQQSA

SEQ ID NO: 160248 - protein, 396 aa, unidentified
MFYVGIDVSKDKSDICIQNENGNDLIHRFKITNKKADLEMFYEIIESIKSKTPGNSDVVIGMEATGIYSLPLYSALIRDGHKVKLYNPIQTNGFRKMNIRKTKTDPIDSAIIADMLRHSEPPQVSEIQDFRLFQLRELVRIRHRLIEKQSLCKVQLVRNIDAIWPDYESVMKRVFGATSLAILKKYSVPSKLRNESFEQFYELVQKKSRSKISRSKAEKLYTHAGNVLTIPELDSVISIEIKTLITQLELHDEQIRSVESNINQMMKQIDTKIMSIPGIANILGPTILGEIGNVNRFSNAKKLIAFAGLDPVVSQSGRFESKGGRISKRGSPLLRHALFLAANTAIQNDDNLKRFYVKKRSEGKHHFSALNAVAAKLLRIVYWVLKNKKEYQIQLS

SEQ ID NO: 160249 - protein, 397 aa, unidentified
MIAVGIDVSKSKSTIAILNGDGSIRAKPFVVHHTADELQALSSYIKGTDEVPIILMEPTSHYHYPILKTFQDAGLAVCLINPYQMKKYGDTELRKTKTDKRDSLRIAQYALEKSYSLVPYTPADQKYEDLRFLSRQYSQRISTLVANKVQLQALLDQTMPGITTLLPLKSRDPDNCVLLRFIKRFKSFDIIRKMGKTRFLDSYQVLVRKTKDRYAGTKGLAIYELVLNSVTTRGDNPLNAMTQEQCVDIISASQKAADEINLQMRIIAETIPEYTVLRSMAGVGDRLGPIILAEIGDIRRFHSGKALNAYAGNDAPPYQSGQFESRNRHISKRGNPALRKACFEVIQALKLAKPQDDPVYLFLIKKEQEGKPYNVAKMAAVNKFLRIYYARAMELYR

SEQ ID NO: 160250 - protein, 338 aa, unidentified
MSEVTTVGLDLAKQVFHVVCCDAHGKVVGKRMLRRAQVLRYFANLPVALVGMEACGGAHYWARELQALGHAVKLLPARSVKAFVQGNKNDYNDALAIAEAVVRREMRAVAVKTAAQQDIQALHRMRQQCVATRTRLCNQLRGLLGEYGMVLPRGVGSLRRRLPALLEDAENGLSTFFRRLLAEGYQQLRALDEHIATYDTEVVQHSRQDDACQRLRTIPGFGPIVASVFHSQVGDGQAYRRGRDVSAAMGLVPRQHSSGGKTVLLGISKRGDRQLRSLLVHGARAVVRQAAHKDDRLSRWVNRLKAQRGHNKAVVALANKLARIGWAVLHNRSTYQAA

SEQ ID NO: 160251 - protein, 344 aa, unidentified
MEDFDVAGIEVSSESFLVRVVRHGRLGSPQTFPNTTEGRLAILRLLIRSGARVRVCLESTGLYGLDLALALHEKAVIEVMVANPRSVRHFGEAMMQRSKTDPLDAALLCEYAARMPFQRWQPPTLTARQLCAITRQIHALTVMSTMDKNRLHAANLSETTPKIVRDELERNLAAQKASIGRLTRAALKLIDTDPELKRRFALLVNGPQKAPGIAQTSALQILGELVLVGPDFNVHQWVAYAGLDPREYQSGKSVHKKVRISKVGNSHLRRALYMPALVAVRCNAHFRAFYQHLLAKGKLKMVALVAAMRKLLHALYAMMKYNQPFDGSKLFPNACPPLSEATRA

SEQ ID NO: 160252 - protein, 338 aa, unidentified
MTIIATGIDLAKNVFAVHGVNGSGVVQMRQPKVARGKLGALVAGLPPGVIGMEACSGAHHWARQFQAHGHRVRLMAPKLVTPYRMSGKRGKNDAADAAAICEAMQRPNMRFVPVKTEEQQAQLMVHRARQGFITERTACINRIRGLLSEFGIVLPLKAEVVRRQAREHLEDLPGYANLVIGDLLSEVAHLDERIGQYDKHVHAIARQSTPAQQLMQLMGIGETTATALVAMVGNATEFSCGRQFAAWIGLVPGQYSSGGKTRLGRITKAGDPYLRSLLVMGARAVLNAAKNKADSISRWALAVEQRRGYWRAVVAIAAKNARLAWAVLTKGEAFKLPA

SEQ ID NO: 160253 - protein, 364 aa, unidentified
MDPALAASWNLERQLQPRRRVMQVVRIGLDLAKYVFAVHGVDERGKIALRKTLRRDSVVRFFANLPPCMVGMEASNGAHYWASVLTDLGHQVRLISPHFVTPYVKSNKNDRNDAEAICEAISRPSMRFVPPKSTEQLAVQAIHRICRRLVSDRVKLVNQVRGLLAEHGIVIPRDITQLRRGLAELIARCDDDLSELVRSLMTELREELAELDRRITSYDRRIREIFRNSEPCQRLGKIEGIGPITATALIAAVGDRTCFKNGRQFAAWLGLVPKQRSSGGRARLVGISKRGDRYLRTLMIDGARAALARAGGKQDPRSLWLGKLRNRRHPNVAAVALANKNARIVWAMLAGNTAYEPELSMNAA

SEQ ID NO: 160254 - protein, 433 aa, unidentified
MGLIVPTARHPERADQPMPYAWCVGIDWGSQQHQVCVLDRNRRLVGERTVSHDGASLAQLASWLWTLSEGHPQRISVAIEVPRGAIVEGLIERGFHVFAMNPKQLDRFRDRHSVAGAKDDRRDAFVLADSIRTDLPSFRRLRLDEPQLIVLRELSRAEETLLEEFRRSANRLREQLHRFYPQLLQLGLAADEPWLWELLELAPTPAHAALLSAEQGQRVLKAHRIRRVKATEVLACLQAPALPVAPGVLEAAQAHCGFLLPCLRVLTEQLRLCAQQVQALLNTLAEEPGEAGGPSDVAIVQSLPGVGRKITAWLFAEASQPLAERDYQVLRTHGGVAPVTRQSGKRRQVVMRRGCHPRLRQALYHLARVAMQRDAHFSGVYAALRAKGQRHGQALRHIGDRLLRILVAMLRHRTCYDPSRIRQGLVVQMGRKI

SEQ ID NO: 160255 - protein, 367 aa, unidentified
MVDCIRSDSEVTVGVDLGDKFSTIYVLNSDGEILDEGRVRTTAEALTARFQGLPRMRVAIEVGLHSPWVSRLLEECGHEVLVANARKLRLIYQNDRKSDKVDAEYLARLARVDPKLLSPIEHRGAEAQKDLAVVRARDALVKTRTALINTIRGSVKSIGSRVPSSSAHSFHRKVADAIPEELRPALTPLLAIIEEVTHSIDAYDKKIEELCETKYPQAQVLMTVVGVGPLTALAYALVIGDPARFKKSRDVGPYLGLVPRRQESGDLQPQLRITKAGDKLLRRLLVGSAHYILGPLNAADSDLRNHGQAIARRGGKNAKKRAAVAVARKLAVLLHRMWTTQEEYEPLRNAKRRGAKKQTISSGPATT

SEQ ID NO: 160256 - protein, 371 aa, unidentified
MENCIMVGCDLHDATMLLKVGVGRGAPEKLEYATAQSGRQAMIQELKKQAKSLGGAKVYFAYEASALGFGLYDELTEAKMTCYVLAPSRIERSPHQRRRKTDEKDAERLLDLVRGHVLAGNPIPAVWVPDAQTRDDREVVRARIDAVEKRTAVKAQIRTLLKRQGTPSSFKGTRGRTKGYWAWLRYLAGSDQGLSAGARVHLKSLLRQAEALDQEIAQLDQEVAALAETERYAEPVGEMIKIRGVGLLTAMVFLTEMGDLSRFRNRKQIGAYLGLVPSSHESGEQDDRKGHITGQGSPRVRMILNQATWIWIRYDPEAKALYERIAAKNPKHKKIALVAMMRHLAIRLWHAGQEAQRRAGLFQRRPTEAAA

SEQ ID NO: 160257 - protein, 403 aa, unidentified
MYAVGIDVSKGRSTVAVLEPLGKTVAKPFEVHHTKSGMNDLVNYLNTLDGECRVVLEHTGRYYEPVVRWLSGAGLFVSAVNPKLIKDFDNSSLRHVKTDKADAKKIGRFALDKWYMLRQYTAMDNIRTQLKTMNRQMSFYQKQQTAYKNNLISLMDETYPGANKFFSSPKRPDGSEKWVDFIEKFWHVDCVCNISLKSFTEKYQKWCKKHGYIFQPDKPAEIYNASKELIPILAKDDMTKLFVQQAVTQLNAISKAVEELRQQMDSLASQLPEYPVVMSMFGVGTTLGPQLIAEIGDVHKFTKRSQLTAFAGVDPGVNESGDYAQKSVHTTKHGSPYLRRTLFLIMNVLIQNQPKDDPVYRFMAKKRDEGKPYYVYMTAGANKFLRIYFGKVKEYLSNLPSEE

SEQ ID NO: 160258 - protein, 357 aa, unidentified
MNPKDKLADFRSQELFVGIDVHKKSWTVTIRLENLELKTFSMNPSSEELKNHMKTKYPQGKYHSVYEAGFSGYWLHRELTELGFNNIIVSPTDIPTSGKERLRKTDKIDSRKLARELSAGNLKGIYVPSLLFQELRGLSRQRYQQTKKLTRIKNQIKSYLNYYGQALPENCELLHWSMKFICYLRTLEFSYEMGKEQLENYIDELLLLRSRKLKILQSLKKHLQKHNLYNKIKLLITVPGISYITATTLLTEIADIHRFNSTDSFASYIGLVPSTKSSGEKDKVLGITVQFNRYLRQLLVEASWVAVRNDPALTLSFTNYSKRMCNQKAIIKIARKLLNRIYYVLKNEKEYVRSVVA

SEQ ID NO: 160259 - protein, 334 aa, unidentified
MGKVTTVGIDLAKNVFSIHAVDESGAVIFRKTVTRSRLLSVVGQWPACLIGMEACSGAHEWARRFQVLGHAVRIVAPRFVTPYRRSGKNDGNDAEAICEAIQRPSMRFVPVKSVEQQAVLTLHRVRQGFIEERTALINRTRGLLAEFGIVLPNRAIEVRRGAAACAERLPELARRAVSDLIAHLLVLEERIGSYDRELESLARANEAATRLMSIPGVGPVTALAAVATVGHAHEFANGRQFAAWLGLVPRQWSTGGRARLGRITKRGDAYLRTLLVMGARAALQMAARRHDKLSRWAMALKERCGYHKAVVALAAKNARIVWALLTRGTAFRSA

SEQ ID NO: 160260 - protein, 374 aa, unidentified
MRSILYVGMDVHKANYTLCCYSMEKDTVFAKVQMEPEVKNILQYLKKVEQNCDGDCEFLCGYEAGSLGYTLYHQLTHYGIDCVILAPSTMPRTNKREIKTDKRDAIKIAKCLAYNTYSAVHIPTEEDNAVKEYIRMRDDEKGSRKRIKQRILSFCTRHGKHYTEGNNWTQKHIIWLKHLDFGNAILQEAFEEYLILYFQACDKVDRYDKRIEEMADCERYKENVKKLSCLIGIKTHAALATIVETGDFNRFKNARDYASYLGLVPGENSSGDTRRQTGITKAGNSHVRTLMVESAQCYGRGKAGVKSKALARRQSGNDPKVIAYADKANERLRRKFYKIMFHSKRNIAVTAVARELACFIWGIMTGKMEEVRHG

SEQ ID NO: 160261 - protein, 388 aa, unidentified
MIQVDDLSRSLIAFEQISTLVIVVELSQSSWLAAGVVPGIERRPLKKLDPDPTALLHLVEGWRDRATKAGRAITRTVLAFESGRDGFWLARWLRVRGVETFVMHSTSVAVSREPRRAKTDRLDTEMLIRVFLGWLRGEPRHCKMVAIPTLEEEDARRPSRERESLVGERTRIINRMKAALVRLGIRGFKPGLLTAPQKLDALRTPEETPIPPNMLDEMRRDMARLAWVREQINAIEQARLERLERAPATGRHAMVRMLARVIGVGVETADMLVQEVLSRNLRDRRAVARYAGLTGSPDESGSKRREQGLSKAGNARVRRGLIQLAWRFLRFQKDSALAQWYRGRTEDAAGKRKRTMIVALARKLLIALWRLATIGEIPVGVALRSAVA

SEQ ID NO: 160262 - protein, 337 aa, unidentified
MLFCGIDLHSNNCFIVISDENDKVLYSKRHPNNLEEICALLSPYLLQLFGVVVESTFNWYWLVDGLQAAGHRIHLANTTAIKQYDGLKHRGDESDARHLAHVLRLGILPEGHIMPKAERGVRDLARKRMQLVQMRTTQILSIETQMDQQRGCHLKSNDIKKLSSDGVDQLQFGAMESMALKANLTVMQSIETQITLIEKELAKHCRSHPGFALLKSVDGIGDVLATVILLETGAIGRFADVGNYASYCRCVGSAHVSNGKKKGEGNTKNGNRFLAWAYVEAANFAIRYSEAAKKFYQRKKAKRNATVAIKAVAHKLARACYHMLKTGEIFSVERCFT

SEQ ID NO: 160263 - protein, 423 aa, unidentified
MKLTYPICCGVDVHKTFLVATIITSEYVMPHYHQKRFSTFYSGLVAFKKWLLEYDCKDVCMESTGKYWVPVWNVLEDSCHVVIANPKWVSAVKGNKDDKKDSKWIGDLFRMGLVPSSYIPSKDIRILREFTRYRSKLISMRSSEKNRFQNAFTVCNLTLDAVVSDMFGKSATDIENYLLDADVVDPEHCVSLLRRSLKKKASDVVEAVSGFNMTPEQKERVRIVQGHFADIDHRVAQLDEIIGNLVAEYEGQISLLCTIPGIDRRTAITILSEIGTDMTQFGSSKRLCNWAGLAPASNQSAGKKKSVRISRAGVYLKPALVEAAHAAVKSTEKQPYYRIKFERLMKRRGKKRATVAIARMILTAIYAMLSTGEIFNPSDLEKFDMPEDLKRKQILSSAKEAVKLLVSLGLVPAGSISLDALAG

SEQ ID NO: 160264 - protein, 356 aa, unidentified
MDSVYYLGLDVHKKTISYCLKQSDGRVVQEGAVEARRAALDRWLEQLPKPWKGALEATLFTGWIYDYLLPHAHSLDVAHPAMIRAIAASKKKNDRVDARKIADLLRCDLLPVCYMAPAEVRELRRLLRFRNLMVRQAVRMKNKASGLLMEVGAEYSKEKLDQKRYFQQLLDSVEHVPESVKQMLRMSRAARDQFEESQRRLVAALLKEDLLRERVARLQSIPGVGQILALSWALEVGEVERFQTVGQALSYCGLTSAQISSAGKEHRAPISKQRNKHLQWVLIEAAKVAPMWNPQLKQVHERERARGNANRATLAAARKLVAYLLAVDRSGEPFRLRPAAESATQIQEEAAATAAA

SEQ ID NO: 160265 - protein, 372 aa, unidentified
MGEDSIVYVGVDVSKNKHAIAVAEGGRTGEVRYFGEIQTTPASVERLVRKLEKRYGRLHVCYEAGPTGYGLHRQITAMGHVCEVVAPSLIPKRAGERVKTDRRDAVTLARLLRAGELTGIWVPDEVHEAMRDLVRAREAASEDLRKKRQQLQSFLLRHGRIFTGRKRWSAAYIRWLAAQKFEHSAQQIVFQDYVDAVRDARERLERFDAHIEELVPAWSMAPLVAAYQAMRGVSILVAATFAVEVGDVRRFDSPRQLMAFLGLVPSERSTGESVKRGGLTLAGNRRARRVLVEGAWSYRHPARVTETIRKRLENLPKAVRDIAWKAQVRLSKRYRRMTTGGKKAPVVIAAIAREMAAFLWAIGREVEPRPIA

SEQ ID NO: 160266 - protein, 320 aa, unidentified
MVNLEKKVVGVDVSSKFLTMSFKNEHNQEIVINIGNLKKDIVGYLKKLKKEDYKVVVEATGSYSSKILYYSYSMGFDVCRVSPLTIKKYAEVKNQISKTDDEDAKLIRDFGEKMELSLYEPKNENLEFLEQELTLWQDLEQEKVRFSLKLKSLRQKARLNKEVLKHYETLIDSLQKEIEKLQKRLPRLEDGELKENKDLLKSINGIGEKTSLLLLVATNHFKDFKHSKSVSKYFGVAPRMYHSGNKKVTIGKCRTSKEHIRSILFICSWSAVKCNPQCKALYERKGKCKKLALIAVCNKLLRQAFGIIKSKNQYQLDFVK

SEQ ID NO: 160267 - protein, 346 aa, unidentified
MDHLGIDLHKKSSQICLLTPGGELLERRIQTTRDSFAAALGSRPRTRILIEASTESEWAARCLEELGHEVIVADPNYAPMYAQRTRKVKTDRRDARALAEACRLGAYRRAHRTSDAQQHVRAQVAVREVLVQTRCKYVLLAGALLRRQGLRWASGGPETFPARVGRLSLSETLQGEIAPLLAMVKILTTQIQEADHRLVCLIESDPRAQRLCTVPGVGPVTAATFVATLDQVERFGGAHQVEAYLGLVPRELSSGEKQCRGRITKAGNGRARWLLVEAAWCILRYKKPETRALRRWAERIALRRGKSRAAVALARRLAGILFAMLRDGTTYQPEKLGVGVERKTLA

SEQ ID NO: 160268 - protein, 318 aa, unidentified
MLIHYIDIAKRNFVIAVSSLSKTKTETNNPKGIAHTIEYLKKHKVALVVTESTGGLEIPAAKAIRRAGIAVIIANPRQTHQFAQSQPLTKTDAKDAKMPAFFAQMTAQKEDSQTMPYQPPTEAEEVLEALVNRRNQPADMRTAEKNRLHQVHETQVGSVKQLIAHFDRLIDELDKQIDDHTHTHFDGKAQVAEQIKGIGSITTATLMVMLPELGRLSHKRIAGLAGIAPHPRESGETKFKSRCFGGRSAVRKALYMATVAATRFEPLIRDFYQRLLSEGKPYKVAVTACMRKLLETFAKFLSLPTAETQTQVFVYFRS

SEQ ID NO: 160269 - protein, 468 aa, unidentified
MGTCHVKKAAARGQAKDGLFEVINPNAAGIDVGASEMWVCVPGENDRERVRSFGTDTVELEAIAAWLLQRGVRTVAMESTGVYWIPLYQVLENHGLEACLVNARHAKNVPGRRKTDRLDCQWLQKLHACGLLSASFRPPPEICRLRTCMRHRATLVQEQAAQIQRMQKAMREMNVQLDAAVSDVTGVTGMRIMDAIVAGEHDPATLAAMADPRVRRSPEQIARCLRGDYRPEHLFVLRQALAAYRFFLEQIRACDEEVERYTVEMEQAAGRADATLPAAADDRRKRKRGNVPEYDVRTHLYRLTGVDLTSVPGIGELSALGLISETGVDMTCWATGRRFASWLDLCSSPKVSGGRVIGQGRRHAANRAAQIFRQSASSLKNSQCWLGSFYRRMRVRIGAAAAVKATAHKLSLIYWHVLSTRTEYRDIDVSQYEERLRERTIRNLKRRARQLGMDLVPAEDPSEAVPMT

SEQ ID NO: 160270 - protein, 481 aa, unidentified
MSRRKMSTFERLQRGHKLSQRERKQLERQLRAEDPGWEIVHRNVAGIDVGNESHFVCVDPQRATPSVREFGSWTAALKETVEWLKSCGVQRVVMQTTGVYWIPLRDVLEQAGLEVAVVNARTTKNLPGRKSDVQECQWLRKLDIYGLLRASFQVPETIRAIRTIWRLRERWVQEAGRAIQQMQKALILMNVQLANAISDISGKTGMAILRAILSGERNPWVLAKLRDERIQASEEEIAHSLQGNWREDLLFELQQVMAAYDFQQQQIKDCDRELQKYMNLQPTRAGVGEGMPETEKAKPRRKQSRARKPRKNQPDFALEAELKRVLGADLTVIDGVKLMTIQTLYSELGADLSAFPTEQHFTSWLMLAPKREVSGGKLIKHSNLRGRNRVANALRMAAESLKESDSYLGARYRSLRGRLGAVKAVKAMARYLACLIYRMLTKGQAFVDRGAACYEQKRRERELSHLQRKAATMGLQLVPTK

SEQ ID NO: 160271 - protein, 341 aa, unidentified
MNIKRIGIDLAKQVFQIHGVDGQEKVVLRKQLRRAQLLDYFKKLPPCLIGMEACGSAHYWARELQKLGHTVKLMAPQFVKPYVKSNKNDANDAEAICEAVARPTMRFVAIKSIAQQDIQAVHRIRSELVQQRTAKVNQIRGLLAEYGTVVGRRIDVLEHALPLILEDAENGLTADFRVLLEGLQQDLATLNGRVDDLDKTIKSLATSNTDAKRLQQIPGIGPIIATALICAIGDGKQFKRGRDMAAWLGLTPRQHSSGGKDRLLGISKHGDAYLRTLLIHGARSVLKVASQKDDPRSRWLQNLCSRRNKNIAAVALANKNARIAWALLSKKTDFLPEGEPV

SEQ ID NO: 160272 - protein, 320 aa, unidentified
MSASSVVVGIDVAKAHVDVSVLGGKLDAQRFDNQAEGHSALTAALKPLDVALVVMEATGGYEAELACVLQAAGLPVAVVNPRQARDFAKSMGRLAKTDAVDARMLAEFAAVLLRREDLERFLRPLADAQQQWLAALVTRRHQLLTMLHSERQRLQITPKGLHPSIEAIVAAIKAQLDDIEGQMVVHVREHFAQLDALLQSASGIGPVASATLIAELPELGRLNRRGICALVGVAPMANDSGSSKGRRRIQGGRFDVRRVLYMAALTASRRNPVIKAFYQRLIAAGKCPKVALVACMRKLLTILNAMVRTHQPWNNSLHGA

SEQ ID NO: 160273 - protein, 390 aa, unidentified
MPEDAFRPAQAAIRTELGAIFVSLELSRRAWLITSLSPGGGEKMSKHSVPASDVSALLRRFAEIRRKATARTGRDFPIIVIQEAGLDGFWIHRVLQSEGVESHVVDAASILTSRRRRRAKTDRIDGETLVRTLMAFKRGEPRVCSMARAPTPQEEDRRRVCRERRTLVGERVRHVNRIKGLLFAQGVFGYEPLRKGRRERLEDLRTGDGRPLPVHLKAQIIRELDRLEVLLKQLKAVEAERDALLKPATDKAASPAAMLARLKGIGPETAAVLWSEGLFRPFDNRRQVAAYAGLAPTPWQSGSIDHEQGVSKAGNPRLRTTMVELAWLWLQNQPTSALSLWFHERVRLGGRIRKTLIVALARKLLVALWRYTTAGVVIEGAVMKAAPATI

SEQ ID NO: 160274 - protein, 345 aa, unidentified
MEQISRIGMDTSKHFFQLHGVNAAEKVVLRKKLRRKEMVAFFKALAPTVIGIEACGASHHWARILRSFGHEVKLIAPQLVKPYVKRGKNDTADAEALCEAMSRPTMRFVPVKTAEQQAALMMVALRDRLIRNRTQLSNAIRGYAAEFGFTAARGMAHIDPLLDRIQADENVPVLARELFAAQAEEYAQLQAQIAEVDAKLMAWHKADECSRRLAKIPGVGPIGAALLMMKTPAPEMFRSGRQFAAWIGLTPKDHSTAGKVRLGVITRAGDEALRSVLVVGATAVVQQVRRGGRGSPWIVDLLKRKPPKLAAVALANKMARIAWKLMVTGNSYAAKSAPAALMGAA

SEQ ID NO: 160275 - protein, 435 aa, unidentified
MNCVDDIRLEQFLQLKKEIRGSDKHLIVGIDAAKEKHNAFFGTARGKTLVKNLVFDNTLEGFQKLLAYVERIKVQYSLSKVVFGIEPTANYHKPLSEHLIKCGHLVVLVGGVAVKNNRPLLDGRWDKHDVKDAANVADLISQGKCLFYEYPLMTLRNVRILNALKRRLKKREHGISVCIRNNLLAQYFPELDRHYGPSETLAVVRECLDPSAIAGMEYDTFYRAVAPGRTTLAKDRRVRAIWRTAVDSIGCTMGEASSFEAQVMVDSLKQIRLTIKSVEDKLEDACLEFPEYTYLLSIPGFGPDVSSKVLGAIGNPHRFANGKQVLKMAGLDLCADRSGKKSNSAIPVISKQGKADLRYGLYQAALIASLKNKDFIAYYTNKLKGRAKEKGIGTKMRVKLAAKLLIIAWTLMKKKEFFDPKHLKQEDQDAQKKAA

SEQ ID NO: 160276 - protein, 571 aa, unidentified
MSRPRFELRDAAVGYAARGIPVLPLHYPLPHRNSLQRVPGGPQAVVARAACSCRDPGCGQPAKHPLGSLVPHGVKDATCNRARILAWWTRHPQAKIGLATGHLFDVLDVDGPAGAQAIRTLADAHGLQSSGPLVCTGGGGWHFCEGEQGRCAKRRSRPGLTLGITGVLPSDRSVDQIPRTPPGAPSADGVTSEEPGLGPRRSTVRRLAVGALPANRRAGKDDMASLPAVVRQVTVGVDSHKDVHVAAAVDQVGRVLGTTWVPTTTQGSAQLLRWATRLGQVQRFGIEGTGSFAAGLSRWLQQQGYQVVEVNRPNRQTRRRRGKSDPVDAEAAARAVLAGEATTTPKAANGTVEMLRVLRVARRSAIKARGQAANQLHSLLVTAPDPLRHQLRGLPLARLVQVAAAVRPGPLTDPQAATKFTLRELARRYQFLTAELERLDAQLAALAPKAAPRLLARRGVGAQVAGALLVVAGDNPGRLRSEAAFSMLCGSSPLEASSGKTVRHRLNRGGDREANNALWTIAMTRLSCDERTQRYLARRTAEGKSKREIIRCLKRYIAREIYRDITATVGS

SEQ ID NO: 160277 - protein, 394 aa, unidentified
MRFYTAQHRYYCGIDLHARRMYICVLDAEGKVRVHRNGPATPEHLLATIAAYREDVVVAVECIFTWYWVADLCAQEGIAFVLGHALYMKAIHGGKAKNDKIDAHKIAVLLRGGMLPMAYVYPREMRATRDLLRRRCHFMRKRAELLTHIQNTASQYTLPTFGKKIAYKANRIDVAEQFADPEVRKSIETNLAPLDHYDRLLTDLELHLTRSAKVHDVHAFYRLRSVPGIGKILALVLLYEIHDIHRFPRVQDFVSYCRLVKCAKQSDGKHYGYSGKKIGNAHLKWAFSEAAVLCLRKNPTAQQYVARLAHKHGKAKALTILAHKLARAVYSMLSCAQAFDAHKFFHQTAHREHSLRARVNAGAALEQKAGPRRHGKARPHTDCAEDVMTATLGN

SEQ ID NO: 160278 - protein, 329 aa, unidentified
MDQATTNAWLGIDVAKEKVDSVLLVEQRHGYQVFANTPAGFERLSEWLRQEHVQHVHACLEAPGSYSDALARYLVEQGHTVSVLNPAVLVTYRQSRNTRSKTDKLDAMVLAHYARERQPRAWHPLPAEVLALRSLLAYRSDVQQTLLQVRNRQRSGGLESWVAARLQTQIEQLVKEFKLVEERIWKHLETSTTLSATWSHLQTICGIGQLAAAHVIAQIGEIERFDHPAALVSLAGLAVKQRESGSSLRGRAQMDRHGRGSLRRLLYMCALVAMRWDPHMRAWAQRLKARGKPSKVVLVAVMRKLLHIIYGVWKHASDYDAQLAFPAAV

SEQ ID NO: 160279 - protein, 327 aa, unidentified
MAKRTTICAGIDTGKRKLDVALDGSSEQLQIDNTPEGYKVLLDWLRRHRVKRIGIEASGGYEQAVVAELRRKGIVVVVFQPAQVRAYAKFHLQRAKNDKIDAALIAACTAAVKKIHPPPDARLLPFAEHLTMIDQIGEDIALLKNRLETCRNARIQQVWKDDLARLAKRERIEFKALVAAIREHHDLAERLDLIYSVSGAGLPTAVAILVRMPEIGQLTREQAAALAGLAPYDDDSGKHVGVRHIDGGRERLRRALYTAALPASFRWNPQLITLYKRLTAAGKGHKRALIACARKLLIFVNAVVARGIRWDHQRPPTIAATALPQTG

SEQ ID NO: 160280 - protein, 350 aa, unidentified
MSILALDLGQSKSVFCMFREDTGEYQFGTVNTRSDALRKLLTKHRPAQVVLEVCPIAARVYDLAAELGIRTIVADTTQDAWTWRNVKRKTDRDDALKLLRLAMVGQINPVHIPPAIMRQWRGLLNAREAAVRAQTRCKLRIRALLTTADQQLPRGKGGWTRESLDALRQLSRPLAECPPQELWRGALAMELEQLELLNRHVEAHDRKLQEWAQSDRRVQLVSTIPGVGTVTAATIVAVLDDARRFRTRRQVASYAGLTPRRHQSGQIDHQGRISKRGNAMLRRVLNQAAWVAVRYEPLQRDFYLRLSGGGQKGKRKRAVVAVMHKLLVTAWAILRDERPYQRPPQSAAAA

SEQ ID NO: 160281 - protein, 340 aa, unidentified
MTITTVGIDLAKNVFAVHGVDQNGKTVLVKPKVSRAALPELIASLPPCVIGMEACSGAHYWARLFRQYGHEPRLMAAKFVSPYRMAGKLGKNDAADAQAICEAVRRPHMRFVPVKDESQQAMQCLHRTRQGFIEEKTATYNRLRGLISEFGVIAPQSTDALRHMVSVQKDSLPLQVQQCVDDLLEHVDRIEANITEYDRILSRMAKTDHRSQRLMELKGIGPTTACALVASIGNAHDFKNGRQLAAWLGLTPSQYSSGGKSKLGRITKAGDSYLRTLLVQGARSVLIGAEKRTDSFSRWVCMLVERRGYWRAVVAIAAKNARLCWASLHFGDDFRLYSAS

SEQ ID NO: 160282 - protein, 407 aa, unidentified
MDVVHPKCAGLDVHQQTVVACARVGSGKTVTHAVRTFGSTTPELLALSDWLATHGCTHVAMESTGVYWKPVWHVLDGHFELVLANAMHIRNIPGRKSDVNDATWIADLLAHGLIRSSFVPPEPIQELRDLTRTRKQLVREIAQHTLRIQKTLETANIKLTAVLADITGVSGRAILQALVAGERDPERLATLANERVKASRADLVAALHGRVTGHHRFMLHLHLTQIAALEAAVREVEARLGDALAPFRAALDRLITMPGVSETVARVIVAEIGFNMTRFPTAGHLVSWAGLCPRLHESAGKRLSNRTRSSNPWLKTTLVQAAWAATRKKDGYFRAQFLRLKSRRGPKKAIIAVAASMLTAAYHMLKHGVDYRDLGADHFDRRDKAKLAKRLIARLQDLGVTVEVRAA

SEQ ID NO: 160283 - protein, 347 aa, unidentified
MKFYTKQHTHYCGIDLHARMLYVCILDSQGETVVHKNIKANPEALLRLITPYQDNIVIGVECMFSWYWVADLCREKGIAFILGHALYMRAIHGGKAKNDKIDSHKIATLMRGGMFPEAYVYPSEMRGTRDLMRRRMHLMRKRSELLAHVHNTNSQYNLPEIKKNLRYAFNREGVADRFNDPSVSKSIDLDLNLIDFYDKQLSKVEWHIQQHAVDCDQHSLILLRTVPGIGKILSLVILYEIHTIERFPSVQNFASYSRLIKCKRESAGKSYGTAGAKIGNAYLKWAFSEAAVLFLRKNPDAQEWLKKKTNQHNKARALTILAHKIGRAVYFMLKRHTIFNQEKFLNI

SEQ ID NO: 160284 - protein, 339 aa, unidentified
MKYTPVGVDIAKHLIQVHFIDENTGEVVDKQLRGRDFLTFFSNRESCLIGMEACGGSQHWARELTKLGHKVRLLQARFVKAFVMGNKNDVMDARAIWMAVQQPGKEIAVKTEEQQSVLVLHRTRRQLVKFRTMQINSLHGTLLEFGESIHKGRAAMEREFPEALERMKERLPPYLITVLEDQYNRLSELDSLIDDIEKQLTSVARQNETCKRLLDIPGVGPLIATAAVATMGEASTFKSGREFAAYVGLVPKQTGSGGKIRLLGISKRGDTYLRTLFIHGARAAALLTREPGPWITELKKRRPASVAIVAMANKLARTVWAIAAHGRKYDKNHVSIRPY

SEQ ID NO: 160285 - protein, 448 aa, unidentified
MNKVKTKKEKVKKISQLTVINPNVAGIDVSDTEMMVAYPINSVQLKVRGFGCYTRDLHEIIKHLKANFISSVAMESTGVYWIALFLLLQENGFEVYLVNAKHVKNVTGRKDDESDAEWIQKLHSCGLLRGSFQPDNMTRVLRSMVRHRKVLVRTSSTYINRMQKALELMNIKLHTVISDIDGKTGSRIIEAILAGERNPEILANMRDRRIKASREEIIKSLEGYWTKEHLLELRQCYQLHLIHRQMINELDKEIEKQLAEHVASINEGIFPEIKNVKRKVSGKNKIQFNVTSYLNELLKVDVTEIFGISELSALTIISEVGLDMTKWKTEHHFTSWLGLAPNTKKSADKVISSRIMKKKHYAGQAFRVAASSLYNSKTPLGDFFRRIRTKAGTPKAIVATARKIAIIYFQMVSKKEAFNPKALLEYQQKYKQKKILQLKKKIASLEAA

SEQ ID NO: 160286 - protein, 299 aa, unidentified
MDEVTTIGLDIAKQVFHAHGADASGRRVFSRRITRAKLIEFFAAQPRCTVALEACAGAHHWGRELQRLGPEVRLIPPVYVKPFVKRQKNDAADAEAICEAAQRPTMRFVPVKSEEQQASAAVFRARDLLVRQRTQLLNALRGLLAEHGWVAPKGLFHAGAMMAKIEDPGCALPPSARDVFLVMIGSAKALDERIGLLDREITKRAREDETARRLMTIPGIGPITATALVALAPPPESFRKGRDFAAWVGLTPLQRSTGGKARLGSITRMGERTLRRLLILGSAAVVLHASSPRDRGSSR

SEQ ID NO: 160287 - protein, 318 aa, unidentified
MTDSITHFVGIDVSKDSLDVHILEPRTSFRCSSNQKGRTALLEKLPAPGTCLIVLEATGRCQRPLVADLAAAGHAVAVVNPRQIRDFAKALGILAKTDKIDAQVIARFAERIRPRPMVETHERQTQLNELITRRRQLLEHRTAEFNRRDQSLPKLVRQSLQRSINALSKDLEKLDRAIAELLESDDDWRQRLERLTSVPGVGPVTAATLVAELPELGQLNRKEIAALVGVAPLNRDSGQFRGQRTIWGGRASVRSALYMAALNAKRCNPDLRDFAARLHGSGKKPKVVIVACMRKLLTILNTMMKTQSCWRTRSAVAS

SEQ ID NO: 160288 - protein, 337 aa, unidentified
MTRYVGVDLHRRRSVIVVLDGDGAELWTHRIDNGPLALGLEIEAAGPEPEVVLEATWGWYWAADVIAQAGGRVHLAHPLGIAGFENRRVKNDRVDARLLADLLRMGRLPESWIPPESVRHQRELVRYRRKLSQLRAGLKAQVHAVLGKEGLLPPVNHLWGPGGNVWLDETDMAEAYETRVRSLRRLIKLYDSEIGKLDLRIAAEFKGHVGYEAIQTIPGVGPVLGAIFTAELGDVTRFGSAKRVSSWAGLTPRHRESDSKVHRGSITKQGPPLVRWAAIEAVSKNHGGDPIKQHYHRVAERRGKNKGRVAAARKLLTLVYYGLRDGEIRSLAPPEAA

SEQ ID NO: 160289 - protein, 355 aa, unidentified
MDSKKYIGMDVHKESISIAVRNDVGKIVMECVIETKANIILDFIHGLRGELHVTFEEGTWAAWLYDLLKPHVTELVVCDPRKNASMREGNQSDKIDALRLAELLRLNHLSPVYHGEHGLRRLKELVRSYLTITKDLGRVMTRVKAIYRSWGIPCTGKQVYAPRHRAEWLGKIGEPGVRRRAEFYYQQLDALRTLRQEVRRDLLAESKKHQAWKRLCQIPSIGPIRAAVLLGVLQTPHRFRTKRQLWTYSGFGIETQSSADHRSVNGQLQRVKKPSSIRGLNRNCNHDLKNLFKGAAIVASSKPGPFQEFYTALLSKGIRPEMARLTLARKIATIALMVWKRGASFDAQYLKPQTA

SEQ ID NO: 160290 - protein, 336 aa, unidentified
MCTLPVIVGLDYSDRSVQVCVLNEQGQVVGNRACANDWQAIVQFAQSRGTVVRAAIESCSGAANLADELVVRAGWHVDLAHPGYVARMKQSPDKTDYQDARLLADLERVGYLPRVWLAPEPIRELRRLVRYRQQLIQQRKAVKLRIRALLREQRCRPAATVNAWTRAWLAWAQKEAALSEQGRWILAQHLRELGRVAEDVKEVEKRLTEATADDPEVATLQKQPGIGPVTAWTLRAEIGRFDRFRTGKQLARFCGTSPRNASSGDRVADAGLIQAASPTLRATVIETAHRLIRTDPRWAQMAARLRGRGKPACVVVAAVANRWIRKLYHQMVKAAA

SEQ ID NO: 160291 - protein, 402 aa, unidentified
MAVSKKFTRFCGIDIAKAKHVACVIDRDGASCIRASSFANTAEGYQRLLDRLKDTARASSILIGMEATGHYWYGLHDFLTRCGYAVAVLNPIQTARQISQAIRKCKTDKYDAAHIAQLIRSGNYRPATIPSEKAMTCRQLTRLRYSMLQQQTRIKQLLWSRLHPVWPEYEPLFADPFCKTARAVLRLAAAPQDILQIDQDDFAEMIRSTSRGKLGQLKAQEIRDAAHNSVGMHRGRDGISIGINCLLDQMEALEPVRKKLESQVIHMAETLPQYLFTLPGASPLNIVSLYGEVDPIATFGRPSQLVAFAGLDGAVFQTGQYDAPQRHISKRGSPFLRKTLWQMAYRALQHEGDLRDFWLKKKRENKHQFVAVTAVARKLCHVVWRIMTDQRDYIPEGYNPKS

SEQ ID NO: 160292 - protein, 407 aa, unidentified
MICVGIDVSKRKSTVCFMAPGDKIIRRPFDVKHTKEELQPLVDEIRVQAKYDEIKVVMESTGVYHLSIAYFLQQNGIFVSVVNALKVANFNKAENFRHTKTDSIDSTNIARYGIAYWAKLPQFDLNGDKYFLLKRLCDAYLNFSEERSRILLLLQSQLEQTMPGIFDLFGGFDINSGKDKLLDFLKRYCHIEDIIAKSEAEFVASYREWAKEKGYRSNESKAATIYAQAKNGIPSIPNNPIVRETIMWYVGLLRRADEALMASLTRMEDIAKDLPEYELVGEMGGVGRVTRVALIAQIGDVRRFKDKHSLICFAGLTPSIHESGKFRASQNHIVKKGPARLRKVLYQVMMSLVMHKIPKDDAVYRFIKKKEAEGKYKKVAKVAGMAKFLRIYYGRVMHLYRDLGLAA

SEQ ID NO: 160293 - protein, 388 aa, unidentified
MKNRSDLNQSYAAFDQASTIVSVVELSSKNWLAAATVPGVKRQPRKKLSTNEYELLAQIGRWRAEAVKAGHEIKRIVVAFEAGRDGAWLARFLRDHGIEAYVIHAASIPVPREHKRPKTDRLDTEMLMRALLGWLRGEPRHCRMAQIPTLEEEDAKRPNREHKSLVSAQTSLVNQMKSTLVCLGITNFNIKLVKAGQRLAGLRTPNGEPIPPNTLAGLYRGLERLAVIRKQIKAIEQELRQRLKAKPTHGTNPLVLMLAKIFGHGVETADLLVHEVLTRNLRDHRAVGRYGGLTGSPDESGKTRREQGLAKAGNWRVRHAMLQLAWRWLKFQKGSALAQWYFQRTADGRGVTRKTMIVALARKILIALWRYVTTGELPAGVVLKPVAL

SEQ ID NO: 160294 - protein, 426 aa, unidentified
MHDNRNERINQISEDTLVIGVDIAKCVHYACAVDERGREVKKSFSFRQSRQGFETFYATILKVMESHQKKNVVVGFEPTGHYWMNLSSYLTDRGIRFVLVNPLHVKQTKELDDNLQSKNDPKDARVIAKMIPQGYYSIPRDMTPIEAELRHGSAFRARLKKQGASTQNRIKRWIDLYFPEFISVYKSIGMNASTVLSSYPLPEDLVREDPEKLLENLKNLGGKHFSVKNLTKLLDVAATSIGYQESPEMARAEIQILLTQMKLLEEQLESIEKQLVTLAKQMTDFDLFLSVPGIGENTVVEILSEIGAFSHYKSPRQILKLAGLTLVTNSSAKKEGNKRLSKRGRKRLRSLIYKAIFPILHAIPAFRSLYDYYSEHREHPVAKKEALLILCRKLIQVLHGLSKRGETFNEERMVADISFFGNQKAA

SEQ ID NO: 160295 - protein, 542 aa, unidentified
MAAHTLVPLCPWKSLTSVAAFRFLVARLLLEKGPTRPRRRACVVIANRAEPGQFNLNGEYAMAKRNLSTFERLQLGAALNRKERREVQQRLQATDPGLEIVNRDAAGIDVGNESHYVAVPPGRDAQPVREFGSWTAALEEMAQWLIRCGIRTVAMQSTGVYWIAVHDVLQQHGLDVNLVDARGTRNVPGRKSDVQECQWLMRLHTYGLLRACFLPAPEIHAVRTMWRLRDQHVKDAGRCIQHMQKALIEMNVQLHIVLSDISGMSGQAIIRALLAGQRDPKVLAALRDPRCQASEEEIVHSLHGSWKPDVLFELQQAVDAYDFYHLQMAKCDEQLKQYMVLLPARKTEMCAPPAASDKSKSRGSRKPSKPTKNQPSFNLEAELERILGVNATTINGLGAMTIQTVLAEVGPDLSAWKTEAQWSSWLNLAPKRDVSGGKVVRHVRGQHLNRVGNAFRTAAQTLLRSESYLGARFRYLRVKLGGLKAVKAMARILACQYYRLITKGQVWVDQGAEEFKRRSEQRELATLQRKARQHGMQLVPTA

SEQ ID NO: 160296 - protein, 416 aa, unidentified
MNKKGAITFEQIVERGCGIDVHKKVLVATIRGTGIQETTKSYDAFTDSIENLRDWLKKNKVTHVAMESTGVYWKPIYNILEEDFEIILVNARHIKNVPGKKTDKKDSKWIAKLLLSGLLKGSFIPAKPIRELRDLTRYRRKIVGQVASEKNRLQKILEDANIKLSSVVSDMSGATATKIINAMLAGQEDIKELVKFRHGKMQSSIEDLALSLKGHLTEHHKFMLSTIKESINEKVLLIEKLDERIEKQLKENELELDSELLQSIPGVGKNAAAGILAEIGNNMGQFPNERHLASWAGMSPGNNESAGKKKSSRTTHGDIFLKILLVQCGWAATRTKHTYLRSKYDSLVGRRGKKRALIAVGHKILIATYFILRDKVAYKELGEEFLQDKKKDKQIKYYLNQLKSLGFELDINRKVA

SEQ ID NO: 160297 - protein, 314 aa, unidentified
METSAQPVFVGIDVSKNKLDVALWPSGEGFAVERNANGLNSLCAKLAALNPVTIALEATGGFETVVAAALAAASLPVAVVNPAQVRAFAQALGKRAKTDPLDAAVIARFAEAARPAIRPLADAETQLLADLIARRRQIVDMIVAEKQRLGRAPAKRLKKSIERLLKALEKELSNLNGDIDTAVRASPLWRANEELLTSVPGVGPTTARTLIAELPELGTLTRKEIAALAGLCPFTRQSGQWRGKSFIQGGRASVRAALFMAAMVAARFNPILKTFYDRLAAAGKPKKAALIAVARKLLTILNAILRDQKPWQIA

SEQ ID NO: 160298 - protein, 438 aa, unidentified
MKRILRPNAAGIDVASEIHYVAVPFERSSTPVRSFGSFTTDIHEMAKWLKDCEVDTVAMESTGIYWVQLYLILEEYGIEVFLVNARHIKNVSGRKSDVQDCQWIQELHSYGLLNASFQPDSITRELRTYLRHRKSLTEGYAQQIQRMQKAFEQMNIKLHNVLSDICGKSGQLIIQAIISGELEPKKLVLNVDSKVKASEEEIIKSLTGNWREEHLFELKQAYELYLVFKEKIKACDNQIKHTLSKMDQHSEKGEVKEVKRRVYSKNRLAFNGTQYLYNILGIDITKVFGISELTALEIISETGIDMSKWKTRKHFTSWLALAPNNRISGGKLLKPKKTKKRNKAGQAFLMAAFALQRSNNWIGQYYRRIRARSGPLVATKATARKLAIIFYEMVKNKVEFIPIPMTEYEDNYKKYKYKYLERQASAIGYKLISMSSVS

SEQ ID NO: 160299 - protein, 440 aa, unidentified
MINKDAAGIDIGSGEHWVAVPEDRDEEPVRCFGCFTADLQAMARWLKQCGVTTVAMESTGVYWIPCYQILEEHGFQVKLVNARHVKNVPGRKSDVSDCQWLQRLHTYGLLSGSFRPDDQICVLRSYWRHRANLVRYASDHIQHMQKALTQMNLHLHKVLSNVTGVTGMNIIRAIISGERDPEKLARMRERGVKNTPEAIAKALEGDYRQEHLFALKQAVELYDFYHRQIEASDREIERYLHTFEAKVDPVQNPLPKQKRKKEMRYQSFVDLRTELYRVSGIDFTQIPGLDVVTVQTILSEIGLDPGKFPTEKRFVSWLGLCPNNRITGGQVKSTKTRKTANRAANAFRMAAQSLANSNTGLGGFYRRIRARLGAPKAITATAHKLARIFHRMWTTGQSYTDLGSDYYENRYKERVLRNITRRARELGYDAVLQPIEQRVA

SEQ ID NO: 160300 - protein, 381 aa, unidentified
MPTMPKRAALSNPGMFDLGVSHLDAAGVPPLVFGGVDTHADTHTVAAVSHLGVMLGNASFPATAGGYRQLYCWLAAHGSLIRVGVEGTGSYGAGLAAALTERGVELVEVNRPNRVIRRARGKSDPIDAEAAARAALNGVATAVPKARTSVVEAIRVILVARRGAVQARTAAINTLHHMIITAPRQLRDQLQPLTRRHQIAVCSGLRSTDITSPTRATKLALRRLACRINHLTAEISDATKDITALVRGHAPQLLAEVGVGALSAAQLLITAGDNPDRMTSPAGFAALCGTTPIPVSSGKTNRHRLNRGGDRQANCALHTIINSRLRYHPETQAYAAKRTAARKTERDIRRSLKRYLARRLFTLILNPNQAAEISPRPLDRP

SEQ ID NO: 160301 - protein, 355 aa, unidentified
MSQEKYIGMDVHQATISVAVMDDRGKLIMECILETKAGTILEFIRGLQGSLSVTFEEGTSAAWLHDLLKPHVTNLVVCDPRKNALLKDGSKSDRIDARKLADLLRLNRLNPVYHGEHGVRTLKELGRSYLTITKDLTRVMNRIKALYRSWAIPCSGTTVYAPRHRAEWLAKISEPGVRLRAERFYQQLDGLQPVRQQARRDLLVESRKHKAVKLLRQIPSIGPIRAALLVALLQTPHRFRTKRQLWAYSGFALETHDSGEYRCVRGKLRRNRERMTVRGLSNNHSPDLKNLFKGAAISASSRPGPLYDFYAALLEKGMRPTMARLTLARKIAAITLTIWKKGVDFDAKELHRQAA

SEQ ID NO: 160302 - protein, 330 aa, unidentified
MASIPVYVGLDYHDSVVQVCVLDQGGRMLCNQPSRNDCGEIVQRVAPFGTVVRAAVEACTGSANLAEELVQRGWSVDLAHPGYVARMKQNPDKHDFGDARLLADLERVGYLPRVWLAPEETRELRRLVRYRQGLVDQRRNTRLRIRALLREHRLRRPGRAWTQSWMYWVQTVALPEQSRWVLDQYLVSLVALGRQIAQVERRLRRVTGQDPLVQLLLQQSGIGPVTAWTLRAEIGRFDRFRSGKQLARFCGLTPRNASSGQRQADAGLIRAGNPQLRAVLIEAAQRLRRTDPRWQAFSDRLMAAGKSGSVTTAAVANRWVRWLYHQVVAA

SEQ ID NO: 160303 - protein, 409 aa, unidentified
MEVLHERCCGIDVHKRMLVACLLTPGERGRPQREIRTFGTMTGELEEMAAWLQQAGCTAVAMESTGSYWKPVYNILEGAVELVVVNAQHLKLVPGRKTDVKDAEWIAELLQHGLLRGSFIPGRAERELRELNRYRTSLTRERAAEINRIQKVLEGANIKLASVATDVLGVSGRAMLQAMIEGVRDPGVLAEFARGRLREKRHVLEAALRGHLREHQRFMLDVQLRHVDELDAALQRVSDAIAERLRPFASALNRLQTIPGVGLRTAQTILVEVGPDMTRFPSAGHLASWAGVCPGHHESAGKRRSGKTRHGSPWLRASLVEAARASGRAKGYLGEYYHRLAARRGTKRAAIAGAHTILIIAYHLLLNDEAVYEDLGAQYFDTRRQQRTTNRLVQRLKGMGYEVTLTSAA

SEQ ID NO: 160304 - protein, 316 aa, unidentified
MDHNTVVYGVDVSKAKLVVAQDDVQTLAEVDNRPESIAAWLAGLPKGAVVAMEATGIYHRLLAHLAHAAGMRVYVLNPQTLKHYAWAIGQRGKTDNCDARMIARYVAHEQAKLRRWQPPARAADRLSQLLERRHTVVGVRQTLSQSLSGLPILKAARQSLLASLERTVGRLDLLIRHEMARLPGAAALYERLKSIVGIGPVVAAQLVAVFSTLSFARAGAFIAYTGLDPRPNDSGGHRGRRSLSKHGPPLLRCQLYNAGMAAANSKVFKPVYKQLLERGLQTTEAIVILARKLARIAFALYKSGEVFDAQKHFKIA

SEQ ID NO: 160305 - protein, 359 aa, unidentified
MPSITPDHAVLEVVGGVDTHLDTHTAAVIDQLARVLGTEQFPATPAGYQALLAWMRERGRLSRVGIEGTGAYGIGLTRLLRDEHLEVIEVDRPNRKTRRSQGKSDPLDAIAAAKAALTGERTGIAKQRDGRVEAVRNLRVARRSAMNQRADAQRQIKTLIVTAPDELRARLRDLNGKQLIAACTNLRPDRSDATTPATAAKIALRSLARRHQHLSAEITDLDELLEPLVAAINPTLLAAHGVGTDIAGQLLVTAGENHQRITSEAAFAMLCGVAPLPASSGKTTRHRLNRGGDRQANAALYRVVLCRLRWDPNTRAYTERRTKEGLSKKEIMRCLKRYVARELYQLITTNQPQSNAGHP

SEQ ID NO: 160306 - protein, 346 aa, unidentified
MERYVGLDVSLKSTAICIVDAKGKIVREGAVATDPEAIATFIALHAPEPVRIGLETGPTSTWLWTELKALGLPVICIDARHVKAALTMQINKSDRNDATGIARIMQTGWYKEVRVKRLESHAIKALLTSRALLIAIKRDLENQIRGLLKNFGLVIGRAKMNTFTLRAGDLLENRPELAAAIEPLLQAREAIGRQIIDLDCKVRRLAQASDPVRRLMAAPGVGPITALCFLATIDEPMRFARSRSVGAYLGLTTRRYASGESDWTGRISTCGDAMLRSYLYEAANVLLARTARWSTLKAWGICLAKRSGLRKAKVAVARKLAVILHRMWVDGTDFNWSSKEIAPQIA

SEQ ID NO: 160307 - protein, 356 aa, unidentified
MTKITASFENETVYVGLDIHKRSWNAAIYLGDQYIRNIHQPPAPQALHHYLHHNYPQAKYVCAYECGKFGYWIWRAFKHLGVECLVVNPADIPGTQKDEVYKTDCRDARGIAQALCSGQLKTIYVPCEDQEADRQLVRQRKKIWSDLVRCKNRIKGFLDYKGIVVPTQYDNANWSRNFLTWMCKLEFAHSSDRITLNYLISEMELLRKELLSISNAIRKLMRSKKYKKLYYLLRSVTGIGPLTAASLITEIGDMKRFKNFYHLNSFIGLLPMEHSSGERELKGRITVRKHRQIRSDLVECAWTAKRTDPALALYYSEQIKRGKNGKAAIVKVARKLLSRIRYVWLSGEPYQTAVVK

SEQ ID NO: 160308 - protein, 334 aa, unidentified
MSNVTTCGIDLAKNVFSIHAVDGHGVVVLRKTVPRARLAAVVAQLPACVIGLEACSGAHEWARRFAQHGHTVKLMAPKFVAPYRRSGKNDSNDAEAICEAVSRPSMRFVPVKSVEQQAMLTLHRVRLGFVEERTATINRIRGLLAEFGVVLPQRVVEVRRGAVATLDQLPSLAQRALRDLLAHVRVLDERIGEYERELEQHARHDERAKRIQKLSGVGPISASAIVSSVAEAHEFRNGRQFAAWLGLTPKQYSTGGRTRLGRITAHGDPYLRTLLIMGARSMLQTALKRTDRLARWALGVRARRGYHRACVAIAAKHARIIWAMLAKNESLQLA

SEQ ID NO: 160309 - protein, 363 aa, unidentified
MKKLTRRPTRFKGITVGLDVHQQFVVYQVLDRKGDDEAGGRFVADHTGLEDLLTLVGRRKVQYVLEASSCFLWLYDALAERVGTENVHVAQPHRVRPIAASLEKNDANDAWWLAYLCFEGRLPEAYVPQGAIRELRIATRELRSAVNRRADLIRRLRSHLVQMGLRLKTKNLHTEEGRAAAWSRLELLEGMRRVAVERILRSVEAGDEEVEGWRRLADELCKGLPLVQTLSKEIDGLGPVTASIIYAELGDPRRFHSAKAFAKATGLVPGLRESAGRRAPIGISRAGSASARWAFTRAVIACMRCKGGAGRNVKYWVLRRSGSRPKRKVIVAAARKMAEGVWRLFALGEEFDLARAFPGKTAA

SEQ ID NO: 160310 - protein, 362 aa, unidentified
MGPNQEAGMGKRITKASGLTIGLDLGDRFTEGRVLDASGEVVEGFRVRTTQPALSSRLAAYPPSRVVLEVGTHSPWVSRAVAAQGHEAIVANPRRVRLIAENDAKSDGVDAELLARLGRVDVSLLRPIVHRGEQAQRDRILIQARDGFVRARTQLVNQVRGFAKALGTRLPASSTEAFPKRVRAAAPEDLFPGLETLLATIERLTRTIREMDVEIERLCAERYPETALLRQVPGVGAITALHYVLTLEDPARFQKSRSVGAYVGLRPRQRDSGEQRPQLRITKAGDRLLRSLLVRCAHYILGPFGPDTDLRRAGLRMCERGGGAGKKRAIVATARRLAVLLHRLWVTGEVYEPLRAEASQAA

SEQ ID NO: 160311 - protein, 303 aa, unidentified
MACFNELDKPIKFSNSNVGLTQFFNHLQTNGCLKNETVIGVESTGAYSLPLAIIGARKNYVVKIINPIVTKSYLGSSIRKVKTDKADARVIRSCLIEGAGAEFKDAAEEVIFKNLIRQRYFLVKLKAELILKQQDITLKEECLKLPISSINTELKEIIVKKIIYLEQQLAACLPDQQILLQSIPGVGKITAMTFATEIGDISKFSSPKKLVGFVGLDSKIRQSGTSLNIKGHISKRGNRLIRKTLYVAALTAIQRPNLFRDFYEKKLSEGKAKNVCIVAVMRKMIHVIYAVLKRQSPFVEKGA

SEQ ID NO: 160312 - protein, 344 aa, unidentified
MVTTIGIDPHKATHTAVAIDETEQVLGELTVPADRYQTPRLMEWASHLDGDGRVWAVEAAGGLGHLLSQQLITHGEQVVDVPAVLASRVRVLGSGRSDKNDPNDARSVAIAALRQPGLARVRREDQAQVLRMLAKRHLELTSLRTQAACRLHAVLMQLRPGGIPKRLSTNKASRVLQGIRTLDPVGEQRRAIARTHLADIRRLDRDIKANKALIRQAVAATDTTVTDVYGVGPIVAAFLIGYTGDPTRFATADHYAAYNGTAPIEVSSGGKTRHRLSMRGNRTLNHAIHMAAVTQIRFNTPGRVYYDRKIAEGKTKKEALRALKRRISNAVYRQLATDQQRATR

SEQ ID NO: 160313 - protein, 409 aa, unidentified
MNVLYPRCAGLDVHKDSVVACVRLHDEGGTPKHVVETFGTTTTALLGLSDWLTGHGCTHVAMEATGVYWKPVWHLLEDSFALVLANAMHIRNVPGRKTDVNDATWIADLLAHGLIRASFVPPTAIQELRTLMRTRKQLVREKVQHVQRIQKTLEDANLKIASVISDVIGPSGRALLQALIAGETRAEALLAVTTGRLQAPRARLLEALSGRVRPQHRFLLRLHLDQIQSLEHAIETVDAEVGSTLEPFRERAAHLRTMPGISDVLAQVIVSEIGVDMSRFPTAAHLVSWAGLCPRNDESAGKRRSTRLRPGAPWLKTAMVQAAWAAARAKTGYPRAQFLRLRSRRGPKKAAVAVAASMLTAAYYIIRDNVDYRDLGADHFDRTDRTRTARRLVRKLGDLGFHVELTEAA

SEQ ID NO: 160314 - protein, 351 aa, unidentified
MIWIGVDAHQRLHQAIAVGAQGETLGERTITNDEASWVALLGWAQALGPQRIWAVEGAWYLGRGLAQYLARSGERVHEVSGRWTAQRRRGMRRPGKSDRLDARAVAQLLREEADTLPRVYAEEDPLAAVQLWSRLQAETTEDMTRLINRLHALLLFCEPAYQTRLPALTTKAGTQALRAYQAPGQGELARERERAVRALAEQLALLWTQDRELRSKLERASTARFSPLRRIEGVGPLIACGIVAETGRPRPGFREQHFAAGAGVAPLEASSAGGTRHRLNRHGNRRLNMFLHQIVLTQARTYEPARAYLGRRRAEGLTAREARRALKRHVARRVFNALSECFAMPVEAVAA

SEQ ID NO: 160315 - protein, 364 aa, unidentified
MDVHTTNYTLCCYSMEDDRFFAEVQVEPDAKNILKYLARIEKQQSRDCRIVCGYEAGCLGYSLYHQLHAHGIDCVILAPTTMMTKPGKRIKTDRRDARLISKCLAFHTYSPVYIPTEVDNAVKEYIRMRDDANSALARVKQQIIAFCIRHGKIHDGKSYWTNKHLEWLSSLDLGNKILSEVLQEYLIRYYQLREQVDMYDMRINELAQAEPYRQKVEKLGCFRGIAAHTALSFCVEVGDFRRFATAQQFASYLGLVPGECSSGDKQQYTGITKAGNSHLRKLLVETAQVFGRSATKSGKSVALKERQAKCDSLTVAYADKANARLKKKYFKIAMRSKVNIAKTAVAREMACFIWGMMTDNISCA

SEQ ID NO: 160316 - protein, 402 aa, unidentified
MNAVGIDVSKGKSMVAIMRPFGEIVSTPFEIKHTSSDINSLVKLIKSIEGESRIVMEHTGRYYEVLAHQLSEANLFVSAINPKLIKDFDNDSLRKVKTDKADSVKIARYALDKWQNLKQYSVMDELRNQLKTMNRQFGFYMKHKTAMKNNLIGILDQTYPGVNTYFDSPARSDGSQKWVDFASTYWHVDCVRKMSINAFIDHYENWCKRKKYNFSQSKAEEIYGKAKELVPVLPKDDITKLIIKQAVDQLNSASITVESLRTLMNETASKLPEYPVVMAMKGVGTSLGPQLMAEIGDVSRFTHKGAITAFAGVDPGVNESGSYEQKSVPTSKRGSSDLRKTLFQVMDVLIKTHPQDDPVYQFLDKKRAQKKPYYVYMTAGANKFLRIYYGRVKEYLASLPES

SEQ ID NO: 160317 - protein, 449 aa, unidentified
MSRPQVIDDREHERIYDKVAAVDVAKDSGMVCTRTPHPSRPGARRSTIWTVQARKNAIAVLGRKLARDGIEIVTLESTSDYWRIWFFVLEACGLAVQLVSASQARNLPGRPKTDKLDAQWLARLTEMGLLRASFVPPRAIRDLRDYTRARTRLVQERTRCWQRLEKLLEGALIKLSAVASTLATVSAQDMIRAMIAGQRDPRVLAGLARTRMKARHDDLVEALDGMFDDHHGQLAGLLLDRIAFLDAQISQLTTRIGQAAAAIPAAWGISADGSSGPDAGAGPDAAALPAAARLAEIPGMSEDLARSVIAETGLDMTRFPTAAHLVSWAGLCPAARQSGARIRAGSKGHGNGYLRGYLGQAATGAARTPTFLGERYARIGRRRGKAKAQVAVARSILVIIWHLLADPTARYHDLGPGYHAARLDQDRKIRNHVRQLQALGFDVTITRAA

SEQ ID NO: 160318 - protein, 342 aa, unidentified
MKFYCGIDLSARDCHVCVINEQLKIVVQQKLRNELVKICQLLGPYKAKLKIVVESTFNWYWLIDGLQAEGFDVVLAHTLGLYLITGAKVKTDRRDAYSLAKLLLVGAVPVAYIYPVETRPVRDLLRRRMHLVQVRAGEYGSLRRLLLRQGILSSKQQEIKTATEAELEQWFEHPLVRLHASQELRRIELYSQQIGELEKTILALAQTAPSYELLLQLPGVGQTIALTILYEVGELTRFANVKVFSSYCRVVPGIAQSGNVSRRGRASKQGNHYLKAAFSQAAVHAVRCYPKVRRYYERQLKRHRGRGRQMICYNIIAHKLAQAAFHVLKEQTEYREELLFGR

SEQ ID NO: 160319 - protein, 336 aa, unidentified
MDHESFAVGIDVSKQHLDLDEYPTKNPRRFEYTTEGIEAIRKQLQQRTPLLIVIEATGGLEQLLVAELVAAKLPLVVINPRPARDFAKSTGQLAKTDAIDARILAHFGFAVRPPLRPLPDENALELQEFLARRRQLIHMRTAELNRQQQTRNAKVKASVQTVLETLELQLKDIDRELDQRLKDSPVWHQTDELLRSTKGVGPQTARTLIAELPELGQLSRQKIAMLVGVAPINRDSGNFRGKQTIWGGRASVRSALYMATLSAIRFNPVLKNFYQQLVLRGKNKKLSLIAAMHKLLTILNALIRNKQHWKDTTINRPQHEHNQQPQPSPHKTPALA

SEQ ID NO: 160320 - protein, 354 aa, unidentified
MKRTTKYVALDVHQATTVASVREESGRVIARSVLPTDSGALTEFVRGMRGTRHVTFEEGTQAQWLYELLAPLVDRVVVCDRRGAPRQGNKGDQVDADQLSELLRRGALRAVYHGSADRATLKELTRTYRNLVEDATRVMLRLKALFRARGIPTVGTAVYHSRHRAHWLARLLEAGARFRAEALYAELDVLRKLRPKAKAAMVMEAQRDPAWPVLRTIPFLGSVRVALLLATMQTPWRFRTKRHLWAYAGLAVVTRSSADYTIVAGQAVRRRRSPKTRGLKRNHNRVLKDVFKCAATAATARPGPLQAFYRSVVARGTREELARLTLTRKLAALTLRLWKKGERYDPTKLTTPAR

SEQ ID NO: 160321 - protein, 345 aa, unidentified
MPIVGGLDIHRKQITFDYLDTATGEVKRGQIAPADRKHVRAWLARFAGRGEVAFAIEGCTGWRYIAEELAAGGLEAHLGEPADTAAARGRKRHAKTDKTDARHLRTLLAEGRLPECWIPPEQILEYRALLETYHDLRAEHTAWVQRIHAVFFHQGAPRLGEGVLRTEQGRAGLRAAAAAHLSPAGQLQVATALDMLAAVEARLGPLRRQLLDAARHLVGAKVLAARLYGAGPITALALTCWLGGKDRFSSSRKAVRFTGLDVTVHSSDRKGPPGRLSRQGPPVLRWAVYEAGKTHGRTSAPDHGYYATVKDRKNGKRAALSEARKIVRQACHILAELGDDALTTT

SEQ ID NO: 160322 - protein, 480 aa, unidentified
MAKRKESTFERLQKGQQLNRRERRELANRLSSADPGLEVVNRHAAGIDIGNESHYVAVPTGRDEQPVREFGSWTADLERMAQWLQACGIETVVMQSTGVYWMAVYDVLQSRGLQVHLVDARGTKNLPGRKSDVQECQWLLKLHTYGLLRSCFLPPEPIRQLRTVWRLRDQHVKEAGRAVQHMQRALTEMNVQLHNVISDLAGVTGQAMVRAILKGERDPRTLAGLRDRRIQAGEKELVESLRGNWKEEVLFELQQAVEAYDFHQAQMAQCDVRLQEYLTALPSREAAPAEAPPEAPVPSGPSRKPRKPKGNQPAFELQPHLQRILGVDATTIDGIDVMTVQTVLAEVGPDLSAWKSERHWSSWLNLAPKRDISGGRVIRHTREHRTNRVGNAFRMAAQSLLRSTSYLGARFRYLRAKLGGIKAVKAMARHLACLFYRLVTRGQTWVDRGAAEFERRRQERELAMLQRKARDFGMTLVAAA

SEQ ID NO: 160323 - protein, 359 aa, unidentified
MQTQRRELNFKGQNVFIGIDVHLKSWTVSIYTEKLFHKKFNQPPSAKVLHDYLERNFPNATYYSVYEAGFSGFWAHYELMKLGINNIVVNAADVPTSQKEKMHKDDKVDSMKLGRSLRNGELNAIYIPQLATLNERSLVRFRASVVKDMTRLKLQTKSFLYFYGLNYPPQFANRNTHWSNRFMKWLKDDVKLSYPAGQEAFNLLIRQAEEQRALLLDATRKVRDLSRTEVYAHNMKLLRIIPGIGPITAITFLTEIVDVKRFKDTDHIASFVGLVPGRHSSGEKDKNTEMTFRGHDFIKRTLIESAWIAARYDPALNLAYHKYVQRMEPNQAIIRIARKLLNRIYFTLKYQREYVTGIV

SEQ ID NO: 160324 - protein, 354 aa, unidentified
MEFAQIDSQYYCGVDLHSNSMYVTVMDKFGKILYRRNLRNDFHLFKTKMAPFLPDLAVGVESTYNWYWLADGCHQANIPFYLGHALYMKAITGGKKKNDKIDSRTLADLMRGNLFPTAYPYPKQMRSTRDLLRRRNYFVVLRAAANSHIQTIFHQLATVDIQGADVKKKNTRRTIIEKIDDPQLQLSVESDLDLMDALDPIIKQLERRIRAQAKQHDRKLFAILQTTPGIGDILALTILYEIHKIDRFPSAKNFSSYCRTVRCERSSNGKAKGGGNQKIGNPYLKWAMDQIIVRAQTKNPLIRSYYQLLKSKHGKRKARAIIGHKFAVAIYYMLKNGQGFDEKKFIQPALKKKK

SEQ ID NO: 160325 - protein, 347 aa, unidentified
MNFYTQQHKHYCGIDLHARARYVCILDEQGTKLVHKNLPTTPEAFLRLIAPYREDLVVGVECMFTWYWLADLCSQEGIAFVLGHALYMKAIHGGKAKNDKIEAPKIAVLLRGGMFPQAYVYPSEMRATRDLLRRRCHLARKRAELLAHIHNPNSQYNLPEIGKRLANKSNREDVAEHFPDPSVRKAIEVDVALIDQYDQLLGEVELYLTRSAKAHDVQPFARLQSVPGIGQILARVILSEIQDIARFPRVQDFVSYCRLVKCAKESNGKRFGTSGKKIGNVHLRWAFAEAAVLFIRQSQPGKEYFAKLEHKHGKAKALTVLAHKLGRAVYYMLSREQAFDLKRFVTA

SEQ ID NO: 160326 - protein, 365 aa, unidentified
MKEEGKRRFVGIDLGKREYTMAIIGKKGKVSIHQGKTGIQGRQGLYRLLERSDRIALEAGNLAFIIAREIEKQVGSEVKVLNSAKLPFIWDAPTKTDKEDAMKLAHLVEERRDEKLPIVPLPSEKEMERREIVASYGREVRDRTKMINRLHSLFLKQGQTTVVKKNLAVAQRRHEAVQILSGVEREEAEYILQHLDLAEKRIKELKGKIEEEARADEDMKHLQTIAGVGPIVAYAYVAHVGDGSRFSKGAQVSNYLGFVPRLYYSGTIQRHGHIRKRGNGYLRCLLVQAAWSMVRCRKGGCLKERFIYLTKIQGRSKKKTIVSIGRRMAELMYAVLRDKTEYEARPWKGPAPNITAEMAEKAMCA

SEQ ID NO: 160327 - protein, 343 aa, unidentified
MQVSTIGLDLAKNVFQAHGVSAEGKVVLKKQLRRGQVLSTFAKLPPCLVGMEACAGAHYWARELRKLGHDVRLMPARDVKAYVKRDKTDAADAAAICEAVSRPSMRFVALKTPEQQGRLMQHRVRDLLLRQRTQTINALRAHMAELGLVAATGRQGLGLLLAILADAKDERLPQDARASLKLLASQITALQAQIDSLDKRLHAQHRQCPASRRLETIPGIGVIGATALAATITDPKAFKSGRDLAAFIGLVPRNNSSGGKQRLGPISKQGDRYLRRILVVGAHSILKQARTRPDKHPWLARLMARKPGKLAAVALANKTARIAWAVLARGESYRAPTAPAAAG

SEQ ID NO: 160328 - protein, 344 aa, unidentified
MITIGIDPHKSSHTAVALDGGGRVLGELRCPANQATLVRLLQWAERWPERIWAVEGAAGLGHLLAQQLVASEEMVLDVPATLAARARLLAPGHGRKTDGIDATSVARVAQSQPVLRRVGPEDHSAVLRLLSDRRDELTGERRRVVNRLHRLLRDLHPGGAPTGLSTKAAGELLNHLRPATAVDLERKVMARALVADLRRIDRALVENRARCAHAVAVSGTTLTAIFGISEVLAAKILGHVGDIGRFSSADCFASYSGTAPIEVSSGAVTRHRLSRNGNRALNNALHLAARVQTMHPGPGRDHYERKLAEHKSSREALRSLKRQLAKVVYRHLVADQVRRLALAS

SEQ ID NO: 160329 - protein, 337 aa, unidentified
MRKASTVKVFKDCLGIGIDVSKGELVVVGLTTGEPYIKRVNNRLTSIRAFVRALSKAGYGGQIICESTGHYHLKLALACHELGMEIIVLNPLQSSKHSKAKVRKTKTDAEDGLMLATMCITEPKLPKPTQLTASKALIQLKMGQLASIEKQLQKSQSSLNQYEETYAELGLELSELQVSLRAHHRSFKRLQKQLQGELEDLLIDNMADQKSYIRLCRLPGYSNVVSGLVGQLDRQVKGASSWVAYAGLDISVRESGTWKGRGKLTKRGNAYLRKRLFQAAWGACMNYDYVRAYYDMLKAQGRNHTEANCMISRKLLKIAYQVVVNEKEYDPKIAFSN

SEQ ID NO: 160330 - protein, 311 aa, unidentified
MTELTIGVDISKDHLDAACFTSGRQARFANDAAGLKALRHWIGPVQRVARLVYEATGRYHARLEQALAAWPLVKVDPLRARRFAEASGTRAKTDAVDARMLARMGFQLALPPDPPVAPGTRELKALQTARDGLVRDRTALIQRETHAALPLLRRLAARALRLVDAQIAEVEAAIAQRIAADPIRARRQEILVSIPGVGPQLSALLVVGMPELGAASAKEIAALAGVAPTTRQSGQWTGKAWISGGRADVRRGLFMPTLNAVRHNPDIRRFYGRLVAAGKPKKLALVAAMRKLLILANVLITQDRPWEPRPA

SEQ ID NO: 160331 - protein, 395 aa, unidentified
MFIVGIDIAKRSHEAIIIAEDGQVVRKAFSFRNNCTGYNLLLEQVRRLTLVKSQIVFAMESTAHYWLALYARLLKDGYTVMVLNPIRSHSLRELYIRKAKTDARDSLIIADLVRFGRCKASNVPQDKILALRELCRSRAYLVDMAADLKRKLIALLDRIFPEYESLFDSVFSKASIAVLSKYSTPQKVKNANLGKLTDLLMESSNGHFGEWKAHQLKEAACSSFGIDDSGGVYSTLLGMFLEQILSLTAQADSLEKQISIFFQEFNNPLTSIPGVGTVLAATILSEIGDITRFSSADKLLAYAGLDPSVKQSGEFKSNQNRMSKRGSPYLRRAIWLASTVAVHRDPMFQTYYEKKISEGLHYMNVIGHVSRKMTAVIFAVLRDGQPYQPILQSAG

SEQ ID NO: 160332 - protein, 341 aa, unidentified
MDHYAGIDVSLEYSSVCVVDASGKIVREDKVASEPEALIAWFASLGFGLERVGLEAGPLSQWLFAAMREAGLAVELLETRHVRKAFEAMPVKSDRNDARGIAQLMRLGWFRPVHCKSMGAQETRATLTARKLVQSKLRDVENSLRGILRGFGLKVGKTTELGFAGRIRELVAGHPHLETIADALLAVHVVLRNEFKAFEKRVRKMARSDTRTRLLMSTPAVGPIVSLTYASAIDDPGRFKSSKQVGAHFGLTPRKYQSGETDYTGRISKIGDSSVRTALYEAAHIMLTKPVKGCSALKSWAMRIARRAGMSKAKVALARKLAVIMHRMLVDGKPFKAVAAA

SEQ ID NO: 160333 - protein, 341 aa, unidentified
MKPAMNILGIDIAKHVFHAVGMDNTGEIVFRKRLSRHDLIPFMAKLPPVLIGMEACGGAHYWARRFREHGHNVKLMAPQFVKPYVKSNKNDSRDAEAIAEAVTRPTMRFVPIKDVDQQDIQALHRVRERLIGERTALVNEVHGLLHEYGIVIPTGVAKFRQAVIGKLESEKDKLTSLSQEMFWKLIEEFAGLEKQLAYYQEKLEALATTHPECQRLMTIPGVGPLTATALVAAVSDASAFKNGRQFAAWQGLVPRQHSTGGKDRLLGISKRGDSYLRKLLVHGARTTIRWVGRKTDRRSPWIRQLVERRGKNRTAVAVANKNARIVWALLTSHQDYQLATG

SEQ ID NO: 160334 - protein, 386 aa, unidentified
MMLIGIDPHKATHTATAVEPGTNQEVASIRIDATLKEYRRMLTWAARWPQRRWAIENAEGLGRHLASWLLARGEDVVDVPATATARVRQLSRGGGRKNDRIDAAAAACVAAQQGDARPMAAEGAADALAVLDERRINLSQARVRAVNQLHALLRALLAGGAPTDLSAVTASVLLRTVRPSSEAERVRKAVAADLVAEIRSLDTRLKASAKGIAELVEKSGSTLTETVGIGPIVAGRLIARTGRPSRFASSAAYANYVGAAPVEVASANKARHRLSRTGDRQLNSALHTAAITQIRMSGSRGHRYYMSKIAEGKTPREAKRCLKRRLADHVWRVMTSDERRQGASPGGHPGATLKSSATGSTPTASSSDKSLPEPAKRDSTAPQPAS

SEQ ID NO: 160335 - protein, 346 aa, unidentified
MVIIGCDFHSDFQQISLLDTETGEERELTLQHREQARAFYSALPPGAVVGVEACGQTQWFEALLAEQRHVLRMGDPTAIRASMPRRQKTDRRDAEHIRVLLMENRFPEIWVPSPAERDVRQLIVHRHKRVQMRTAVKNQLHALAINQGLRLRWRLWTEAGRKQLESLPLLPYAAQRRQELLRLLQEMDRDLAALDAAVACEAQARPEVVRLMTHPGVGPVTALAFVLTIGPVERFARARQVASYLGLIPAEHSSAGKQRLGHISKQGSPLLRLLLVEAAHVAARHEPELKRCYTRLRHKHAAGVAKVAIARKLAVRLYWMLRNQSNYRPFRVGHMQVSPSHSVVEA

SEQ ID NO: 160336 - protein, 428 aa, unidentified
MNCTQNEKLNQVTPHTLIVGVDIAKFKHVARAQDDRGKILGKALTFTNTKEGFEAFFAWLEEMQHKHEKADVLVGMEPTGHYWLNLAYTLKERLVSFGVVNPLHVKRSKELDDNSPTKNDIKDARVIAQLIKDGRFSYPRLPMDQDAEVKAGITIRNQIVGDLQALRGRIHNWLDKYFPEFLTVFKDWGGKMALATLEHIPLPVQLNQTTPERVAEIWSTYGGVQRPSHKRIQRLQEAAARSVGLTVGLQMAQREIATNIKRYKMLKEELHALEKQLEDLVLTLPGIAEMLTVPGVGMVTVIELYSELGDIKNFENPRQILKYAGLNLRESSSGKHKGQTRITKRERSKLRALLFRTVMPLVRHNRAFKALHQYYTTRQENPLRKKQSLIVLCGKLVRVLHTVGQKQCPFDEERMIRDIPHLSLALGA

SEQ ID NO: 160337 - protein, 462 aa, unidentified
MTIPRNKGHRTPEIPSATPLPAIRPRVAGLDVGSSAHWVCGPGRADRTPNVRVFGTTTDQLTELADWLAAQGVESVAIESTHVYWIPIYELLESRGIEVVLVNARQLHNVPGRKTDVSDCQWLQLLHSCGLLRGSFRPGEVITRLRALQRQLANLVAERTRCVQWMQKALDHMNVQVHRAVTDLTGVTGLAIVRAIVGGERDPARLALHRDRRCGKSAAEIARYLTGTWRDEHLFNLASALRLFDALETEIAAYEAQLLTEVAALHPPERQADPVPPHPNPAKEKAIKARGEQAARTTLWRFAGVDLTRVDGISAGAAQVVLTEVGPNLTAFPSEDHFVSWLRLCPRTPISGGKPLKKRRNGLGANRIAGVLRMAATSLQRSKTALGASFRRIARHKGGAVAVFATARQLARLIYRMLRYGHDYVDIGEQAYDHRFQTRRLAALTETARTLGYTLVPKLAAG

SEQ ID NO: 160338 - protein, 353 aa, unidentified
MPVYLGVDFHARTQTVCWCDTADGVIHQRTLDHQRDDVRGFYAQFAAPALVGLESSGYALWFHHLLGALGHQVQVGDAAAIRKFAQRRQKNDRRDAELLLDLLLRGDFPAVHVPPPASREVLSLLRYRHRLVRLRTMLRNGLQAVALNHQLRLGPGLFRSRGLAQLQALPLPGADAVQRHHSLQLLDALQKNIQEVEEGLEARAADERVRRLRTHPGVGLLTALAVVHTLEPVTRFDRARRVAAYCGLDPQEHSSGDTVRFGHISKQGNRLLRFLLVEAAHTAVGPGQDDELRRFYFHLLVKKHPAVATVAVARKLVLRLYRMLREGIDYDEFRRRGRDVRRAREATSPAQSG

SEQ ID NO: 160339 - protein, 361 aa, unidentified
MHDSTTWIGMDVHKESIVVAAVNGAGTVAARWETPNTSKGKDRLATRLSEFGTVRCAYEAGPCGYDLRRFLETKGIPCDVIAPSLIPKKPGDRVKTDKKDAEKIARMHRMGDLTAIHVPTPAQEALRDLLRAREDANEDLVRRRHRLQKFLLRQGRRHEGKNWTRDHWRWIRAQKFDDRNSETVLSEYIAAIDQEIERIGRLDAQIEQESINPDIVPAIARLKALRGVDTLTAMTILSELIDLNRFPSARKLMDFVGLVPGEYSSGGKQWRGSITKSGNVHVRRVLVEAAWHYRHSPRSTGAAIKKRREGQPPEVIETARKAELRLYKKFTRMVMRGKKTTVAAIAVARELAGFVWAIGRI

SEQ ID NO: 160340 - protein, 311 aa, unidentified
MTEHATVGIDIAKDTFDVYIDPTRQLLHLDNTPEGHQQLLSSLSAITVKLVVMEATGRYHSLLAATLELAGLPVAVVNPRQVKNFARALGTLYKTDPNDARIICEFGRRMEPEARPTPDEQTQRLAGMVTRRRQLVDNRTMEINRYKSCDDVVVSAGIKRHIDWLTAEIRDADDDIDKQIKVMPLWREKATLLEEVKGIGPTTMAVLLAMLPELGRLNRHKISALVGVCPYAHDSGKMKGKRSIWGGRSAVRSALYMATLSAVRYNPTIREFYERLTGRGKPFKVAVTACVRKLLTILNAMLRDNKSWVTN

SEQ ID NO: 160341 - protein, 380 aa, unidentified
MPEAVIGLDVGKLSHWACVATRDGEILLSAPVANREGDLDSLFGRFPDALVVVDQSRNIGALALARAKAAGMSAAYLPGLAAHGAARLFAGDAKTDERDAMVIAKTALGIPDALLPVGDPGPTVAAARALAAQRNFLTCENTRSKNRLRSILLESCPAFEALVDLSDGPQLRLMASLGGAWSVADAGPRRAAALTRGAARGKIEALVRSTASSTRPDAAAIAAEDRAVRLLARRISENSAEIDVITAEISALLEGDDTYRCLLTVPGIGPKTASELAISIDIEDFPSHDRLASYCGLAPRNRQSGTSISSVTASRQGNKRLKNLLIFSCNCLTRTEGRWGDYYARCRERGMPHGKVLKALARKRLKVIYAIMRDRVPYAA

SEQ ID NO: 160342 - protein, 370 aa, unidentified
MEKNITFVGLDVHKKSISVAVAEAGLRGAGRFVGNIPNTPEALSKLARKLAGKGGALRFCYEAGPCGYGVWRHLRGLGHDCVVVAPSLIPRKPGQRVKTDRRDALGLAELDRAGALTPVWVPDADHEAMRDLVRARAAAVRALRRARQQLTGFLLRHGRLRHGRNWTLAHRRWLSTIRFDHPAGQIVLQDGIHAVEDAEARRDRLTGQIEELLPRWSMAPVVEALQAMRGVALIVAVTLVAEAGDLTRFDNPRQLMAYLGVVPSEHSSAQSVRRGGITKAGNGEARRVMVEAAWSYRMPARVSRARLGRIEGLPKAVRDIAWKAELRLCARYRRLNAAGKPVNVVTVAIAREMLGFAWAIARHVGQRPAI

SEQ ID NO: 160343 - protein, 420 aa, unidentified
MTVDLERGYKRREPCGPKQYLNLLLRSILMIYVGIDVAKDKHDCFITNSDGEVLFQVFTIQNNRKGFDDLFSRIQSTSSDVSNIKVGLEATGHYSYNLLGYLIDKGLPTYVINPLHTNLYRKSLSLRKTKTDKVDARTIAMMLMSDVNLKSYSDTSYHNEELKSLTRYRFDKIQERARLKQSVSRLVTILFPELEKLVPTLHIASVYALLSELPSAGKIASCHLTHLTKLLENASKGRYSREKAIEIREAARTSIGSNMPAKSLELRHTLRLIGELDSEITEIESEIKRIMDQISSPILTIPGIGYRMGAMILAEIGDFSRFDSPDKILAYAGVSPSTYQSGQLESSYSHMEKRGSRYLRFALINAAKYACHWDETFGAYLQKKISEGKHYNVAITHATKKLVRLIYAMEKSGKPYIKMA

SEQ ID NO: 160344 - protein, 318 aa, unidentified
MIVKHFVGIDVSKGDFYACINDVEAPRKFNNTPAGVRGFLSFLNVQQCLPRTTRIGLESTGPYHYPLSFSCTRQGYTVNIINPLITHAYNKTTVRRTKTDKKDATLIRYVLTQGAGYPFVETKDTLILKNLARERAYLSNMKRDIQRKAKDVEYKEAIIHTPITNVNQEVFALLSEKMKDIDRQLKQYKTQEQTLLQTIPGLGPTTAATLIAEITDIQRFNTPKHFTAFIGLDPRTHQSGTSIHGKGYITKRGNKILRTLFFNCASVAIQHPNIFQDFYQKKVSEGKPKMVALIATTHKLAKVAYAVWKTNTPFDPNH

SEQ ID NO: 160345 - protein, 350 aa, unidentified
MMIGVDYHPSFQQIAFLIEGTGEYEERRLNHSDGEAEKFYRDLQLRGVQVRVGMEATGYSRWFERLLAELGFEVWIGDPAEIKAKRVKKQKTDRKDAQLLLKLMMEDRFPRIWVPSPENRDVRQLLWHRHRLVQMRTRIMNQLQALAMNEGRRWKSKLWSEQGRAELEKLALAPWASRRRHELLELLDRMNPTIEELTAAAEQEARKRPEALRLMTHPGVGPLTALAYVLIIGTPSRFHRGKQIGNYVGMIPSEDSSGGKQRLGHISKQGNSLLRFLLVEAAQAAARNNSDWRRRYMHLAMRRHKSIAKVAMGRRLGVRLYWMWRNGCEYSPSMEFGSYAGQLGTGHGVQ

SEQ ID NO: 160346 - protein, 322 aa, unidentified
MSGSILGVDIAKKKFDVALLINGKLKHKVFTNDEEGFEELELWLKKQGANHVHVCLEASSTYGDELAAYMHDAGHSVSIVNPARIKGFAQSELMRTKNDKVDAGLIARFCLAMHPEPWTPAPPEMRQLQSLVRRVDALINMRTQELHRLGTAHKAIEHSIREHVAYLDTQIDVLKRQIADLIKNDPDLKAKKDLLKSIPGIGEATIAAILAELHMFERYDSVGKVVAFIGLAPRQFISGSSIKGKPRLSKVGHARLRKALYMPALVSIQCNPIIQVFYHRLKENGKNGKVVVCAIMRKLVHLIFGILKSGRPFDPNYTTNQA

SEQ ID NO: 160347 - protein, 419 aa, unidentified
MRSIQAKKVRIVNYETLIVTVDIGKTKNFGYCRCPNGIDIKPFGFHNNGYGLKYFWDKITQMKKAHNLKAVVVGFEPTGPYGEPLVHYLRKKKVKLIQVNPMHTKRVKELQGNSPNKTDQKDPKVIADIMELGHALTIVLPEGTAAELRRLTHSRERAMQRRTSFFNQLQNLLFVIFPEFYQVMKNVKTKSSMYILEHCPTPEDIIKYTLKNLTVTLRKVSRGQIKEERARELYTAAKTSVGIKEGRKSILFEIKEILSMIKATEHFIAEIEKKMSHHLKDIPYSKFIISMKGIGEITVAGLIGEVGDFREYKTISEVLKLAGLDLFEISSGIHKGQRRISKRGRPLMRKLLFFAAINVVRKGGIMREYYQGCLERGMLKMKALIAVSRKLLGLIFVLVRDQSEYIEDYVEKQKLKKAA

SEQ ID NO: 160348 - protein, 336 aa, unidentified
MLYAGLDIHKNFSQAVVCRENGNVLKEGRVPTTKESISEFFSEFKEELKIAIEAGINSEYIFDFLEEQGHKVTLAHPLKTRMIAESRVKTDKIDANILAYLLRTNLLPTSYMPPKDIREIRQLVRQRIFLGRFSAKLKNRIHAELIRKGIRYERKGLIFTSDGKNWLHSLNMPFMESYLIMLGSIEDQIKKHNKKINQRGRKYEEVKLLTSIPGIGVYSALVIFSEIGNIERFNTEEKLFSYSGLIPSVNQSGNHRYYGRITKQGSKNLRWILTENVRVHLNWARANDVETKLLKYYLRLCKKGKPKNKAVIATARKLLQVIYWMLKNKTGYCVKG

SEQ ID NO: 160349 - protein, 364 aa, unidentified
MTTVRYVGMDVDKQKIVLARLEAGRDAKAVEHVIANTPNAVKKYFAALLGDAEVHATYEAGCFGFGLYRQLTAMGVSVVLAAPGLIPRKPADRVKTDRRDAHNLAMALRAGQISAVYVPTEPDESVRDYLRMYEALRGDLRICKQRILQFLLRRDLPYDGGGPWTVKHRHWLSALQFSQPRDRQTLDMYLSQMQQLEAMCAEAAAEVEAIAAQDCYRQQTKKLTAFKGIKTLIALSFVTDIGDFRRFASARQFMAYLGLVPSEHSSGNKRRQGGITKAGNSHLRRLLVEAAWHYRSYHPSSRDLTERRRGVDPSVLSYVNRAGRRLNRKYMHMLLRGKRSQVAVTAVSRELAGFLWGVMTDQVA

SEQ ID NO: 160350 - protein, 350 aa, unidentified
MEHHAGLDVSLKDTSVCIVDGAGKIIRETRVASEPEALVGYFASLEIKVVRIGLEAGPLSQWLYAALTQAGFEVVLLETRHVKAALSAMTVKTDRRDARGIAQLLRMGWYRPVHCKTLPSQEVRAIITARKTLLGKLIDIELSMRGILRGFGLKVGSVTRKSFEIRVRELMAGQVTLTTIMEGLLNARATLVAEVTKLHRELLAIARADEVCRRLMTVPGVGALTALTFKTAIDDPTRIAKSRDVGPLFGLTPGRYQSGETDIIGKITKVGDVMVRTALFEAATVMLTRSTKSSRLKAWALDLVKRRGTKRAIVALARKLGVILHRIWVDGSTFRCAKEGAAMPALITAK

SEQ ID NO: 160351 - protein, 412 aa, unidentified
MRVVHERCCGLDIHKKFVVACLLATESDGTVHKEVRTYSAMTNDLLALADWLRGEDCGPVVMESTGSYWRPVFNLLEEQCEVLVVNAYHVKAVPGRKTDVKDAEWLADLLRHGLLRASFIPAPTQRQLRDLTRYRIHLVDERARLINRLQTVLEDANSKLASVVSDVRGLSAREILQRLLEGETDAQALAELARGKLRAKRDALAQAVVGRLQEHHVFLLREQLAHLDYLDAAIARLDAELAARLAAEQEALALVQTIPGVARRTAEVLVAEIGTDLTRFPSAEHLASWAGMCPGNAESGGRRLSGRTRRGNAWVRRTLAEVANVVSRMKGTYLAAQYRRIAARRGKGRAVLAVGHSVLVAFYHMLTRHQAYRELGADYFDDRQRDQVQRRLVHRLERLGYAVTLEALTTSS

SEQ ID NO: 160352 - protein, 357 aa, unidentified
MKSKIKQLDFKGETIYTALDVHKKSWCVTTGCREFELEHYSQNADAKMLIRHLKKTYPGARHLVVYEAGFCGFGIQRSLKEEGIDCMVVNPADIPISNKEKRRKHDKLDSRKIYKRLAAGDLESIYVPQTALEHARSLVRERGRIVQDQTRCKNRTWSLLMFSGLTIDADRPKQYWSRKFIESLKQLDCGSEPLRQTLDLAIDEYLLTRQLLTTATKKVRELSGSSLFAKTQELLRSIPSIGLINAMVIQTEIQDIFRFKTLDQLCSYAGIVPDLDSSGDRDKKTGITHRSNNYLREAIIESSWVIIRKDPAMLMLYKTYCARMDENKAIIKIARHLLSRIRFVWSNQTKYEIGIAA

SEQ ID NO: 160353 - protein, 326 aa, unidentified
MQGKEASEQETKVQCNVGIDISKCWLDAHVLPGDDRLRVANNCAGIRQLKRWLSHYRIALVAIEATGKWHRHLHRSLVASAVPVAIVDPYRVRMFAKAQGILAKTDQLDARVLALFAAMMAPPVRPVAPQTMAELAELVVARASAVEAQAALKNQFAAAESTFLKRQLDRRISRAGKDIAALDREILKRIKADASLARRYAVLTSIPSFGFAVAATLIACLAEIGSATAKQIGMLAGLAPVADQSGDRDGVRVIWGGRPAVRRVLYLAALSASRFNADMKAFYKRLIDNGKPSKVALIAVARKLVVLANTLVSEDRTWQPRAPILA

SEQ ID NO: 160354 - protein, 367 aa, unidentified
MKKGSTAAAKPSRKLSDQKLTVGLDLGDRSSWYCVLDQAGTILLEQRLSTTPKAMREGFGGMPRSRIALETGMHSPWVSRLLSELGHEVIVAHARNVRLIGESRKKDDRLDAQMLARLARIDPQLLCPVKHRSAKAQADLTVIRARAGLVRARTALVNTARGLAKSYGERLRGCNVRNMNPEKAEGLSPELQAALEPLLAAIESVSEQIREYNDRIERLAQQSYPQTALLKQVKGVGTLIALTYLLTLEDPHRFRKSRDVGCYLGLQPGRRNSGQSEPQMHISKEGDPYLRTLLVQGAQHILGPFGADCDLRRWGLKLAERGGRSGKKRAIIAVARKLAVLLHHLWVSGEVYEPLHNSGGVAMPAAA

SEQ ID NO: 160355 - protein, 348 aa, unidentified
MKPATHSLGVDIAKDKFDVNLRPLADPQGRRAASFTNNLRGFEQLRQWLLKTGIAEPGQVHGCLESTSRYGDALARFLYGHSFQVSMVNPRRTRNYANSQLTRTINDTIDARLIADFCASERDDLRLWEPLQDDHAELRQLTRARQALVQQRDAFGNLLETASGLPRKIYQKQFRALDRQIHQLETLIKTFTQEALNPQLLKHVELADSVTGVGFITAVTVLAELPPVSKIHQAAQAVALFGLDPFNKTSGKTVQTRSRLSRMGSQYGRRALYMPALSALRFNPIVRDLGRRLRANGRDGKYVVVAAMRKLLRLIFGVVKQGKPFDPNWSNPTAPHSKHHRLEPAPTV

SEQ ID NO: 160356 - protein, 321 aa, unidentified
MGDEIMHTEDHTEQFAGIDISKSHVDIDIYPKPHCQRFDNTETGRALAVQSLLKLKPTLIVVEATGGYETPLVAAIAVAGLSVAVINPRQGRDFAKAIGVLAKTDRVDAQVLARFAQAVRPEARPQPSAETTELAALLTRRRQLVEMITAENNRLHMAVPLVAKEIGKHVTWLEKCLKATDGDLDDMIRQSPAWQHKVALMTTVPGMGRVTAIALLAQLPELGALGTREISGLVGVCPYSRDSGSMRGRRTIWGGRSAVRAALYMAALVGSRHNPILKTFYQRLTASGKPKKVALVACMRKLLVILNAMMKHDQAWHYEAA

SEQ ID NO: 160357 - protein, 354 aa, unidentified
MTRSTKYVALDVHKEATAATVRNARGKVIARSVFPTEEGVFLEFFRGMRGSIHVVFEEGTQAQWLHDLLTPVSDRVVVCDRRGESQQGNKGDRIDSDELSERLRRGDLRSVYHGSPHRADLKELARAYQNVVEDTTRVMQRLQALFRARAVRTSGRRLYSPAHRAEWLAELPDRGVRLRAETLYTELDMLLELRPKVKAAMVAEARRDPAWASLRTIPFLGPVRVAQLLATLRTPWRFRTKRNLWSYAGLAVRTYTSSEFVIVQGRPVRRQRQPMTRGLNRNHNRVVKNIFKSAAASACVRPGPLQDFYRALLERGLDPALARVTLARKLAAVTLRLWKKGEPFDPKLLTVQVR

SEQ ID NO: 160358 - protein, 377 aa, unidentified
MERLKFVGLDVHAETIAVAVAEEGGEVRALGIIPNREESIRKLVRKLGPVEQLRFCYEAGPTGYALYWQLTRMGAKCEVVAPTLVPVKAGDRVKTDRRDALKLARNYRAGELTPVWVPDAAHEALRDLVRAREAAKKDELRARHRLNKFLLRHGRRPPMGVKAWTMKYLEWIKREVHFEQMAQEATLLDYLHEVEHAGVRIMRLDGAIEEAVKCVPPKMRAVIEALQALRGIARVASVTIVAELGELSRFARAKQLMGYGGIVASEHSSGECTRRGGITKTGNAHLRRVVVEAAWTYRHRPAVGTSLRKRQEKVSEEVKEIAWKAQERLHQRYRKLLAKGKNKGIVVTAVGRELLGFIWAIGIKVEAAQKESLQQAA

SEQ ID NO: 160359 - protein, 319 aa, unidentified
MNNIILGVDISKLTFDVALLNDNKVKTKKFSNTSKGFSELKQWLKNKGIDNAHVCMEATGGYEAKMAEYLYDNNFKVSVINPARIKGFSMSKLSRVKTDKADSELIARFCQVMQPDLWQPIPKHIQELQQLVRRLDTLIANKNQENNRLDEASDVVAVNISAHIEFLDKQIKEVEELISNHIKGHRDLNDKSKLLDSIPGIGEKTIGVILAFLSIKNFDSVKQVAAFVGLNPKPRQSGSSVLGVGRISKTGDADLRKAFYMPAVVSIRFNPIIKDFAKRLSNAGKAKMVVVIAAMRKLLHIIYGVLKNKMPFNENIKTI

SEQ ID NO: 160360 - protein, 484 aa, unidentified
MAKRKLSTFERLQRGERLNRKERREVQQRLNLDDPGLDIIHRDAAGIDVGNESHFVSVPPDRHPQPIREFGSWTAALEEMARWLKDCRIRTVVMQSTGVYWIALHDVLQRHGLKVNLVDARGSKNVPGRKSDVQECQWLRKLHTYGLLRPCFLPPPEIHAVRTLWRLRSQHVRDAGRCIQRMQKAMIQMNVQLHNALSDISGVSGQAIIRAVLKGERDAKLLAKLRDPRCQASEEEIVQSLQGNWKEDVLFELQQAVDAYDFYQRQMQQCDQQLRRYMAALPTCAPVPPPASAPSLPSAKEGKQGRARKSRRQGNQPAFDLAAELERILGVNPITIDGIDVLTIQTVLAEVGPDLSAWKTERHWTSWLNLAPKRDVSGGRVIRHVRQHHTNRAGHAFRMAAQSLIRSQSYLGARYRYLRAKLGGLKAVKAMARYLACLYYRLLTRGQIWVDRGTEEFDRRNQQRELAALQRKARKHGLQLVPAA

SEQ ID NO: 160361 - protein, 337 aa, unidentified
MKRYLGVDLHRTQFVVCTRWENGEQQIRQWRIGELARFVEQLQPQDRIAVEAMGTTARFYDAVVGRVERVVVVNPHQFKVISESVKKTDRKDAAALALYLEKDLLPEVRMKPKPNRELMHLAETRDLLVKQRSALKGKINNLLAMQGMELKREALSSKIALERVLALPVSGMVQLELRILVEQIRSLSESIAELDERLEEEGQQLPGYENLTSIKGIGWLSATVLLTVIGKISDFADENKLAAYLGLVPKIANSNESERSGRITKQGNKLARTALVQCGLVAKRYSPYLQGFYERIKQRRGGGKAKIALARKLVKIVYDTLKNKWVFEDFPNFTLAA

SEQ ID NO: 160362 - protein, 345 aa, unidentified
MEHFAGLDVSVKDTSVCVVDDTGRIVREVKVASEPDALLAVLTNPAYRFKRIGLEAGPLSQWLFSALAEAGLPAICVETRHMRAALRAQINKTDRNDARGIAQMMRAGLYRPVHVKTLRSQKLRMLLTHRKLLQSKAIAIENDLRATLRNFGLKVGVVGTAKFEMRIKELVENLPDLTVLVEPLLIVRRALREQIGILHRRLLTIVRDDDVCRRLMTIPGVGPVVALTYRATVDVPARFRNSKAVGAVFGLTPSKYQSGEIDRTGAISRCGDEMMRAMLYEAAHIMLVRSVKWSWLKAWAMQIARRRGLKKAVVALARRLAVIMHRIWGDGTEFRWTREQAAAAA

SEQ ID NO: 160363 - protein, 383 aa, unidentified
MLYAGVDIAKTDHVIGAVDERGEALGKPMPFRNSAQGFERAAAWLEGVAERPEDVVVGMEATGHYWMSCYAYLVARGYRVCVINPTQVAAVRKLKGLSRVKNDRLDSALIAETLRIGQFDETRLATDEVQSLRTLSRYLESLKGELAEVKTQAICLLDAYFPEYAGVFSDGFGAAGRAVLSKSALPFELRRRRRGRHRRGAEEKARALMGAAKSSIGITLGQEAASFQVKSLVRQMEFLDAECAKVQGLIRGLLDKVEPLILTIPGISYATGAQIVAEIGDVSRFRSAASLVKYAGLNSSVNQSGKFDSGGGPITKHGSPYLRRALWLAANRARQFDPALRAFYDKKRSEGKPHRVAVTAVARKLCHVVFAIMRDQVPYSPGR

SEQ ID NO: 160364 - protein, 454 aa, unidentified
MRKLLRRVAGLDVHAKSVEACVRVWDGEDREQMHVRRFGTMTGDLRALSAWLGEHGVTHVAMESTGVYWKPIFNVLEEGFALLLCNARHIKHVPGRKTDVKDCQWIAQLLQCGLLTGSFIPPRAQRDLRDLTRHRAQLTGEATRVKNRIQKILEDANVKLAEVASDPLGVSGRLMLKQLVAGQTDPKALAELAQGRLRAKTAELRQALESDLTDHHRFMLAKLLRHLEFLEQEIEDLDRRIESALPGPDRPGPSAAAAKAAETPAPAPQPEPLAQSPAASNAAAPDAPAPLSFPEAQALLCGIAGVQQTSARAILAEIGTNMAQFPSAKHLASWARLCPGNDESAGKRRSGKTGKANRWLRRVLVQCAWAATRCRDAYFAAQFRQIAKRRGKKRALIAVAHSMLTVIHQMLKFHLPYQDLGGDFFDTIDPVRKTRYHVKRLEELGYKVIIEAAA

SEQ ID NO: 160365 - protein, 457 aa, unidentified
MMEAKRRREQRSMLPVHPDAAAIDVGATVHVAAVGPARDAEPVRSFGTFTGDLYRLTDWFAQCGIKTVVMESTGVYWIPIYEILEQRGFEVRVVNARDAKHVPGRKTDVSDAAWLQRLHEFGLLRGSFRPQGAIAALRAYLRQRERLLDYAAAHIQHMQKALTQMNLQIHHVISDITGATGMRIIRAIVAGERDPDTLASYRDIRCHSSEETVRQALIGNYREEHLFALAQAVELYEVYQAKVATCDEKIAVVLERLKQTCRAPAKPLRAARHKTRQPNAPAFDARGALYAVLGVDLTQIHGLGPYLALKLISECGTDLSAWPSAKHFTSWLSLAPRNKISGGKILSSRTRPSGNRAAALLRLAATTVGRTETALGAFYRRLSARIGKAKAVTATARKIAVLFYNAVRHGMDYADPGASYYEERYRQRVLTNLQRRAKAFGYVLQPTEIEAVSMAVS

SEQ ID NO: 160366 - protein, 349 aa, unidentified
MRFYTKQHQFYCGIDLHARLLAVCIVDQTGAVVLQKQLPAEKQLLLNVLAPFRPDVVVAVECLFAWYWVADLCRDEKIPFVLGHALYMKAIHGGKAKNDDIDAEKIARLLKGGNIPVAYVYPKDLRETRDLLRRRMYLVRQRAALITHVQIVNAQYNLPEFSKKLIYAKNRAELKIAERFDNPQLRKSVEVDLALIDALDERIAEVELHLERTAKVEDPQTFHLLKTIGGVGKILGLTLLYEIHDIKRFPDVGEFLSYARLVRCRHESAGKKLGSGGHKIGNAHLKWAFSEAVCLLVRHFPAVKIWQARHEKKHGKKKTLGILAARLGRTVYHMWRKREAFDVKRFLGQ

SEQ ID NO: 160367 - protein, 424 aa, unidentified
MQNTAARKRKQVPEGYLAIGVDPHKKRHAAVAITQDFTTRAKFKFDNTREGLEMMLDRAKVEMLKSGCRGVIFAIETGGHYWRNIAYYLDERGIPFRFINQYTLKRRREGKDLNRRKNDYRDSEVAAQLLCTGEFVESVIPQGVYAELRTSHNAYQRLVKERTRITNLVKGLLDALFPEFTQVFKDPGGLTALSILSACPIPRVIAGMTEDEFEATIEARHKGRRLMRKKLRALHYSAKTSIGIDAGARSLSYEIAFLVDKFELIRQQIRIMEGALVKLVDETEEGKYLLSIRGLNYIAVAGLLAELGCFKLYWSAKQMIKMAGSNPTESESAGKKRSKTPMSKQGRPLLRYCAWTSVIPMLRFNPDFRAWAKQRRERPVHANPLSGREIVGAALNRLLRLAFALVKNQTYYQNVKPALIPVAV

SEQ ID NO: 160368 - protein, 381 aa, unidentified
MQASIESTPTAGHSGTIFITIELSQKTWLVTLHSPDRDRISRHKLEGGDHAGLLGLIGKVKARAAEKLGSAPRVVSCYEAGYDGFWLHRLLQAAGITNFVFDAASIAVEQRSRRAKTDRIDGELMLRTLMAYLRGEPRVVRIVRVPRMEEEDARRASRERDRLVKEQTAHSNRIKALLRLLGVAVGTPRRHHWLAWLEQQRDWQGQPLPPHLLAEVKREHARLMLVREQIAALEQAEAAEVSSAPAMYERRQLLQRLKALGPAFSATLVNELFYKDFRNRREVAAYCGLVPSPWKSGGIDLEQGISKAGNHRARLKAIELAWLWLRHQPDSALSVWFRNRTANAGKRARRIAIVALARKLIVALWRYLLTGLVPDQATMKA

SEQ ID NO: 160369 - protein, 407 aa, unidentified
MDIICPRCAGLDVHKQTVVACARIAGDGAALQEVRTFATTTSGLLALADWLDSHGVEVVAMEATGVYWKPVWHVLEGHFELVLANAAHVKNVPGRKTDVNDAMWLADLLAHGLIRASFVPPVAVQELRTLTRTRKQFVRERTAHVQRIDKLLEDANLKLSVVLSDILGKSGRAVLQAIVDGHTDPERLAACVTTRVKASRAELLEALRGHVSAHQRFMLKLHLTHIDALDQAIAAIEKEVGLGLDTFRQAAKLLSTMPGLSAVGSNVVIAEIGIDMSRFATPGHLLSWACMCPRNDESAGKRRSTRLRRGGKWLKTTMVQAAWAAVKVKGSYLQAQFHRLRARRGAKKAIIAVAASMLTAAWHMLRNATEWHDLGAAHFDRADAHKTAVRLVRRLQQIGYAVQLTPA

SEQ ID NO: 160370 - protein, 342 aa, unidentified
MDHFAGLDVSVKDTSVCIVDGAGKIVREVKVASEPDDLLQVLRNPAYCFKRIGLEAGPLSQWLFSALGEANLPVICVETRHMRAVLKAQINKTDRNDARGIAQMMRVGLYRPVHVKTLRSQKLRMLLTHRKLLQSKAIAIENDLRGTLRNFGLKVGIAGRAKFEARIKELVEDVPDLEVLVEPLLVVRRVLREQIAVLHRRLLTIVRDDEVCRRLMTTPGVGPVVALTYRATVDVPARFRKSKSVGAVFGLTCSRDQSGERDRPGAISRCGDEMMRTMLYEAAQSMLHSTRWSWLKAWAMQVAKRRGMKRAIIALARRLAVIMHRIWVDGTEFRWTREAAAT

SEQ ID NO: 160371 - protein, 415 aa, unidentified
MYYVGIDIAKSFHVVSVIDDKETKVVSKPFRVNNDTKGFEKFLTILKSVSLDTKEFVIGLEATGIYGENLLEFLKSKGYIVKLLNPFQTSRYRERITMKKVKNDDIDSLVIALLLKDGKFSSGYVTDDEYQSLRTLYRNRATIQSDMKEVKRRILTQITVTFPEFEGFINPFTVSGLALLDKYPTAHHYKHSSVDRIMKLFRHIQGNNFTKDKALKLLELSKESIYSGKAKDARAIAIKSSIRLLKMYLSELEIIEAEILSLLDDTATPTTVNAAGEEIKRADTLIANLKTIPGVAEKTIAAIISECGDLNRFPSIAKFIGYLGLFPTENSSGNSKSIGHLSKRGSPLAKHSLYMSAVSCLIHNRELKQLYDNKRSEGKSKKEALIAVSRKIATIIYSIFKYNIPYDPNRVFAKS

SEQ ID NO: 160372 - protein, 320 aa, unidentified
MTYIGIDVSKDSFVAAYPAKSGYTTKTFPNTTSGVRRFIQSLPTESHCVMEATGNYSMLLLYLLQEANILVSMENPQKIKHFARAMLSTTKTDEIDAKLIAMYGEKMEPAPYKIPSESIIMLKQKRTVLRQLKKQLTMMVNLQHSLSVLPKQDPTAKVVTEQTIKHLRKQISKMEEEITNLSNKEFKRQMDLLTSIKGIGENIASALIMATGGFTYFSSAKQISRFLGLCPTYQQSGTSVNVKGHINRNGDAHLRSQLYVIAFSSIRFNSACRETYERLRARGKSGKVAIVAVANKLIRQAFAVVTNNRPYIDGFVSTLA

SEQ ID NO: 160373 - protein, 388 aa, unidentified
MIQVDDLSRSLIAFEQISTLVIVVELSQSSWLAAGVVPGIERRPLKKLDPDPTALLHLVEGWRDRATKAGRAITRTVLAFESGRDGFWLARWLRVRGVETFVMHSTSVAVSREPRRAKTDRLDTEMLIRVFLGWLRGEPRHCKMVAIPTLEEEDARRPSREREILVGERTRIINRMKAALVRLGIRGFKPGLLTAPQKLDALRTPEETPIPPNMLDEMRRDMARLAWVREQINAIEQARLERLERAPATGRHAMVRMLARVIGVGVETADMLVQEVLSRNLRDRRAVARYAGLTGSPAESGSKRREQGLSKAGNARVRRGLIQLAWRFLRFQKDSALAQWYRGRTEDVAGKRKRTMIVALARKLLIALWRLVTIGEIPVGVALRTAVA

SEQ ID NO: 160374 - protein, 406 aa, unidentified
MLITVFFVEKINTDRGTLSDLPGLRPILRFNPLSVCLNKHQIEIRVLRLISKVLIVFKQVNLDLLTINSKVMEFTYFIGTDVSKNELDFAVMHGKTLLFHKEIANTETAILLFIKELTILPEFDLASAVFCMEHTGIYNNHLLVCLHKKNASIWLESAMQIKRSSGNIRGKNDKVDAIRIADYAYTKRDKVRLWAPKREVIQQLANLAAARARLIEAKKILKTPLQEHDSFSTKKITKQSTSVCSYTLKAIDADLDKTEKKMDKIIAKDPELKRLFSLVTSVSGIGKVTATQILITTNEFKDINNPKQYACYAGVAPFIQESGMFKGKGRISHMANKKVKTLLHMSAIVAIQYNQDLKRYYDRMVNEQKKNKMSVINAVRNKLILRIFACVNHNSTYENNYQKSVA

SEQ ID NO: 160375 - protein, 400 aa, unidentified
MNNKLIVGIDIGKRTHVATIIDDKGIEVLRPFSFANTTVGGNSLLARIASVNHDASVVVFGLEATGHYWLALYSFLTEKGYSVSVINPYQSDAWRKVYLSSTKTDKEDSFLIADIIRFGSFAQTKIADENIVSLRNLCRFRVTLSQQITDTKRRIVTILDQVFPEFETLFSNTFGKTAKALLEEYPTPESIEQITTRRLTNLIRKVSQGRFKREKAEEIKQIASSSFGIDFALSSFKLELSLLLKQLDFLDEQIQIVEQEIGQVMQTIPSTLTTLPGVDMIIAASLLSEIGDIHRFKTSAQLVSFAGINPTVHQSGQFQGNRNKMSKKGSPYLRLALWKAAITSVRFNPVLKEYYEQRIKDGKNHMTVIGAVTRKLCGIIFTMLKENASFDEQYKPSHLR

SEQ ID NO: 160376 - protein, 377 aa, unidentified
MKRIKFVGLDVHADTIAVAVAEQDGEVRSLGVIPNREESIRKLVRKLGPVEQLRFCYEAGPTGYVVYWQLTALGAKCEVVAPTLVPVKSGERVKTDRRDALKLARNHRAGELTPVWVPDAAHEALRDLVRAREAAKKDQLRAKHRLSKFLLRHGRRPPTGVKPWTLKYLSWVKHEVRFEQMAQEATLLDYLHEVEHAELRIARLDLAIEEAVKLTPPKMRAVIEAFQALRGVARVSAVTIAAELGEVSRFSRARQLMGYGGIVASEHSSGESTRRGSITKTGNAHLRRVVVEAAWAYRHRPNIGETLRKRQEGVSEEIREIAWKAQHRLHARYRKLMARGKVKGKVVTAIGRELLGFIWAVGVQAEAAQNKTEQRAA

SEQ ID NO: 160377 - protein, 323 aa, unidentified
MEQAILGIDISKDSFDTALLINGAYKFNTFTNEPDGFHRMTKWLNKLKCGHLHCCMEATGRYADHVAEYLYVSGHSVSVVNPARIKFYANSKLKRNKTDKADAQLIAEYCLREKPSLWSPPPANFKNLQALIRHLDGLMKSRQQERNRLNSGVSTPGVITSLQDCISFYDQQINNIQSQIQNLINNDPELLRRQTLLISIPGIGKLTAAKLLGEVRDISAFQSARQLAAYAGLTPKNMLSGSSVRKKTVISKTGNAHLRKLLFMPGITARNWNPIISPFCDRLSQNGLSPMEVICASMRKLLHLVYGILKSGKPFDPNYLENA

SEQ ID NO: 160378 - protein, 329 aa, unidentified
MKKHFIGIDISKRTLDVCVYSPLINPENYTQVTNDSLGFKTLLKWFKSKSFSFSDIVICMEHTGIYGLDISLFFEANSLDYCMISGYEMKHSVGFARGKSDKVDSFRIAHYCYLYREELKYSRVKSKVLLSLRDLMSERRSCVKRASQCKAYLTEHKKNTDSSGYSRYSRELKYLNTFIHEIEKELILIIESDSDLYNTYKLITSIVGIALINAVNVLLYTNNFEAFDNAREYACYCGIAPFSKQSGTSINSPAKTDSMCNKTLKSELTQASLSAIVHDSELRMYYQRKLMSGKHPGVILNAVKFKLLERIFAVVKRGTPYVKLSTYSS

SEQ ID NO: 160379 - protein, 442 aa, unidentified
MRSIGLDVGRDSAEVAIVGVDGRTGSGGRIRTTPEDLTAFARTLGPDDRVVLEATTNTWAIVELLEGHAGQVIVSNPLRTRAIADAKTKTDTIDAATLAELLAADYLPAVWQPDAATRALRRRVAARAALVAERTRLRNRIAAVLIRNLVTCPLSDTFGKRGRAWLETVALPEDEREQVDATLRLLDGLAVEVGQAEVGIARVVVDDARVRRLLTIPGIGPHTAAGLVALIGDVHRFGRPSKLVGYLGLDPIVRQSGRRSWTGHISRAGQGHTRMLLVEAAHAAVRAPGPLRAFYVRVAARRGPSIAAVAVARKLAVLAWHLLTHETEYRWAPADLTEGKVRRVELAAGSPDLRGRARGDGHAVERRRRTRAADRSRLERAETEYVAFVAERRRSDAAAATGERLSGRRPAAPRSPSPHSAVRLGVGRVRGEDTPMEDPPGA

SEQ ID NO: 160380 - protein, 350 aa, unidentified
MVVVGADVHKRTHTFVAVDEVGKKLGEKVVSATSSGHYQALRWARERFGDEMVWAIEDCRHLSARLERDLLSAGQQVVRVPPKLMAQARSSARTRGKSDPIDALAVARACLREPDLPVASHDDASRELKLLVDRREDLVGQRTSTINRLLWRVHELGPAHAPKAGSLDQAKHRDLLSQWLASQRGLVAELARDELADISRLTEAINALAKRIGDRVRGIAATLLTMPGCGELTAAKLIGEAAGVTRFKSEAAFARHAGVAPIPVWSGNTAGRVRMTRSGNRQLNAALHRIAVTQIRLDGLGKAYYRKRIATGDSNTEALRCLKRRLARVVFHHLHTDHQNRLQPCQPAAA

SEQ ID NO: 160381 - protein, 308 aa, unidentified
MSSPKVYCGVDVAKASLVLAAPGVRHQIPNTAEGHRQLLALTPAPSHFIIEATGGYERALVLALHASGRALSVVNPRQTRAFARAKGRRAKTDPIDALELADYGAKFTPAADVPPSASQQKLWELSSRRVQLVAARTVELNRLDHLGLKKLRTQAQTLIRQLSRQIAQLDQWIAELIAADSALQAKAERLQQVQGVGAVTAATLLAHVPELGSLSRRQAAHLFGLAPFNSDSGQAQGRRQIAGGRAVPRSALYMTAMVAIVHNRHLKDFYQHLLHTGKLKKVALIAVMRKLACLLNHLLKNPHFALAD

SEQ ID NO: 160382 - protein, 405 aa, unidentified
MKVLIERSCGMDVHKDSITACIITPEGKEIQTFSTKTVFLLKLIDWIKEQGCTNVAMESTGVFWKPIVNLLEADSIEFLVVNATHMKAVPGRKTDVKDAEWIAELLRHGLLTASYIPNRNQRELRELVRYRRSIIEERARQHNRIQKVLEGANIKLSSVVSDILGVSSRDMLHAIADGEDDPEKLASFARRTMKRKKDELELALRGYVNPHQRLMIKTILNHIEFLNEQVEKLDREVSQRVISFQEDVERLDSIPGIATRMAEQILSEIGTDIEKQFPSAAHLCSWAGLVPGHNESAGKRKSSKTKKGNKYLKSALTEAAHSVRGSKNYLGALYRRTAARKGKKRAAISVAHAMLRISYYLLTRKEMYVDLGEDYFEKQKQQFIVRHSVQRLEKLGYTVTITEAS

SEQ ID NO: 160383 - protein, 353 aa, unidentified
MTSTKYIGMDVHKESISIAVRNDAGKIVMECVIETKANIILDFIRGLRGELQVTFEEGTWATWLYDLLKPHVAKLVVCDPRKNSRQGNKNDRIDARELSDRLYMNKLRSVYHGGAGVRTLKELARSYLTISKDLARVMSRVKAIYRSWGIPCAGKQVYAPRHRAEWLAKITEVGVLRRAEFYYQQLDALRPLRHEVRRELLAESKKHKATKLLCQIPSIGPIRAALLIALIQTPQRFRTKRPLWKYSGLAIEMHSSADYRSVKGQLQKSRKRISVRGLNRDCNHDLKNLFKSAATIASVKPGPFQEFYAALLAKGMRPEMARLTLARKIATIVLIVWKKGVSFDAKYLKPQTA

SEQ ID NO: 160384 - protein, 481 aa, unidentified
MKPDPKKASLQITKGRKRRDKASKTQHQINTQTHLNAGGIDIGATEIVAAVPPDRHADPVRTFTSFTSGLRELCAWLKECGVTTVAMESTGNYWVNCYDMLEQAGIRVFLVNAKHVKGVPGKKTDVCDAQWLQQLHAAGLLTGSFRPKQEVLQLRYLIRHRDGMVAESSRLMLRIQKVLTEMNLKLQHVFSDIDGKSARDIIRAILDGQRDPESLAALRDRRCKASKEDVVAALDGDYRPEYLFVLRDLQEQLDEMHKRMSRIDEEVARQVSLIGKAAQASRTAPEETDDGAAEGGKVKAKRLGKNAVVMNYKTESEHFFGVDLTQIVGVNSGVIIALMSEIGTRENLLESFKSADGFCAWLAVCPNNRISGGRVLNCRTRKSNNRIAAALRLAAYGLNNAKCQMGQYCRRMKGRLGKAEGITATAHKLARIIYAMIRNGRAYDEKEAFKSNPGVERKRQKNLKILAKQMGFELVPITQAA

SEQ ID NO: 160385 - protein, 345 aa, unidentified
MTSVATIGLDIAKSVFQVHGVDVEGRVVVRQRLARRRVLAFFEKLAPCLVGIEACSTSHYWARELGAQGHEVRLMPAQYVKAYVKRGKNDAADAEAICEAVTRPTMRFVPVKTPEQQSVMMLHRVRLMLNRQRTQLSNSIRAHLSEFGIVASIGRRGIDQLLAIVADERDARVPADARVCLQMLAAQLSVVKQQILENDRRVRASARSTDLGRRLMEIPCVGPLLASALTATISDPSAFKTGRGLAAWIGLVPKQNSSGGKERLGSISKAGNRYLRQMLVVGAMAVIRYAERHGTRRPWLIQLMQRRTTKVAAVALANKMARIIWALMTSGERYRAPAVQGAQAA

SEQ ID NO: 160386 - protein, 390 aa, unidentified
MFYLGIDVGKFSHSLCLLREDGQRSIWQTNNNREGFNDLADRLKGIDYSKILVGMEATGHYFLNLYQFFLEKSFQSEQIALLNPLQVKAFRNTNLRGAKTDNIDAERIAVLLRFGEFQRCNVSVNEMMDLRQLSRLRYELVASSSNLKRRIIAVLDRIFPEFGKVFRNKLGKTALALIQEYPFPENLASLSLDKLKSIVKSLSKRGIADKKIEALHQAASNSIGISFGKEGFKIELEVLLARFSMLQKQIDKIEEKIESIMEKTDTPLLTIPGLGLTTGAAILSEIGSIDNFSSAVKLIAFAGLDPKLKESGSYKGKTPISKRGSKYLRSAIWYSAMVACRIEPNFKQKYKERKDKGKSHRYCITAAANKLTKVIYHILKNNCSFQADLL

SEQ ID NO: 160387 - protein, 348 aa, unidentified
MVSKHSDHQMMLHEQGEITKMREFTGIDVSKEKFDVGWLRDVNTGKKKTKVFKNTAAGHQQVADWLLKNIKVPAEEIVITLEPTGVYHEALLYFLHDCGFQMLLVNPGKAKKYAESINQVHKTDKLDAITLAWYGHAQHHKLTLWQPESPEIRELKVMIRRLDALEKDLQREENRQEATRVSLSSDRVAQSLKDMIETLKAEIQRLQQDIDNHIDRFPELKRNRQLLQSIKGIGPVMSRELVYLFASKCFKSAKQAAAYIGLIPRLRESGKLKGRTTLSKMGSARIRAKLYMAAVCASAHNPDIKAQKARLLKAGKVKMQALGAAMRKLIQICFGVIKHQCEYQPQLV

SEQ ID NO: 160388 - protein, 384 aa, unidentified
MESISTLDTSIAYEAVGLDLAKEDVALAAFDSEHKEPYLIDRIPYDKLYELLADMAPALVAMEPCSGAHQIAEQIQELGHEVMMISGRHVQAWVKDHCNGQKTDLNDAFAILNLAYDRWLTPIRGKTREECRLLALQASYRQLKGQRTKTMVHVKATLHAWGFPIRAGSFNQKVLHELIDTNREAFGDEVVETLHLMINRVRDLDHDIATVLKLLTEATKRDPRASLLRSIPGFGILTMSRWCAVIGDIARFDSPKQTMAFVGLVPNNRITGHHTETSSGREARGQGKMSKRGDKMLRSLCILGAASLCLMVRNDRLPDCPFVASIKERLASPRPWFKVLVYVAAKLVRIATALLKYGETFSYEKAGISKAVLKQWELEQAKAA

SEQ ID NO: 160389 - protein, 428 aa, unidentified
MSIEETIRRDQFCQIKNEIRGSDEYLIVGIDVAKAKHHAFMGSATGKCFLRKLIFENSLEGFRKLLERSEAIRIKSAHSKAVFGMEPTGNYHKPLGTYLIRSGRQVVLVAGKAVKNNRELLDGRWDKNDTKDAANIADLVSRGKFLFYDYPSASINQLRQLLSLRRRLKKEEHSLRMRIRNYLLAQYFPELDHFYSACESETLAIVRWCLDPDKIAGMEFDEFFSMVTTTKRGIAQKLRLQKIHRLAIDSIGCRMGPAAEFEARLLVEKLSEVRRQLKKVADRMQDICLEIADYSWLLTIPGFGPYISARVLASIGNPWRFDSGNQLLKMAGYDLGADRSGLKSDKAVPVISKRGNSELRYALYQAAQVASTRNKHFIRYYTRLLDGRQRERGIQTKMKVKMAAKMLKIAWTLMKKQEAFDPAHLQLS

SEQ ID NO: 160390 - protein, 342 aa, unidentified
MKITTVGIDLAKNVLQIHGINAQGKKVFNKQLQRKKVLAYFTQLPPCLIGMEACGSSHFWARKLQEVGHTVKLMAPQFVKPYVKTNKNDTADAEAICEAVTRPTMRFVPIKNGEQQAVLSLHRARQGFVKARTAQANQIRGLLIEYGITIPQGIGHITKRIPEILEDGENELPGVFRQLLQRLGDHLKELDRQAIELDAQIQTWHRESEASKKLAHIPGIGPLTASALIASIGDARSFKNGRQLAAWLGLVPRQHSSGGKHVLQGISKRGDTYLRTLLIHGARSVIRVATGKTTPTHCWAINLVERRNKNIAAVALANKNARIVWALLTQDREYQADFSLAV

SEQ ID NO: 160391 - protein, 360 aa, unidentified
MFTERTSVGLDVHARSVAAAAIDGVTGEVFKARLVPAPDVIVGWVGGLSGPCAAVYESGPTGFGLARALAAAGIRCEVAAASKLQRPAGDRVKTDARDAMHLARLLRLDEVTPVRVPSAEEESARDLVRSRDAARADLMRARHRLSKLLLRHGIVYCGGKAWTQAHDTWLLKQSFSLAGTQAAFADAYESVVLATGRRDRLDEVIVAMAADSQFTPVVHRLWCLRGISTLTAFSLAVEIGDWDRFTGAGIGAYLGLVPSEHSSGASRSQGGITKTGNSHARRLLVEAAWHHRKPYRPTAVLRRRWEQAPPAAVARAQAGNHRLHRRWVTYTEHKKRPVIANVAVARELAGWCWSLATLPE

SEQ ID NO: 160392 - protein, 430 aa, unidentified
MKSNTQNAKIEAITEKTLVLGIDVGSETHYARAFDYRGIEYSKKPFKFSNTEAGFVTFKEWILDLKERHEKDKVVPGMEPTGHYWFNLGKFLQDNEMKPVLVNPHHVKKSKELDDNNPTKNDRKDPKVIAGLVREGRYMIPYLPDGVYADLRTASNIRFQLQAELTRIQNRISRWFNIYFPEYKTVYGKPDAKSGMLILKAAPLPEDILTLGIDGVNQIWRDAKLRAVGKARAKTLIEAAEHSVGSKEGAVSARMEIRMLLEDYESRNTRLQEVMVLIEELVKGIPMAEKLLEIKGVGIRTVSGFLAEVGDISRFNNPKELQKLAGLALVENSSGKHKGETTISRRGRKRLRYLLFEVAMSLVAKNPEFRELHNYYTTRRLNPLKKMQSLMAIAAKLIRVFYAMLTKGVDYDPKKMVSDIKRPAVYLQAV

SEQ ID NO: 160393 - protein, 442 aa, unidentified
MEEYAEVVELEQAIEQVARVAAIDIAKASAMVCTRLPAEKNPDRRVQKVFGVKATTNAIAELSDHLVCQGVELVVMEATSDYWRPFFYQLEVRGLRCWLVNAREVKNVPGRPKTDKLDAIWLAKLAERGMLRPSFVPPKPIRQLRGLTLLRTALTEDRSRYRNRIEKVLEDACLKVSDKTDGASDLFGTSGRAMLEALVAGERNPATLAELARGRMRVKIPRLVEALTGQFEDHHAYLIGMLLEDHDRLTAQIQELTVRIEQAIATFDPTPPPDDDHPTRTGLLDRLDEIPGVGRDTAAVILAEIGVDMTAFPTPGHLASWAKLTPRTIQSGAKNTHGPAGKGNGWLKGPLGQAAMNAGRTKTFLGARYRRIAKHAPAKKAMVAVARNILEICWILIDDPNARFTDLGPDWHDRHINRTRKTRQAIRELEHLGYTVTLTEAA

SEQ ID NO: 160394 - protein, 430 aa, unidentified
MTKRSSTPADAVLVAIDMSKHRQEVLIERPEGGRRRRMTVMATKADYDRLATDLSDVGRPIVVGFEATGNYHRTLAHRLLAAGFELRLISSVALARTREALHNGWDKNDSKDAQVILHMLRIGATQRYVDPLAAGINDLQEMSKTHEAISKAKTQTWHRILTHYLPLYFPEIERFAGNSRSDWFLALIERFPTPASMTALGQEAFTREAWSLVGRKVSKARLINDIYETACASVALPVDEDSIAITMFRMVIAQARSLIRQRDEIERTAHAVLAENRDYQLLRKIPGIGPINALTILAEAGDLRRFAHHRQFLKFCGLDLATCQSGTFRGRTKLSKYGNARLRRTFWMATQVAIRQRDNSFRDKLGRYVAGHGNDPDRRRKAMTALTAKMARVAHAVIKTGTEYPPFVERADTRWKDPSLSCREGATATL

SEQ ID NO: 160395 - protein, 366 aa, unidentified
MKDYTVFRSVTAAPAAAKSKVNKSGSLLKIGLDIHREKFVVVAQYDHATPRPPHRFAPAEFVPWVEARLREGFEVHVVYEACGFGYGLYRALLQAGAHCYVVAPQKLDEGNTRVKTDGRDSHALCLRLDRYLAGNKNSLAVIRVPSEEEERARHWGRQREQLVHHRQKLEAQGRSLLIGHGLPAPARWWRPQSWSRLGKLLPVWILPQLEFYRPVLLALDQQIRTLTVELEKAAPLALPKGMGALSSVVISREICNWRRFNNRRQVSSYTGLCPGEYSSGTKRVTRSVTKHGNSRLRAALVELAWRLVRYQPRYHAVQKRLTVLAKGAQATRAHRKKAIVAVARQLAVDLWRLHTARCTPAMLGFN

SEQ ID NO: 160396 - protein, 312 aa, unidentified
MECFVGIDVAKATLDLALEPSGEAWSVPNDAAGIDDLVNRLAPLGPTLIVLEATGGYEAAVTATLANAGLPVVVTNPRQVRDFAKACGRLAKTDALDARTLARFAARVQPAPRPLPTEAAQLLDALLTRRRQLIEMLTAETNRLGVARGPVRRDITQHIRWLKRRLADADGELKAAIQASPVWRAKDDLLQSVPGVGRVLSLTLLAELPELGRLSRREIAALVGVAPLNRDSGRRRGPRVVWGGRAPVRAVLYMGALAATRANPVIRTFFARLRAAGKPTKVALTACMRKLLTILNAMVRHQTPWREQAVLD

SEQ ID NO: 160397 - protein, 483 aa, unidentified
MKAAGQHKKVKPAKAGVGGGEKRHSQLRNRKQRRELARKIEAKDISLEVKHPDAAGIDIGNEAHYVAVPPARDTDPVRRFGCVTAELKAMAGWLKQCGIRTVAMQSTGVYWIPVYDVLEEAGLEVFLVNARETKNLPGKKTDVQESQWLMQLHTYGLLRNSFRPGQEIRRMRNYWRQRNDWVQSAGRHMQRMQKTLTQMNVQLANVISDLSGVTGQAIIKAILAGERDGWKLAALRDGRIRASEEEIAQSLEGNWQEDLLFVLKQEQEGYEFCQQQITACDQRLEEYLKQRADRSEGAAAPDETRKHRRKKKRGNAPQFELREGLFRMTGVDLTRIDGIDVMTAMMVVSEAGWDMSKWQTERHFVSWLRLCPDNRISGDRVIGKGRLRTNNRLAGALKMAASSLRQSDTYLGAQFRRLRTRLGSPVGIKAMAAKLARLIYRMLRYGMEYVDRGAAFYEQQHQQRQIDSLKRKAEALGFKVIAA

SEQ ID NO: 160398 - protein, 312 aa, unidentified
MKSYTNFIGIDISKRSFIAAFDGGKTTKEYKNTVEGIAEFIKEKGDILSSGLSVLEATGGYEMRTLLSLCNAGFSVHRAPGRQVKNFIRSYGNEAKTDAIDARGLAQYAQERSESLALFTPPSMQASQLYELAQRRRDLKQILVSEKNRLQGPLVDCVKKNIEAMIENLKASIKEITDEMNKLIDEDKQLKAKQAVLMTIPGIGPIIANDLLILLPELGNLNRREIASLTGVAPITRESGQLKNYRHTGHGRQGIKPTLFMAAMAARHSNSSMRTYYESLISRGKKKMVALTALMRKIIVIANARLKEMPKK

SEQ ID NO: 160399 - protein, 311 aa, unidentified
MTNTIGIDISKDTLDVHRLADGQHKQFLNGKAGHTQLLKWLKLRPGQLVIFEATGAYHRQLERALGAKGVPFVKVNPKQARRFSQASGKLAKTDRVDCEMLAKMGAALQLLPKPLNAENLYDLRELLSARRALIKDRTAAKARNATVTHTLIKQQLGKRLRHIECDIAKIDAAMQELARQDPHMDERLDILSSIPGIGMTTALMILVDMPEIGTLDSKQVASLAGLAPMSQSSGKWQGKARIQGGRPNLRHAIFMPALVAIRHNADLKAKYDQLVAAGKEKKVAITAVMRKLLVLANALLRDHRKWTVKAA

SEQ ID NO: 160400 - protein, 351 aa, unidentified
MRFYTKTHQHYCGIDLHARTMYVCILNATGEILVHRNIRTDQTRFLALIEPYREDLVVSVECIFTWYWIADVCAREHIAFVLGHALYMKAIHGGKAKNDKLDSHKIALLLKGGMLPQAYAYPAAMRATRDLLRRRLHLARQRAHLMAHIQNTVHQYNLPALGVRLGKPTERDGVAACFPDPVVRRMMQLDLDLIAYYDQQLAQLEWQLVKQARGHDAQMYHLLCSVRGIGKILTLVLIYEIQDIQRFPTCGQFLSYARLVRCPKESAGKIVGKSNKKIGNSYLRWAFGEAAVLFLKGNPEAQRWIEKQASRHGKGKGKALAILAKKLGQTVYAMLTKNRCFDEAKFMAQLQ

SEQ ID NO: 160401 - protein, 397 aa, unidentified
MIAVGIDVSKAKSTVAVLNSDGTIRAKPFTMYHTLSDMDAVVNYLNGLEESFSILMEYTGHYHYPVLKKLQEEGFPVCLVNPYQMKKYGDVEIHKAKTDKKDALRIAKYALEKSYMLTPYTSLDQKYEDLKFLSRQYNQRISTVSYTKTQLTNLLDETMPGITSLLKLKSRRPDKCALLLFIKKYGSFDRIKAMGRSRFLSSYATLMKKSHDRYAPQKGLSIYELACDSITTRGDNDYIIAAQNQLVDLLAAVQNAADEEIAQMQNIAETIPEYKILRAMNGVGDRLGPIILAEIGDIRRFHSAKALNSYAGNDAPPYQSGQFESRNRHISKRGSSALRKACFEVMQALKLAKPQDDPVYLFMIKKEQEGKPYNVAKMAGVNKFLRIYYARAMELYK

SEQ ID NO: 160402 - protein, 352 aa, unidentified
MISTQTTATPKLFIGMDVHKKSWTVHFKTDLFDNKTVTMPADPLSLINYVEKNFSGHQVSCCYEAGCCGYWIARVLKEKRWQVSVVNPADVPRNNKQDWQKTDKIDSRNLCKHLSDGNLKGIFIPGEEQEQLRSLLRRRIHLSRHLRSIKNHIKSQLLYYGIQLPEQYDNPNWSREMKTWIGNIKWKFNSAEESMKSRLKQLEFIWYEELHISSELRAYCRKYYKKDYYLYKSVPGIGGITAAGILSELGDIRRFNRLDELAAIVGLVPGIYQSSENKINLGLTKRSNHQLRSLLVEASWVAVRTDMALQQYYRKHARKEPNKAIIKVAHKLLSRIRAVINSGIPYQTGLIK

SEQ ID NO: 160403 - protein, 303 aa, unidentified
MKRVRFVGLDVHAETIAVAVAETDGEVRSLGVIPNRVESIRKLVKKLGPAEQLRVCYEAGPTGYVLYWQLTALGAPCEVVAPTLVPVKSGERVKTDRRDAVKLARSYRSGDLTPVWVPDAAHEALRDLVRAREAAKKDQLRARNRLSKFLLRHGKRPPAGVKSSWTGNYLLWIKQEVHFEQLAQEFTLLDYWHEVEHAAGRVERLDRALEEAVKSAPPPMRAVIEGLQALRGVAQVSAVTIVAELGQISRFARPRQLMGYSGAVSSEDSSGERVRRVRSPRPGMRICDASSWRPRGRTDTGRP

SEQ ID NO: 160404 - protein, 354 aa, unidentified
MFYSGIDLHKNNCFITTINRDGTIIKQSKLPNEESVILNYFFSIGNIHKAVVESTSNWYWLSDLLKNHQIDLTLAHAKYLKAISYAKVKTDKVDSQTLAQLLRMNLIPTAHQITQEIRGTRDTMRARLRLVQKKTSSILSIHRILEKFNVPIPDNRKLQFISTLPHLKDLPLSDEYQFQVDCFSDQIRLLHKQIKLLEKSLHPQLIPNKDIQRLLWIPGIGKISAFTIYLEVDGIERFPDVKKFFSYCRLVPGASNSNNSYKHKSGSKDGNRYLKIAFTEVAVRAVQYYSEIKQFYQRKSRKTNKPIAKTIVAKELARITYHVLKDQTEFKTFKGMTLSREKTLQWPRLPSPAA

SEQ ID NO: 160405 - protein, 452 aa, unidentified
MEEPQEVQDEEYERVWERVAAIDVAKASGVVCTRVPDEARPGRRRTKVWTVTATLSAVTELADHLRCHQIEVVTLESTSDYWRIWWVVLEAAGLTVQLVNARSVKNVPGRAKTDKKDAVWLAKLTERGMLRPSFVPPYDIRRLREFTRLRAGLVHERTRYWARLEKLLERALIKISAVVSSLDTLSARAMIEALIAGQRNPRALADLAVGRLRPKRAALAEALEGRFEPHHGELARILLDQIDALTGQIDQLTARITELIAAIPAAQGVDADGATGPGAGIGPGAPVLPAVMRLDEITGCGVIAAQAIIAEIGLDMAVFGTPGRLVSWAKRCPQTRQSGTKTSTGKAGKGNPYLNGVLGEIAASAGRTDTFPGERYRRLARRRGKRKAIVAVARSILVIIFHLLADPEARFRDLGPGYYDTHIDRQRKIRNHIRQLEALGLDVTTVPRHDAA

SEQ ID NO: 160406 - protein, 349 aa, unidentified
MTQQRSSYAGERVYVGVDVHKETYTVTCVCRKQIVKTATVPAEPASLAASLLQWFPGATLTSAYEAGFSAFVLHRALTQVGITNIVVNPASIAVAANDKVKTDRRDSKRLAIDLADGRLRGIYVPTEAEELARLLPRTRAQLVEHRATIARQIKAKLHQFGLIAPASRRLISNRYLREIAAWALPPELHVSLTLLAEQWRFATRQLIEIRRLLREQAVAQAELEQVYRSVPGIGAVVARTLATELGDMTRFANERALFSYTGLTPSEYSSGPAVRRGHISRQGSGRVRHLLIETAWRALPRDKVLQEIFDRIAATRGKKRAIVAIARRLTGRIRACFRQGTTDAVGTYA

SEQ ID NO: 160407 - protein, 352 aa, unidentified
MNQITTVGVDLAKDLIVACAADVAGRTQFYKRFGFHGFAAWAANLPPCTIAMEACSSAHYWARTLSALGHHVKLLAPDLVKPFRKSQAAKNDRNDAQAILITALQPDMRFVSVKSVEQQSILAVHRMREGWKSERTALINRVRGLLAEFGIWLERSPQTLARRLPQLMQEEQLPARVRALLAQAHGQLLQLEALMQQCELDIQAHARHSEAAQRLSALNGVGPITASAIVATIGNAADFRNGRQMAAWSGLVPKQSSSGGKERLGKITQRGDTYLRGLLTQGARSTLNAALARPPDKRSHLEHWIVALRQRVGYHKSLVAIANKHARISWALLARGERYDPHAASRHVRVSA

SEQ ID NO: 160408 - protein, 349 aa, unidentified
MAEQRISYTGERIDVGIDVHKETYTVTCLCQRQMVQTATVPADPARLAESLLRWFPRARLFSAYEAGFAGFVFHRVRTTAGSTNMVVNPASVAVAANEKVKTERRDAKRLARDLADGRLRGIYVPTEAEELARLLPRTRAQLVAHRATITRQIKAKLHQFGLITPASRRLMRSRYLREIAAWELPTELRVSLTLLADQWRFATRQLLEVRRLLREQAKAQVALETVYRSVPGIGEIVARTFATELGDMNRFAHERALFSYTGLTPSEYSSGTAIRRGHISRQGVSRLRHVLVETAWRALPRDPSLQAMFDRIAATRGKQRAIVAMARRLIGRIRACFRHGTTYAVGTAG

SEQ ID NO: 160409 - protein, 404 aa, unidentified
MELTPIYRCVVALDVHQAKLTVCIIYEDENGEIQVELREFGGFKRDRRAMAEWIVSFKPDVVVMESTGIYWKSPYAALEKVGIAALVVNARHVKNVPGRKTDIADAQWLATLARCGLLRNSFIPPSHFRQLRLISRQAQKLTGVLAGEKNRLHKVLTDGGIRLSVVVSDIHGKSARAMVKGLITGETPEQVLRYASSRLKATEEELLDALDGELTDDHRFVLSELMAHIEEVERHIATFHQQLVKRLADQRAVLQTLQTIPGLDEMGAAMLLVEIGDDMSAFGSADKLASWAGVCPANNESAGKRKAGKKRKGNPYVRRILCEAAHAASRTRCALADKFQSLLRRRGRKRAIFALAHKLLNIVFLLIQRGEYYRDAGVDYEALNVKRNAPRWMRMLKKHGFINA

SEQ ID NO: 160410 - protein, 412 aa, unidentified
METVVERPSALDVHKEQVTACVRVPGEGRSREQHVAEFPTTVAGLLTLRDWLAAFGVQQVVMEATGVFWKPVWAILEDEFECLLVNARHVKQVPGRKTDVKDAEWLCQLAEAGLLRASFVPPKPIRALRNLTRYRKTQIQERAREANRLHKALEDTGIKLDCVATDILGKSGRAMLDALVSGTTDPEILADLAKGKLRKKIPALKEALVGRFDHLHAVWIGAILAHLDFLDEQISSLTEAIGEQIVPFEKAVELLCTIPGIQRRNAECIIAEIGIDMSVFPTDKQLASWAGQCPGNDQSAGKRRSGKTRKGSKWLDWALEETAMAAIRTNDCYLAAQYARLRPRRGHKKALGAVKHSILCIIWHMLSTGELYSDLGGDYFRKRDPERITKRLIAQLESLGHKVTLEELPHAA

SEQ ID NO: 160411 - protein, 351 aa, unidentified
MSQNPDSAVAVIGIDIGKNSFHVVGLDTRGAIVLRQKWSRGQVEARLANMSPCLIGMEACVGAHHLSRKLKAFGHDARLMPAKYVRPYSKGQKNDFRDAQAIAEAVQRPTMKFVATKTADQLDLQALHRVRERLVSQRTGIINQIRAFLLERGVAVRQGLRFLRAELPRILATPPDVLSPRMVHVIEGLAGDWRRLDARIDHLSGEIAAVARQDAGCARLMSVPGIGPIISSAMVAAIGTGDAFSKGRDFAAWLGLVPKQISTGDRTILGKISKRGNRYLRVLFVQAAWVVLIKPKSWERHGLKPWIEAAKKRLHRNVLAIALANKLARIAWSVLALGRSFEARPATAAAA

SEQ ID NO: 160412 - protein, 365 aa, unidentified
MGIMHWIGIDDHADKWTIAHLEGTAEKPTNEFELVPNEQGYRKLIGFLKGLDGEVRVCYEAGPCGYDLYRRLKKAGLKCEVAAPSLTPTKPGDRVKTNRRDALKIARNLRAGELTFITVPDEGRESLRELTRGRSAVQKDVVRVRHQIIKLLLRYGQRYREGKAWTTRFWVWLGTIKLAGEYAQIILDEMLVTHEQRTSQLARLDKLIEEAAKKPEYVHYVKALGVFRGISTLSAMVILAEMGDLRRFPTAPKLMAAIGLVPSEYSTGDKTSRYSITKTGNAHVRHIVVEAAWQYQRRSTTGRTITARRKDQPPELVSIAEKCDARLRRKFSRMTSRGKLSTVAVVAVARELVGFIWALGQISHP

SEQ ID NO: 160413 - protein, 399 aa, unidentified
MLAVGIDISKSKSVAAILNQDGSMHTSPFEFHHTQPELDAFIKYILNSNQSATILMENTGHYHYPVLKAFQEAGLPVCIVNAYQIKKFGDMDLRKAKTDKKDAVRIARYALEKSYSLVPYTSMEQKYEDLRFLARQYNQRMLTLKTNKVFLLNLLDETMPGITNILPLTTRAPGTSLSVLFINRFKSYDRIKKMGKSRFLDAFEKIARKSRNRQTKTYGLAIYEAALRNITTRGENEYTLAAQDQCLELVCESQKAADSIILKMQTLAETLPEYAVLRSMAGVGDRLGPLILAEIGDIRRFHSGKALNAYAGNDAPPYQSGTFESHNRHISKRGNAAFRKYCFEVMQALKLTRPQDDPVYLFLLKKEQEGKPYNVAKMAGVNKFLRIYYARAMETLKQQ

SEQ ID NO: 160414 - protein, 348 aa, unidentified
MPLRGGAHDGSSTIGLDLAKNVFQAHGASAAGEVLFRRKLRRDQVLGFFAAQPPCLVAMEACPGAHYWGREIGKLGHTVRLIAPAYVKPFVKRQKNDAADAEAICEAAQRPTMRFVAVKSEAKQTSAVIFRTRDILVGQRTQLINAIRGHLSEYGLIAPRGPFHVGRLIAHIEDPASSVPEAARSCLALLVEGVRHLQEQIGKLDAEISARAKADEMTQRLMTVPGIGPLIATAIEALAPPAETFRSGRDFAAWVGLTPVQRSTGGKERLGRTSRMGERTLRRLLIIAASAVIRWAKRKGVPKGSWLGRMLERKPPMLVIVALANKNARIAWALLTKGESYRAPAVPA

SEQ ID NO: 160415 - protein, 350 aa, unidentified
MVESIKTETRGIVGMDLGDRSSQLCRLDRESGAILEEQRVSTTTAQLQSYFGALPPQLVVLESGTHSPWVARLVRQLGHEVIVANPSKVRAISASRRKTDERDARCLAQLGRVDPELLCPVHPRSEEAQQALSVVRAREGLVRARTQLINQVRGTVKAFGHRLPGGSTASFARRVTQALPESLKASLEPLLRVIAELSQEIAQFDKDVEALAEHWSDTQHLRQVQGVGALTALVYVLVVGDPQRFARSRVVGAYVGLVPASRSSGDTNPQLPISKQGDQLLRRLLVQAAQYVLTHGVDSDLKRFGLQLAQRGGKNGKKRAVVAVARKLAVLLHRLWVDKASYTPLRKPSA

SEQ ID NO: 160416 - protein, 315 aa, unidentified
MDYIGIDISKDTFHVAWNEIAEVSVFANDHEGIASFEDSLHRRQFQKEHTKIGLESTGIYHLLLCVLFTDHGWDVTVINPYITSKAINATLRHVKTDVKDARAIRSVLIAGHGYRFTDTPAILELKALLREYAALVKLKTTCKHLIHAHEIYQKTTDKKADSMFPPLLLFLEKNLKEMRRRLGKMESGTQTLLRSIPGIGPVCSAALVGHIGDIRRFDHPRKLVAYLGLDCRVHESGTSIHGKGFLTKRGNGALRALLYNAAFIARQHNPDLQRFFEKKTAEGKHYCSAMCAVERKLVHLIYAVWQRRTPFEKRP

SEQ ID NO: 160417 - protein, 455 aa, unidentified
MAKQKTRKAPALETVNTGAAAVDIGSREHMAAVNPDVTDMPVRAFGTFTHNLHDLAAWFKSHGVTSVAMESTGVYWIPAYEILEQHGFEVILVNARYAKNVPGRKTDVSDASWLRQLHSYGLLRGSFRPTAQIATLRAYLRQRERLVEYAAAHIQHMQKALMEMNLQLHHVVSDITGVTGMRIIRALVGGERDLDILASYRDVRCHASVETIKAALNGNDRPEHIFALTQSLDLYDFYQSKMLECDSNLEDMLDVLAAEQEHDPGQLPKARTKTKQVGAPSFDVRAALFGVLGLDLTQIHGLGPSLSLKLVGECGTDLRAWPSAKHFTSWLCLAPGNKISGGKILSSRTRRSSSRAAALLRLAAVTIGRSDTALGAFYRRLAARAGKAKAVTATARKIAVLFYNTLRYGMTYKDPGASHYEDRYRNRVLGNLKRRAKSLGYDLQELPTEADMVVS

SEQ ID NO: 160418 - protein, 337 aa, unidentified
MASVERATGGLLCEARVEHERGALRTFLARWDPGSPVAVETIGNWYWIVDEIDAAGMVPRLVHARKAKLMMGMVNKTDKLDARGLNRLQRTGTLPTVWIPPGALRDQRDLPRTRMGLVRERTRLKNRTHATLAKYALTIDGVSDLFGVGGRQRLQQQLPHLPPHTRYATERVLEQLAGVEKQVELLEDRMREVFEQTPELRLVMSLPGVGFILGTVIRLELGDVRRFPSAAHLAAYAGTTPRVHASGGKTRYGQLRSDINRYLKWAFVEAANSVCLNRRRRPGRHVSRLYERIQRRKGHDKAIGAVARHLAEATDWILTKQEPYREPKSAAVSSREG

SEQ ID NO: 160419 - protein, 370 aa, unidentified
MTQSTAFVGLDVHKDSISVALMSAEGVAVELGQIQNNPTAVRKLVRRLAVKHSRLSFAYEAGPCGYGLYRQLKDMGHECLVAAPSLIPKRPGDRVKTDRRDAMALARLLRMGELTAVWVPDPHHEAVRDLVRCRDDVKQAERRCRQRILAFLLRQGRHYDKSNWTLEHRRWLKSQQFDHQEHQTVFDHYLHSIIEAEERVAQLEREMAESLVGWSLAPLVRGWMAMRGIKLVVAMTLASELGDVSRFARPGGLMSFVGMVPSERSSGQSRRQGGITKSGNRHVRRVIIESAWSYRHKPCWSPTLRARAADASEAVRGIAWKAQKRLHKRYHRLTSLLKPSQVAVTAVAREELGFIWAIGCQVMQEQQSLA

SEQ ID NO: 160420 - protein, 402 aa, unidentified
MNAVGIDVSKGKSMVAIMRPFGEIVSTPFEIKHTSSDINSLVKLIKSIEGESRIVMEHTGRYYEVLAHQLSEANLFVSAINPKLIKDFDNDSLRKVKTDKADSVKIARYALDKWQNLKQYSVMDELRNQLKTMNRQFGFYMKHKTAMKNNLIGILDQTYPGVNTYFDSPARSDGSQKWVDFASTYWHVDCVRKMSLNAFIDHYQNWCKRKKYNFSQSKAEEIYGKAKELVPVLPKDAITKLIIKQAVDQLNSASATVESLRTLMNETASQLPEYPVVMAMKGVGSSLGPQLMAEIGDVSRFTHKGAITAFAGVDPGVNESGSYEQKSVPTSKRGSSDLRKTLFQVMDVLIKTHPQDDPVYQFIDRKRAQGKPYYVYMTAGANKFLRIYYGRVKEYLSSLPES

SEQ ID NO: 160421 - protein, 361 aa, unidentified
MRFIGIDLHYDNFVAAYFVGDKIVQTVRIYFNDKVRFEAFLKDLRKGDFIALEASTNSFWFYDQICERVTECFIINTRKFLIVSGSVKKTDKIDAKKIAKKLRYRVLYSADEDEFPTVFVPNKKVQELRTLFTTYEMLSSHKTSLKNRIFSLLVGQGYYFKSKELHARKKKEKILSLAMADSVRFQLELLYDEIELKEKKIKEIKNKILELGIYFEKEIDKLVEIKGISVFTAIAIMTDIADIKRFKSSKKLCSYLRSAPKVDSSNKSTKIGSVNKQSRKLALKMLLQGLAHAYKSSPYLLSIYERKIKSKKAGKVRIAIARKIFTSIFHMLKNDKHYYWKDNYTYNNKKKEYEIFIRKLA

SEQ ID NO: 160422 - protein, 309 aa, unidentified
MLTAEADNCKTKVVVNTAAGVQALLAWCAKHGAQPAQLHAILEPTGLYHEQAATALPQVRVSLVNPAQARDFAKALALRSKNDALDSYVLARYGQTLSPALWHPAPLHARQLRALLTRREALSKDLLRELNRKEKSQFSPSAPLVDGSIDKAIAFLREQIKQIERAIDQHIDNHPDLKQDCELLNSIPAIGPQAGNAILAVMHNRHIDSAQSLAAYLGVVPVQRQSGSSLNSCARLSKAGPSQVRATLYMAALVGTRHNPHIRALYQRLLKAGKSKKAALGAAMRKLVHLCFGVLKNRIPYQPNYAMNG

SEQ ID NO: 160423 - protein, 335 aa, unidentified
MEFEFFIGIDVSKNELDFAVRQGKSFLFHREVANEPRAINSFIKELGKLRGFHLNKAVFCMEHTGIYNNHALACLHKRKAHICLEAATQIKNSLGNIRGKNDKIDAIRIADYAYDKRDKLRLWQPKREIVQQLAHLATTRLRLITVKKQLKVPLKEHAAFSTMKTSKLNTQICSHTLKALDQDIDRADKAIEQLIKADAELTRIFSLVTSVSGIGKVTAVQVIIATNEFKDINNPKKFACYAGIAPFTDDSGKIVKKARVSHMANKKVKTLLHLSAIVAIQYNPDLKLFYERKVIQDKKNKMSVINAVRNKLILRIFACVNQNRPYEKNYCKLVA

SEQ ID NO: 160424 - protein, 366 aa, unidentified
MKKSSTVRANGNMIFKGHKLTIGLDLGDRSSNYCVLDEAGEILLEQKLATTPEAMKQTFEKIPRSLMALETGTHSPWLSRLLKELGHEVLVAHAQKVNLITKSTRKDDRHDARTLARLARIDPELLGPVRHRSAKAQIHLTVIRARAELVRARTALVNAARGLVKSYGERLPKCGTEQVSRELAAELSAELREVLEPLLKEIESLNERIKEYDARMEKIARESYPQVALLKQVKGVGTQIALTYVLTLDDAHRFAKSREVGCFLGLKPGRRDSGQSQPQMHISKEGDRYLRTMMVQGAHYILGPFGEDSDLRRWGLRLAERGGKNGKKRAVVAVARKLAVLLHRLWVSGEVYEPLRNSHKAMRAAA

SEQ ID NO: 160425 - protein, 441 aa, unidentified
MAMRKRDEEVVFPNAAGIDVGASSHWVAVPRHSASEPVREFGAMTDDLNALADWLLACGVDTVALESTGVYWIPVYEVLESSGLKVWLVDARQMKYVPGRKSDVQDCQWLQKLMSLGLLRAAFRPGNEVCVVRAVVRQREVLLAEQASWVLRMQKALVQMNIQLGEVLTDVMGMTGQAIIRDIVAGQRNPAVLARHRHGRVKASEHDIVRALTGNWRDEHVFVLTQALAMYDSLAQRIVECDARIEALLAPLGCHEVTLAGPAKRAGKNTPGFDLRTALARWAGVDLTRINGIAVTSVLTVLSEIGPDLGRFASVKHFCSWLGLCPGTKVSGGKILSARTRRSTNRVRQTLKLAAMSLSRNGSALGAFYRRMCARMDKPRANTAVAHKLARMIYFMLTRGEAYVDQGQQNYEEQQRQRSIAALRCRAAELGFAVTPTAATA

SEQ ID NO: 160426 - protein, 350 aa, unidentified
MDKISALAGATVVAAGIDMAKSTFSVCGLDAAQRVVLERTMNRATLIELFARLQPCTVGLEACSGAHQLARELTALGHTVRIMAAKFVVPHRTSGKNDRNDARAIVDALIHRRTRFVPVKSEEQQALLSLQRARSGFVEERTALVNRIRGLLAEFGVTLPVHIEKVRHGALRAAQRLPILARQVIEQLHAHLLILDQRIGQYDRQLRELARHSEAASRLTGVLGIGPVTAITTVAMIGDGRGFKNGRQFAAWMGAVPRQYSTGGKTRLGPITRHGDVYLRSLFVQCAKALLAVAPRRNDHLSRWALAVRSRRGFGKAVVAVAAKLARIAWAILAKGERFRVQASVPCATR

SEQ ID NO: 160427 - protein, 283 aa, unidentified
MLIIGCDYHPGFQQIALVDTDTGELSERRLLHREEAEQFYRKLQEQGLEARVGMESSGHSRWFERLLREVQLELWIGDAAEIRTKRVRKQKTDRQDARLLLRLMMEDRFPRIWVPDAANRDLRQLLWHRHRLVQMRTRVMNQLHVVALNEGLRRKKALWRPAGRKELESFALAPWASRRRQDLLDLLDQLTPKIHELTCALEQEVEKRPVTRRLMTHPGVGPLTALAFELVIGTPERFHCGKQIASYVGWFPKKSPAGNVGAWDTSASKATCCCVFYWSKRRR

SEQ ID NO: 160428 - protein, 385 aa, unidentified
MSIDHPAIGPVGENHIMLFASLELSKSSWLLTTNSPGVEKMSKHAVTAGDGGALLDLLARLKAKGERRIGTVIRVVVIQEAGLDGFWVHRLLEAAGIESHVVDPASIAVDRRHRRAKTDSIDGETLLRTLMAWTRGERRVCSMVRPPSPEEEDLRRLTRERGILVKERTQHTNRIKGLLSGQGIYEYEPLAKNCLGRLDALKTGDGRRLPPRLKAEILRELDRIQVVTKQITVVERERDALVKTRTEATPENPAAMLASLKGIGAELSSLIWLEALFRHFTNRRQVASYAGLAPSPWQSGRTARDQGISKAGNRRLRHAMIELAWFWLRHQPGSALSRWYQARVGNGRGRIRRIAIVALARKLLVALWRYVTQGIVPQGAVFKTA

SEQ ID NO: 160429 - protein, 340 aa, unidentified
MNEITTIGLDLAKNIFQVHGVDETGTAVIVKRLRRSQVIAFFAGLPPCLVGMEACATAHHWARELSELGHEVRLMPPQYVKAYVKRNKNDAADAAAICEAVKRPSMRFVPAKTIEQQSALLTHRARDLLVRQRTMLVNALRGHMAEFGLIEAQGLHKVAGLIAIVMDDMDERIPEMARQALKVIAGQINELQTRIAALETQVLAWHKNNPVSQRLATIPGIGPIIATAIAATVPDPSVFRSGREFAAWLGLVPRQNCTGGKVRLGGISKRGDSYLRRLLVNGAISVLLWSKMAKTDPWLVSLRGRKPLLVAAVALANKTARIAWAVMSRQTTYRHAAGAA

SEQ ID NO: 160430 - protein, 347 aa, unidentified
MNNLSKSKVDGKISMFVGMDLHKNYLQIAVMNDKGKVLENSRINNDIKQVGRFFEKNINDEKVRVVMESSSVWYNIYSYLSEEKHLNVVLSNPVKTRAIASAKIKTDKLDAAKLANLLRGGYIAECYVPDRRIMDLRELVRHRAALVRMRTKLKNKINSIVLMKGIQISSKHCSFTHLYNQELKELNDYRINGYLHLIESLDSEIKDVSKKIMVLAKEDEMASLLMTIPGIGYYSALLVVSEIGDINRFPDSYHLCSYAGLVPSTHSSGGITYHGSITKRGSKYLRWIMLECARAHIRTNKKSNITQFYTRLAKIKGNSKAAVAAASKLLKVVYWVMKEKRKYHYHG

SEQ ID NO: 160431 - protein, 360 aa, unidentified
MVKHIFVGIDLGDKNSVARIAVDREKTERFGFVNNRRGRARLFEEVKRRAQEVGGKIVMAYEASACGFVLRDEAEKRGIPCWVLAPTKMEKSVEQRKHKNDDRDADDVVEKLRAHVLAGNRLPTVWVPDLQTRDDRELIRTRLDLADKQTQLKSQIQMLLKRHGLEKPSGLGAGWTIRYWQWLEGLTELESFGWGARQGLASLLRQLNSIETEMQQLQKPVEQLAGEPRHKRIVEELTKESGVGVLTAMVYRTEIGEAGRFRRGRQVGKFVGLTPTSHESGEQNDRKGHISRQGPPRLRKMLCQASWVHVCHDDGAKRIYEQLVSRNPKKKKIAIVAVMRRLAVRLWHRMRKVELELGMA

SEQ ID NO: 160432 - protein, 346 aa, unidentified
MMIIGCDFHPSWQQVSWLDTETGETGERKLVQGSGDAERFYRQVAAPALIGMEATGNCHWLVDLLSELGHELWVGDAAQIRASYVRQQKTDQRDAAHLLKLLVEGRFPRIWMPSSEVRDLRQLLLHRYKLVIIRARVKNELQHLCLNKGVQRKRKLWSAAGQQILRELPLKPWAARRRDDLLKLMAMLDQQIEPLDQAVQEEAQRDKMALLLQTQPGVGPITALAYVLTMGDVSRFPRGKQVASYLGLIPREHSSGGRQKLGAITKQGNRMLRMLLVEAAQIAVRFDPEFRKQYLHRCHSKPKAVAKVAAARKLAVRLYWMLRTQTKYPAVVRIESSPRVPLVGAS

SEQ ID NO: 160433 - protein, 375 aa, unidentified
MNEITRAPIVRVGVDLAKQVIQVHAVDASGRRVAARAFKRDQFFAWCAQLPAGCMVAMEACSSAHHWARKLRTLGLDARLIAANFVTPYRMEGKSGKNDATDAAAICEAASRPGMRFVPVKTCEQQGVMSLHRVREGLKEERTACINQIRGVLTEFGLVFGKSPKVLRAVLADVIEDASNELSTTARLVLQRAFDHWRELDEHMQWCDRQVGLHVRASPEAKRAAKVIGIGEIGASALTAGVGDFTQFKSGHQFGAWLGVVPRQASSGGKIRLGRITKRGDDYLRTLLIQGAKAAVMSADKRDDPTSRWLVQLTARVGWQKACVAMANKNARILWAVMTREEGFDPKHVSVKPRAKQAAEQPGLASPSTPATCAA

SEQ ID NO: 160434 - protein, 368 aa, unidentified
MSNHSHYKVGCDAHKYFSLFAVLDRHGKVVQRTRVNHEPGTIQAFLSQLPPGTPVALETVGNWYWIVDEIEAARCVPHLAHAAKAKAMMGYVHKTDKLDADGLGILLHNGTLPSVWIPPGELRDERELPRTRMAFSKIRTKLKNRVHPTLAKYALSLDTDSDIFTAKWRPQLLALLQQLPPETCRCAHQELELLDLVQAHIDRLEARILQRARRTPSIQLIQSIPGPAEILSIVIDRELGSIDRFSCPKHFAGYAGTVPKVKSSAGKTHYGRMIKQCNNYLKWAFIEAANVVVRQRHHPNWRIKYVVHLYERTRQRKGHAVAVGAVARYLAESTYWVLKKGEPYKEPLPRHLAGSKSVVPPRQARTRA

SEQ ID NO: 160435 - protein, 358 aa, unidentified
MQSNKINFKGQNIFIGIDVHLNSWSVTAITPSGYKRQTSHRADALELYAYLTKNFPGGIYHAVYESGFCGYSCCYELRELGIDCVIVHAADVPSTQKSRLSKTDSNDSMRLAMSLSNGELNTIYIPPKEVLGDRDILRYRTIVQKGMSRTRSRIKHLLHTNGVSYPREFREPYKHWTRRFIKWLREDVKLLSGKRLELDFLLEDLEHQRSQLLKATGKVRELSRTSRYAEDYGNLISIPGIGLITAMTMLTEVTDIHRFSSQKKFMSYVGLIPVMKDSGETIRQNEITPRGNQRIRRMLMESAWSAVRYDAQMAAAFGTFCRRMKKNRAIVRIARILASRTYHILKTRTKYDTALCTA

SEQ ID NO: 160436 - protein, 345 aa, unidentified
MQIKSIGIDLGKSTFHLIALGSRSQVVIRKKFSRSQLLVYTANLPSSLIGMEAGVGSHFLGRALREQGHQVRLIPAQFVRPFVKSNKNDYRDAEAIAEAVERENMRFVPIKTEDQLDLQALHRVRDRLVARRTSVINQIRAFLLERGISLRKGPASLGRHMPEILENAEEKLSTRMRSLLDFLWQEWKGLQSQIERLNADLEEIASNDASCRRLQQIPGVGPLVSTAVVSAIGNGAAFKKGREFAAWLGLVPRQWSTGGKPKLLGISKRGNPYLRKMFIHGARAAVLRAKRTESSLTKWMNGLETRTARNVVIVATANKLARISWAVLASGENYHPKHKTLALSN

SEQ ID NO: 160437 - protein, 355 aa, unidentified
MKKVTKKQNWFKTITLTRKDCLYVGLDVHKDSISVALWLNGRISKTFRTPADYQLLTERFQSAKVALKKVVYEAGPTGFGLARVLRRAGLPVEVISPANTPRPSKRQSKTDKLDCKKLAEYAAKGMLAAVAIPSEKKEADRQVARLRDQLVKKRCQVKQQIRSFLLQHSLPDPSNWSQANMTQLRALFLSQELRFTLHMHLEELDDLTDKIKRTEEHLREMAEQSRNRQPLEILQSHPGVGPMTAWAFHTEVFRPGRFRSSAAVANYFGLSPLIHQSGETSREGPIVKTGRAALRSKMVEAAWRWIRTDSQAREVYNRLCRNTGSGKKAIVGMARRLVIHLWCMVCTKQHFHPAP

SEQ ID NO: 160438 - protein, 450 aa, unidentified
MSPLALDVVTKTGKTPVLGRMLSKYVRRKTSSIENDITKARNHLRQRGKIMRVVFGIDVSKASSEVAILVNGEKIHGYTIPNDAIGFNRLLEDLGTVYQPEIVFEATGVYSRRLQAFFEDNSYAYIRLNPLESKKQLDSLRVRKTDKIDAEKLATSQFILNRTPSYVQEALYQELRDLSRFYQNLTEDIVCSKNRLHKVLQVTFPELENILSSPTGKQYWNLVMAFPCNSFVLELDDAALRAIIRQSTSKRISENRVTYLVDKLTKLANQSYCAVKKTSPMMEEVKYYAGELLRLSEYRQSVLEKMITLAHPLPEYEILLSIPRIAETTATSIIGELGDIRRFHPANQINAFIGIDLRHYESGDFLAKEHITKRGNPYARKILFKCIHNIASASHTNPCHIADFYEKRKRQSQVTSTKPHTIASIHRLIRTMYYLITHNKLYDYTSTQNR

SEQ ID NO: 160439 - protein, 372 aa, unidentified
MRKMIAAIGIDVHKKTSSAYAVYAGKGTEKEKHRTFLDSFNKEFGEFPSTPEMYNEIMRFARGHEYHILLENSTKSHEVYWIFKNGGANVTVAHSTDLYRITKSVKKTDRNDSVELAGYMRRRLHGENEFSESYIPSPEWMLRREMCRGIFAEKEYLADTKRRMRAHILLHGIRLTREYDDITVRNALIEMNRISDPYLRMLVKFATDAMNRVSMGEKTIAQMFFGNKMCELIDSIVGFGTTSAAYMTSLIVDIDRFSSSKEFTASFGVVPKMRSSGESDPNCPTTHRGDDLMRKRLMDCTRSHVRFAKDSVVTAMYHRLVNNGKPKREALVAASRKLLTVVWSVLKSGIPYSSDPDALKGAKEMEEGSAEN

SEQ ID NO: 160440 - protein, 403 aa, unidentified
MERTAGIDLASEEHRLCVVDAEGRRLEQRTITNDEQGLGLLCRRLVELGVTRVALERPNGLVVDRLLEAGLAVVPVHPNQLAAARDRYRTGGGKSDGFDAYVLAELARTDMHRLKALQPDSDETRALRALTRAREDLVAQRVSLANQLRAQLESFWPGAARIFSEVDSPIALCFLERYPSPADARALGEKRLSAFLARNGYSGRKSAAELLARLRSAAQGRAGELESEARRAVVLGLVAALRPLVEQIRLLTSEIRGLLEQHPDGEIFRSLFRDPNSVVTAAELLAEIGDRRERHPASDSLEAIAGQSPVAVESGKRKVASFRWACNKTLRDAVSVLADTSRKHNPWARKIYADAIARGKDHPHAIRILGRAWLRVIWRMWQDRAPYDPARHGSLQRLLTQEG

SEQ ID NO: 160441 - protein, 345 aa, unidentified
MHNTIVGVDLAKDVIQVCVIKHKKVLSNEEMTPRNFSIWLANHQPSMVVFEACATSNYWKQRALVCGHDAKLISAKLVAHIRQNQKTDKNDALAIVQASQLTDIRFIRGKSFSQQELQSISRMRELAVKQKVALSNQICALLLEFNIRISPKKGGLSGVVEEVLEDAENGFSADFREALYETWQAFLAIVNRISGYEDNLRASIEANPDCKKLMALESVSTINAVHLYTTLACGEDNLFKSARDASACIGLTPIQYSSGGKVKLGSIGKYVKNALVRSNLISGAMAVIQQVCRREPKTTKEKWLKELVERRGKRCAAVALANKTVRTAYAMLRDGTEYQAQPLAA

SEQ ID NO: 160442 - protein, 413 aa, unidentified
MMSALVYRFHVGIDWATEKHRVVVLDAERRVVREREVCHEGAALESFADWLTHLAASAVETVAVAREVPRGAVVDVLLARGFHVFALNPKQLDRFRDRFTVAGAKDDRRDAQVLASALATDQPAFRRLEPEHPLLLELRELSRLEDDLQEELGRLTNRLREQLHRYYPQLLHLVPAADEPWLWTLLERAPTPSVAQHLPRATVRTILSRHRIRRVDTDAVLATLRAPALPVAPGTVQAAQRHLAVLLPRLRLIHQQRAECATQIEGLLERLGESQEHRDVPILRSVVGVGRVVAATMLAEASRLLAARDYHGLRAQTGVAPITRQSGRRTLVCMRYACNPRLRQAAYHWGQSAARHDPVSRAHYERLRARGHSHARAVRGVVDRLLHVLTAMLTAGTLYDPARRRLPVGEAVA

SEQ ID NO: 160443 - protein, 523 aa, unidentified
MAVKRSSKKSKSRAAEFLQKPRGVIHPRVQKVGPEHFGIVCVDCAKARSKWMLTDFYGRVLVPPTEVAHNRVELAATVAQVRAALIQHDLRDCLVAVERTGRYHHPMKNTFAQADFDTRLVHPYSTKQFRQPANPDNKTDDTDLAAMQRAAVNGFALQEAAPSESWVQLQLCIRHRRDLVRKCSALACQIRQHLDAALPGYAACFDKLWESNVAFRLIRQFGSAGALVEQGVTGLCHYLRQEKVRFQERTLDTVVAWAKNAAAADIAGDLHRQIALANEDDRARKTLEITALERDIAHRLVQTPYVLLMSFPGINVVSAADFAGEMGPIENYAHHRGITGRAGLFPSRYQSDRVDHADGPLVRRANRALRAVILGIADNLMLCNVHFRQLAGLWKLAGKDPRKSHVKIASRFCRIAYHMVAGRQVFRHPSLRERGYILDKLLAFHLEHQTPYEQSLRDLHLATAQIPIKEHAAEAEPLAERMRTTRAFAKKGPQPLNEILAIVLARLGVGALPSIPSEEKDLT

SEQ ID NO: 160444 - protein, 406 aa, unidentified
MAVMIGIDPHKASHTAVAIDQSEQLLGELRVRSSADQVERLLAWAVKWPQRTWAVEGAGGLGYLLGQQLVSVGETVLDVQPKLGSRVRLLATGNVNKNDPNDARSVAVAALRSKGLRSVAAEDHAAVLKLWSKRRRDLGSLRTQVVCRLHAVLCDLVPGGHPKKEMTATQVARALAALEPAGAVQAARYELAMDFLADLRRIDTQMREAKKRLEVAVKASGTTLTEVFGVEPYVAGTVLGYVVDVSRFADRDHFAAYNGTAPIEVSSGGHKVFRLSRRGNRRLNHAVHMAAVTQAAHRHSEGRAYYERKIIEGNHNKEALRCLKRRISDAIFAHLVADAKRKTQSGQAGPGGQRGNGSVSSVAGSHPERQLFGQATPRPIPTIRRTVTSRGAKSQEHVEKKSRKAS

SEQ ID NO: 160445 - protein, 345 aa, unidentified
MQPMYYMGLDVHKRTISYCVKDSSGKVFSEGSLPATRLDLDLWMKTLPQPWSAAMEATMFTGWIYDHLKPHAAALKVAHPLMLRAIAAAKKKNDRIDANKICDCLRCDFLPECYMATTAIRERRRTLRYRNLLVRQMVQMKIKISALLMEAGVSYNKQRLHKAGYFRELLATNPDIDEGLRSLLRLCRETVVRLQKMESALVRTLESDSLLMDRVERLMTIPAVGPITALTWVLEVGEVQRFSSIKKAISYCGLCGAEKSSGSTVQRTPLSKQRNKHLQTTLIEAAKMAPRNSPELAMLYDKEKQKGNANRATLAVARKLVAYLVAVDRRQKEFLTVERENRTAA

SEQ ID NO: 160446 - protein, 394 aa, unidentified
MSATTVDCNTSGSVLYMAMELSCKKWVLAFSTGAARDPRIREIKARDIFELRREIRRARVRFGLFKDAPVVSCYEAGRDGFWIHRCLVHHGVQNVIIDSASIEQNRRQKHIKTDRIDARKMVRMLCRWHGGETDVFRTVCVPSKEDEDRRHLHREIKTMKRDHTRLVNRIRSLLTELGLNSQVWLDDRFLSWLETVKLWNGKPVPDGARVRLEQQFLRLERLETEIAKVEKTRRKRIRTEDSRQARQVRKLLGLKAIGETSSWLLVNEMFGWRHFANRQQLASFTGLVGAPFDSGGMNRDQGITKAGNKWIRSVIVEVGWMWLRYQPQSALSQWYLRRFGESGKRMRKIGIVALARKLIIALWRYLEKGIPPEGAILVPWHTKVGLRKAPAGVV

SEQ ID NO: 160447 - protein, 417 aa, unidentified
MQVVRPICCGADIHKDIIVATIAISNQNGIAEYIQREFCTQNYDLINLKSWLKEHNCFEFAMESTGKYWIPIFNVLEDEIKVYVVHPKYTKSIKGKKTDKKDSKWIAELFRHGILTFSFIPPREIRELREISRYRIKLVAMRTSERNRYQNAMTVSNIGLASILSDPFGKSSKAIMEEVLKSSSLSEGKIRSLLNKSAKKKAKEVFASLEGSRIEPDQRLKMTVSSEHMNQIDSHIDTLELDLVQRCLPYANLINLLIDIPGISYISAIAVIAEIGIDMSVFKSSKQLTCWAGLAPANNESANKKKSVRISRAGTYLKPLLIQCALSAIKSTSNPYYRIKYNIIKKRRGHKKAIVAIARMILVNIYAILSTGEAYNPCDFKEVTSPKPAKKEMTIENALSFLQAQGIDTSALVLNVS

SEQ ID NO: 160448 - protein, 361 aa, unidentified
MTIVEGTRAVTGGVDTHLDVHVAAALDDIGGLLGVESFEASAAGNDKLLGWLGSFGSITRVGVEGTGSYGAGLARHLRAAGVEVVEVDRPNRQARRRTGKSDPADAVEAARAALSGRAQGAGKTRDGNVEAIRALVVAKRSTRSTKIKTLNQIRHLGFTASDDLRERFRGVSRFHLGATAAALRPRVGSDPVSYATKTALVVLGRRVIALDEEKERLDALLGELVAKTAPQLLELHGVGVDTAAALLVAAGDNPDRLRSEAAWAHLCGVAPIPASSGKVTRYRLNRGGDRQANSALWTIVITRMSSDPAPAPTSPAASKKDAPRPTSSASSSATSPARSTATYLATESLRDQRRRFGSIIG

SEQ ID NO: 160449 - protein, 344 aa, unidentified
MDHSAGLDVSVKETSVCIVDDTGRIVREVKVASEPCALLQVLKNPAYRFKRIGLEAGPLSQWLFSVLAEAGLPVICVETRHMHAVLKAQINKTDRNDARGIAQMMRAGLYRPVHVKTLRSQKLRMLLTHRKLLQSKAIAIENDLRGTLRNFGLKVGMVGKVKFEARIKELVENLPDLAVLVEPMLIVRRVLREQIVILHRRLLAIVQDDEVCRRLMTVPGVGPVVSLTYRATVDVPARFHKSKSVGAVFGLTCSKYQSGEVDRSGRISRCGDEMMRSMLYEAAQAMLRSTRWSWLKAWAMQIARRRGMKKAIVALARRLAVIMHRIWVDGTEFRWTREQAAVAA

SEQ ID NO: 160450 - protein, 312 aa, unidentified
MVEHCYGGIDVSKDRLDVQVLPQGRCFSVANTSAGWSQLVDRLRGLSIAALGIEPSGGYERGVIRALLAAGLSVRRINPNKLRQFARARGVLAKNDRLDARLIAEYVAIMPTRVVHRDPAAEQLAAVVTIRRQLSDEHVAVENQTAHIEDAMLRRLNKRRLARLEADILLLDKRMAEIVASNANLARRYDLLTSMRGVGPTLAFTLIALLPELGQMSRKQIAALVGLAPYDFDSGKLKGHRCIYGGRIPVRNVLYMAALSAARYNPALKTFHNRLAAANKKPKVVIVAVMRKMITILNAMLRDNVAWQPKTA

SEQ ID NO: 160451 - protein, 456 aa, unidentified
MRRYELGDNKVRAALPMVHPNAAAIDVGARKHVAAVAADRAAEPVRSFGTFTTDLHRLVDWFAECGVETVVMESTSVYWIPVFELLEARGFVVYLVNARDAKHVPGRKTDVSDAQWLQRLHSHGLLRASFRPKEEIVELRAYLRQRERLLEYAASHIQHMQKALMEMNLQLHHVVADITGATGLRIIRAILAGERDPAALARLRDKRCHASIGTVTKALTGHYRSEHLFALEQALALYDAYQEKASACDARIEVVLKRLSFRRGRKVGPLPAPRPGMRRQPNGPRFDVRAALFALLGKDLTQINGLGPYLALKLIAECGDDLSAWPSAKHFTSWLCLAPSNKISGGKVLSSRTRRSGSRAAALLRLAAVTVGRTDTALGAFYRRLSARIGKVKAITATARKIAVLFYNAMHHGMDYIDPGASSYEARYRARVIGNLRRRAKAFGFALQPMEAMSVS

SEQ ID NO: 160452 - protein, 356 aa, unidentified
MSEGSWVGLDVHARSVVAGVIDVGSGEVRSLRLPPGCDATVAWLTTLPAPVRVVYEAGPTGYRLARACAGAGISCVVAAPSRIRPAADRVKTDRRDAERLARLLRLGEITPVRIPTLEEEAARDLVRAREDARGDLMRARHRLSKLLLRHGLVYDATAWTRTHDAWLRRQRFQGGPLAIVFDECYGRMIDAKSRRDALDKAITELAATSPYVDVVSRLVCLRGVSTLTAFALTVELGDWHRFRPESLGPFLGLTPSEHSSGERRRQGAISKAGNSHARRLLVEAAWHQRRPPRLSVTLERRRTGKSLAVRAQADRSARRLHERWHALEGRGKPRAIVVVAVARELAGHCWALATME

SEQ ID NO: 160453 - protein, 344 aa, unidentified
MKITRIGLDIAKQVFQVHGVDERGKVMVRKQLARLKVREFFAQLPPCLIGIEACGSSHYWGRELTKFGHTVRLMAAQFVIPYRKRGKNDANDAAAICEAVGRPDMKFVAIKSEEQQSVLMVHRARTLVMANRTAQVNQIHGLLGEFGLVVPHGVARLRRELPEILEDAENGLPALAREVLARLLEQFHEYDVRVAAYDRQIRAIAAASEPARRLMQVEAIGPQTATALVASMGDPHVFKSGRSYAASLGITPRQNSSGGTDRLGPITRQGDRYVRTLLIHGARAYLRIVDKRTDGKSVWARRLKERRHVNVVAVALAAKHARIAWAMLAKGTEYRPVGIEEAAA

SEQ ID NO: 160454 - protein, 357 aa, unidentified
MKSQEIKYVGIDCGKKTLEVIRIGDNSLHQRQQFSTTEIGISKLINWLNPNDVVGLEADSQSFRIAKSILNKGVQVIVLNPGNLATIYQSLKKTDKEDSLKIARLIQRFPIEELPVVPIPNDEEEDNRRLCTEQENWTRQLTQSKNRLHSLFTQAGLTHITKKHLRTKANREISVALLPSRYQKEAERILKVLDLVEQNLKLIEKEIQEALKKNKAYVQTIMSMPGIGMITSLAIMSYMGDCKRFSSAKQAAYYAGLVPRVDISGDTVRYGRIINRGCHSIRRVIVQAAWSLVRCQHGGKVKEFYQRLYLKKGAKKSIIATSRKMIEVLYAMIRTGKLFDSMPENILNRKLTQYGLM

SEQ ID NO: 160455 - protein, 371 aa, unidentified
MAKLTRTMQYVNNTELSSREETRCQFNGGKAVIKLGIDVHQDFYVVVEQVGGSNPKPPQRFQKDAFLRWAAKVKEKSGAEVHAVYEACGFGFGLQRKLSALGIECEVVCPQKLDEGNKRVKTDGLDAKALCLKLDRFVQGNRDALAIVRVPTEEEERSRAIHRQREQLVKARKQLEAQGRSLLVHHGLEPVQNWWKPRTFAALPVPQWMKELLQNSQPVLLGLQEKIAALTAQLQSAAAPDQPRGLGKMTSVVIDREVGDWNRFNNRRQIASYTGLCPGEYSSGNTRLQSCVTKHGNPRLRAALVELAWRLVRFQPNYKPVLKWRAILAKGALATGAARKKAIVAVARQLAVDLWRIKTGRLRPEELGLSN

SEQ ID NO: 160456 - protein, 351 aa, unidentified
MVTVGLDLHKRYITACALDESGTVLAEHRRLEPSLDALGRWLGGLAQPVLVAMEATLYWHWLERQLTAQGFAVVVALPYQVKLIWQARTKTDPIDARKLAELARVKLLPAIWIPDSATRSLRQLLRGRVFLVRQRTVMRNRIHAYLTAENLRCPELDLYSKAGQAWLATVDLPAVVRGQVGLVLANHALLTTQVQALDRHIKATVRRDETARRLQTIPGIGPFGALLLQAEIGPISRFGSAQELAAYAGLVPSTRSSGDKTRHGHVGRGNPWLKWLLVEALQTLKLAPGPVGDHYRKLLRAKGKPKATVAAARKFCTYLYWMLKEEWSYTEWLRQHDRSEVRPMQPLGSAA

SEQ ID NO: 160457 - protein, 410 aa, unidentified
MEAIVECCAGLDVHQKTVVACLNSGVAGARSTKEIRTYGTTGQELREMRDWLRASGCTLVAMESTGVYWKPVHAELEGHFELIVGNAHHIKNVPGRKTDVKDSDWVSDLARHGLIANSFVPPRPIRDLRDLTRYRRKLVEAQAAERNRLIKLLESASIKLSGVVSDVFGVSGRAMLRALIEGAQSSADMAQLARGRMRRKQPELARALDGRIDEHHRFMLRLQLQRITAAEADLAQLDERLSEKLAPYDEELGRLMQIPGVDWVTAGAMIAEIGVDLSVFHSAAHLASWAGLCPGNHESAGRQKGGKTRKGNVWLKTAMVTAAIAAGKARGSYYAEKYRRLSAKRGKMRAAVAIAHKILVVAYRMLTDRSDYRELGADYLDRLNHHRIAINLTKRLRAMGYEVQITAKAA

SEQ ID NO: 160458 - protein, 349 aa, unidentified
MSAVREKHTNIVGVDTPARTNTYAILAATTGGLVDTATFPTSTAGLKRAIAWIARRSEPGRTLVSIEGANSYCSGLTRALRSTELELCVVRPPRRTSRTGRCKSDDIDALAAARTVLGEQVEALLDPRAEGNREALRILLNTRTAMERQGTADRLMLNSMLRTMDLGVDARNALADGQVLTVSRWRACRDDDLSTKIARAKAKRLATAILRFHGELEANHQQRLEVVGLVAAGLLDLPGVGPVSAAQVLVSYSHHGRVHSEAAFAALAGVNPIPASSGNKTRHRLNRHGDRQLNKAIHTIARTRMAHNPATIAYVERRTVEGKTLRDIRRCIKRFIARQLFRKLPALLS

SEQ ID NO: 160459 - protein, 419 aa, unidentified
MTYRIAGIDVHKRMLAVVVADVAVDGGYQFDRRTFGTAPEQLRQLAAWFLTSGVDEVVMESTAQYWRPVWDLLEQAWVLPRRRQPGAPPTAGTLHLAQAQSNRGPRGRKKDFPDAERLVRRLVAGELILSFVPDAEQRLWRTVTRRKYQLTCSRVQLQNRLEALLEEMHVKLSSLVSDLLGPSARRMLEAIAEGATDPTAVAALANQRLRATPEALADALGACADLHPVYRRLLQLALTELRGIDAQIEALNREMGGLLRRHQDAVQRLAAVPGLGVDSAQQIIAEVGPAAVTFPAPKQMASWVGVCPGAEESAGVTYSRRSPKGNRQMRRLLNQAANAAVKTKGSIFELVYRRLVPRLGHRQAIGAMAHRLCRLIWKILHDGVTYEERGPAVTKERLRARTAKMIRELKTLGYRVEPA

SEQ ID NO: 160460 - protein, 336 aa, unidentified
MLIIGCDFHSRFQQIAMLDTDTGEITERRLEHGSGEARAFYVALPGPARVGMEATGYARWFERMLAQQGHELWIGDAAEIRARMVRQQKTDARDARHILQLLAENRFPRIYVSKPEDRDIWQLLRHRDKLVHWQTSIRNQLHALAMGEGLCRKKRLWTQRGRQELQALSLDSWATRRRNDLIEILDRLRPAIEELDQAVQQQAQQRPAAVLLMRQPGVGPVTSLAFTLMVGPVQRFATSRELVSYVGLNPSEDSSGGRQRLGAISKQGNSMVRWLLLQAAQTASRSDVALRRHYQRLVVRRGRAIAKVAIARKLAVRLYWMLRQAAKPNAADSHAG

SEQ ID NO: 160461 - protein, 342 aa, unidentified
MSDINVFGIDISKHVFHIIGLDSHNKIVVKRKLRRTQILAWFAQCEPCQLSMEACASSHYWGREFEKLGYQVQLLPAQHVKAFVQGNKNDYNDALAIAEATNRPGIHPVSIKTITQQDLQAIQRMRKQAVTTRTALCNQTRGLLGEYGLIIPLGIHQLRKAIPAILEDAENELSDLFRVLLRQRYDQLIQLDSDIEFYTHQLTAQAAQNKCIKQLQTIPGFGPIVASAYHVYVGSGVTFANGRGVSASLGLVPKQHSTGDKQVLLGISKRGDKELRSLLVHGARSVASVAHKHNDRLSVWVSRLIEQKGMNKATIALANKLARIAWVVTTQQVDYQTRPSTL

SEQ ID NO: 160462 - protein, 323 aa, unidentified
MNKDINYFGIDISHLVFDVTDSDGNYHQFKNNVTGFRRFIKHLDINSHCVMEATGYYHYQLAYYLLENSIAISVENPLAVKRFIQMKLSKIKTDKSDSKLICEYAKQVQLKLWEGNSKHQVECLQMTRLLSVYTKQSTMLKNKLHGEAVLGNPSKVVVSSLKRSLKQVKKELDALESKLLILVKQVHQDLLTRLKSIPGIGNKTALMLVVLTDGFDRFKSGSELCSYAGLTPIIRQSGSSVHGRSRISKIGNQKLRNLLFMCSFNACKYNKACREIYERIVAKGKSKKLALIAVCNKLLKQAFAIAKSGLIYEDSYRSILIKN

SEQ ID NO: 160463 - protein, 345 aa, unidentified
MLHAGLDLSRRRLDVCLIGDEGVVVERLAAPPDADGLRHLVERVGPQGRVRAVIESMTGARFVRDTLEELGWEVLIADAQKVKGLAPLACKTDRIDAQVLAVLSHRDLVPAIWLPNPHVRAEREQARFRLHLVKHRSMLKHRIHATLITFGHPCPVSDLFGVAGRELLDRLTIPEPWRGTVEASLSLIDDLDAEIDLVNRQLRLGGAEHPYIPLLLTVPGIGWVLAFTIAAEIGDIHRFTTPKKLCGYTGLCPRVNQSGDKDRRGPLTKQGPRYLRWAMLEATMHALRHPAYADRYQATKRRLGKQRGAKVAQIDIARRLTEAVWHMLTRNQPFAPAGATHRLAA

SEQ ID NO: 160464 - protein, 402 aa, unidentified
MRDAWVTLLLGRNYNAEPQAERNRSMKKLRFLGLDVHAETIAVAVAETDGEVRSLGIIPNREESIRRMIKKLGPAEQLRACYEAGPTGYVLYWQLTALGVSCEVVAPSLVPVKAGDRVKTDRRDASKLARSYRSGDLTPVWVPNQEHEALRDLVRAREAAKQDQLRARHRLGKLLLRHGRRAPAGIKAWTHKHLEWIKEHVHFEQVALEYTLWDYWHEVEHVSERIRRLEQAITEAVKLAPSRMQEVIRGLQALRGIAQLSAVTIVAELGEISRFEAAGQLMAYSGAVASEHSSGKHIQRGPITKTGNAHLRRIVIEAAWSYRHRPSCGWALRQRQQGLSEEVKEIAWKAQHRLHQRYRHLLGRGKDKPKVVTAIGRELLGFIWAIAVHVERKPSQPTVAVV

SEQ ID NO: 160465 - protein, 529 aa, unidentified
MSAVIGLRPQGVWKKHAADSSAVRWNTASEKTEQTLERPCPRVSVVLGHVGDIGEAVRTTIPFERVSTTTYPNRRGIPTKIMEEGMAVRKRIALELAHPNAAGIDIGSASHYVAVPPDRDDQPVREFKSFTEDLEQLADWLIRCGVDIVAMESTGVYWIPLFELLESRGLTVYLVNARHVKNVSGRKSDVLDCQWLQQLMSYGLLSGAFRPKDEICALRAVSRQRDMLLSYQSRHVQHMQKALAQMNVQLANVISDIVGETGQKIVRAIIAGERDGKVLAKMKNARIRASEADIEKSLCGNWRDEHLFALKQAMALFDSYSERLAECDHQMEMMMAALRREGFGEPGKSRQRSRNKNAPKFDVRAYLFGMCGVDLTRINGIDTTTALRVIAEVGPDMSRFKSAKHFASWLGLCPGTKISGGKVLSGASKRTTNRAAQALRLAAAALQSSQSSLGAYFRRLCARLDKPKAITATAHKLARLIYTMLTKGSDYTDQGQDYYEERYRERVMHHLAKRAQKLGFQLTPIPQPA

SEQ ID NO: 160466 - protein, 348 aa, unidentified
MKNKSFVGIDISKNVIDVSIFREDTNIKMFPHEVFNNTRKGFGDMCSWLKKSRVVLSQALFGMEFTGCYSLDLEKFLTSKNYSFCMLSTRIVKHHPMGTIDKRDKNDSAKIADFLYRYDGTECAKPYKLPSKAMQQLKQLVNERKFLVEQRTNFMNRMQMFETKEDSAMYESYIKKLNHDIEKIDQEECELMSKEEDVFDTFQNLLTIPGIGFVNATKIIAITRNFTAFDTARQYARYVGVAPCSHTSGTSVKWRARPSAHCNGQVKADLSMAALRAVEYDVEMQMFYNRKLGGRKDSDTKRKALNAVKFKLIRRMFAIGKQKRKWEVLNTSDDRKNLHIEKSKASEL

SEQ ID NO: 160467 - protein, 369 aa, unidentified
MSSVSSAAGAIHLGMDTSKNTIVVGILSPGEEIPVLDRIWNEEGSVRHLVGRLGDVSALRTCYEAGPCGFELHRLLSSMGVACDVVAPSLIPRRPGDRVKTDKRDASRLARLHRAGELTAIRVPSPAEEAVRDLVRARAALLSDRKRAQQRITAMLMRHGRIWRSGSAWTQEHERWIAGQRFDEPALATALAHYRAALDTRRAELDAVEAELLPWAGRDPLAGTVARLGCYRGIAELTGLTLAAEVVDWRRFPAARAFMGFTGLVPAEYSSGERVRRGSITKTGSGPVRTALIEASWAYRFKPAIGVTLRRRQLGASPDTLARSWQAQRRLHARYQALTARRKPPGMALTAVARELAGFVWAEMTAEGG

SEQ ID NO: 160468 - protein, 327 aa, unidentified
MEPWRLIIKPEEFLNELDSFPKFLHWLQKNKLPPEQTVLCMEAAGVYGEALAYFLNSQGYRLAVETPLKVKRAFKPFGPKSDPVDSQQIAEYACRYWDELHLWTPNQQVLEQIKTLLNTREQFVAQSVAHQNALKSLQRKVVRTPLAEQVHIEALKQIKKHLRTIEDEIRRLIDQDPTFGQMLGLLLSVPGVGLLLATHFLVSFYSAQRELNYKEMASYLGICPHEHSSGSSLHPHPTSRHFGPPDMRRLLYLASMSVRTHHPDFNHYFLRKAAQGKPKKVILNNIANKLLKIMFAVIRSQTPYIPGYRSVNPIFLKKALTVSSYSG

SEQ ID NO: 160469 - protein, 330 aa, unidentified
MHIGVDVGKECLDICYPDGSKEHIGNTKRSRAKLIRKARAMSAIVSFEATGPYEENLADECLAAGVSAVRLDAWKTRKYAESQGMLEKTDAIDCEMIRDFAASLKPEQLRFVRPMSDGYRRLKRATSVRRNLIKAKTLVVNQLENILDKDVRASVSRVIDALERQIEKMDALCTEAIRSDEKMNAIAVRFEQVVGVGPVLISTMLSSCPDIGSFTSKGIAKMAGVAPIENKSCTIRKKSKPRRGRRELRSALYMAAVSACHSNHLLEPVYKRFTDRGMPRRVALIALARHIAILMNYIAKYPDFNPAVDPKKVALLALPKRKPGRPRKNP

SEQ ID NO: 160470 - protein, 312 aa, unidentified
MDNAVYVGIDVGKERLDVHVRPIGESLVVARDDEAIVALAQKLLARQPRLVVLEATGGLQVKAAAALAAAGLAVAVVNPRQVRDFAKATGQLAKTDRLDAETIARFAEMVQPVPRPLPDEAARALMALIARRRELVALRVAERHRRREAAAAAWVQRDLEASIETLTERIEAIDLEIENHVKGSPIWQVQEDLLRSVPGIGKTVSRTIIAELPELGALTRRKIAALVGVAPFADDSGKHRGRRRIAGGRAGVRTALYMAAVSATRCNPIIAALYRRLREAGKPAKVALTACMRKLLVILNAIMRDHRPWQHA

SEQ ID NO: 160471 - protein, 346 aa, unidentified
MKTIPVGVGIDYADSGVQVCVGKTKGRAGENQVQDLVLRNKKVANSWEAIAAMVRPDEAVQFAVVEACTGAADLADELHGEAGWPVVLAMPGIVKKMKMNPDKSDLQDGQLLFDLGRINYVPRVWLAPKAVRELRLVVRYRQQWVKQRRAVKQRMGALLREQRVRLPGKRWSKPWRQALLSCKDLSEQARWVMGQHTQALLWLSAQIAACEKHLLQIPSEDWMVKELLTYKGIGLVTACVMRAEIGSFARFGSGKKLARYCALTPRNASSGERQADAGVVQAGNKLLRTVLIEAAHRLGRLDPRFRAMRNALKARGKPGSVVAVAIANRWVRGLHHRGVAMERAAA

SEQ ID NO: 160472 - protein, 355 aa, unidentified
MDKIKYIGLDVHRDTISAAVLNESGRLLQQSVLMTRTVAILDFIGGVRGSLHVTFEEGTHSAWLYDLLSRRVDKLVVCNPRKNALLKSGNKGDAIDARKLADLLRAGLLSPVYHGETSALEVQQLARSYLMLTEDTTRAMGRLKAVFRGQAISCTGRRLYGPKHRGEYLAALGGCALRRRAERLYQQLDALQQLRRDARHDLIVECRKHVEAKWLQTVPFLGPLRAAVLIGRVQTPHRFRTKRQFWTYCGLALETRDSAEYRVTDGQLERKKRPAQVRGLNWNYNHELKNVFKGAANAASTGQGVFREFYLGLLKKGMRPEMARLTLARKIAAIALKIWKKGESFNAEHLKSQAA

SEQ ID NO: 160473 - protein, 429 aa, unidentified
MEEVDEVELVVQRVAALDLGKATLEACMRVPHPSKPGRRMQEIRGYATTTAALLEMAVWLRQWGIERVVMESTSDYWKGVYYLLEAEGFDCWLVNAREVKNVPGRAKTDRANAVWLAKVAERGMCRPSLVQPPGIRHLRDLTRYRRALVQDRTREQQRVEKLLEDAQIKISSVLSDIHGVSGRAMMEALIAGQRDPRTLARLAKGLARKKSDRLEEALRGFFTDHHATILQMMLDNIDRIGAQIAALDARIAEAIGPFSRQAARLADIPGVNTVAAAELIAEIGVDMTRFPSAAHLVSWAKFCPQIHQSAGKSRSKARGKGNPWLAGTVGRIVFSASHTETFLGARYRRLARRRGKPKAIVAVGNSVLTVVYHLLSDADLSFCELGPAHYESRINKHRRARDLATQLQALTGQHIVIRDGKAIITDAAA

SEQ ID NO: 160474 - protein, 390 aa, unidentified
MQPTQVQDVTRNDEVLAVSLELASKSWKVGLDDGKRNSPAVHGVDHAEPKGRLDEAMAVIEKTKKKWGLAPGVRVVVVYEAGQDGFWIQRALSERGYEALVVDPASIPVERKARRAKTDRLDAIRLVLALRAWLRGERDRMKVVRVPPVEAEGQRHLVRDRGTLQKEIGQHRDRMRKLLRTVGCWESMEGDLRGRLERGEVQGYGGSALPAALQERLVRECVRLKLVEEQLAKLEKTLPAQLPEAVRQRMVQLMQLKAVGPVGAQRLLLELFWRQFNNRREVGACVGLVPQPYDSGESRVDQGISKAGNRRVRALLIEMAWMWLRWQPHSELAHWFAQRTRGSGSNKRSKRIAIVAVARRLAILLWRYLKHGVLPEGVQLKPAKVTLKAA

SEQ ID NO: 160475 - protein, 359 aa, unidentified
MASVCQNGDVDHHLEEASMKEICIIGLDLAKNVFQVHCSDRTGSVLLRKKLRRDQLLGFFAKQPSCTVAMEACSSSHYWGREIGNFGHQVRLIPPAYVKPFVKRQKNDAADAEAICEASQRPTMRFVAVKSEESQAAAIVFRARDLLVRQRTQIINALRGHLAEFGIVVAQGPAHVAKLVMAVEDPERLLPDMARPVLGVLVETLRLLDERIRFLDAEIARRAKEDNVARRLMTVPGIGPIIATALTALAPAAETFKRGRDFAAWLGLTPLQHSTGGKQRLGKTSKMGERTLRRLLIIGASAVVRWAARKGAVAGSWLAGMLKRKPPMLVRFALANKMVRIVWALMTKGGIYRAQIAVG

SEQ ID NO: 160476 - protein, 397 aa, unidentified
MYIVGIDIAKRKHEAAVIDGEGTVIIKPFSFTNNCSGYNRLLAMLTKAKLPLDEVSFAMEATGHYWLALFTRLQKEGFRVQVINPVQTNSIRSFYIRQAKTDPRDALLIAEVIRFGHFSESTLHPENIYELRELCRGRHAIVSMQADVKRKVVALLDQVFPEYETAFTNMFSDTSMAILQTCPTPKELSEMPFEELCHLIEVSSHKRFRMAKAQELQELARNSFGFAMAGDVFSTMIRLYAKHLDFLKQQVREMDRKIAEIMDTLDTPITTITGIGPTLGAYILSEIGDISRFSSAAKLAAYAGIDPTMRQSGEYNGVRNRMSKRGSPYLRHAIWLAASSAVLHDPALKFYFQKKRDEGKPYMASVGHACRKMVSIIYAVMRDNKAYTPHIPNEISA

SEQ ID NO: 160477 - protein, 348 aa, unidentified
MVLIGCDFHPSWQQVSWLNRETGEAGDQKLGHEPGAVKKFYQQFPVGSRIGMEATGNCQWFMELVSGLGHEVWVGDAAKIRASDARQQKHDKRDARLLVQLLAEHRFPRVWVPSREQKDLRQLLIHRYKLVRIRAQVKNGLQHLAMNQGVLKKRRLWSKAGQQALCALPLGPWASRRREDLLKMVSELDAKISLLDQAVEEAAQKDERARLLMTQPGVGPVTSMAFVLTMGDVSRFPRGKQVASYLGLIPREYSSGGHQRLGSISKQGNTFLRMLLVEAAQGAVRCDPGFRNEYLHRCHSKPKGVAKVAAARKLAVRLYWMLRTNKGYPEVVRVESSSRVPLVAKGRP

SEQ ID NO: 160478 - protein, 370 aa, unidentified
MNRNTGMFAGQIIGWMNGHQVVGMDIAKSVFQLHTVDMDTGELQDKRLTRDKVLAYFSNRRPCVVAMEACGAAHHWGRKLQQMGHHVKLLHAKAVRPFVLGNKTDVTDARAIWLAVQQSGMRFVAVKFVEQQATLVLHRQRQLLVKMRTMQLNALRGMLYEFGAVFPKRRDALLGEVQQALDKLQDVLPQLVSQSLSEQAQRIRSLSEDIAACETRLRQQLAQDEQMQRLMDIPGVGLLTATAAIATMGQASQFKSGREFCAWLGLVPRQQGTGGKVQLLGISKRGDSYLRTLLVHGARALVCCGKAPSAWQSELSQRRHKNVVIVAQAAKTARIIWAVTAKGQAYEEGHQSSRPGQGKKQGQEQAMAQV

SEQ ID NO: 160479 - protein, 346 aa, unidentified
MILIGCDYHPSWQQICWLDTVTGETGEKKLEHGSGEAERFYRQLPAAALIGMESTGNCQWFVEMATTQGHDVWIGDAAKIRASEVRAQKHDRRDAALILKLLMEGRFPRIWTPSGQEKDLRQLLIHRYKLVRIRAQVKTELQHLAMNQGVTRKRKLWSKAGEKVLRELPLKPWASRRREDLFKVRGMLDEQIAPLDQAAAEAAEKNEKARLLMTQPGVGPITSLAFVLTMGDVSRFQRGKQVASYLGLIPREYSSGGKQRLGSISKQGNRFLRMLLVEAAQGAVRCDPGFRNEYLHRCHTKAKGVAKVAAARKLAIRLYWMLRTNTGYPEVVRVESSSRVPLVSAS

SEQ ID NO: 160480 - protein, 337 aa, unidentified
MDYFAGLDVSLEKTHLCVLDRDGTVVHEATAPSSPAAITAALTAAPACTRVVFETGRMAPMLYHGLVELGVPVVCIESRQAYQALRTLATHKTDRNDARGLAQLARTGFFKPVHVKSLPAHAVRALIMARKKLVGQRVTLENQIRGLAVVFGVRLPRGLSPAFVEQVLSMSDGIPGLASAMRGLVAARQAVLGAIAAIDADMKKLVRASDACRRLMTIPGVGQLTALAFTAVIDDPSRFRRSRDLGAYLGLVPRRYQSGEIDYVGGISKVGDRRVRTLLYEAANVMLTRYKGELKLKDWALAIARRSTMRKTRIALARRLAIIMHAMLRHGTEFNPA

SEQ ID NO: 160481 - protein, 405 aa, unidentified
MQETTQHDAVDVFVGVDVGVDVGRGQHHAVALDRNGKRLYNKALPNDEVKLRALIAELKTHRRLLFVVDQPSTIGALPVAVARAEGVLVAYLPGLAMRRIADLHAGEAKTDARDAAIIAEAARSMPHTLRSLRLADEQLAELTMLCGFDDDLAAQVTQTSNRIRGLLTQIHPALERVLGPRLDHPAVLDLLERYPSPSALAAANEKTLANRLTKLAPRLGKNLAAEIVQVLNEQAVIVPGTQAATIVMPRLAQQLAALRKQRDEIAAEVERLVLAHPFWPVLTGMPGVGVRTAARRLTEAAQKAFATAAHLAAYAGLAPVTRRSGSSIRGEHPSRRGNKVLKRALFLSAFAALRDPVSRAYYSCKIQQGKRHNQALIALARRRCDVLFAMLRDGTIYPPKSAPNA

SEQ ID NO: 160482 - protein, 346 aa, unidentified
MMIVGCDFHPGWEQVAWLETETGETGEQKLVHADGEAQQFYRALPVPSLIGLEATGNCHWLVDLLHALGHEVWIGDAAQIRASYVRKQKTDRRDAAHILKLLVEGRFPRLWVPDREQRDRRQLLIHRHKLVEIRARVKNGLQHLALNQGVQKKRSLWSKAGIETLRALPLAPWAARRREDLLGLLAALDQQIEPLDRAVGEAAQQDANACLLMTQPGVGPITALAFVLTLGDVSRFPRGKQVASYLGLIPREHSSAGRQKLGAITKQGNRMLRMLLVEAAQRAVHCDPEFRKQYQHRCHSMPKNVAKVAAARRLAVRLYWMLRTQTPHPDVVRTESSPRVPLAGAS

SEQ ID NO: 160483 - protein, 411 aa, unidentified
MKLFVGLDVSSFDIKVCFLNGEGDQLNAFTVKNDLPGATKLRDEILYAVQDESVSELRVGLESTSVYSFHPSMFLHNDESIQSHGGQVFVMNPKQIANFKKSYSDMDKTDEIDAFVIADYMRFGRLPMSVVKEEQYVALQQLTRARYQIVRQITQEKQRFLQYLSYKCNTFTEDVESSVFGKALMDLFLESYSLEELSQMSLEDLADYLRIKGRNRFPDVKQVAKSIQKAARSSYRLDKVVEDSIDAILGTSITLIRTFEKQIKDLDKSIERIIKGVPQTLQTIPGVGPVFTAGIIAEIGQIERFVNEAKIAKYAGLYWRKHQSGRFTADDTSLSRNGNQYLRYYLVEAANSVRRQIPEYRDYYAKKYQEVPKHQHKRALVLTARKFVRLVDALLRKNQIYTPGRGVPYEA

SEQ ID NO: 160484 - protein, 449 aa, unidentified
MSKIKTKNEKVKRISQLPVIRPATAGIDVSDAEMMVAYPISSEQLEIRAFGCFTTDLHSIVKCLKENGITSVAMESTGVYWVALFLLLQEEGFEVYLVNAKHVKNVTGRKEDESDAEWIQKLHSCGLLNASFQPDNMTRTLRSMVRHRKNLVRTSSSYINRMQKALELMNIKLHTIISDIDGKTGLRIIEAILEGERNPEILADMRDKRIKASREDIVKSLEGYWTTEHLFELRQCYQLYCTHRQMIEECDREIEKQLVEQIASRNEGMIPDIPKVKRKVSGGKHKVPFNLTAHLREILGVDVTEVVGISEISALTIMSEVGTDMSKWKTEHHFTSWLGLAPNTKVSGGKTISSRIMKKKHHAGQAFRMAANSLNNSKSPLGDHYRRIRAKAGAAKAVVATARKLAIIYYKMVANKEAFNPKALEDYQQKYKQKKINQLKKKIALLEAA

SEQ ID NO: 160485 - protein, 343 aa, unidentified
MQTITTIGLDIAKSVFQVHGVDAGGRVIVRRQLKRRSVLAFFQKLPPCLVGIEACASSHHWSRELQALGHTVRLMPPAYVKPYVKRQKNDATDAEAICEAVTRANMRFVPTKTPEQQSGLVLHRTRHLFIRQQTAVINAIRAHLAEFGIVAPVGRHGVEELLNVVADPGDRRVPEMARACLLAFGAQLRRIKEQILEFDRLIRAWQRSSEMSMRLDECPGVGPVLATALVATVADPNAFRSGRNFSAWIGLVPKQHSSGGKNRLGNISKQGDRYLRGLFVAGALSVIRYAKIHGTKHRPWLTALLARRPTKVAAIALANKIARMVWAMMARGERYKEPAALAR

SEQ ID NO: 160486 - protein, 347 aa, unidentified
MNFYTQQHKHYCGIDLHARAMYVCMLDQAGTILIHKNLPTTPEAFLRVIAPYREDVVVAVECMFTWYWLADLCAKEGLAFVLGHALYMKAIQGGKAKHEKIDAHKIAVLLRGGMLPQAYVYPAEMRATRDLLRRRCHLVRKRAELLAHIQNTNSQYNLPEIGKKLAYKANRAGVEEHFLDPSVRKTIEVEVSLIDHSDQLLGEVELYLTRTAKAHDVQTFARLHSVPGIGKILALVLLYEIQDLPRFPRVQDFGSYCRLVKCAKESGGKRLGTSGKKIGNVHLRWAFAEAAVLFLRQNQPGKEYFAKLERKHGKGKALTVLAHKLARAVYYLLTRAQAFDLTRFVPA

SEQ ID NO: 160487 - protein, 335 aa, unidentified
MKTAGIEVSCQTLTLVINQNGRLGEPRTLGNTPDRYPELIQVLRKARVSRVCFKAMGLYHLDPALVLDGAGLEVMVIDPKAAKGFAETMQTRTEIAVVDATVLAELALRIPFEPWSRPDASALAVRACAHRITTLSEACTQTKDELHAARKTAATPEFLLAQLQQSIAQFDAQIQRLHRQVLDLIAADQDLQQTFDLLVSVTGIAAADAIQLLGELLVLPQDMSAKQWVAMAGLDPRPPRSGTGVDKKPRLSKAGNRDLRLALYRPAQIAICQDPQVRAYYHHLIKTRGLKKIQAVCAVMRKLLHAIHGMFKTRTPFDNSRFHTPPKVKHGKITR

SEQ ID NO: 160488 - protein, 322 aa, unidentified
MTSSKLATRVIGVDVAKNKIDVSDPHGKIKREIQNTNACIVKQIVSKIDQPDKTFVVCEATGGYERTLVQALQQAGIAVCVANPFQVRQFGKGIGVLEKTDPIDAALLQRFGEVVDLQPTLPKSPEHQAHEALVRRREQLMNMINQEQNRKAQADNLPIISMIDETLDLLKKQLNSVDLQVKAFLEKEAETNMAVAILQSVPGVGIVTTSTLLSDLPELGTLNRGEIAKLAGVAPIANQSGTRDRKRSIFGGRSHVRRVLYMAALTATRFNPVIKTFYKRLLAAGKEKKLALVACMRKLLTILNCMINRKERWREEKVVTGT

SEQ ID NO: 160489 - protein, 322 aa, unidentified
MSVSNQRCAGIDVSKGTLDIAISNNASQFTVPNGSDGFTQIIGELKRNKTRLILMEATGGLESGVACHLQSEGFDVVVINPRQARDFARAMGYLAKTDRIDARVLLQMSEVINQHPEREKYIRPLPDAHRQILAAMVVRRRQLTIMLTAERNRLHPSHPQSYESIKSIISALKGELARIEDEMAIHIKDHFSELSGLLSAVKGVGAATVAVLLAEVPELGSLSRREISALIGVAPVNRDSGTMRGRRILFGDRASVRTALYMSALVGTRHNPVIKEFYTRLVAAGKPKKVALTACIRKLLTILNAMLKKNEAWDPMYHQHAS

SEQ ID NO: 160490 - protein, 367 aa, unidentified
MKKISTEAVKQNRNFSEQKLTIGLDLGDRSSWYCVLDEAGSVLLGQRLSTTPKAMKEALGGMPRSRIALETGMHSPWVSRLLSELGHEVIVAHARKVRLIGESRKKDDRLDAQTLARLARIDPQLLCPVRHRSAKAQADLTVIRARAGLVRARTALVNTARGLAKSYGERLRGCNVRNMNPEKAEGLSPELQRALEPLLAGIESLSERIGECNEGIEKLAQESYPQVARLKQVKGVGTLIALTFLLTLEDAQRFRKSRDVGCYLGLQPGRRNSGQSEPQMHISKEGDPYLRTLLVQGAHHILGPFGADSDLRRWGLKLAERGGRNGKKRTVIATARKLAVLLHRLWVSGEAYEPLRNSNQRVMPAAA

SEQ ID NO: 160491 - protein, 353 aa, unidentified
MGLKHQKEKRSMNHFAGLDVSVKETSLCIVDDAGRIVREVKVVSEPEALLAVLKNPAWHFKRIGLEAGPLSQWLFNALAEACLPVICVETRHMRAVLKAQINKTDRNDARGIAQMMRAGLYRPVHVKTLRSQKLRMLLTHRKLLQSKAIAIENDLRATLRNFGLKVGIVGTVKFEARIKELVEGLPDLAVLVEPLLVVRRALREQIGVLHRRLLAIVREDDVCRRLMTVPGVGPVVALTYRATVDVPSRFRTSKAVGAVVGLTPCKHQSGESDRTGAISKCGDEMIRTALYEAAQILLVRSKRWSWLKAWAMQIARRRGMKKAIVALARRLAVIMHRIWVDGTEFRWTREAVA

SEQ ID NO: 160492 - protein, 328 aa, unidentified
MKHLALDAHTRTSELSVRDARGRLIDCRQVPTEAHALIESIGHVAGRKTLVVEESNLAGWLKRTLEPHVTRFIVCNPKQNHWIAKDEEKDDPLDANKLSHLLYGGFLKEVHHPAEPQQRFKNLVLHHYRLSRSVVRYKNQINAKYREQGFVCRSYLKQGIPDELDEIRSAELEDLCDILEAAESIGKRAKTRLQREARKFPQIARFQEMPGIGLIRASTFFAIIDTPFRFPSRSKIWVYCGIGLKTRASAERVYRQGPNQEFNRYLKSAVKQAVGNAVRQKGRFQDQYDRLVKLGTDPRQARVTVSRSIVSTMWSIWKSGEQYNPEMS

SEQ ID NO: 160493 - protein, 422 aa, unidentified
MMGKERRWFVGVDWGSQEHVVSLYDDEGEKISQRRFAHGGTGLTDMIAWLLKASGGKPGDIHVAIETPHGPIVEAVLERGFNAYSINPKQLDRFRDRFTVSGAKDDSRDADVLADSLRTDMRAFRKLSIADPIVVELREWSRIDEELKVEHVRLTNRLKHQLWRYYPQMLELADDVGANWFLDLFEVVPTPEKAANVREKTIARILKNHRIRRFDATHVLSELRKPALSVAPGTIEAATARIRGLIERIRIINNQIKDAGRQLDRLCKNLSEPVADKDEETSPGQKTEQRDAAILDSLPGVARTVLATLLAEASDTLQRRDYHALRALCGSAPVTRRSGKSCVVVRRYACNQRLRNATYYWAQNAVRFDATSRAKYDALRAKGHGHARALRSVIDRLLKVACAMLNSGTLFDPEFASKQTTG

SEQ ID NO: 160494 - protein, 345 aa, unidentified
MNTIKVTQREGKGKSVCLNEFDHFLALDWSMKVMAIAHMRRRSKEPETFERPSDLKEFKQYLATLKGRKVLTIEETTTAQWLYVELIDHVDRIILCDPYHNRLLSNGPKTDKIDAGKLCLLLRAGLLKEVFHSLSGLYELRRLVSAYEDLVKAGVRVLNQKASMEQGHFESGKHAPFILEHVAKSIELYQRSKEQYERKFSDLSKRNKLLKNLMEVSGIGIIGAVKIVAIVVDARRFARAGNYLSYCGLIKHEKISGGRSYGRRRPRFNHTLKVVYKLAAMSVISGHNNPIREYYEYLLAKGFAEHNARHAVARYIARLTYGMLKTGKRYQAYQWRNQAAGHQAA

SEQ ID NO: 160495 - protein, 334 aa, unidentified
MGSKKYRRCCGIDVHKKNVTACILPPVGKPEVEVRKRTFRTFTRDLKQLRTWLKNLKVTEIAMESTGQYWRAVWNIFEGHFEKLILVNPQHIKGLAGHKTDPKDAQWIASLLETGKLKGSLVPPRELRELRDLTRQRVNLLEELNRAKNRVEQLCQAGNIKISSVASDLFGLSGRTMLKAIVEGRRDPGWMADYARGTLRGKRRELELALDGSFTDNQRWLLHQELGQVEWLEVHIQVLEQEIARRMAPFEEPIRRLTTIPGIESKTAWTIVAEIGVDMTAFEDVQHLASWAGLCPGNRESGGKRMSGRMRKANRYIKRAMCQAAWAAAHTRNT

SEQ ID NO: 160496 - protein, 420 aa, unidentified
MKAYNTNDFAALIGIDWADTKHDICEHPINTEKYHYCIIKNKPQALHDWAMSLKQRYPNQQIAVACELKKGPLIYALAKYSHLTLFTINPSSVANYRKAFTPSNAKDDPSDAFIQVEILSLHMDKLTVIEPESAPMRSLAQLVEYRRSLVQDSVDLSNKITATLKNYYPQVLEWFKEKDTFIFCDFISKWPSLAKVKRAKKQTLLDFFNSHHSHYPNVNEARIRSIKSAMPLTEDLGVITPNQLLIEVLIKQYRVLLKGIETLDKAIKPAYKSQEDKVIFDSLPGAGPQLAPRLLVAFGSNRERYKNAAELQKYAGIAPVIERSGKKKWVHWRYSCPTFLRQTFVEWAGFSIRYSFWAKAYYEQQKSKGKLHNCIIRSLAFKWIRILFRCWKTRTAYDESKYLEALKHRGSPLLKFAINS

SEQ ID NO: 160497 - protein, 353 aa, unidentified
MPTKSNKTIVNVAVIGIDIGKNSFHIVGQDQRGAIVLRQKWSRSQLAARLANLPACLIGMEACVGAHHLAHRLTALGHDARMMPAKYVRPYAMGQKNDFNDAEAIAEAVQRPTMKFVPIKSADQLDLQAMHRIRERAVSQRTRVVNQIRAFLLERGIAVRQGMRFLRSELPIILATRDDVLSPRMMRLIEDLSADWRQLDERIENLSDEIEGLAKQDACCTRAMTVPGIGPIISSAVVSAIGNGAAFSKGRDFGAWLGLVPRQMSTGDRTILGKISKRGNRYLRKLFVQAAWVVLIKPMSWERHGLKQWIEAAKKRLHHNVLAIALANKLARITWAVLNGEHTFHARVERHAT

SEQ ID NO: 160498 - protein, 419 aa, unidentified
MNYVGFDWASRAHDVTVLDEAGGVLDRWAFPHSETGWVTTLDRLARHGSAAEVPVIIERTCGLIVDRLLAAGHPVVPVHPTAFYAARPRWGASGAKSDPGDSYKLADYLRTDGHRLRRLTPTDPGLHELQALVRLRDDQVRARTAATNQLTAILDTYWPGPKQLFMSLASQIALAFLTDYPTPTSAAHLGEARMAAFCRRHAYRGGKSPAELLSRLRAAPVAPVGLPPATLAAMVTAQVTLLKTLQTVISDVERLIAVRVVAHPRSNLFENLPGVGMINLAQLLAEVGPILDRVDSAEQAATECGAAPVTRSSGQTRGVYFRWAANTRARKAITSFAHNARMQDDWAAALYADARARGKRNPHATRIVARAWLRVIWACWTSGQRYNPDRHHSSRFLHRCHPAGAQARSRWSPPPEERS

SEQ ID NO: 160499 - protein, 366 aa, unidentified
MKKTSTVRVNGNMIFKGHQLTTGLDLGDRWSNYCVLDEAGEIILEQKVAMTPEAMKQTFSKIPQGLIALETGTHSPWVSRLLTELGYKVIVAHAQKVQLISKSNRKDDRHDARTLARLARIDPELLGPVRHRSAQAQIHLTVIRARAELVHARTALVNAARGLVKSYGQRLPKCGTQQVSRELGAGLHAELREVLEPLLKEVESLNQRIQEYEVRMEKIAKESYPHVELLKQVKGVGTQIALTYVLTLDDPHRFPKSREVGCFLGLCPGRRDSGESQPQMNISKEGDRYLRTMLVQGAHYILGPFGEDSDLRRWGLKLAARGGKNAKKRAVVAVARKLAVLLHRLWVSGEVYEPLRNSQKAIRAAA

SEQ ID NO: 160500 - protein, 338 aa, unidentified
MTIKFLGIHLAKSVFQLCGLNQAGKVVYTKRLNRDKLLQEIATLSECQIAIETCTGAFYWQREFEKLGHNVKIIAPQFIKPFVQGQKNDSNDAQGIAVASMQPTMKFVPTKSQDQLDIQALHRARQRIVNHRIATVNQIRGLLLDRGIVIGKAVSRLRNAVPLILEDASNGLSIRMRRTIAQLYELMRDLDTRIKYFDKEIEVVFKESETCQRIAKVKGIGPKTATAILAAIGNGSEFKNGRHFAAWLGLVPKQHSSGDRQVLMNITKRGGQHLRTLLIHGARAVVRTCTNQNNLFNKWVGDLKERRGYNKATVAVANKNARIVWSILRNGDEYRLPV

SEQ ID NO: 160501 - protein, 392 aa, unidentified
MRKPKKQKMPPLNDLSRSLTAFDPNQTLTVVVELSKKNWLVAGIIPGVERQPLKKLPTDENELLKLLERWRAEAEKAGHKITRIAVAFEAGRDGFWLARWLRARGIEAHVIHAASVAVPREHRRAKTDRLDTQLLKRAFLGWLRGERDHCKMCAIPTFAEEDAKRPHRERETLVGEHTTIINRIKANLARLGIRSFDPQLEKASLEKLRTPEGEPIPSNALAELARDLARKQFVAEQIQQIEKVRLEQLKQAPKIGTNLMVLLLMRVIGIGIETADMLVKEILSRHLRDRRAVARYGGLTGSPDESGSSSREKGLSRSGNARVRRGMIQLAWRFLRFQKQSVLAEWFEARTKNARTSRKKMIVALARKLLIALWRFVRDGVVPEGVALRPAH

SEQ ID NO: 160502 - protein, 403 aa, unidentified
MNRNAVGIDVSKGKSMVAILRPYGEIVSTPFEVKHTVSGIRSLIEHIQAIDGESRIVMEHTGRYYEPIVRELSQADLFVSAVNPKLIKDFGDNSLRKVKSDKADALKIARYTLDSWTELRQYSFMDEIRNQLKIMNRQFDFYMKHKTAMKNNLIGILDQTYPGANTYFDSPAREDGSQKWVDFATTYWHVDCVRKLSLNAFVDHYQKWCKRRKYNFSQSKAVEIYEASKEIVSVLPKDDLTKLIVKQAVEQLNMASQTVEQLRAMMNEAASKLPEYPIVMAMKGVGRSLGPQLMAEIGDVSRFTHKGAITAFAGVDPGVNESGSYEQKSVPASKRGSGTLRKTLFQVMDALIKTKPQDDPVYLFMDKKRSQGKPYYVYMTAGANKFLRIYYGRVKEYLSSLSK

SEQ ID NO: 160503 - protein, 344 aa, unidentified
MNIASIGIDLGKTTFHLVALGERNKILLRRKFSRSQLLAYTANLPASLIGLEACAGSHFIGTVLREQGHQVRLIPAQFVKPYRKSNKNDFIDAEAIAEAVTKQNMRFVQIKTQEQLDWQAMHRVRDRLMQRRTALINEIRGFLLERGLTFVARPIYLRKNLPTVIEDAEQNLTPRLRWLLDRLWQEWKQTEIDIKAITDQIEHISNNDARCRRLRQIPGFGPLVSTATVAAIGNGAAFRRGRDFAAWVGVVPRQYSTGGKQKLFGISKRGNIYLRRMLIHGARAVLLRVKYDTGGFGQWVHRLAQRAPRNKIVVAIANKLARMAWAVLSSGQEYRHQPVQLPAA

SEQ ID NO: 160504 - protein, 418 aa, unidentified
MELKYERCAGLDVHKETVVACVRVAMAGGKASHEVRSFGTTTSALLELSEWLETCQIKAVGMEATGVYWRPVWHVLEGDFELTLANARAVKGLPGRKTDVNDAMWLSDLLAHGLIRGNFVPERPMAEIRDFLRTRKQFAREKVRHTQRIQKILEDANIKLDSVISNVVGTSGRRILRAIIAGTTSKEFLASLGSSRLKASKEELAEACRGFVRDPHRFLLEVELDEVEHLEAVISKLEGEVAKRIEPFRGAVEMLMEIPGVGELAARTIVSEIGIDMNRFPSDAHLISWAGLCPRSDESAGKKRSTRIRDGAPWLREVLVQCAWSATRAKGSYLRALFYRLRARRGPLKALIAVARTMLQSAYHMLRNGEAYRELGEKHFDTLNQMRTARRLVQRLQKMGYAVNITGLPAAEPAGSFS

SEQ ID NO: 160505 - protein, 454 aa, unidentified
MQEATQHDAVDVFVGVGVDVDVDVDVGKGRHHAVALRRNGKRLYNKALPNDEVKLRALIAELKTHRRLLFVVDQPSTIGALPVAVARAEGVLVAYLPGLAMRRIADLHAGEAKTDARDAAIIAEAARSMPHTLRSLRLADEQLAELTMLRGFDDDLTAQVTQTSNRIRGLLTQIHPALERVLGPRLDHPAVLDLLERYPSPSALAAANEKTLANRLTKLAPRMGKNWAAEIVQALNEQAGIVPGTQAAAIVMPRLAQQLAALRKQRDEIAAEVERLVLAHPFWPVLTSMPGVGVRTAARLLTEAAQKAFATAAHLAAYAGLAPVTRRSGSSIRGEHPSRRGNKVLNAPCSSPPSLPYETQSHGPIPRARSSRASATTKHSSRSHGDAATSCLPCCATAPFTQPFTHPSQPLTLDERHRGTRACCAATSPRGAAPVRRMRSRPDVARARPRRYMP

SEQ ID NO: 160506 - protein, 369 aa, unidentified
MKEHITHVAMDDSKRTIGLGILRPRATEPELRSIPNEPRHVRRCFERLQRDGRVVACYEAGPAGYDLYRQLTALAVPCQVIAPALTPRKPGDRIKTDRRDAAKLVRLFRAGELTPIRVPEEAGEAVRDLVRCREAVQEDLRRWRHRLGKVLARHGRVYRDGRNWSQRHWTWLRGQHFQLPALDRTYAEYRGTVEHLLAQLADLDREIGAAADTEPYRRPVGWLRCFRGIDTLAAMLLLAEIGDFQRFATPRTLMAYLGLVPSEASSGAREQRGSISKAGNTHARRILIEACWHYRHPPRLGPALARRSQGQPPAVRAQAWKAQQRLHRRYRHLVGHGKRPPVAVVACARELLGFLWAALIQATPLRNAA

SEQ ID NO: 160507 - protein, 369 aa, unidentified
MAKPITYVGLDVHKDTIAVALAEGGLRGEVREHGKIPNTLAALKALTVKLAPARRELRFCYEAGPCGYGIQRQLTEAGHECAVVAPSLIPRKPGERIKTDRRDAINLAKLHRAGELTPVWVPDQAHEAIRDLVRARQAAVRTLRQARQQLSGFLLRHGRHYHRPAWTQLHRRWLASLKFDQAVHHIVLEDCIAAVEAAMSRRDRLEAHIEAVLPEWSLAPVVEALQALRGVRLVAAATLVAELGDITRFTNPRQLMAYLGLVPSEHSSGRTRRQGGITKAGNGAARRMLIEAAWSYRFPARIAREQLLRQERLAKPIRDIAWKAQERLCRRYRKLARAGKLPTVITAAIARELAGFIWAIAKQVQPTAT

SEQ ID NO: 160508 - protein, 394 aa, unidentified
MSTLFVGIDVSKDFSTAKGLSIEGKSKFYIELKMDSEGFSQLLAAIRSNCEDFSEATVAMESTGCYHINLFSFLTNKGIQCVVINPLLILNFCKLTLRKTKTDKKDAATIAQFLLVHKEPLSKLSFSQDVQDLRDLARERESLIALTSALKNDIRRMLQLTFPELESLCNIFSETILHFLTQFPSARIVKAADKKTIAKALVHADRRKRVAVSSDDIIKTAQVSVATSGAAKELILPQKISTFLYLVEKRKKITKALVKTCKTMMVQDLEIITSIDGISNRSGALFLAEVGDYRAFQSYKNLIAFAGIDPSTHQSGKFEGKSRISKRGNRHLRRIIYNMTFCAVRENNVFRDYFLKRKKDGLLFKMAILATAHKLVRVLFAMLLSKSLYKIKNA

SEQ ID NO: 160509 - protein, 346 aa, unidentified
MSKHSLPAGDIGALLARFSEIRQKAIARTGKSFEIIVIQEAGLDGFWVHRVLQKEGIESHVVDPASIATSRRRRRAKTDRIDGEALLRALLAYKRGEPRVCAMVKAPPPEDEDRRRLCRERKVLIAERVQHVNRIKGLLFCQGVSGYEPLRRNRRQQLDALKTGDGRVLPDYLKAQISRELDRLELLLGQIKAVEAERDALFAAATATAPMPAPVTMLLEIKGIGPEFAAILWMEAFFRSFANRRQVAAYAGLAPTPWQSGSVDREQGVSKAGNPRLRTMLIQLAWLWLRHQPQSALALWFKERVTRNGGRFKKTTIVALARKLLVALWKYVTAGVVIEGAVMKCA

SEQ ID NO: 160510 - protein, 490 aa, unidentified
MNSGNKSIFTRQNQTLINLFRDAKHPDKVLCVPIDYAKQTHMTLFCNGSERLLKKPFPVKNNPEGIAFLLKAVEKICRKHHIKREHVFFGGEDCGTFSDNFIYALRKEGFAVMGVNAADAARQRENMQASTDKLDLLGIAKMLLGKRGSIAGGQIGKERALRSLTRHRDSQVRMRTATGNRIHKIVDQLFPGFLDEKCSAIPPFSEASLYLMEDRFSPVQIAKRQDKALLRKLKMHGLQHPEAALGKLKAYARQVLGHPPELVGMLQTSLAGEVNLYRCLCDNIDLIGREIAQQLAQTPGAMLTTIRGTGITLAAGVASEIGPPDSQPSTRRLCSYAGIVPRVKQTGGPEKGAKTGKVSRRNNHLLKNHIVQCGNHLGQHGPADLKEDHRRRGANTQHADFGMARRYLRMGMRLMKNNESYVPPELRSLKNDAAVQELRSYYLDFWPKLLDKWVKAGAVHTAFAPENPLGQWRERIEAIYEIELPLPKKK

SEQ ID NO: 160511 - protein, 274 aa, unidentified
MEAKFVGIDVSKATLDVDCLPVITPLQFSNDASGIAGLVKWLVGSGVERIVLEATGGYEVAAASALAAAGLPVVVVNPKRVRDFAKAQGILAKTDRLDARVLALFAQQIAPPVRALADAAQRDLAELLDRRHQLVVMRTQEQARMATVLPVARSDVKQHIAWLDKRIRKHEGVLLKRLRANDIWDAKVTLLDTVPGIGPVNLFTLVGRLPELGTLNRQQIAALVGVAPFNDDSGKRRGQRYIRGGRADVRCALYMATLAAKLWNPVIPPACASC

SEQ ID NO: 160512 - protein, 327 aa, unidentified
MVGLDSTGRVLIRKRCSRAQLLTFTANLQVQLIGMEACSGAHFLGRALREQGHEVRLMPAQYVKPYVQTNKSDYLDAEAIAEAVQRPRMRFVPIKTEEQLDLQALHRVRERWVMRRTAVVNQMRSLLLERGLTLPKGRSHLDEQLPRILEDAELNLSGSFRVLLAQLKLELEQLAARIEEMDRVIQKTARENEACQRLTEIPGVGPVTATALIAAVGNASAFGKGRRLSAWMGIVPGECSSGGKQKLLGISKRGNKYLRRLFIQGARSVLQQRYKQAPGLSSWLAQLLGRTHQNVVVVALANKLVRMAWAVLCKNERYRPPVFAGTT

SEQ ID NO: 160513 - protein, 410 aa, unidentified
MEVLYLHCAGLDVHKGTVVACVRHMVNGAVTRDVRTFGTTTKDLLALSEWLASQGCTHVAMEATGVYWKPVWHILSDGDVTLVLANAAHVKNVPGRKTDVNDATWLADLLAHGLIRGSFVPDAQTQELRALLRTRKQFVRERSSHVQRLQKTLEDANIKLDGVISDIIGLSGRRMIEALIAGESDPEALAALAHRRIKAPPAVLREALRGRVTDHHRFLLQLHLQHIDALDAAITAIDREVNVQVEPFHTQVLLLTTIPGVSDLSAYVIRAEIGGDMGRFPSVGHLISWAGFCPRNDESAGKRRSNRMRKGAPWLKTTLIQCAWAAARKNGSYLQAQFPRLRARRGAKKAIGAVAASILTAAYHMLKNGTLYHDLGPDHFDRRAKTVQTKRLLTRLQRLGYAVQITPLAA

SEQ ID NO: 160514 - protein, 418 aa, unidentified
MNTDWTQHAYFAALDWASDHHDVLVLDRQGAVQAEFRFAHTADGWAEFTLKMQPFTGAPITLETSSGPAVDQLLQRGWAVYPVAPPAAARYRERKVPSGTKTDRHDTWALADALRTDGHAWRPLRPQDEATATLRALCRDEIALIEQRTALVNQLQAALREYYPAALAAFDDWTAPYAWALLLQFPTPAQLQAAGKRKWEKFLHTHQLWRPQTVAARLELFAHAHALPASPAVTAAKSLLAVSLAKILVTLQTQLDEYRRRITEAFHQHPDHDVFGSLPGAKATLGPRLLAEVGGVREEYPDADALLCQAGVSPVSYQSGKVNKCRLRRACNKVLRATVHLWANSSRLTCEWAQAYYQMKRDEGQSHASALRCLGKRWLKILWRLWQNHEAYNEAKYLAQLQKRGALTWTKLQTPQTV

SEQ ID NO: 160515 - protein, 471 aa, unidentified
MQVLYYRCCGLDIHKKLIVACLLSMSAQGVHKEIRTFGTTLADLYRLRDWLVANECQIVAMESTGVYWKPIWNVLEEELKLLLVNAQHIKAVPGRKTDTKDAEWIADLLQHGLLRASFVPPRPQRELRELTRYRTKLVQERARLVNRIQKVLEESNVKLASFATDITGVSGRAILQALLDGQQDPQQLAELARGRLRNKRDELAQAVQGTLREHHRFLLKSQLRQLDFYDSQIGELDQEVARRLGVQAAPDDHGPDPSGGEPSGGQRPPSAGHSPEGTQTPPPSSSQVSSSPARSQAEMLRILDEVTGINQRIAQIVVAELGTQLDQFPSEGHLVSWAGLCPEAKISAGKRLSTKTGKGNRWLRQALIEAAHGAARSKNTYLGAYYQRLKKRLGSKKAIVALAHRILVIIYHLLKEQQSYRELGPGHADEQAAESSRRWAIRRLEQLGFAVTLTPKDQEPLATTDHEEEVA

SEQ ID NO: 160516 - protein, 429 aa, unidentified
MNANSADSAPVFVASIGLDWGDQSHALALHDPATDQIETATLTHSAETLHQWLDQLEARFGGRPVALALEGTRGAIFPVLLARPWLHLFAVHPVTSARYRTAFTPSGAKDDLPDAQVLLELLLRHRDKLTPLTLTDAATRQLAGLCEARRDLVDRRTQLLNQLTACLKKFYPQALELVGDHLASPLALAFLTKWPDLLSLKTARPATVKAFYYTHNVRRPETVQTRLERIRQARALTTDEAVINVAVRQLNVLVEQLHVVQKHVAGFDTAIAAAFAAHPEAALFRNLPGAGAVLAPRILIAFGTERDRYPDPGSLQKYAGLAPVREKSGGALWTHWRWHAPTFLRQSFIEWAGQTVVYCPWAKAYYERMKAKDKGHWAILRALAFKWVRILWKCWQERTPYDEARYLKQLAHRRSPLAQVRLQTQPVTS

SEQ ID NO: 160517 - protein, 418 aa, unidentified
MVAVDVVHARCAGIDISKTDAKVAVRVHREGKAKADVRVETFGSSTPQVLKLRDWLVECQVTCVVMEATGDYWRTFFYLLEDAGFELLLANPRAVRGLPGRKSDVADCQWLAELGALGLVAGSVVPPPPIRDLRGLTRLRTQLARDRATNAQRLEKVLEDAGIKLSSVATDITGVSSRRMLQALADGIVVEDIVEMAYGALRNKRTELADALTGQFTKHHGFMVRMLLARIDACDADIAELTTRIDLLMEPYRRAHDLLVTIPGVSNRVADVIIAETGGDMSQFPDAKHLASWAGVAPGSNQSGPRAKPAHVRPGDTYLKGALGVAALSAARNKKTYYSAQYRRIASRRGPMKALVAVENSIITSVYFVLTRDTPHVDLGADYFTRRRPDTAKNRAVSQLETLGYQVTLTATQESVAG

SEQ ID NO: 160518 - protein, 386 aa, unidentified
MQLQQTLATPKLYIGIDVHKKTWSVHYKTDICDHKTITMPPEPQLMADYVFTHFPHHEVKVAYEASCCGFSAARYFLNLAWEVLVVHVPDMPKTDKQNYQKTDKLDCRNICNWLATGQLKSVHIPTEQQEQFCNLLRQRFRVTKQLRNSKCNIKSALLYFGMAIPEQLDKPHWTKDFITWLQQLEFTDIAGKYSMDSKLRAYTYQEQDYRLLATQLRAYAKMHYKKDYELLKTVPGVGGYMAAAILAELGDIRRFKNERQFSSYIGMVPGIHQSASTEKQMGITPRCRALIRTYLVQAAWQALRRDPELQAYFRTHVGKNVKSVIIKIAHKLVKRIYSVIKNETPYVCNYQNTNNTKLDKKLLDTIEQNIKTEDYDIDIDTEIDKD

SEQ ID NO: 160519 - protein, 363 aa, unidentified
MALKIVYQICCGVDVHKTFVVASIASTNKQVLPPKRHRFSPFTQGLKELLQWLLDNHCKNVCMESTGKYWIPIYNVLEKDCNIVLAHPKYVKASRGKKTDKKDAKWIADLFKFGIVRSSFIPQKDFRILRELTRYKYKLVNMRSSEKNRFQNALTSGNCKLDMVFTDVFGKSASNIIDLILSDNPYTDEDILSKVHKKCKASPDMILDSINGTDLTPVQKSRIELVNDHIKQLSSNIQRLDKLIYLMIEPYEDYISFLCQIPGVSRNSAITILSEIGVDMNQFTSTRRLTSWAGLTPSSNQSTGKKKSVRISRAGVYLKPCLVEVTHAAVKDKNHPYYANKFNKISNVVERNVLLLRLPEKYL

SEQ ID NO: 160520 - protein, 422 aa, unidentified
MLGVGIDWAEEFHLVALGHPDEGVIELSRVEHTPAAVEALIERIARLEPDPAAVRVVIETRHGLLVERLTDAGYTVLPVNPDLIARRRGPARKNHDAEDARIACLLALDRHAGLRPLVPHGELAGELRAIARDDERAARDQRRLLNRLRQDLISTFPAALELAGDDLGAPTVLRLLERWPTRTQLAQASHDELVAFARAARHGWPDRFADRIQQALAADHLIPRDYLVRAKAATIRLTAIQLLAIGTQRRAWERRMAELLLGARPTGKSGRRREERPGNAVPGGKVYLSFPGLGDRLAARVAGEIGDHVDQFESPNALQCYAGKAPVTRRSGKSELVVATRLACNRHLADAVQQWAFCSLRASGWAREFYDAQRARGKHHHAALRALGNRWLEVLWHCLIRGVCYDEATHVANRNRALAKAA

SEQ ID NO: 160521 - protein, 352 aa, unidentified
MQHFIGCDVHTRDQVVAWIEEETGEIKKRRLEHASEEVKGFYAQFPRGTVVGIEATFPAHWFERLLAECGHELWVGDAARIRASEVRYQKTDARDAEHILDLLRTGRFPRIWVPSLEERDLRQLLVHRMKQVRARTQVKNQLHALAISQGVCRKRKLWSVKGRKELERLALLPWAGRRRKELLESLDRLDEQIRELDRAVEEAGREREEVALLRTHPGVGMVVGLAFVLTVGPLERFRNSRKLVSYWGLNPRENSSGGRQRLGAISKQGNTMMRWLLVEAAQTAARLDPQLGRIYQRLKKQKTSAVAKIAVARRLAVRLFWMLRTRNNYTQLVHMSGSPSSAVVPPRAEPTV

SEQ ID NO: 160522 - protein, 338 aa, unidentified
MTIDVLGIDLAKNVFQLHGVDRKGHPVFKRRVMREQLLSVVAGIEPCTIAIEACTGAFCWARKFEELGHKVKIVGPQYVKPFVRGQKNDGNDAEAICTAVRQPHIPLVPKKSIEQQDIQALHRARQRMVNHRTAVVSQIRGLLLDRGIAFAKSIGRARRMIPEILASQANELTAMARDAIGELWDLLCDLDRRIESFDKKIAAVFKASEVCQRIAKIKGVGPKTATAIVAAVGDGAEFKNGRHMAAWLGLVPRQHSSGDRKVLMGISKRGDQHLRSLLVHGARSVVRVAANKNDPINQWVNQLQERRGFNRATVAVANKNARIIWAVLRTGEPYRPAA

SEQ ID NO: 160523 - protein, 342 aa, unidentified
MKSTTIAVDVAKEVLEVAVSVRPGQVSEQKRLSRAAFMKFCTDQPPATVLLEACGSAHYWGRRLQSIGHRVVLLPPHATRPYVFRNKTDRTDTRGLLEAFRNEDIHPVPVKSVSQQALTALHRLRSTWLATRTARINTVRGLLREFGCTIPVGAHHVLTRTWDLLADADSGLPDALRPALAAACTEIRDMEGRIHVVEDQLKALADQTPAVARLRSIPGVGLLTATALVAFVGDVQRFPSGRHFASYLGLTPRERSSGLVRRLGAISKRGDVYLRMLLIHGARAVLWAAKKRPTPDRLRVWALHLEKLRGHNKAAVALANKLARIIWAVWKHDVDFREVTVA

SEQ ID NO: 160524 - protein, 400 aa, unidentified
MLSIGIDVSKGKSTVCGMKPGGEIVYTPFEVQHTREGMSELVSLLRSSGEEVRAVLESTGSYHCPVVAALLENGIFVSVVNSLRMKRFCSQSIRKVKTDRIDAMQIALYGLAYWQELQPTRLPEDTYRELQLLARQYYQMTSILIKAKVDFNAICDQVLPGMQELMNDHAGRHKLSDFVLRYHHTTHILEMGETRFRKDYCKWAEKKGYRNCERMAVLIFATAQNGIPVLPNAPSTQIVITEAIRVLHTVEASRDAILTQMQALAKTLPEYSLVREMPCIGDTLAPRLIAEIGDVRRFHSKRALIAYAGIDAPPYQSGKFCANNRHISKRGNRYLRKTGYEVMQSYVMHKPANDPIFTFIEKKRSEGKSGKLAMVAGLNKFLRVYYGKVTELYRSLPAIE

SEQ ID NO: 160525 - protein, 344 aa, unidentified
MGKRCYLDCDVHEKSTTVCLVWEEGGEVKRRDLGVVASTEAALLEAAAGWAATWASQLGELWPPVPVLETGGRSLLVHDALVPLVDEVWVVDAAEVARLRGHRPKKDKEDAFLLAKLAVERLLHPLWIPPLEVLGLRAVVRVRRGMVQRQTGLANQLWALAQLGGNPVERGKTLSGANLGRLKQATWKTRDFAVALELLVKEAEDLADTLGLANAHLKARFAENQYAQWLDTLPRCGVVNSLELATEIGDIRRFRSAEALRSFAGLTPGYGESAGKRTGGGLSKHGNRHLRYAFMTLANQMSFLSADEEELAGLYWRHFNKRRGLTGAGLRAQALVASELCNIV

SEQ ID NO: 160526 - protein, 345 aa, unidentified
MNKPVSIPPSTVFCGIDVSAAFLSVALIESDQTLTPCEFANDPSGHKALINWLGKRRSRVRVSLEATGIYSLDLALALDAASGIELAVLNPKLVNRFAQTLRRSKTDAADAVVLAQYSQRMPFLAWQRPDDKALRLRGLGRYIESLVVDRARLKGRLRTAQSSVTTPRAVLQDLQRAQAALLRRILRMRREAMKLVQATPAFQQRLELLTSVPGIAKISALQILSELILLAPAMTVRQWVAYSGLDPVQRVSGSSVRKQSRISHAGNRHLRRALYMPAVAAVRWDPHLKAFYKALQMRHKTKLQALLAVARKLLHAIFGIFKSNKPYDGNRLFPHLAFELESIAG

SEQ ID NO: 160527 - protein, 389 aa, unidentified
MKIYVGIDIAKLNHFAAAISSDGEIILEPFKFTNDADGFQLLVSKLESFDKNSIIIGPPSTAHYGDNLVRYLVAEFYQVCVLNPIKTCQMRKNNIRKTKTDKVDTFVIAKTLMMQDDLRFVSFYDLDMMDLKALGRFRQKTIKQRTRLKIQLTTYVDQVFPEIQYFFKSGLHQHAVYALLKEAPSPKEIASMHMTHLANLLKVNSHGHFTKEQAKELRVLAQKSVGANDSSISIQITQTIQQIELLDSQLEKIEAEMTDIMRFNDSVIMTIPGIGYINGGMILGEIGDIHRFSNPNKLLAFAGLDPSVYQSGNFQAKTTRMSKRGSRVLRYALVNAAWNVVRNNATFKAYYDAKRAEGRSHYNALGHCAGKLVRVIWKMLTDEVEFNLE

SEQ ID NO: 160528 - protein, 317 aa, unidentified
MNSEAYIGVDVSKALLDVKVLPSNEAQQFSNDDSGVKQLITLVQKIDPQRIVFESTGGLETLAVSSLIENHFPAVVINPRQVRDFAKANGRLAKTDSIDADTIARFARDIRPEVRPPKDEHTRLLSALNARRSQVVDMLVAEKNRLHTAPGPNKKSIQKHIKWLERSLEDINKDIEKTIKKSPACLENDKILQSFQGVGPVVSTTLMCDLPELGTLNRKKIAALVGVAPFNCDSGRFRGRRRITGGRANVRRKLYMAAVASIRHNPMVKDFYDRLINAGKPPKLALTACMRKILTILNAMIKNRTYWIAPCKFLFDI

SEQ ID NO: 160529 - protein, 318 aa, unidentified
MNIIGLDISKDTIDATLHKTNGSIHYIKFKNNDDGLKQFRLWIKGNRIRKAYIGMEATGIYYEKAADMLSSYYTVYVINPLKIKDYGKSRFNRTKTDKADSNLIADYIKRHQDTLIPYQIPKNKALQKLINLKNQLQQHQKQIKNRLHSTEEDFIRNIHQDLIDTIQDKMEQVKIAISEQIKKQTDNNHYRNLQTIPSIGKDTASVLYAQLTEKHFKTANQFVSYAGLSPAIIQSGTSVRGRGRLSRYGNRRLKSTLYMPALCAYRFNAFPKLINNLKKAGKPKMVIIVAIMRKLAKLAYYIVKIGQPYDAERHRLNQ

SEQ ID NO: 160530 - protein, 344 aa, unidentified
MDHFAGLDVSVKETSVCILDDAGKIVKEAKVASEPQALLEVLANPAYRFKRIGLEAGPLSQWLFSALAEAELPVICVETRHMQAVLKAQINKTDRNDARGIAQMMRVGLYRVVHVKTLRSQKLRMLLTHRKLLQSKAIAIENDLRGTLRNFGLKVGMVGTVRFETRVQELIETIPDLVGLVEPMLVVRRALREQIVILHRRLLAIVRDDEVCRRLMTTPGVGPVVALTYRATVDVPARFRKSKSVGAVFGLTCSKYQSGEIDRNGRISRCGDEMMRVMLYEAAQSMLHSKKWSWLKAWALQIARRRGMKKAIVALARRLAVIMHRIWIDGTEFRWTREPATAAA

SEQ ID NO: 160531 - protein, 347 aa, unidentified
MLIIGCDFHPGFQQVAIFDNRTGEIEEKRLQHRAEAEQFYRSLAGQEVLVGMEACGHYPWFEGLLQELGMELWFGDAAKVRASVVRKQKTDRRDAEHLLDLLRQDRFPRIWVPSLEVRDVRQLLVHRHKQVQARTRTKNQLQAMALSHGVQKKRKLWTKAGRAELEQLPLLAYAAQRRKKLLEALDELDVEISELDRRVAEEARERPEAVRLMTHPGVGSVTALAMVLTLGPAERFGSGKQVGSYFGLIPSEESSGGKQRLGKISKQGSSFLRFLLVEAGQTAARYDPQLKRFYRRLAVRKNRSVAKVAVARKLATRLYLMLREQWTYAQLSQAVMQVSPSHSVAGE

SEQ ID NO: 160532 - protein, 345 aa, unidentified
MSIVGGLDIHRRQLTFDYLDTVTGQVRRGQVSPADREHLRAWLARFAGRDDAAFALEACTGWRYVAEELAAAGAAVHLAEPADTAFARGRKRHAKTDKTDARHLRQLLAEGRLPECWIPPGRILEYRALLETYHDLRAEHTAWVQRIHAVLFHQGVPALGEGALRSEQGLAALRAAAAAGLSPAGQLQVATALEVTAALEERLHALRHQLLDAARHLAGAKVLAARLYGVGPVTALALTCWLGGEGRFSSSRQAVRFAGLDVTVRSSDRKGPPGRLSRQGPPVLRWALYEAGKTHARASAPDHAYYAQVKDRKNTKRAALSEARKIIRQACHILTELGDDALTAA

SEQ ID NO: 160533 - protein, 405 aa, unidentified
MEVIYERCCGIDVHKNMVMACIFVKGKKEIRKYGTFTEELEELIAWIQEKACEVVAMESTGVYWKPVYNLLEEAGIKAIVVNAQHIKGVPGRKTDVKDAEWIADLVRHGLVKESYIPNRAQRELREMTRYRQELIEEKAREINRIQKVLEGANIKLASVISDVSGKTGISILKAIISGTTDTEALSQLAIGRTTKKIPLLQKALKGSVGEHQRQMLKHQIRHIEFLIHEIERIDEEVQKKTEYAENEIELLDTMPGIGRRSAERIIAETGIDMNQFKSAAQFASWAGLVPECNKSAGKKMSVKIRKGNKTLKTTLVECACSAIRDKNGFFHARYKKIAARRGGKRALIAIAHSMLLSIFAMLRDKQAYRDLGSNYFYEIDKDKIMNKNIKSLQKLGYSVTLNQTA

SEQ ID NO: 160534 - protein, 377 aa, unidentified
MKQYNTLSVGLDVHKESIAVAYAPDEDGAEAIYLGSVGTRQCDVDKVIRQLHSKACKLRFVYEAGPCGYWLYRYLQKKGQECIVVAPSRIPRRSGDRVKTDRRDALQLARLLRSGDLTAVYVPKPEDESVRDLSRLREETLRDLQAAKNRLKAFLLRHDIRYEGKANWTASHLRTLAHICMATAAQRVVFQEYLGAVTHLMEKLALIETELREHAKSWRLAPLVQALQALRGVQFHVAVTIAAELGDLRRFEKPRQLMAYVGLHPSEYSSGGKRHQGAIAKTGNAHARRVLVEGAWSYRHLAKVSPQIQQRLEGLPEDIRSIAWKAQVRLCKRCRRMIAHGKNRNIVIVAIARELIAFMWAIARKVELSQVSLAQAS

SEQ ID NO: 160535 - protein, 418 aa, unidentified
MIENVQWFVGIDWATQNHRVCLLDVEGRHVNERDFAHNGAGLSELRDWLLEKTKAAPGQIAVAIETPHGPVVEMLLDHAFLVFAINPKQLDRFRDRFTVAGAKDDSRDARVLGSAVRTDRQAFRRLAVDDPVMIELREWSRMADELQQERTRLANRIRQQLWRYYPQAIELTDDVADDWFLALWQQVPTPATAAKVSEKTIMRILKDHRIRRLDAATVLQTLRKTPLFVAPGTTEAACVHIRNLVARLHLVNRQIKEAHRALDGLCARLEAPTENSSGQNREQHDVTILRSWPGIGRIVLATLLTEATQPLRTRDYHALRALAGTAPVTRRSGKQCFVIRRLACNKRLQNAVHHWSRVAIQHDTAARRRYDALRQRGHGHARALRTVGDRLLYALCTTLERQTSYNPNCQTAQLTAGR

SEQ ID NO: 160536 - protein, 359 aa, unidentified
MKYDAALDVSARTSAICVLDRQDGRVVLEATVATEPQAIVVALKPFLKRLHLVGHEAGGVSPWLHRELQALGLPMVLLETRHAAAALQAQRNKTDKNDARGLAQLVRSGWFRAVHVKSEASHRLKMLLNGRRLLKQKLMDIENEVRQSLKVFGLITGPRIQRTSFVQRTRDLVAGDPVIAGVVDCLLNAWSALWSEYKRLHALLVRVVGHDELCRRFMAVPGVGPVVALTYRTGIDDPRRFRKSKTVGAHFGLTPRRIESGDTIAYDGRISKCGDGEVRTALYEAANGLLVRSKTWCSLKVWGMKIAAKRGHKRAVVAVARRLAVILHRMWLDGSDFRFGAAPVSPTRRGSAAATPACA

SEQ ID NO: 160537 - protein, 413 aa, unidentified
MTEETFAWFVGVDWGSEKHQVCILDQQGTIVGERHFLHGGAGLAELGDWLLSVAGTVTAVAVGIEVPHGPVVDSLIDRGFVVHAINPKQLDRLRDRFSVAGAKDDRRDSYVLADSVRTDRRLFRRLHVADPRLVELRAWSRLAEELTEERVRLGNRVHHELWRYYPQMTKLTDDVAASWFLELWTIAQTPAKARQLRKATVGQLLKQHRIRRIDAETVIRTLREPAIKVADGVAEAASVHMRSLIARLHVVNRELREAERQLDKICAEIGATEAASGDGLQRQDVMILKSMPGIGRINLAALLSEGSGPLSRRDYPALRTLCGAAPVTRRSGKSQVVIMRYAAHVRLRNTVYHWARVASQHDPTSKSRYAALRQRGHSHGRALRGVADRLLGLACVLLQRQTPFDPQYGHPAT

SEQ ID NO: 160538 - protein, 353 aa, unidentified
MTTVILPHHWCVGIDLHKDTMTVCTYCRCCGEIAFRKIACKNRDQIAEFFRTLPRPHSVAIEAVGFYRWLWELAEPLVEKLVLADATQARALAGRRLKTDRADAQNIAELLADGRLPLAYAPPLEVQILRDWTRQRNRLSRAHARALHGVKSIMNINNRPGPVRLNAARLIGYLKAYGKLLPERHVRMLWQHQRQLGLLEEEIEMCEREIAKLLDAPRFEPVTKLLLTAPGVGFVTAATVLAEVGDFSRFPDGKAIGRYAGMTPRVFASGGKERQGHISKTGPSDLRWVLQQAAWTAIRCDDQIKRRWLKISRGSGKKSAAVGIARQLLVTLWQMIRHQAPYRPRVEPVPEAA

SEQ ID NO: 160539 - protein, 445 aa, unidentified
MTNDSPQTNCSPTTQSPQSPAPAPILCWVGLDWADKKHCLVVRTAGVAKPETHLVEHKPEALDAWFLKLRQDHPQGRIAVAIEQSRGPVLYALMKYDFLALYPVNPRCLADYRRAFKVSGAKDDPLDADLLSELVYLHADRLRALTIEDLPTRQLRLLVEARRGFVDDRTGFSNRLGATLKCYYPLALELLGEDLTTPMALDFLRRWPNLAQLKSARPGTLRGFFYSHNSRSEDKIAQRLKTINQAAPLTEDPALVEPLQLQMERLVQQLRTLNQTIDQYDARIAAVFAQHTEGWLFKPLPGCGEVLAPRLAAAFGTIRANFESSDDLLCFSGVAPVKKESGGLKIVHFRYARPIFLHQSIVEFAKCSIGHCEWARLLYEHQLGKGKSRWAAIRVVAFKWLRVLWRCWQERQPYDEITYLRSLQRDGVELYRSLYEGLPPVKTSV

SEQ ID NO: 160540 - protein, 345 aa, unidentified
MSMVRMIVGGVDTHADTHVAAVIDSNGGVLGIEAFPADQSGFEALLGWFTSHGEIQMVGVEGTGSWGVGLARFLHDHEILVVEVDRPNRQNRRRVGKSDPTDAVAAARAALSGSATVIPKTRNGPVEQIRILMVARRSARSQRIETLNQLRHLVFTGPEEVRARFKDRYKTGLITEVAKLRPRTGSDPVLFTTMVTMRGLARRIQMLNAETKALDSMLNVLVTDTAPLLVGLYGVGIDTAATLLVTAGDNPDRLRSEGSWAHLCGVSPIPAGSGKTSGRHRLNRGGNRQANAALYRIVLTRMSRDERTRTYVARRRGEGKNTAEIMRCLKRYVARETFKHLPRTA

SEQ ID NO: 160541 - protein, 459 aa, unidentified
MTLKKKMEMEIINRNAAGIDVGSRSHYVAVGQSLEDVKEFGVYAEDLVALCEWLLSYGITSVALESTGDYWQNLFSELIKYGFEVTLCNGKFTKHPKGKKTDVKDCRHIQKLHALGLLTSSFLPEETTEILRTYCRQRNNLLHISSGISRKMQKYLKFLNFRLDVVVKDVCGLTGLAIIADICNGNLDPNSLAEHRHYNCKKSKEEIAKALHGNNREDYLFGLRQEYQSYLFYQKQIKACDKEIDNFIKNELKKSPEKAKLKTTDKPYKRQNKNAPAIKNFNQLAFQYFEGVDLMEIEGVSHSTILSVISEIGPGGFKKFPTSKQFVSWARLAPNNKISGGKVLSSKIPKGSNRLKIALRQAANAIGNLKDTHLSDFFRRVAYRKGRQAAVSATARKLGVIIWTMVTKKVPYSPPKEYLFLDQKRKLKMASRIKKNIAKFDLKPEDIGFGNSLNISIDF

SEQ ID NO: 160542 - protein, 347 aa, unidentified
MKKIFIGIDVSKEKCDATAISAEKGLTEVEKLDYLVFENRPKGFRSLLSWAKRLKPDVAMEDILFICETTGAYDRALCDYIYSKGLDIWRESALQILWSSGVRRGKDDKTDSLMIAEYALHHIDKVHLYESPDSRILEIRALFLYRRKLEQEKTSKLVRIKELEVTAGKSKTLTFIIHDAKKSIRQLEKSIKECENKILELVEADEALSKSYQHLDSVKGLGIVNITALIVYTNNFKAFKTSRKMATYWGVAAFRSKSGTSVDKRADVRNLSSSMLKSYLTQAAMHTIAKGGIYHDYYQRKIAEGKTHSVALNNAKNKLLHLAMSLVTHDMDYEANHEFLRTQRVAN

SEQ ID NO: 160543 - protein, 400 aa, unidentified
MLSIGIDVSKGKSTVCGMKPGGEIVYTPFEVQHTREGMSELVSLLRSSGEEVRAVLESTGSYHCPVVAALLENGIFVSVVNSLRMKRFCSQSIRKVKTDRIDAMQIALYGLAYWQELQPTKLPEDTYRELQLLARQYYQMTSMLIKAKVDFNALCDQILPGMQELMNDHAGRHKLSDFVLRYRHTTHILEMGETRFRKDYCKWAEKKGYRNCERMAAHIFATAQNGIPVLPNAPSTQIVITEATRVLHTVEVSRDAILTQMQALAKTLPEYSLVREMPCIGDTLAPRLIAEIGDVRHFHSKRALIAYAGIDAPPYQSGKFCANNRHISKRGNRYLRKTGYEVMQSYVMHKPANDPIFTFIEKKRSEGKCGKLAMVAGLNKFLRVYYGKVTELYRSLPAIE

SEQ ID NO: 160544 - protein, 425 aa, unidentified
MNKSTTDLTQFAAFIGIDWADKKHDVCLQIPGSSHREFSVVLHKVAAIDNWARALADRFGGRPIAVCLELSQGPIVSALLKHDFFVIFPVQPHALASYRRTFTPSRAKDDPTDAELAVDFLTRHPDALHSLDRERVEIRALQRLVQDRRDFVNDTTRVTNRLTYALKAYFPQVLEWFRDKNTLMFCGFLARWPTLDAAQAETDATLATFFHEHHLRYPAIISRRIKAIRAERPLTDDPAVVEPNLLVVAALVAQLRQLIATVQTFDDRIAKICGQTADHKIFSSLPAAGVALAPRILAAFGEKRERFANAAAVQKYVGIAPVTERSGNQHWVHWRLACPTFIRQTFVEWAGETVLRSFWARAFYDQQRKKGASRNAALRALAFKWIRIIYRCWVDKVPYNESLYLSSLQRRRSPLLQFIAAEAAE

SEQ ID NO: 160545 - protein, 420 aa, unidentified
MEVVVERCAGLDVHKDLVVACVRVPGSGGERVSMFAEFSAFTVDLLGLRDWLVAHGVTRVGMEATGVYWKPVFYVLEDVLECWLLNARHMRNVPGRKTDMADAEWICRLMEHGLVQPSFVPPPAIREIRNLTRYRKTRIEERTREAQRLDKVLQDAGVKLSSVASDLLGMSGRDMLDALVAGSTDAAVLADLARGRLRSKIPQLQDALTGRFGAHHALLVGEILAHLDYIDEAIERLSDAVDAAIAPFAEARDRLATIPGVDRRVAEAIIGEIGVDMTRFPTAGHLASWAGMCPGQHESAGKARHGTARQGNSWLQRHLTVAAMGATRTKDSYLAAQYRRIAPRRGKRRARKAVGHSILVAAWHMLSTNSDWSDLGADYFERRDDPTRRAARKLNELRALGWTVTTNPDGTNTLQPPAAA

SEQ ID NO: 160546 - protein, 460 aa, unidentified
MARKANRRNSRQRGLRVLHENVAGVDLGSTEHWVCCPSTTQNDPNVRVFGTTTVQLERLCRWLKEQNVVSVAMESTGVYWIPLFEMLERKGIKALLVDSRHLSRVPGRKTDMQDCQWIQLLHSCGLLASAFRPAESICQLRAYIRARGSLVREGADWLRRMQKELDQMNVRVHRAVSDISGTTGMSIIRAIVHGQRDPVQLAKLRHPNCHLSEREIAQELTGTWHEEHLFNLKEALHMYDFIQERLDAYDRRIQEHAESMQRSDIDPYDLQPPKSKDKARKIKADGQEPLRKALYAMCGVDLTAIDGISVDTARTILGEIGPDVSAFANEKQFKSYATLAPNMHISGGKSQRRRSRGQSHRLGQALKMAAVTLRNSKSALGAYYRRIAMRKGACIAVFSTAGKLSQIVYRMLRYGEHYVDIGQQAYEEQFRQRKIRALTRAAKELGYKVLAVPKAELNTT

SEQ ID NO: 160547 - protein, 381 aa, unidentified
MAKDKFDYCAMDPDLNILCTGSNCENTVEEFQRFSGVLRTLKTPRTTLSIGMESTGIYHMPLYNHLRNEGFHVRILNGLEVRGMKKSRVRKTSNDAIDAHSIARYLMVTETKDSYEFPEELENLREFITAYDILTCKIRTTKNNIIRVIDLLFRGLSNIINLDDNAVEMLEKYRIAEEFLNADQADLLRYMSRRKTDMILRAAQSTPQPGKSKEALLIEMSSLLSILTVLNREKEGIESAMKAELESRNHIIRSIPGIGPITGSIILGKIGSIDRFESAEKLVAFAGFDPVIKESGKRRSERSISKRGDPLLRSAIYLSTLAAIRSNPVISDFYRRKTEIERVPKQKALVAASRKQCHIIWSVWHNNKPFAVPEKFRPIIE

SEQ ID NO: 160548 - protein, 340 aa, unidentified
MDKVSIIGLDLAKLVFQVHGADAVGRVVVRKQLRRSELLRFLGALEPCVVAMEACGSAHYWGREIARLGHDVRLIAPAYVKPFVKRQKNDAADAEAICEAAQRPSMRFVAVKSEERQAAALVFRTRDLLVRQRTQTINALRSHLAEFGMIAPKGPASIAALAARLGEPGEKLPIEARIMLEVLADTISTLEGRIAQLDAEIGRRAREDETARRLMTIPGVGPITATAMAALAPPTDIFRRGRDFAAWLGLTPLQKSTGGKQRLGRISKMGERTLRRLLIIGASAVVSHTARRGAQPGTWLARMLATKPRMLIVVALANKMARTVWALMAKGEDYRAPAAA

SEQ ID NO: 160549 - protein, 348 aa, unidentified
MNTTTTTYAVDTAKSVMQLHWVDVASGEICRRKLSRAKFTQFFGALKPARVVMEACGGAHHWARSLAAMGHRVELLPARQVRAFVRGNKDDAADARAIWLASQQSDIRRVPVKSAQQQAVLSLHRLRSHWVCVRTATINMLRGLLYEFGVVLPPGKVLGLKVLAARRAEIDALLPPLMQRQLDGQLAALRQLELEVKHIEVELALVQRTDSAAKKLRQVPGIGLLGATALAATLGDARGWRNAREFSTSLGLSPRHNGTGGKVTMGGINKRGDPYLRTLLISGARAVANAPSAPEWVRQLMLRRPANVAVVALANKLARTAWALLAHDREYARDWVSKLPRAAQAAAA

SEQ ID NO: 160550 - protein, 347 aa, unidentified
MTDIITTLAAIGIDLGDKDARYACLNEEGTFTEEGTVAMTPAGLRKHFAKIPRTRIAIEAGAQSRWIAKTLAEFGHEVIVANPRQVQLISANHSKNDSNDAKLLARLARVDASLLSPLEHRGEKEQTTLVSIRARAQLVKTRVALMHSLRGMVKGFGVRLPHATSDQFLQRCKGSVPEALLPHLEGIFTIVQSLSEQIASYDDLIEKIAIEQYPAVQGLKQVPGVGTLTALTYVTTIADPGRFSKSRAVGAFLGLRPRQQQSGGQNPQLGITKAGDVYLRKLLVQSAHCLLGTYGQDTALKQWGLKLCERGGSNAKKRAVVAVARKLAVLLHKLWVCGDLYRPFPAR

SEQ ID NO: 160551 - protein, 331 aa, unidentified
MKKQSLVGIDVSARSLDVALERGKTSRQDLVFENTAEGHQKLAKRLTRGGMRACVCLEATGVYHLDLSLALHATNGIEIMVVNPRAAKDFARAQLQRSKTDRVDARSLLEFNRRMEFVPWQPPSRTILALRALSRRIQALLVNRAQEKNRLHADDVVADTTPAIQESIERHIESINDEIAALTQAALDIVRADAELKTKFDHLVSVKGIADASAITILAELAVLPDDMTVRQWVAHAGIDPRCVESGTSVLGQVRISKVGNRHLRAALFLPAMVASQHEPQIKAFYQKLIASGKKPMQALVAVMRKLLHAIHGMFQHDENFIGEKFYAGNA

SEQ ID NO: 160552 - protein, 351 aa, unidentified
MIIIGCDFHTRFQQIAMLDPTTGEILERRLEHENGEAEKFYATLPEPARVGIEATIHAPWFERMLLRCHHELWIGDAAEIRAARVRKQKTDSRDAQHILDLLLTNRFPQIWIPSPAERDVRQMLRHRHKLVRFRTSVMNQLHGLAISQGLCRKRKLWSRVGRRELEALALDRWASHRRLELLQLLDQFNPWIADLDQAVQKEAQSRPEAVQLMKEPGVGPVTALAFVLTMGPISRFQRSKQVVSYLGLNPSEESSGGKQRLGSISKQGNSMMRHLLVEAAQTASKSDPELRRYYQQLKFRRGHSGVAKVAIARKLAVRLYWKLREAAQSVPPARMQGSPSNPMVEESPSLS

SEQ ID NO: 160553 - protein, 480 aa, unidentified
MIKSVGIDLAGTGEHKVRCLDEGAQPCDGFGFQTTPEGLAKLEERIFSDGSNPVVVFEPTGLAWLMVAIYLKAQHPDCRLVRVQARRVVALRKYLRRSSKSDKIDSLTLAKMPFIDPEQLEEIYLPPAKMYAIQRLARQRKRLESEIGSRKKRIGSIVDGYFPGMRQAFSDPWSAHARAFLRSRLNPLVVVHAGEKALHAFLTKARQHGKADSTESHLVYLACQDAATLYELSSSVGTIDDDFFVALQDEIARELRLMEVEEAESEAIAKRLEQLYRELHPSDNLRTIPGVGEHTAPIFLATVGDPARFRSQSAFANYSGVVPAAKQSGGAEAKGLRMTKAGPAIMKWALYQSSQIGRRCDPQLAWVYYREMVHYGKNHKQAMGAVMSHMGARVLAVLREDKPYELRDIDGRPITSEEARRLILLKYQVPEEIKRERRRRKQVTGKAVKSGRRNREMAAHRTNEAATAPQPVVATATSHS

SEQ ID NO: 160554 - protein, 449 aa, unidentified
MEQPQQVEDEEYERAWERVAAIDVAKASGVVCTRVPDEDRPGRRKMHVWTVTATMGAVTELGDHLRCQGIEVVTLESTSDYWRIWHVVLEAAGLTVQLVNARAVKNVPGRAKTDKKDAVWLAKLTERGLLQPSFVPPYDIRRLREYTRLRADLVHDRTRYWARLEKLLERALIKVSAVASSLATQSVRAMIEALIAGERNPKALADLAIGKMRAKRKELTEALDGRFEDHHAELARILLDQIDALTAQVAALDEKISELITQIPAAQGIDADGTTGPGAGRGPDAAVLPAVARLDEITGCGPTAAAAIIAEIGLDMTVFGTPGRLVSWAKRCPQTRQSGKKHTAGSAGKGNPWLNGILGEIAASASRTDTFLGERYRRLARRRGKRKALAAIARSVLVIIYCLLADPAARFRDLGPDYYDNRISRERKISNHLRQLQALGLTVTIAEAA

SEQ ID NO: 160555 - protein, 322 aa, unidentified
MNENTNYFGIDISKDVFDVMGSDGLFHQFSNDVTGFKKFIKLIECNSHCVMESTGVYHLRLAYYLIGHNIKVSVENPLSVKRFIQMKLSKIKTDKSDSKMIYEYAILNNPNLWTGQTKSQIECSHLLSLSNLYTKEIIVLKNKLHSEEAQGSPVPRVIRSIKRSLSYYKKEIETLETTVLKLVKEEYQDLHSRIKSIPGLGAKASALLIVLTDGFERFNTASELCSFAGLTPIIRESGSSIRSRPRISKMGNRRLRKVLFICSFSASKHNKACKELYNRIVAKGKSKKLALVAVCNKLLKQAFAIAKSHLWYDENYRSVLVR

SEQ ID NO: 160556 - protein, 332 aa, unidentified
MTTTTTTSLPVLGIDISKATFDVALLRAAETRKPKARKFDNRPVGFQALCLWLAKHDVAQVHAVLEATGAYGDALAEFLYAAGHQVSIVNPAQIKAFGQVELQRNKTDRADAALIARFGWCQRPVPWTPPAPELRELQVLMRHLDDLIAQRTQVSNRLSEGRLTPAVEKSWQQVLATLETQISTIKEQVEAHFKQHPRLKQQRDLLDSIPGIAPETAARLLAEIPHLAELNSARAAAAYSGLTPRRHQSGTSVNAPTRMSKIGNARVRYALYFPAITALRCDPSFQQLAARLAARGKHKMQIIGAAMHKLVRLAYGVLKNQQPYDRNYLVEA

SEQ ID NO: 160557 - protein, 451 aa, unidentified
MSKDRTRSKPSGLPIIHPFAAGIDIGSRFHVVAVSPDLCDEPVQTFQAFTGDLQRMADWLVATGTKTVVMESTGVYWVAAYEVLESRGLEVILVNAREARAVPGRKSDVNDAQWLQRLHACGLLRASFRPGRDIAELRAYLRCREKHTDYAAAHIQHMQKALTFMNIQLHHVIATITGVTGLRIIRAIVAGERDPGRLAAMRDVRCKESLETIRNALVGNYQPEHVFALKQALALYDFYQQCIDECDVEIERAVAILNIAHSFPEAPLPKAKHRNKMPSDPNFDVRTAMYQLAGTDLTQIHGIGPFLALRLIGECGTDLSRWSTAKHFTSWLTLSPGCKISGGKVLSSHTRKTSSRITVALRLAAVAVGRSNTALGAFYRRLAGRIGNPKAVTATARKIAVLFYNAMRYGMDYRDPGADHYEQQYRDRVIKQLHRRAAQFGYSLQPQDSPA

SEQ ID NO: 160558 - protein, 370 aa, unidentified
MEFIGIDLHTNKFTCSYRDENSPPDAKKGKRTETFELNERGLAAFYQTLTEDTYVLIEATITTFSFVRLIRPLVKEVIVANTYELKQISLARVNTDKIDANILSRILKMQVLGKERAISPVVVPPEDIQELRGLFTTYRLFRKQTTQIKNRIHSLFKEKLYGFTQEEIFDKESRKKLLGLEDGTALAFQASLLFKELEYVESCIKPLKEKIMELAKPHMKEIEILTSMKGISVFIAIAVIADIIEVNRFRDSKSFTSYLRSAPQVASSNTSVKIKGINKKGRKVSAALVAQSLNHMLAASEKLNRWYMRLTKYKKAGLVRTGLRRRVFAEMYQMLKKGEYHYGRDVQKHEAKMSQYRKFLEKRNFLLEIA

SEQ ID NO: 160559 - protein, 387 aa, unidentified
MTRSNQTSDFVPGNFDIFAGLDVDKKSMSITFTDHGTLQRSLRLPYSATQLLNYTRKHFPGQRVAFVYEAGPTGFGLYDELTAAQRHCLMVTPAMVPSAPRNRVKTNRLDSKKLSEGLRGGQLKGIHVPPQIFRELRHLVQLRDTQVSQLSATKCRIKSLLLFEGLPFPDAKGKWSGRVLRELEKLPCHPGVRFKLDCLIDALQFHFQTAAKVQKEIRRFCDNQAELKQAITWLTSLPGVGTITATHALARLGDWRQIKNVRQIAGFLGLVSSEHSTGEKENRGEITRIGDQRLRNKLIQCAWIAIRKDPELRAFYRRIYQQRPKKTAARIAIVAVARKLTTRMYAVLKEQRPFVIRADSSIAPLTAEETTGLRERLDIAQNDELSF

SEQ ID NO: 160560 - protein, 401 aa, unidentified
MISVGVDVSKGKSTICILKPYGEIVCSPFEVQHEEEALEAFADLLAKLDGEIRVVMEATGIYHLPVLTFLHDKGYFVSVTNPFAMKKYAKDNSIRGAKTDKLDSMMIANYGIEKWYKLQKYEGDEETYAELKLLGRRYRYYMELHVKALQELTHILDYVMPGIKKMFNSWNEANGKDKLSDFVEKFWHFDLITSMNLEEFTEEYLSWAKEKKYHRSRSKAKAVYELACNGIPTLSSNTPSTKMLVQEAVSVLRAVDSSLALILTRMQLLAKSLPEYSAVREMGGVGDVLAPKLIAEIGDVRRLHSAKALIAWAGIDPPPYESGQFIGSKRKITKRGSSTLRKVGYEVMRVLKSHPAPKDDAVYNYILKKEAEGKSKKHAKIAGLNKFLRVYYARVMEVYQL

SEQ ID NO: 160561 - protein, 367 aa, unidentified
MSSISARGLTYLGLDVHRDTISVAVLGLGREEAPTVDRIANDEPSIRRLVARFADPRRLRACYEAGPTGYELARLLHRMDVRCQVIAPALIPKAPGDKIKTDSRDCRRLARLHRAGELVAIRVPTVAEEAVRDLCRARADMLADRSRARLRLGGFLLRHGRIWRGGSTTWTFAHERWLLAQRFDDPALSTTYAHYRATLQARDAALDAIEADLATWYDQPPFADTVARLAAYRGVTRLGALTLASEVGDWRRFASAPQFMGFCGLVPSEYSSGSSTHRGRITKTGNSHLRAQLVESTWAYQYRAAATLELRRRQAGLPPEVTARAWKAQLRLCGRFRRLAARKHTRQVVVIAVARELAGFLWAEMTA

SEQ ID NO: 160562 - protein, 495 aa, unidentified
MKAKARKAKGKHSNSSKRGAKIAAKRGAEGMEIVHPHAGGIDCGAQEHYVAVPPQSVELGEPYVRCFSAFTQGLDALVEWLKACGVTTVAIESTGVYWIALCQKLEAAGIEVFLVNARHVHHVPGRKTDVKDCQWLQRLHSFGLLSASFRPEDLICRLRSLQRHRLNLVWTAGAEIQHMQKALQQMNLHLHHVVSDITGVSGLRIIDAILAGERAANQLAKLRDHRVYKSTLTQMEAALVGDYRPEHLFVLGQSLQAYRFYQARTQDCDAEIESLLQQLAERFDSSSALGAQLPQPEVLNDAAPSQNPRPAKRKVKRKAQANEPKIDLADYLRRICGVDLTQVIGLNVLSVLLIVSEIGVDMSKWRSAKAFCSWLGLSPRNKISGRKVLDTRTCKVINRVATTLRLAAQSVGRTNTAMGIFYRRKTGHLGPAKATTATARKLACLVYHLLKYKEQYREPDPAAYQLKVQKTILAKIQRQAAALGYKLLPTALVPA

SEQ ID NO: 160563 - protein, 338 aa, unidentified
MEVYAGLDLHSTNTYVAMIDKDNKVLYKQRHGNDVPTILSVLDPFKKDIQGVVVESTYNWYWLVDALMDTGYRVHLANVSAIKQYEGLKQIDDRRSSLWLANLLRLNILPTGYIYPKEERPTRDLLRKRLHLVRHRTSHVLSVKNILARNLGIRMKSEEVKKLNTSDIKILFSDSEMRVAVAASVGLISHLENEIKGIEAMITRKLKVRKEFIKLLTMPGIGQILGLTIMLEVGHIDRFPTVGDYSSYCRCVRSIRTSNGKITGYGNRKSGNKYLSWAYVEAANYARRFHEVVRSYYEKKLARTNRIVAIKAVSHKLARASYYVMRDNVDYDQSRLFG

SEQ ID NO: 160564 - protein, 365 aa, unidentified
MKIIYWIGIDDHADKWTVAQYRGEEPQPSKEFELVPDEKGYRRLLGYLKGLEGEVRVVYEAGPCGYELYRRLTKAGYKCQVAAPALTPRKPGERVKTNRRDAAKLARYLRSNDLTFIVVPDQDRESLRDLVRSRQSVQKDVGRMRKQIIHLLLRYGHRYREGQAWTQRFWAWLKKVQLEGVHSRFVLTEMIGELEHRISQLERYDEQVELASQKPEYQHYLAAQRTLRGINTLSAMTILSELGDLRRFATAPKLMAAVGVVPSEYSTGDKTNRFSITKTGNAHLRHVVVEAAWQYQRRPLLGRTIKARRKDQPKAIVEIVEKCDKRLHARFYRLTSRNKKSSVAVVAVARELLGFIWAIGQIAHP

SEQ ID NO: 160565 - protein, 406 aa, unidentified
MEAVYERCCGIDVHKKVIVATMRRGRRIETRQFGTYTSNLRELCAWLKESECQMVAMESTGVYWKPLYNIFDLEGIEAMVVNAQHMKAVPGRKTDVKDSEWIADLLQHGLLRASFIPDRNQREYRDLTRYRKSRVEERAREIRRLDKVLESANIKLSSAITNLLSASGQRYIAMVTGEGEITREAVSSAYDLRLKADIDEIYETLQGVTSPVQKLLIKEIMRVIREQTAQIERIEAMITQHGDEVYRAAACALTAIPGIGERSAQQILAEIGTDMSRFPSASHLCSWAGLCPGNNESAGKRMSGRINHGNKTLKATLVECAHASLRKKDCFFCAQYNRLSVRRGGKRALIAVAHSMLIAIYHVLRGEPYRDLGGDYYNQFNRERKIEGHLMKLKKLGWTPPVPAVG

SEQ ID NO: 160566 - protein, 443 aa, unidentified
MMRIVVKRGAGLDIHKKTVVATRMRVAEDERMVWDTQTFGTTTPELLGLYDWLSDWECTHVAMESTADYWKPVFNILEGTFEVLLVNAQHVKHVPGRKTDAKDSEWLAELLIHGLLKPSFIPPKPQRELREMTRYRGTLVEERARVVNRVQKLLEGMNIKLASVATDVLGASGRAMLEALVVDRLRPDEMAQLARGRLRNKIPELEKALTGIVAKHQRKLLALQLAHIDFLDEQVEELSAEIERHIEGMDQPPQGGNSQSENDLSEGTLTDGSLPPLSYGEALIVLDTAPGVNQNVAETVLAELGADMSRFPTPEQAAAWAGVAPGNNESGGKRYSGRIRDGNRALRLALVQAAWSAVRTKETYLKAKYERLVVRRGKKRAIIAVAHSLLKSIWYMLAYHVPYQDLGGDYFDNRRKESKINYHLRQLQKLGYSAQIEPQLVTG

SEQ ID NO: 160567 - protein, 350 aa, unidentified
MQGTGRWIGLDLSKETYEMCYFDQKGKVGRSGGETTKAGRSKLYAKLKAEDIVAIEVNSLAFVMEKEMRTIGCTVVILDASQLSIIYASTKKTDKEDALKLARLVKIYEKEDLPIADVPTEKEYYRRKLTKECKTLKDDRTQEINRLHALFLQCGITTMKRSNLQTDANRQKVLPQLFGYEVGQAKRVCERLTLLETQIKELEQTITKECKADKDIERLKTIPGVGNKTALAFAAYVGDGKRFNNGDEVANYLGLVPRVDCSGSINRYGHITKKGNRIVRALLYQAAWAIVRSKHGGALKAKYFYMTEHGKGKKISITAIARKMAKLLYLVMKNKQMVYQELPFPDLQAG

SEQ ID NO: 160568 - protein, 412 aa, unidentified
MNTRVEKACGIDVHQAFLAATILTSAGAKDTREFSTCLEGLLDLKTWILENRCQRVAIESTGIYHIPAYTILEGKVETIVANPLQIKYIPGRKNDDIDSEWIAEVCLNGQIKPSYIPCREIRDIRELTRTHVKFTEARTALKNKVHKILQRAGIRISGVLSDIFGKSGNTILNGILDGKPIEQIIGQVKDKRIKAKPTEIKDSIKGELSQNDIFVIKDCLETVKFLDAKIKEFDSRIFQSLSGMRREQDILMSIPGIGFTIAAAAIAEIGDIKVFPKPKNLVSWSGLAPAVNESAGKSSNGHITKRGNKYLRTILVQAANSIAIGKSNKLKFFYQRIKVKKGHKKAIVALARKLASIIHHLLANNEKYSEEELKEKKVRLPKFVSVQDLNVNELIEILCEAGYTVNKGSSAG

SEQ ID NO: 160569 - protein, 383 aa, unidentified
MKAVCGLDVHKDSIFLCILHSDGELFEQVFGVLTFQLEEMRKLLQKHHVFEVCMESTSIYWIPIWRVLSPHFTLRLVNPYFIKQLPGHKSDVKDAQWIAECTLKELVRGSFVPPEIIQQLRQYDRRIFDLNAEIVRKVSKVDGVLQRCNIRLSNYVSNIECKSYRDVVRRLSEGVTNPNELMKLVHGRIVNRHGAETILASLTGVVSQAEIDVLRQLHEEIGIAESHRNECQQRMLEICEKHFPEELERLQKIPGIKERAATSLIAEIGTDMSKFETANHLASWSGLRPRNDESNKKIKSRKITHGNVYLRNTIIQCAWAASRQKDSFFSRFSYHQTIVRRKNKMKVIVAVARKLLVAVWHVLHDKTDYVDFKPDREESANNG

SEQ ID NO: 160570 - protein, 246 aa, unidentified
MSEPDAVVVGIAVATMALDVAVRPRREQRQRSHDAAGMAELVAWLQVVHPAVIVREATGGNEAPVVAAVGLAGWPVAVVNPRPVRDLARARGQLAKTDRLDAPVWAHFAAALHPVPRPLPDAQAPELAALVERRRPLVAMRTAEQRRLAVTHSARVRAHMQVHLAWRDGEVADVDVELPCLVRASPLWRAQEDLLRRVPGIGPIIARALLADLPEVGQLAHAQIAALVGVAPLTRESGMWRGRRSV

SEQ ID NO: 160571 - protein, 503 aa, unidentified
MKTPPSSPAAKRHARNARKLQHQTKHPGFPVPVTPLEELTPIHRRAAGIDVGSAQNYVAIPAEGLAPGESPVRVFGAFSVDQDALVEWLQKQQVNTAAMEATGIYWLSLYDKLEMAGIEVCLVDPHGVKAVPGRKSDWLDCQWLQKLHTYGLLAKAFRPDLPVRRLRALTRQRAELVCCGAAHQHHMDKALVTMNLHLSLALSDLVSDTGLRVIQAILDGQRDPKELVKLRDVRCKKSSVAEMEAALTGSYDEEQLFILRQSLEGWQFYQKQMEECDRRIEKALAAIPKAGPAPKAPPRLKAIPADAQARATKRPKRPQKGNNAPTTDFTAAVVRICGTDLMKVCGLNLLSVLMLIGEIGVDMSRWRSARAFCSWLGLCPGAKISGGKVLSRRTRKVHNRASTILRLGAWAAGKTDTWIGRFYRRVKARRGPAKAVTATARKLACVIYHMLKYQEEFVLLDNSVYEAKVEMHRLRRLEKEAQAMGYQLIEQKAVDRALASIPG

SEQ ID NO: 160572 - protein, 339 aa, unidentified
MNNTQFFIGIDVSKPYFDASLMAVTNHVKHPLQTARFDNADGGLKQFGKWLKDAKVPFNGNTLIVIENTGIYHRLLWSYCSKKKLPLHIGNAAHIKWSFGIARGKNDKIDSLRLCQYACKESDTLKATPVADIVLLQLKDLMTARTQLLSQFNINQSYLNELKNINDKAVQHSLEQAYRMAIDGIKASIKALEGQIKNIIVVNEALQKNYDLLITVPGIGHLTAVYLVCCTNNFAGKISGKQLACYAGVVPFEHSSGISIKGRSRVSSMANKTLKKMLHLGALSAIQHYPEFKQYFERKKAEGKHGMSIINAIRNKIVLRAAAVVNNQKTYVDKWSQAA

SEQ ID NO: 160573 - protein, 317 aa, unidentified
MAKPKQPIYVGIDISKDKLDVWVPGKHGEFTNDDDGHDKLVRFLRRFTIEVIVMEATGGLETEVAIALAEAKYPLAIVNPRQVRDYAKAVGRLAKTDKIDAEVLALFGGATKLQAQELPSDAQRRLRALVARRRQILVMLNAEQNRLGTAREPAVVTSVEAVIEALKEQLKQIDDDCDRELRESPLWKGKVELLESVPGVGPVSAKTLLAELPELGSVTGKQIAMLVGVAPINRDSGKQRGRRTTWGGRSSVRSVLYMATLAATRFNPVIREFYTRLVNERGRPKRVALIASMRKLLTILNAMMRDGVPWSFSPAAA

SEQ ID NO: 160574 - protein, 349 aa, unidentified
MTIVAEKYEYVIGVDTHARTHTFAIMQSATGKIQQTQAFPVTEAGMRRALGWVRRRTSDREFLAAVEGTSSYGASLTRLWEDAGILVAEAKPPRRATRRQAGKSDPIDAAAAARSVAATDIESLILPRTGRIRSALRVLLVARRAIDTRRTADRNTLTAMLRSIDLGLDVRKAVTDRHIAQIAAWRALPADDAAITTIRAEARRLATAIIAANAALEANLAALGKHVTELAPDLLKLPGVGPFSAAILLSTYSHHGRIRSEAAFAHLAGAAPIPASSGNTTRHRLSRGGDRQLNRALHTIARSRLRYDATTRAYAERRTAQGRTPKEIKRCLTRYIARQIFRQMDTLMA

SEQ ID NO: 160575 - protein, 341 aa, unidentified
MSLYAGLDISVKTTAICVVDGNGRVLLEKIVDSSPDVIAEQLREFDQPLERIGLEAGPLSQWIYGGLVEIGLAAICVETRHMHAALSARINKTDRNDARGIAQMMRVGLFKAVHVKTPASQHQRLLLTSRKLLQRKIYDIENDLRGSLRNFGLKVGVVGAVKFEDRIRELVADHPLVAAIVGPLLEARAVLRVQFAKLHRMLLELVRTDPICRRLMSAPGVGPIVALTFRTCVDNPARFSRSKCVGAHYGLTPRLYQSGEVARTGRISRCGDVMLRSSLYEAALVVLTGPGCWNPLKAWGIAVARRRGMQKAIVAVARKLAIVLHRMWRDDTNFRWTVATA

SEQ ID NO: 160576 - protein, 310 aa, unidentified
MKQYAGIDVSLEYSSVCVVDADGRIVREAKVHSEPDALIAWFGEQGAAMERIGLEAGLLSQWLYAEMAKADLAVELIETRHVRAAFKTMPVKTDKKDARGIAQLMRLGWFRPVHCKSLPAQEVRALLTARKLIQGKLHDIEMSLRGILRGFGLKVGPTTRRTYAARIRELIEGHPTLEAITVSLLKVRDALMDEFAGFERKLRVMARQDDNARRLMTTPGVGVLVALTFVSAVDAPERFRSSRAVGPHFGLTPKKYQSGETDYSGRISKIGDAGVRTALYEAANVILTRPVKGSDLKMCIPMKPDGVSDH

SEQ ID NO: 160577 - protein, 418 aa, unidentified
MTKKLDTTFIQIVHPVCCGLDVHKKKISACLITVDNNGKEQYDIKEFGTFTDDLVEMKNWLLNNECPVLAMESTGVYWRPVHNVLEGYMEVILVNARHIKNVPGRKTDISDSKWLAGLLRYGLLKGSFIPAKEIRQWRELTRLRRTYTESLADFKRRVHKLFETANIKIDSVVSDLFGVTGLNLISLLCDGSELNLATIEQNTKPGLKKKVVELHRSIQGFFEDHHRFQLIGLMEVMRSLEKQIDEITRRLEDLTAGHQGLLDRLDEVPGIDKKSAQSIVSEIGVTLDEFICTAALASWAGLCPGNNESAGKRKSGRASVRSHPFKTILIEVAWAAVRKKGSYYRAKYFKLKSRRGAKKAIVAIAHRISKAIFNIIKNGDHFMDLGEDYLTAKTRQKAINSIKKRANQLGYELVPCAN

SEQ ID NO: 160578 - protein, 411 aa, unidentified
MDKIYDKCCGIDVHKKLIVACFRKGNKQEVREFGATTRELLELADWLKEGGCEMAAMESTASYWKPLYNILEYSDLKAMVVNAHHMKAVPGRKTDVKDAEWIADLLQHGLLKASFIPDKDQRELRELIRYRKSLVGERTRELNRLQKMLEGANIKLSGTVQDINGKSARNILEYLITGKAIDSKAYDEMYEKKVIAHNLKATKEQIIDDLNGVMTPLQRKMMKELLSHLDELNVHIKNLDDEIDNFMKPEEKQASAAIQDIPGIGNTSAQAIISVIGTDMERFPTDRHISSWAGLCPGDNESAKKRKSGKTRKGNSILRTTLITSAHSAVKDKNSYFHAQFMRISAHRGKNRAYVAVAHSMLIAIYHILKDGVAFKDLGAEYYNQFNKERKINAYLKKLKALGWEVPVVAA

SEQ ID NO: 160579 - protein, 385 aa, unidentified
MSESITRYVGLDVHKDSIDIATADPGRQGEVRHLSSIGGDLVSLDKALRKLISKGAKLHVVYEAGPCGFVIWRHLSRQGIACEVVAPSSIARPPGERIKTDRRDAMLLARLARSGDLTPVRVPDAADEAVRDLVRAREDAVRECRNARHRLKALLLRNGIGYAGKSAWTAAHLRWLATLKMQHEAQQIAFQEYLHAITEASARIERLEHAMRQMLLDWSLRPLVQALHAMRGVQLIAAMTLVAELQNFERFVSPRQLMAYVGLVPGEHSSGPKRRQGSITKAGNSAARRMLVEIAWHYQHAARVSPVIAARQSGLPKAITDIAWAAQLRLNAKFKRLLARRVMKNKAVVAVARELVGFVWAIAHQVQASNWPGIEPAATAVNSPK

SEQ ID NO: 160580 - protein, 374 aa, unidentified
MSDHSEAFVAFDTSKLRNAVAIADSGRAGEIRFLGEIDTTPAATAKLVKKLADKYQRLTFCYEAGPTGYGLYRQIKGLGHECVVAAPSLIPKKPGDRVKTNRRDALSLARLLRAGDLTAVWVPDERHEAMRDLTRAREAAMMDLRSKRQQVSAFLLRRGLHYEGKNTWTKTHMRWLASQQLAYPEQRIAFEEMMLAVRQAQERLERLEQAIRAAVPDWSLAEVVTALMAMRGIDLIAATTLLAEVGDLSRFQTPHGLMDYLGLVPSEASTGDTIKRGPITKAGNRRARRMLVECSWSYQHPPRVGRDKQQKVDAAPPAVREIAWKAQCRLHRRYRALIRRGKLKTVAITAVARELAGFIWAVGREITTTRAAAR

SEQ ID NO: 160581 - protein, 352 aa, unidentified
MKKITEIILKNEKIFVGLEDSKRTWKLCVRNNNMIVFQGSIPAEFENLMQFFKNKFPKCLIKVIYEAGFSGFWLHDRLQEKGINCIVTPPNMVTEEKCNKVKTDKIDARRLAKVLENEDFKACRVPSEERMQHRQLSRTLHQVQKKITSTKNQIRRFFDVHGIITPKGVWSDKTYIELRNIVIHATLQYCLDMYLDMLDLLRNQKQALTKKLKELAKSPAYNKTVKLYQSTPGIGEFTAIRLALEWGDISEFSSGKKFASYNGLCPSEYSTGDTVKRGGITKQGNRLARHWLVEAAWTAIKKDPALLEKFNAVWKSSGKKNVAIVAVARKLAVRLRGLVLSDKPYVLGLIEG

SEQ ID NO: 160582 - protein, 347 aa, unidentified
MSITMIGLDTAKAVFQVHAVDAAGQVVTRRKLRRNELIAFFEKQAACTVVMEVCGAAHHWARVLTGLGHEVKLIAPEAVRPFVKKGKKNDAADAAAICEAASRPGVRFVPIKSLEQQGVLALHSARSLLVKQQTMLANAIRGLATKFGLTVALGMGKLGELMALVDADKAVPAKARQALTTLFDQCRALDESIETFEAEIVAHARHDDTARRLATIPGIGPITASLIAATVADIGVFQSARHFTAWLGLVPRQHSTGGKTRLGWITKTGNREIRRLLVPGATSMVYRAPQWNSAAGVWTRAILERRPVRLVTVALANKMARIAWALMTRSKVYHAKGRVAIAADAVA

SEQ ID NO: 160583 - protein, 403 aa, unidentified
MAAVMIGVDPHKGSHTAVAIGAAEEPLGQVRVRASAAQAERLLAWAASWPQRTWAVEGAGGLGHLLAQQLVAAGEQVLDVPPKLGARVRLLASGNTSKNDPNDARSVAIAALRSAGCRPVRADDHATVLKVWAKRHRDLGRARTQVACRLHAVLCELIPGGFSKRISAAQAARVLSQVTVSGAVAQARFELAADFLEDLRRIDARMREARKKLAAAVQASGTTLTGIFGVGPVVAAVVIGEAGDPARFASRDHFAAYNGTAPVEVSSGNRKVHRLSRRGNRRLNHAVHMAAVTQVSQRHSDGHAYYDKKIAEGKTPKEALRALKRQVSDAIYKRLKADAARATAGSGQGPGGHQGNDSVASAAGLHPEHRLFGQATPGPVPTLRPRPQKKVTSRATRKTARTT

SEQ ID NO: 160584 - protein, 411 aa, unidentified
MEAAVITAVGIDVSKSKSTVAVRRPGGEIVLRPFEVHHTNRDLKKLASTLKKLGGDIRIVMEHTSTYWRPITLTLKEAGFFVSVVNAMLIHDFSDNTIRKLKTDRADALKIANYALTFWDTLPPFNNEEETRLLLKMQSRANERITATATALRNGLIALADQTFSGVNIAFAPNTKNANGHEKWVDFFLRYWHKDCVCQYSMEAFTESYRGWCKRKNYKFRTDTAHKIYLLAQESVATLPKCESTKMLITQACKSLNAVCEAKQSTQLEMQRLAAMLPEYEVVMQMEGAGPVTGPALMAEIGDVRRFKNKKALVAFAGIDAPPFQSGAFESKSRHVSKRGSPHLRRTIFIISNIILTRSNPENAVYCFMDKKRSEGKHYYVYTVAGSAKFLRVYYARVTEFLRSQPSPGAC

SEQ ID NO: 160585 - protein, 400 aa, unidentified
MGQISIGVDIGKTGHYVIALDEAGSKIRAHELANTQSAIDDLVAFAASNDGSVVVDQPTGGAALLIQACWDAGVSVGYLHGLAMARARDFYEGEAKTDPKDAFVIADVARTHPSRIVTLIPSVEERAKLELLCGRDEDLRSDATRITNRLRALLVAHWPTLETALDKRFRSRAVLQMLAAYPDPESLRRAGKTRLITFLTNRRLRNADTFVARVLDAIASQRTIITGSSAVGPLIAEIAADLDRILERRDTIEKEIEQCFFALPEAEILLSLPGVGARTGARMLVEISDVVRFPTPSKLAAFAGLGPSDRQSGSSIRNTVPTRRGNHRLKNAMFLTAFASLKHPPSRTYYDRKRAAGKRHNEAILCLARRRVDVIHAMLTRKELYRWSPPPTPQETIQAA

SEQ ID NO: 160586 - protein, 412 aa, unidentified
MKDLLEISCGLDVHKEKIVACILTGPLGKPTHSEIREFTTLIPDMIALRDWIISQNCHHVAMESTGIYWMPIYEILEDAFSGDITLLVVNARHMKNVPGKKTDMRDSEWISTLLRAGLLNGSFIPEKRIREFRDLNRYRKSVIRDITSQKNRIEKFLQSSGFRLSSFISDIFGASGRNIILHLIEHGRIDRASLDSCLKTKTRNRMDEILMSVNGTLSEHQKSFLKILMSHYDSLKEHLAEVETNLMEDMAPFALQVEQLSTIYGISTTASCAIIAEIGIDMKPFKTAEHICSWAGLCPGNNESAGKRKSTSVTKGNPYIKSMLCEIAWVIAGKRNTYLSAWYWRIKQKKGAKKAIVALARKLLVIIYTMLKQGTLFDESCFETRRKNCEQKQLFRYIRELKKHGYHVEAQV

SEQ ID NO: 160587 - protein, 368 aa, unidentified
MEVTTIGIDLAKSVFAVCGADSSGRVVMRRQLRRPQVLSFMRGLPRCVVGMEASGGAQYWARQLTALGHEVRLMSPALVIPYRKGNKTDRNDADAILEAVTRPSMRFAMVKSVAQQDLLALHRVRAQLVKSRTALCNQLRGLLRERGVVVRTGAAALKRSLPAALADDRSELSGEMRELLCEMSQWLRTLEQRIASCEARITRKFKHDERCQRLAAVPGVGPLTATALVAAVGNAQRFRNGRELSAYLGLVPRQHSSGGKTVLLGITKRGDRYLRTLLIHGARSALRQCKDDARSGWVRRIRAERGPNVAAVALANKNARVLWALLARGDRYRSTNVATRAVLRSGSPPAVKRARSAKLRVRKDCVGS

SEQ ID NO: 160588 - protein, 341 aa, unidentified
MQIAVIGLDLAKNAFQVHGIDDSGQAVLKRKFRRSEVLPLFAGLAPALVGIEACHTAHYWGREIAALGHDVRLMPPQFVKPYVKSQKNDAADAEAIAEAVQRPTMRFVPIKSADQQAVHRTRDLLIRQRSSLISAIRAHFAEFGIVVGQGIRNVERLLALLETAGDQRLPALAAEMLGILAAQLRYVAEQVKEVEVKLLAWHRADETSRRLQSVPGLGPITASAIVATVGDPKQFKSGRQFAAWLGLVPQQRSSGGKERLRGISKRGDGYIRRLLVHGARAIVGWRKRSATHKTPWIERLLARRPTNVATVAYANKLARIAWAVMMHGNRYNPALAFATIP

SEQ ID NO: 160589 - protein, 453 aa, unidentified
MEILYTHCAGLDVHKKTVKVCLLTQGANEQPHKEFRTYLTTTQELLKLSDWLHEQGCTHVAFEATGGYWKPIFNLLEGHFELLVVNAQHIKAVPGRKTDVRDAEWIADLLRHGLLKASFIPSGPQRELRDLTRYRVKLTEEKAREINRVQKTLEDTNLKLGDVGSSIMGKASRMILHAIADGEKDPSRLAAFAVGRVRASQEQLEAALKGHATDHHRFLLREHLTQIHHLEQAIDRVTAEIIRRFTPPSSPEEPTSAAEKEDETTPERTSDPPSASPEGAVPPKAALSWAQAVVLLSSIPGISERSAIGILAEIGTNMQQFPTAAHLASWAGVCPGNHESAGKRLSGKTRKGNLFLRCLLVQAAHSASHQKQCYLAEQYRRIAKRRGAKRAAVAVAHSILVIIYHLLSDQTTYLEKGETFFEERDREGTQKRLVRQLSRLGYQVELQPITQAG

SEQ ID NO: 160590 - protein, 558 aa, unidentified
MFGNVSTTFLIRKADMMATTAKTGKKSTKRRSKSFALAVLGKPSGVIQPRVMEVGPEHFGIVSIDCAKARSKWFFGDFYGRVLLEPASVEHRYGDLQRAITQLKEAHKQYEIKDSIVCVEMTGTYHQVIMRAFRDAGFETRLVHPFASTHYRTVEHGDIKTDDNDLVGIFRAAVNGFGLVEPIWNETYRNLQLLVRHRRDLVRKRAKVQTQFRSFVERCLPGYTSLFPDDALWQHPTGLAVLQFIAERGGTHQALTDAGIPGVTQWLKDKKCKFLSKTLERIMAWAANAAVGDPLKLTLTRIWLALLDDWKLKTQQIQQIERDVASLLVRTPYILTLSHPGINVISAAELAGEMGPIEHYAHDRAIRGRAGLFPSRYQSDKVDRGGNLSRHRNAKLRAAWLLIADNLVKCNAYWRGKYNLWTSQGTHPRDARCRVANRVTRSIFQIVAGRKLFQHPSRLDRGYVLKKLLDFHRDHDSLVPIIRDDLQAATEFLPTKSYADEAKQIAEVQRKGANSRKPEPIQLAAVLVHVLERLGVTIGEPEVKSEMLEAPVDEAQRE

SEQ ID NO: 160591 - protein, 345 aa, unidentified
MKIVGCDLHTRYQQIAMLDKETGELIERRLEHANGEARAFYSELAAPVLVGIEATGHTRWFERMLAELGHELWIGDAAQIRAAMVRKQKTDARDAAHVLQLLVEERFPRIWRPGLEERDLRQLVWHRQKLVWMRNAVGNQLHALAMGEGVCRKKQLFTKKGRVELEALRLGPWASHRRQELLRMLDQLDASLRELDQAVAEQAEQNAAAQRLMTHPGVGPVTSLAFVLTLGPVERFARSKQVVSYLGLNPREHSSGGRQRLGAISKQGNPMMRSLLVEAGHTAARLDQELKQDYQRLKLRRGSGVAKVAIARKLAVRMYWMLRSQASYAQLVRMQGSPWATLVKS

SEQ ID NO: 160592 - protein, 352 aa, unidentified
MIASTIGLDLAKHNFHVHAVDAAGLVIKTAALRRSEMIKFFQSAKPCLVGMEACATAHYWARELTKLGHEVKLIPPSYVKPFVRRGAKNDAADAAAICEAVRRPDMRFVPIKSEANQGFLMLHRARGLLVRQRTMAVCAIRAHLAEFGIIFGQGRQRIETIMPSIEDLAASLPEHARFALDSLIRMIGELNTQIEGIETKLAQVGRSDPVSSLLSSIPGVGPITSTAIAATVPDARMFRSGREFAAWLGLTPRQNSSGGTTRLGGITKQGDAYLRHLLVIGARNIVRYPKARAKVGGAWIDALLLPTASHDRGRRRGQQAGSDHLGDDDKWRDVQRGTRKDSVTQQPKIQMA

SEQ ID NO: 160593 - protein, 399 aa, unidentified
MIENYDSVDVFVGVDVGKGEHHAVALNRAGKVLFDKALPNDEGKMRAVLQKLKQSGTVLVIVDQPATIGALPIAVAQAEGVLVGYLPGLAMRRIADLHAGEAKTDARDAAIIAQAARTLPHALRSIQLADESVAELSMLCGFDDDILGQMTATSNRIRGLLTQIHPALERVVGPHLDHSAMLDLLQHYPSPAAMKAAGTTRMATRLLKLAPRMGRRLAEEITQALGEQTVVVVGTRAAATVLPRLAEQLAALRRQRSDIAVEVEKLVEAHPLSPVLTSMPGVGVRTAARLLTEVAGKHFETAGHLAAYAGLAPVTRRSGSSIRGEHPSRRGNKILKRALFLSAFAALRDPVSRTYYDRKIAQGKRHNQALIALARRRCDVLFAMLRDGALYETKHALAA

SEQ ID NO: 160594 - protein, 430 aa, unidentified
MKSNTQNAKIEAITEKTLVLGIDVGSETHYARAFDYRGIEYSKKPFKFSNTEAGFATFKEWILELKERHEKDKVVPGMEPTGHYWFNLGKFLQDNEMKPVLVNPHHVKKTKELDDNNPTKNDRKDPKVIAGLVREGRYMIPYLPDGVYADLRTASNIRFQLQAELTRIQNRISRWFNIYFPEYKTVYGKPDAKSGMLILKAAPLPEDILTLGIDGVNQIWRDAKLRAVGKARAKTLIEAAEHSVGSKEGAVSARMEIRMLLEDYESRNTRLQEVMALIEELVRKIPMAEKLLEIKGVGIRTVSGFLAEVGDISRFNNPKELQKLAGLALVENSSGKHKGETTISRRGRKRLRYLLFEVAMSLVSKNQEFRELHNYYTTRRLNPLKKMQSLMAIAAKLIRVFYAMLTKGVDYDPKKMVSDIKRPAVYLQAA

SEQ ID NO: 160595 - protein, 402 aa, unidentified
MEVFAGIDWGSATHAACAINASGQSIANFEIKHDEGGLGELIKRLRKLSAAEPLRIAIERPSGVLVDNLLQAGFVVVPVHPNVVKASRPRYRAAGGKCDRGDAYLLADLLRTDGHRFRALAPECDEIRALQALVRTRADLLAERIALGNQLRALLESFWPAPISLFGEIDSPISLAFLKRYPTPDSASRLGEKRLRGFLSAQGYTGHSSAATLLERLRAAACGKAGQAEAQAKGVLVNSLACILATLVAQLVALTARISREVAALPDGQILMSFPRTGRLNAAQILSELGSVRERYQSEAQLAAEAGVCPVTHQSGKSRGVVFRWACNHRLRPAITLWAHNSRRQCPWADAIYKRARARGARHPHPIRILARAWVRVLWRAWFSHTPYIAAKHYGAQHLQPA

SEQ ID NO: 160596 - protein, 334 aa, unidentified
MNFVGLDIHKKFSYGVIKDEQGKELNRARFDNSEENFDSFLRDFRAEETKIVMESTGVWEYLYEMLENKGFEVKLANPVRTKAIASARVKTDAIDASTLADLLRANLIAESYVPCKEIRKLRDVVRQRKTLTKGRTQIKNKIHAILIRHGIKMPYATLCKSAMSWIIDEIKELSIKTVLISYINLLEQYNTELSFIEGRIEKIAQADKQAQLLMTIPGIAEIRAMEIVAEIADINRFENSSKLCSYAGLVPSVRQSGSSLKFGRLIQQSSKSLKNTLIEVSWVAVRTKEANQLQEFYKKLCKKKSKQKAICAVARKMCCIIHAMLRKNQEFMIL

SEQ ID NO: 160597 - protein, 424 aa, unidentified
MYNKNYISVGIDVGSAFSFMTIVAPDGSVIQKPFKITHNKPDSLEKAVSAIKKAEELHSLESRTFLESTGIYHFPLFCYLVDCGFHVSIINPIITHSANNTSIRKVKNDKVDSIGIAKLGLSGDIPVSQFPAKLVLEIRSLTRKYYDLTDERSAHINKLKGDLHTVFPQYLDIFCDVTGKTSTMILRQYGTPDKILRGHKKTMIEKISKASRKGLSKAAERYEKLCAAATAAKTFGCQIDSIYFNISLTLDLIEKLDSALDSILQRIHQLVTFNKSEKFIQQIKWLDTIKGVGFLTAVTIMCEIGDFSAFRNPKQLFAYFGLDPEVNQSGKFVGTEMHMTKRGSRIARRAVFAVALASIRTKRNGEGINPYLREYYEKKSGQKPKMVALGAVMHKVCNIIFAVLRDEKEFELRSPEEHCRIYVY

SEQ ID NO: 160598 - protein, 410 aa, unidentified
MKVAGIDVHKKVLMVVVVDASTPEEKPARRRFVTMPSELQRLLLWLRERGVEEAVMESTAQYWRSVWLELEPHMRLHLAQAFSNRAPRGRKHDFKDAERWVRRLIANELILSFVPNGEQRIWRSMTRMKLQLTRDRVRLQNQIECLLEEMRIKLSIVVSNLLGASGLRILHALAKGETDPEKLAQLGDERLQCTEEQLVDALTGRAQPVHGEMLALQLERLQLIDEQMARLNRMIAEAMKPHQDAVIRLAEVPGLGVDSAQQIIAEVGAQASTFQSAAELTSWVGTCPGKEESAEQNRSSRSAKGNKYLRRVLNQAAHAAVAKKGSHFQAVFRRLLPRLGYQSAIWAVAHRLCRVVWKILHEGVRFIEQGREVGPREKKKRAQMLARALRKLGYQVTITPINQVAPMAAV

SEQ ID NO: 160599 - protein, 365 aa, unidentified
MQEISTVRTSGKKIFNGQLTVGLDLGDRSSSYCVLNEAGEMLLERKAPTTPKAMKETFAGIPRSRIALETGTHSPWVSRLLTSLGHEVIVAHARSVRLITQSRRKDDRLDAQALARLARIDPQLLSPVQHRSAQAQLHLTEIRARAVLVRSRTALVNAARGLVKSYGERLGKCHTQKLHREAASSLSEELRKALEPLLKEIESLNERIQEYDRRIEKMAKEKYPETALLKQVKGVGDLIATTYLLTIEDVHRFRKSRDAGCFVGLQPGRRNSGDSEPQMHISKEGDEYLRTLLVQGAHYILGPLGEDSDLRRWGRKLAERGGRNGKKRAVVAVARKLAVLLHRLWVSGEVYEPLRNSQKTLPAAA

SEQ ID NO: 160600 - protein, 340 aa, unidentified
MKKEVRFYLGMDVSKLWVDITLMCVVDHQKQPLVSERFDNNEAGMKALGKWLKKHNVSFNTNSLLVIENTGVYHRLVWAYCSKLGLPIHIGNATHIKYSFGIARGKNDKIDSQRLCAYSFKNADELKATPALNPVFIRLKDLMTSRSRLLAQQNSIKVYLKELKLSNSKEVQQIIEDAHKAALEGLKQSFQTVEQQIKQVIKEDQAIETNYKLLISVPGIGHLTAVYIICCTNNFICKITGKQLASYAGVAPFGNTSGTSIKGKDKVHKMANKDLKKLLHMGAISAITHYPEFKDYYERKVKEGKHELSAINAVRSKIVLRAVAVVNNQKAYVNKYKKAA

SEQ ID NO: 160601 - protein, 342 aa, unidentified
MLYVGIDVAKNKHDVTALNVPGKTVLKPLTFSNNKAGFELLDLSFRQLNQDCLIALEDTGHYAFNLLNFLHEQGYKVYTYTPLLIKEFAKSLSLRKTKTDKKDAHGIALKLLSDPNREQFQHDNRQVELKILARHIHRLKKKQSDWKVQYTRCLDIIFPELDKIVGKHSEYTYQLLTCYPNPQKRLEAGFDKLIEIKRLTASKIQDILSVAPRSIGTTSPAREFEIIEIIKHYKRLIDKAKKCVNDLMAEFNSVITTVTGIENRLGAVILAEIRNIHAFDNPSQLQAFAGLDSSIYQSGQIDLAGRMIKRGSPHLRWALIQAAKACARFSPAFKAYLKTKLE

SEQ ID NO: 160602 - protein, 347 aa, unidentified
MRFYTGQHRYYCGIDLHARTMYLCILDHEGGKVVLHRNLRCEPDAFLRAIEPYRDDLVVGVECIFCWYWLADLCALHDIPFVIGHALYMKAIHGGKAKNDKIDSHKIAVLLRAGAIPVGYVYPQGMRATRDLLRRRLFFVRKRSELYTHIRITFHQLNLSAPSGAFRYPGNRVGVAELIPDPVVRASVEADLALAAHLDEIIRSLEGTISDRAMVEDPDTLERLQTIPGVGRILSLTLLYELHDVARFPRVQDFLSYARLVKSQTSSAGKITGISGAKIGNAYLKWAYSEAAVHFLKKNPPGQRLLHRIRSKHGKGKALGILAARLGRASYHMLRRSTAFDMDRFMN

SEQ ID NO: 160603 - protein, 430 aa, unidentified
MKSNTQNAKIKAITETTLVLGIDVGSETHYARAFDYRGIEYSKKPFKFSNDEAGFVMFKAWILDIKEKHGKDKVVPGMEPTGHYWFNLGKFLQDNEMKLVLVNPHHVKKSKELDDNNPTKNDRKDPKVIAGLVREGRYMIPYLPEGVYANLRTASNMRFQLQAELTRIQNRISRWFNIYFPEYKTVYGQPDAKSGMLILKVAPLPEDILTLGIDGVNQIWRDAKVRAVGKARAKTLIEAAEHSVGSKEGEISARMEIRMLLEDYESRNTRLQEVVALIEELVKKIPMAEKLLEIKGVGIKTVSGFLAEVGDISRFNNPKELQKLAGLALVENSSGKHKGETTISRRGRKRLRYLLFEVAMSLVSKNPEFRELHSYYTTRKLNPLKKMQSLMAVAAKLLRVFFAMLTKGVDYDPKKLVGDIKRPAVYLQVA

SEQ ID NO: 160604 - protein, 346 aa, unidentified
MVLGVDTHKDVHVAAVTDGLGRRLGTASFPTTESGYAQLLAWAGTFGVLSQAGVEGTGSYGVSLSRFLHARGVEIVEVNRPDRAARRRRGKSDPVDAEAAAHAVISGRASAVPKTADGPVEQIRVYKVAKDSAVKAKRQAVNQLHALVVNAEPDLREELADLGRKALVTRCAALDDTVHAPVAGAVVHTLRVLAQRVQALDVELTDLNARIEQLVQATAPALLQEYGVGVDSAATLLRTVGDNPERLRSESAFAALCGVSPVEMSSGRTHRHRLNRGGDRQANAALFRILLTRLRDHQPTIDYVARRTREGLSKRRIIRCLKRYLARHLFAVIQAAFAPAAAHTAT

SEQ ID NO: 160605 - protein, 369 aa, unidentified
MGKYIEVFVAFDVAKKKHAVAIAEGGRTGEVRFLGDVENSPLPIERTIKSLAGRYDRLHICFEAGPTGYGLYRQIQALGHECMVVAPALIPKRSGERIKTNRRDAVTLARLHRAGELTGVWTPDAAHEAVRDLVRAREAATDDLRRKRQQLLSFLLRHSRIYSGGGHWTMAHRRWLANQKFEHAAQQIVFQEGIDAIEDAVQRLRRLEKQLALIVPEWSMAPVVEAYQAMRGASFLVAVTFAAEIGDVRRFDTPRQLMSFLGLVPAEHSTGDTIRRNGLTLAGNRRARRALIEAAWTYRYPARVSETLRARLEALPKPVRDIAWKAQIRLCARYRRLSATGKKLPVVVAAIAREMAAFLWAIGREVTPA

SEQ ID NO: 160606 - protein, 349 aa, unidentified
MRFYNGQHQHWCGIDLHARTMYVCILDAAGHVLVHKNLQANPEAFLEAVEPYREGLVVAAECIFTWYWLADVCAREGIPFVLGHALYMKAIHGGKAKNDRIDALKIATLLRGGMLPQAYVYPAGMRATRDLLRRRLHIVRKRGQLLAHIQMTSHQYNLLPLGKRIAYPSNRGGVAEHFEDRVVRKSIEVDLALLERYDALVSDLESYLVRQAKQHDPQAFALLRSIPGVGKVLALTILYEIHDVHRFDRVQELASYARLVKCAKESAGKRHGTSGAKMGNVHLKWAFSEAAVLFVRHSAEGKQLLARLEKRFGKGKALSILAHRLGRAVYYMLRRGKAFDRTRFLATVS

SEQ ID NO: 160607 - protein, 412 aa, unidentified
MDVFCGIDWAEDHHDIALAGRDGQLLARRRISDDAAGLAQLLGLLAEHGDSAEDPVPVAIETPRGLLTACLRATGRPVYPINPMAVARYRDRHSIAGRKSDHGDAVVLANILRTDAHAHRPLPADTELAQAIAVLARAQQDAVWARTAAHNKLRSHLREYYPAFLAAFGGARGGITRPEARVILAAAPTPAAAATLTLTQLHALLRKAGRRRGIDAEATRLREAFRAPQMRQLPLVEQAMGRQAQALLRQLDAACDSASDLEQAAIESFNQHPDAGIITSFPGLGPLTGARVLAETGDDRSRFADAKGLKAYAGAAPITRASGKTRAVVHRRVKNQRLAAAGYIWAFAALTASPGARAHYDRRKTDGDRHAAAQRNLFGRLLGCLHHCLATGQHYDETTAFPNATAKLPQAA

SEQ ID NO: 160608 - protein, 412 aa, unidentified
MDRLVERCAGLDVHKDSVAATVRVPRKDGQRLQETRTFPTTTRGLLTLADWLASYGVTLVGMESTGCYWKPVYYVLEERFECWLLNAQHLRNVPGRKTDVADSAWICQLLEHGLVRPSFVPPKPIRELRDLTRYRKAQIEERVREVQRLDKVLQDAGIKVSSVAAETLGVSVRRMLDALVAGTHDPEVLAELARGRLRQKLPALQDALTGRFRSEHHGLLVSQILAHIDYLDETIATLSARIEHVIAPFSRELLQTIPGPGVARLGAEVLIAEIGVDMSVFPSDAHLASWAGQCPGNHESAGKRHSGKPRKGSKWLHKTLTESAKAAARSKGTYLSAQYGRLRGRRGPGKATGALRHSILIAAYHLLEQKVPYQELGADYFDRRRSTEQRTRRLVRQLEQLGHTVTLQPLAA

SEQ ID NO: 160609 - protein, 356 aa, unidentified
MSRDIKYIGMDVHKEAIVIAVLNSSGKVVMESIVETQASSILQFIHGLQGELHVTWEEGTWAAWLYDLLQPQVHQVLVCNPRRNALLKEGNKSDQIDARKLADLLRTGMLRPVYHGEHGLRTLRELARSYQTIGQDLIRVMNRIKALYRGWGIACGGTQVYAARNRQEWLGKIEHAGVRRRAELLYEQLDGLQALRRTLRPELLTESRKHKAAKLLRQIPCIGPIRAARLLALMQTPHRFRSKRQLWTYSGLGIETRDSAQYCFVRGQLQRAKKPQQIRGLNQNHNHEMKEIFKGAATRASCGVGPLRDFYVGLLDKGMKPEMARLTLARKIAAIALTLWKKEERFDAEQLKTQAA

SEQ ID NO: 160610 - protein, 342 aa, unidentified
MQITTVGLDLAKHVIQLHAVNQQGKTVLKKSLRRNQVLPFFANLTPCLIGMEACSSAHYWARKLQTMGHTVRLMAPQFVKPYVKTNKNDAADAEAICEAVARPNMRFVPVKDIEQQAVLSVHRARQGFVKARTAQANQIRGLLGEYGIILPQGMIHLTQGLSAALDEASDDLPAVFRQLIQRLLDHLKELDRQVSELEQQIQLWHRESATSQKLAQIPGIGAITASAMVASIGDARCFKNGRQLAAWLGLVPRQHSSGGKPTLLGISKRGDSYLRTLLIHGARAVLRVAQRKANYAGSWLANLMGRRHQNVAAVALANKNARIIWALLAHDRDYQANFQPEG

SEQ ID NO: 160611 - protein, 351 aa, unidentified
MMIIGVDYHPSFQTIAFLVEETGECGEQELSHSDGQAEKFYRDLKQRGASVRVGMEATGYSRWFERLLAELGFELWIGDPAEIKAKRVKKQKFDREDARLLLRLMREDNFPRVWVPSPENRDLRQLLWHRHRLVQMRTRIMNQLQALAMNEGYRWRKKLFSERGRAEFEKLPLGFWASRRRQELLELLDRMNPTIEKLTAAVEQEARKRPEVLRLMTHPGVGPLTALAYVLIIGTPTRFPRGKQIGTYVGMIPSEDSSAGKQRLGHISKQGSSLLRFLLVEAAQAAARINPEWRRRYMHLAMRRHKNIAKVAMGRRMAIQLYWMWRNGCEYSQSVQCGSYAGQLGTGHGVK

SEQ ID NO: 160612 - protein, 427 aa, unidentified
MNCTQNNKLMQITPETMVIGVDIGSELHYARAFDCRGFEFSKKALKFPNTKDGFESFDVWATDLMKKHNKTRAFVGMEPTGHYWYGFGCHLQSMGVEFGMVNPYHVKRSKELDDNTPTKNDRKDPKTIAMLVKDGRYLIPYMPEGVYRELRNLMELRRQCVVQLISIQNRVKRWLDIYFPEFCTVFKKWTGKAAMLTLRHFPTPEVVMKTGEEKIVATWKQEVKRAVGHKHAQKLIKAAEDSIGLKHGLESAALEIETLLDEYEIYGQRHQRIMQKVEEQVKQVPSANKLLGIKGIGIVAVAGFLAAVGDVGRFNAPEQIVKLLGLNLRENSSGKHKGQTTITRRGRSDGRYAIFQAVLPLVAKNPEFRKLHQYYIHRENKPLKKMQSIVALCGKLVRVFYAILKTGSEYSAEKMMSDIKRPMTKAA

SEQ ID NO: 160613 - protein, 395 aa, unidentified
MSAEGEAIRSNDYRKDTTVKAPSTRPAAVLGLDVGKSSHWACLIDRDGEVLSSAPVRNREAELDALFASVPAGTLVVVDQFRNIGSLAVRRARAAGLGVAHLPGLAASRAAGLFAGEAKTDERDAAVIARTALGVPDSLSGVPGRGEALEAARALSSQRDHVVACATRDKNRLRAVLLESCPALEAAVDLSDRRWLELLAGFGGAWGVARSGTEGPQAEAAGEAAAASTAPPPALIEAENRQVRFLAARISEALDEAGALEAETAALLEGDETYACLLTVPGIGPRTAAQLAVSVDIGRFPDHDHLASYCGIAPRVRSSGTSVRSVRASRRGDARLKSLLIFSCNSLVRSSGRYGEYYRACRARGMGHGRALKAVARKRLRAIYAVMRDRVPYRE

SEQ ID NO: 160614 - protein, 348 aa, unidentified
MDRYIGIDAHATSCTLAVVGPSGRRLSQQVVETNASALVEAVRSVPRPRHLCLEEGTHSAWLHEILSPHVDELAVVSITESKGPKSDQRDAFARAEQLRIGTFDKLVFKAPTQFALLRQLAGTYDALARDVVRTQCRLKALYQSRGITTTGKTVYGTAQRDEWLERLPVSHRPSAELLYCQLDAAQALKKSASKQLIAESHRHPISEVLETCPGLAEVRVALLIPVVVTPHRFRTARQFWSYSGLGIVMRSSSDWTRDGDRWVRAQVNKTRGLSRSFNHTLKYVFKGASTTIVTKYPGHPLHQHYERMLSAGTKPNLAKLTLARKIAATALVMWKREEKYDPERHHTS

SEQ ID NO: 160615 - protein, 509 aa, unidentified
MRRIGIDIALKAAHKAAVFEDGERKGKPFAVPPTRAGLDELERRATAGADGACEFVMEPTGLGWLPMAAELARRGHRTYLPKPQKTSALRKFLAAHAKTDAHDACAAALVRHVDAANTHELHVPTADETTLKLCVKQRARLVVDAAKAKGRIHAWLVLANPHLGKALGRDATSDVATAFLRGQLDPFAVRERGKDALHRFWQLHTSGRFNAAQVEAVWAACATTCELYDALRAGGTLPFEYASLQLLVRQALEQVEFLEGQIAELDALIAARYATLDPTRLLEREVPGVGAVIAAAVEAFAGDATRFASVKRYAAFYGVVPRTKQTGGGDGKPRQKLTKGGHNLLKQYMFLAAESARRADPALAAVYDHAIARGKHHFSAVIIVAHKLVRRIYALLRQRAEAQAAGTADVPRYRLQCPDGTPLDRAAARAWVADHHPSKRTKEARKRTPGDVRLTRSLPQEGSSEDATRAVALPAPTTFVPDPALAVKSAAESVISTPLDQATISLATS

SEQ ID NO: 160616 - protein, 424 aa, unidentified
MNNTQNKKIAQVSDGTLVIGVDVGSNTHYARAIMARGYEVSKKPFDFENTRDGFDRFVSWANHLAVVYQLKKIFVAIEPTGHYWFNLADYLKAYDVTLVMVAPQHVKHSKEMDDNTQMKNDQKDPLVIARLVAEGRYMIPYIPEDVYAELRSAFNRRCDLVEALTRNTNRMIRWFDMYFPEYRTVYGKADAISGLLILKRAPLPSDILKLGVDGICRIWREEKLRGVGINRARKLVAAAESSIGLKGGEAIRQELWQHMEAHELFKKQLGDIMQMIDGLIAKIPGADRLLKVPGAGIVTVAGFLSEVGDISRFTDPKQIQKLAGLAVVENSSGKRKGKPGISRRGRSRLRWVLFQLAMTTVKSNKEMKAYHLYYTTRKNNPLKKMQSLMAIAGKMTRIFYGILKNGTEYDPAIVMKDFKKEVAV

SEQ ID NO: 160617 - protein, 332 aa, unidentified
MHYVGIDLHKRDLVMAVEDDRGPVGKPRRIACRDEAAIVKAFRKLRPFRAVIEASSSYRWLYDLLEPLGTVVLAHPLRLRAIVTARAKTDKLDAALLARLLRAGLVPESYVPPQPYQVLREVTRARARLVRCATLAKNQMHALLRSRNRHPPYRNVFSKAGRVWLARQDLGVGGNLIRDELLRRLDYFDRERLALDDHLATWSEQFPQAEAVKALYGFGLYSALLVVAEIAESDRFHDARQVGAWAGLTARVHQSGGHAYHGRISKQGSRWLRWILVQAAAKVVRKDRALGNFYRRVRRRSGRNAARVAVARKLAGICWVRLKRWQAEHAAV

SEQ ID NO: 160618 - protein, 343 aa, unidentified
MRKENIIYVGIDLHKETHTAVMLDCWNQKLGEITIENKPAQFHKLTRKVSRFVTEEKTPVYGLENAYGYGRTLAVWLIEKGYIVKDVNTALSYAQRKCVPMYQKSDSYDAEAVALVLINMLDRLPDAILDDKYWTLSQLVNRRDNINVHQQRLKNQLHEQLCMAYPSYKKFFEDVGRPTALYFFGEYPSPVHLRGKTAEELAGELRPVSHNNCSVKKAEKILELVRSDGEILRDCQESRDIITRGLVLDLQHYREQMLEVEEAIKGILPCFQCTLMTMPGIDIVTAANILSEIGNIKRFPNASKLVKFAGIAPVNFSSAGKGRDMCPKQGNRRLQAIFYFLAI

SEQ ID NO: 160619 - protein, 438 aa, unidentified
MSNKVIFNLDELFISVGIDVGADFSWMSIALPNQQFVGKPYKILHNSIDSLTTAVSKIKEAEELYSLESRIFLESTGIYHYPLFCYLRDKGFNCSVINPIITKNSTNINIRKVHNDRFDSKKAALVGLKPDLKVSLMPSDLALNCRNLCREYYDLMDNRSAYVNKLQGELRMAFPQYLGIFSKVTINTSLTLLETYTSPSAFLKADKQEIIDIIKSTARFGLTYAQNKYNAIIQAATDANQFGYIIDSNIKRIRLYISFIRKYDEEINSILESLHELVDANEDADFVKQIHLIETFKGAGFLSAVSIMGEIGDFSAFSKPKQLFAYFGLDPAVKQSGKFEGTKVQMSKRGSAIARRVIHTLTLQSISISRNREAKNPVLREYYLKKCDSKPKLVAMGAVSHKVCNMIFAILRDNKPFKIIAPQEHIKQYNSAKCDIAA

SEQ ID NO: 160620 - protein, 392 aa, unidentified
MMISVGIDVSKDKHDCFIFSSEGEVLADVFTIPNTMDGFHSLLQQIWKCSNSQDKIKVGLEATGHYSYNLLGFLLDNGLATYVLNPLRANLYRKSLSLRKTKTDRVDARTIASMLLSDAGLKPYTDTAYHNEELKSLTRYRFDKVKERAKLKSSIARLVCILFPELEKLVPSLHIASVYALLEEFPGAKQVAAAHLTRLKALLETASKGRYKRDMALEIREVARNSIASPLPAKSLELQHTIRLIRELDNEIAEIEEQIQSIMDELHSPITTIPGLGFRMAAMILAEVGDFTRFDSPDKLLAYAGMSPSTYQSGQLKNCYPHMEKRGSRYLRYALYNATKYVCHWDPTFADYLAKKRAEGKHYNIAISHAAKKLVRLIFAMEKSRQPYCSAA

SEQ ID NO: 160621 - protein, 343 aa, unidentified
MLTLKSFTMGQLLVRQCFGIDIAKGDFTASLCRHYSAGDVLFSDTVTFENSRKGFNQFLRWCQKVSEPSVPATYLMEATGIYFEPLAYHLHRIHKHVSVLLPNKVKHYAKSLNIKTKTDAVDARVIARFGTERQHPEWQPPKEIYKKLRELTRLCGDLKKERTVFSNRTRSTEAGESPNSFVLKANNRVIKELDNLIEKCEKEIAALVEGDIELRERFEKLMTIKGIGLTTLAVVIAETQGFALISNRKQLASYAGYDVVQRESGSSVKGKTRISKKGNSRIRAAMHFPALVSCRFNQNMKNDYLRIIEHKTSKMVGATAVQRKLLLLIYTLWKNNDTFKEEM

SEQ ID NO: 160622 - protein, 415 aa, unidentified
MEATVERCAGLDIHQASVVACVLVGPPGCKPREEVRSFGTSTRELEALRAWLEELGVTHVGMESTGVYWKPVHAVLEGRFELIVGNAHHIKAVPGRKTDVKDAEWLADLVRHGLIRPSFVPPPPIRELRDLVRLRRSLTEARSTERNRTLKLLETANIKLASVASEVFGVSGMAMLRALVEGEAAPAEMAELARGKLRSKRERLTLALEGRLTEHHRYVLAFHLRRLAAIEEDLRALDARIEAKAEPFQAQRRLLQEIPGVDALVAVTIIAEVGVDMSVFGNAKRLAAWAGVCPGNHQSAGKRRSGATRRGNVHLKTALVTAAVSGSRRRGSYYRDKYHRLRARRGRLRAAVAIAHKILVAAYHMLAGGVPFRELGEAFLDQQARQRNVRHLLRRLDHLGYDVLLRPKPAEAAAP

SEQ ID NO: 160623 - protein, 349 aa, unidentified
MTTMTAPTIRVTAGVDTHRDEHVVAALDERGAELGVKSFPSTLNGHRATLAWLRRLGAVERVGVEGTGSYGAGLTRFLRAEGVIVVEVNRPNRQLRRSHGKSDPVDAVAAARAAQSGQTTVEAKARNGAVEAIRALRVARRSARHARTTAINQMRALLVSGPDDLRETLRSNTASQLVKTAARFRPADPATAGGATRFALRELARRVQGLEAECERLDALLAPLVSATAPELVGSYGVGTDTAGALLVSAGDNPERLRSEAAFAHLCGVAPIDASSGLTSRKRLNRGGDRSANNALWRIVMVRMVYDPRTRAYVARRTAEGRSKREIIRSLKRYVARELYRRLPRFETV

SEQ ID NO: 160624 - protein, 326 aa, unidentified
MHAHITCVGIDISKATLDVALYHDDALVATTLTVANDRRGLLALRRWLHKTTADCLLLIGMEATGAYWQPVAASLHASGARVYVLNPRCVKDSARAENQRQKTDRVDAGVIARHLRARHAQLHPWAPPTAAVATLRALLTRWDQLAQDLQREYNRRAEVQEPLVRASFRRMIRVLLQERRTIRAALDQHCTATPELQTAVTAVAAEPGIGRLSAMRLLAFLRTHPFTTARQAAAFVGITPRHKESGTSLKCRARISRVGDAVLRHALYFPAVVARHRHPILRPWADGLIARGKTPKQAVCAVMRRIVHIAFGIVKRVDREQPLLAA

SEQ ID NO: 160625 - protein, 408 aa, unidentified
MRIIGMDIHRDFAEVVALEGTALTHLGRVEMTRDKLRAFAAELQAADHVVLESTGNTVAVVDLLSPHVARVAVANPLQVHLIAKAKTKTDKIDAGVLAKLYAAGFLPEVWTPDEATLARRRQVARRSQLVKQRVRLKGFVHSILHAHLVPRCPHADIFGGKGRAWLRAQVLPDDERSAVERHIAEHDRLTIALKDIEKDIAQAALADENVQRLMTIPGIDMIVAVGVMAAIGRIDRFGSPDALVAYIGLNPSVFQSGDGPARHGRITKRGRSHARFLLVEAAWQTVRSPGPLRAFYERVRARRGNHIAAVAVARKLAVLIWHLLTKGEDYTWASPALMARKRRSMELAAGMPSERGKKGATADYNLPHRRRADRAGAELSEIAYRRMMEGWRKKNPRKGAGATPEERL

SEQ ID NO: 160626 - protein, 424 aa, unidentified
MRITKNEAQNQDHIKLVICVDVSKNTLDTYINQNHTIIQDHFPNNTLKIERKLEEYHRLANELGCMGLHILAEPTGTYHRKLFRVARRLGHTTAYVNVESVSKLKVVESNDTGKTDQKDPRIIWLLSQLDKTLKHRILPEGYQLLREYNKIYDDYEVETVQIKNRMHRYVMDLFSDYSFKNDFLYSPSGQGLITLYGGNPYRIVQSGKNRFMNRMRKHRKGIHNKTLEQLWNDAETSVHHELSLKYRALIEERITELYERYLCLKERKAQCKEKMIAIYSQLRDDDPCLPLAYKGVISAFHLARFIGETGPLSDFAHVRQLLRYGGLNLRERKSGTYRGLNRMSKKGRRLLRKILGQIIFPLVKKNALFGHYYHTKKACGMISYKANVATQRKFLKMMFGWYHSNQEFDLNRVFTSESEYHLAA

SEQ ID NO: 160627 - protein, 335 aa, unidentified
MIKNPLAVAIEQALHPPAHRAETGEAIPAAGSPSVPVGALPSECWVGIDVAKASLDVAIWPTQERLRVTRDEAGLAELIAWLQPRTPTRIVLEATGGLETLVAGRLIEAQFPTAVINPRQARDFAKALGDLAKTDALDARVLARFGQSIQPEPRPWKDEETQALTALLQRRRPLITMLTAEKNRLDSAHRQVQADIRTTMAWLEQRIKVLDDDLQGRLRASPVWREQDALLRSVPGIGPVTVVTLLAALPELGTLDRRQISALVGVCPLNRDSGPYRGHRSIFGGRAVVRTALYRATLTASRFNPVIKAFYQRLRAAGKPAKVALTACIDRKSVV

SEQ ID NO: 160628 - protein, 403 aa, unidentified
MNNVAGIDVSKGKSMVSVLRPFGEVVAKPFSVGHTGSELKELADYLKSLDGETRVVMEHTGRYYEPVARFLHEEGIFVSAVNPKLIKDYGNNTLRKVKTDKADARKIARYGLDNWAELRQHTPMDTIRMQLKTLNRQQSLYAKTKTMMKNNLIALLDQTYPGVNALFDSPVREDGSQKWVDFATTFWHVDCVRNMSLTAFAERYRKWCKRHGYNFSQSKAVEVHAGAQDLIAMLPRDALTKTMVRQAIDALNAVSASLERLKAEMQALAAQLPEYPVVMAMHGVGDSLGPQLMAELGDVTRFTHRNAITAFAGVDPGADQSGTHEAKSTRVSKSGPPELRRALFLVMDCLLKTMPQNDPVYRFMDKKRAEGKPYLVYMTAGANKFLRIYYGRVKEYLASLEGN

SEQ ID NO: 160629 - protein, 317 aa, unidentified
MTQTSTRTAGIDTSKSKLDVAVHGRTEHWQVANSLAGWRILTTKLAEADVSRIGIEATGGYERGAVEHLRAAGFTVLVLQPIQVKAFGRVHLRRAKNDVLDAVLIAACAAAIEQVRDAPDPRLAELAEHLTFLEQIEDDIKRCKTRLEHIDQPALRRLVLGDIARLKARRLAQIRYLARQLRAHRDLAARLDLVLSIPGIGERTALALLIRMPELGRVSREEAAALAGLAPFDNDSGQHKGQRRIAGGRARLRRSLFAAALPAAFRWNKALIVLYTRLTAAGKAHNAALIACARKLLIYANTVIQRGTPWREQASAT

SEQ ID NO: 160630 - protein, 319 aa, unidentified
MAQNDLIVVGVDVAKDKVDACIRRFTLRQTFPNTAQGHRKLVAWLRKCRVGKAVMEASGGYEREWRNVLHNSGIEVRIVDPRRVRSFAQSAGRLAKNDPIDAEMIAWFAETFSQTPGQIPDAAREELAALAKARTALVNVKIRLLVQDEHAAPEPARKAYARVLKSLAAEIDKLEAAISAKVKATPEFAERAEIIESVPGLAQATSAILIAGMPELGQVSDKVAAALIGVAPYDDDSGKRRGARYIKGGRRWVRNGIYMPCLGAATQCNPVLKAFYQRLLAKGKEPKVALVACMRKLIIILNTMLTRRQKWNPGRHAMG

SEQ ID NO: 160631 - protein, 316 aa, unidentified
MAMLSFGGIDVSKDRLDITVLPDEQCSSVSNDAAGWAELIEQLRGSSITAIGVEASGGYERGVVRALLAAGMSVRQINPFKLRQFAKASGILAKNDRLDARMIASFVAIMPTRPAQRQTPMIEQLAAMLTVRRQLSDHKVATENASRLLEGAMLQRLSRRRVAGLTADIDLLDQRLVEIVTADPALAHRFWLLTSMPGVGAVLACTLIALLPELGQMSRKQVAALVGLAPYDFDSGKLKGRRCIWGGRARVRHVLYMAALSASNWNPALKAFHDRLAVTGKKPKVVIVAVMRKMITTLNAMLRDGTAWVDRYSGRR

SEQ ID NO: 160632 - protein, 401 aa, unidentified
MEGPIVSIDVSNGNSHYMCFIKNNKRFGKVNKIDHDIEGFKRLLEDIQKLEAETNEKVCAVFEATGVYTKPLERFLRKNSIKTYMINPLESARKRKEEIHNKKTDKLDPISISKVYYDKEEMMELKKKDETYNWLRKKNRLYENQLNHLRKYKVTFQNQLSICFPGYLDLFKDGYSDIPMTILKKYPHPDLLKNKKAETVARYLEKNTCHTHKVSLEYALKIIGFAKKTYPGCEKDDVEVEIFKILLDKVIETQRECEKTLNEMITVASTLEEYRYISSIDGIGPNLAARIIAEIGDIEEFKSREALVAYAGLDPHIYQSGDQDGKHLKISKKGNKYLRCLLFLAVGCSIRGAKDNPVNRFYQKKKQQSNPLNSKAAKTACTAKLLKIIYGICKNKTTYER

SEQ ID NO: 160633 - protein, 358 aa, unidentified
MSQEKYIGMDVHQATISVAVVDAQGKLIMECLLETKAATIVEFIGGLHGTLSLTFEEGTSAAWLHDLLKPHVSRLVVCDPRKNALLKDGNKSDRIDARKLAELLRGNQLHPVYHGEHGVRTLKELGRSYLTITQDVSRVMNRIKALYRSWAIPCAGATVYAPRHRAEWLAKIAEPGVRVRAERLYQQLDLLQPVRLEARRVLLAESHKHSSVKLLRQIPSIGPIRSALLVALLQTPHRFRTKRQLWAYSGFAVETHDSGEYRSVRGKLQRNRERMTVRGLNDNHNRDLKNLFKSAAISASTRPGPLRDFYVARVEKGMRPTLARLTLARKIAAISLTVWKKGVEFDPQQLQRPALEHL

SEQ ID NO: 160634 - protein, 343 aa, unidentified
MQTVTTIGLDIAKSVFQVHGVDAAGNVIVRRQLKRRYVLPFFQKLPPCLIGIEACASSHHWSRELQALGHTVRLMPPAYVRPYVKRQKNDAADAEAICEAVTRANMRFVATKTPEQQSCLMLHRTRHLFIRQQTAVINAIRAHLGEFGIVAPVGRNGVEQLLDVAADASDKRLPEIARACLLALGAQLRTLKVQILNFDRQIMAWHRSNEASRRLDEIPGVGPVLATALVASVADPKAFRSGRNFSAWIGLVPKQHSSGGKDKLGSISKQGDRYLRSLFTAGALAVIRYAKIHGTKHRPWLAALLARRPTKVAAIALANKIARMAWAMMARGDRYKEPVALAA

SEQ ID NO: 160635 - protein, 461 aa, unidentified
MNSGASSPRVSLARTSLRNLKLSPRLRREHARENAFLWMSSGVGLLEEPMDTIFPRVAGLDVHKATVVACLRRLEPNGRCTQEVRTFSTMTASLLELSDWLANASVTHVAMESTGVYWKPVFHILEDRFTTWLVNAQHIKKVPGRKTDVTDCEWIAQLLQHGLLQPSFVPPPTIRELRDLTRHRSQLVGEKTRVANRIQKVLEDANLKLSSVATDVLGVSGRDMISRIIAGEASSESLAKRARGKLKKKIPQLRLAMQGKVTEHHRFQLRILMEHLDFLESLIAEVSKRVDATITPYAEDLERLTTIPGLDKRSAENLMAEIGADMGQFPSSSHLASWAGICPGNNRSGGKARTGRTRKGSRWLRQTLTQCAWAASHTKETYLSSFYRRLAGRRGKKRALVALAHTILVVVYHVIKEKATYSELGANYLDQLEPERLTRYLVKRLERLGHEVTLHPKTDAA

SEQ ID NO: 160636 - protein, 318 aa, unidentified
MNVIGLDVSKDTIDATLITTKGSKDYIKISNNTEGFENLINWIKTKRIRKIAISMEATGIYYEQAAEYLSALYTVYVINPLKIKEYAKSQFSHTKTDKADSKLIAEFANRHLDKLTPFRPSENPILYKLVNLLQQLKEQQKETQNRLHTAKDIYIKSTHEAIIELLEEKIDQTSKRIEGMIKQKESLNIEYQNLQTIPAIGKETAVILLRHLTDKNFETANKFVAFAGLSPKIEQSGTSVKRNGRLSQYGHRQLKRALFMPALVAYRMNAFPQLVRNLEAAKKPKMIIIVALMRKLAKIAFYIHKTKKPFDKARHQTV

SEQ ID NO: 160637 - protein, 313 aa, unidentified
MTDLCEYVGIDVSKAMLDVACFQSRAFQQFRNTPKGISKLVIWLLEIHPNLVVLEATGGLELACVAELMQAGLPVAVVNPGRIRGFARSIGQLAKTDKLDAMVIAHFAQATQPKPRKAPTPQEEQLSALLTRRRQLIEMLTAEKNRQHSARFGMQTDIQEHIDWLEQKLDQLDEEIQACIDQYPDWKQKADLLSSVPGVGRVTTVTLLGLLPELGTINRQQIAALVGVAPVNKDSGKRQRKRRVFGGRANVRSILYMAALSASNHNPQIRDFYNRLLKNGKEKKVALTACMRKLLVILNAIARSNQIIEASLA

SEQ ID NO: 160638 - protein, 343 aa, unidentified
MEIVAGFDVHRNQITFDALDTETGELCCGRIASTREAVRGWVGRFPGQQVDVAVEACTGWLFVCEALAEAGAVPHLADPAEVAARRGKKRRAKTDRADARHLRQLLAEGRLPEAWLPPAHVCEWRTRTRLRKTLLDERSQWRQRIQATLFHHGIPAASVPTRLLSAEGRRVLAALPLPEAARERTQVALALIDAIDAQLAPLEREIRALARRQAGCQALQRHFGIGPLTAPTILVELGDVTRLSASRKAVRAVGLDIGVHRSDRHSRLGKLTRQGPPEARWALYEAAQSACRRTSPDHQQYLALKARGLSHTQASLTIARKLARRCFHTLRALGPAALQPVSD

SEQ ID NO: 160639 - protein, 350 aa, unidentified
MPKRNVPRPAAVYGIDIGKNIFHVVGLSSDGIPVQKVRFRRDTLLQFFERAAPTIVGMESCAGSQWIARKIQALGHKVRLIPAQFVKPYVKSNKSDIIDAEAIAEAATRPTMRFAALKSEEQADLQALHRVRDQMIGTRTRLINQMRAFCLEYGIALRQGAGLFKLDLPQALEDQSNDLSSAMRKLLAELFTDLRQLEQRIGDVTREIEAIASREDVARRLMTIPGIGALGATALLAAVGSGRQFQKARDLAAWLGLVPREYSTGGKQKLLGISKRGNRYVRKLLVHGARSCFRHLDRTRDRLGSWLDGLQARMHPNKAVVALAAKMARIVWVVLTKPGALYERRDPAFA

SEQ ID NO: 160640 - protein, 315 aa, unidentified
MVDVPCFVGIDVAKAQLDIAVRPSGERWAVPNDAGGVVTLVDRLQAPHPTLIVLEATGGLERAATAALAIAGLPVVVVNPRQARDFARATGQLAKTDALDARALAHFADVIRPTPRPLPDAQTQELRALLGRRQQLVVMRTAEQNRLAGTRGRLQTDIEAHIVWLNARLATLDDDIETLIRASPLWRENDDLLQSAPGIGPVCARTLVLELPELGTLTRQQIAALVGVAPLNCDSGTLRGRRTIWGGRAHVRTVLYMGTLVATRYNPRIKAFYERLLAAGKVKKVALTACMRKFLTILNAMLKHRTPWQSQEVPG

SEQ ID NO: 160641 - protein, 406 aa, unidentified
MERLVNQLFVGIDVHSKEHKVAIIPKTLFEEGGRPWKRVKPLTIKNETESFEYLDKAIHSHVCSADQVSIAVDHTGGHYSEPLVYHLKAQGYHVLYLESKGMKAARERFLDEESKSDTIDCIATAYMLYLRDTHGLSFRISETVPELGTSAATLNSLVLQRQQFNKLLVQTTNRLHQFLLAVFPEGEERYFNQLLKIIPFYPTPKDIVNSNGLEGITGIRLKDTEGIIRLAGRSVGIDDDTYRWLIRELGILRMHFLERCETITSVLRRQATIHPYGKILLSFPLLGEIAAATIIAIIKDIEKWPDKKKLKKALGVYGILTQSSGSYKTRRGKEGSKHGRRVLFQICLRCITKNAPDNDFKDYYFRQVNRGKVRMKAVVSTMGKLAEIIYHCLKSGEPYIYQGIYK

SEQ ID NO: 160642 - protein, 367 aa, unidentified
MRMSVGVDLHKGQFTVYWRGEGGNEGRFALYGTNEHGYRGFESQLMEAVNGGHEVRVAVESTGNTRYFKGRVEKLGIEVVVINTSKFKVVNQSVKKTDRHDAATIAEFLEKDMLPEARLCSADSEELRRLLKARRTLVQSIGAVKNQLHGMLLSLGIETKKGSLQSKKGRRRVLSVLEEQGLAGVAVKPLIETIDLLDQQVKVLEKVLAERVAGDRMVELIMTIPGAGLITASTVRAFTDDISRYEDPKHYASHAGLAPWVQDSGQRERHGSITKRGPEELRTALVQIVVGMVRNSRKTASFRLMQRYAMLKQQKGSGRSIIATARKLSTVIWHMLTKDEEFDPLRMTDAAVRKTAKEMRAAAVEVA

SEQ ID NO: 160643 - protein, 367 aa, unidentified
MTGFQQAGPFVPRNYDVFAGLDVDKTSIAATFAAHDGTIKSMRIPYDADNLLNYVGKKFTGKRVAFAYEAGPTGYGLYDRLTAGGYPCLVVSPSMVPTAPGHHVKTNRLDSLKIAESLRGGQLKSIHVPTTSYRDLRHLIQLRDTCVRQASATKCRIKALLLFEGIPFPAAGAAGQWSRTVVTELKILECPGAVRFKVDQLIAALEFSEKQVLTTTKEIRRFCTQDAEIYRNILFLTTIPGIGWITGTHLLARIGDWREMGNVRQLGAYLGLTQRENSTGLDVNRGSITRTGDGRLRNKLIQCAWVAIRKDPELDVFYRRIYQKHPKQAAPKKAIVAVARKMTMRIHAVLRHQRPYEVRTISLAPLS

SEQ ID NO: 160644 - protein, 313 aa, unidentified
MDQVSIVELDIAKSVFQAHGADASGGVAFRKKIMRAKVLEFFASQPPCQVAMEACGGSHYWAREIGKLGHEVKLIAPKYVKPFVKRQKNDAADAEAICEAATRPTMRFVAVKSETAQASTLVFRTRDILVRQRTQITNPAARLPAEVRSILSLLVQVVTGLEEKISLLDKEIARRTKEDAVARRLMTIPGVGPITATAIAALAPPAATFRKGRDFAAWVGLTPLQKSTGGKQKLGSISKMGERTLRRLLIIGAAAAIQHAGRQGIPPGTWLARMLARKPRMLVTVALANKMARIVWALLVKGEDYRAPVVAAA

SEQ ID NO: 160645 - protein, 349 aa, unidentified
MLIIGCDYHPGFQQVAIFDKQTGEIRQRRLAHPQEAIEFYRGLPAEVLVGIESTGFSGWFERLLGELGHQVWMGDATQIRASMTRQQKTDKRDAEHIVKLLVEGRFPRIWVPSAADRDARQLLVNRHKLVQWQTQVKNQLQFLALDQGLQLKWRLWTRSGRQKLEALPLGPYAGQRRATLLELLDQLEQQIAGLDTAVLGEAQARPEAVRLMTHPGVGPVISLAFVVTLGPVERFAGARQVASYFGLIPRERSSGGKQRLGGISKQGNSFVRYLLVQGGHSAARLDPELKRFYGHCKHSHAHAGVAKVAVARKLAVRLYCMLRDGIDYAELRHRRRSHAGEPESYCGRK

SEQ ID NO: 160646 - protein, 357 aa, unidentified
MAEGSWVGLDVHARTSVAGVLDGTSGELRVQRVPPRSEETVAWLETLPRPVRVAYEAGPTGYGLARACAEAEIACTVAAPSKIPRASGDRVKTDRRDAERLARLLRLGELVAVRVPEPFEEEARDLVRAREDARGDLMRARHRLSKLLLRHGLLYDGSAWTLAHDAWLRRQRFQGRALALAFDESYGAVAQAKGRRDTLDRAIADLAAESPYAEVVGRLVCLRGVSTLTALALSVELGDWGRFRPQSLGPFLGLTPSEDSTGERRRQGAITKTGNTHARRLLVEAAWHQRRPLRASAALERRRQGQSAAVRARADHSARRLHERWHALEGRGKRRTIVAVAVARELAGHCWALATMT

SEQ ID NO: 160647 - protein, 316 aa, unidentified
MKTQTFVGLDVSKQHLDIALRPQGRHFVTPNSHRGIKQLVKRLTALKPQLIVLEASGGYEFLVTAALAEAQLPVALINPLAVRKFAGATGKLAKTDKIDAQVLAHFAEALRPETRRLPDQDQQLLKAALHRRLQVVKMIGQEKNRLEKTFIPALKQDIQAHLTWLHQRLEQLDRDLNDQIRRSPLWRDRDRLLQGIPGIGPVVSRAVMAQLPEAGTLPGKKAVALVGVAPYNRDSGRFRGKRMIRGGRSYLRRMLYMAAVVASRWNPVIRAFYQRLLAAGKPKKLALTACMRKLVLIINAMLKNNQPWKQFVSQVP

SEQ ID NO: 160648 - protein, 422 aa, unidentified
MERDYRIYVGIDWATQAHQACVLDGAGQILAERSFEHAGNAIAAFAQWLNELARGDPEQVAIAIEVPRGAVVETLVERGFQVYAINPKQLDRFRDRYTVAGAKDDRRDAFVLGDSLRTDQPCFRRVRLDDPLVIQLRELSRVDEDLKREGSQLTNRLREQLHRFYAQTLSLCPAADEPWLWALLELAPSPSLGRRLRPQRVQRLLRQHRIRRLSAEEVVAALRTPALSVAPGVLEAATEHIALLLPRLRLVHTQRQRCGARIEALLDDLQAAEDEDEEQGEHRDVEILRSLPGVGRVVAATVLAEASWALADRDYHGLRAHAGIAPVTKQSGKHHTVLMRRACNGRLRNALYHWARVAATCDRPSKTYYAALRQRGHTHGRALRSIADRLLRILIAMLNSGTLFDSSKAGPPQPRLLSGKVA

SEQ ID NO: 160649 - protein, 420 aa, unidentified
MTKRRYRSTKVNQVNWSQIAEQAGEQKVVFAVDVAKEKFVGALMKPDRTVLKTIQWQHPEQTPELMHGLLSHLGAQRLEVAMEPSGTYGDPLRCLFVTHGVAVFRLSPKRVHDSAEVFDGVPSLHDAKAAYQIGRLHLDGVSRRWEERSEQRRELTAQIAVLNLHQERLQSSRNRLEAQLSRHWPELGGILDLGTLTLMSLVAAYGSPARVAAHAEEARRLMHRSSGGGLRREKIEGVLEAARQTLGMPCLEAERMLLQTLAQDMLDNHRAMQRAEQALAAQVDADTTLHWLASVVGKTTAAVLVSTQGRPQDYPDAGSYLKSLGLNLKERSSGKFQGQLRITKRGPGIARLYLYFAALRWLYRDPIIQAWYQRKVARDGGHKGKAIVAIMRKLAKALWYVAQGVAFDSRKLFNLKALAA

SEQ ID NO: 160650 - protein, 354 aa, unidentified
MIIIGCDYHPGFQQIAFVDTDSGELQERRLQHREEAETFYRELVAQGVGVRVGMEASGQARWFERLLAELQIELWIGDAAEIRTKRVRKQKTDRQDAQLMLKLLLEDRFPRIWVPSGENRDLRQLLWHRHRMVQARTRIMNQLQAVALNEGLRRKKGLWREAGRKQLEGFRLAPWASRRRHDLLELLDRLTPTIAELTQAIEREVEKCPEAQRLTTHPGVGSLTALAFVLIIGRAERFQCGKQIASYLGLVPAEESSGDRQRLGHISKQGNALLRFLLVEAAQVTVRSNPEWRRKFFHLAMRRGRKIAKVAMARRLAVQLYWMWRQEWDYEQLKKFSPHAGQPGTGVGVQSNTE

SEQ ID NO: 160651 - protein, 354 aa, unidentified
MTETSPCEIIVGVDTHKHTHAAVAINTLGARLGAMTIPVSTTGYRDLEAWARSFGPIRAFGIEGTGSYGAGLSRSLQANGHPVFEVNHRQLRHQHGKSDPLDAESAARAVLGGQATALPKTSTSTVEMIRHLKVARDTAVKGRTQAMQTVKAIIVTAPAGLREQLDGITGKMALIRRLAALRSGKLTSTTASAKASLRAIARRWLALDTEIKAHDRHLDDLTQECAPAMLEAHGIAAGTAAEMLLLVGDNPDRIRSEAAFAKLCGACPIPASSGKTTRHRLNRGGNRQANAALYRVVIVRMRGHQPTLDYVRRRTAEGKGKMEIIRCLKRFMAREIFGCLCREPKLPLVAQSDP

SEQ ID NO: 160652 - protein, 353 aa, unidentified
MDKYIGLDMDCKKTVGYTIVPGQSESSATFGPDIESIRRYFRQERKGGYQLHAAFEISGQAGFLYDALLDEVDSLHVANPTKMTWIYRTAKKNDRIDARKMAVLLSINELPEVYMPSREVRQWRQTILHRQKVVQKVGQVKNRLRAALKSEGYGKPAHRGSWWKHANRVWMEQLCDDCVDIGSLWRLQVQDLLDELSLLETQRDRITKYLDGYLDKQSAAKLLMSIPGVGPRTAEAVLAYTDGIERFSNYKKYCAYFGVTPKLDESGSFRRLGHISKQGPAVVRWLLCESGWKVVRHCPGLRAFYERVMAGQQSRKKIAIIALTRKLLCIMRAMLMTGELFNEKLVIEVLKAA

SEQ ID NO: 160653 - protein, 351 aa, unidentified
MERYIGLDVHAASTTAAVISEKGKRLGSQVVETNGRALITCLQQIPGRRHVCLEEGTQATWLYELLKPHVEEIVVLAVTESRGQKNDEIDAFGLAERLRIGAGTKRVYKERGGFRELGELSRVHWKVVQDHARVQNRVKALFRGRGVPTTGRPLYVKARRANWLRKLPGSARGAAELLYAEYDALQEVRAKAEKALIQEAHRHPVTRLLETCPGLGPIRVANLVSVVVSPGRFRTKRQLWNYSGLGVVTRSSSDWVQTSKSTWVRAQVAKTRGLNLAHNHRLKDIFKGAATTTIAQRRTNPLRQQYERLLAAGTKPNLAKLTIARKIAATALAMWKHEEAYDPNKYQTAAE

SEQ ID NO: 160654 - protein, 347 aa, unidentified
MLIIGCDFHTRFQQIAMLDRETGEVTERRLEHENGEARKFYEELPKPVLVGIESTGFTIWFDEMLRELGHELAVGEAAKIRRMEARKQKHDRRDAGHILNLLVRGDFPRIWLPKVEERDVRVWLEHRHQLVQMRTRAKNGLQAIALNYGMCRREKLWTEAGRAKLEKLPLLAGRARRRADLLKLLEQLDQWIAELEARLEEEAKRRPEVQRLTTHPGVGTLTALGTVLVLGPVERFPDARHVSSYVGLIPEEESSGGRQRFGKLSKQGNRLLRFLLVEAAQTAGRFDPGLQRCYRRLAFRKGAAHAKVAVARKLAIRLYIMLRDRIDYVEFVRRGSHAGMLEQVALV

SEQ ID NO: 160655 - protein, 378 aa, unidentified
MKTLRFVGLDVHAETIAVAVAENRDEVRFLGVIPNRPEPVRRLFKKLGEPGGLRVCYEAGPTGYVLYWQLTQLGVKCEVVAPTLVPVKAGDRVKTDRRDAQKLARCYRAGELTPVWVPDEAHEALRDLVRAREAAKKDQLRARHRLSKFLLRHGYHAPEKVKAWGQRYLAWIRVQVHFAQPAQEATLLDYLNEVDHAAARIGRLEQSIDAALEQVPQKMRAVIQALQALRGVAKLSAVSIVAEVGELCRFERARQLMGYTGVGSSEHSSGQRIRRYGITKTGNAHLRRIVIEASWSYRHRPSRSDVLKQRQRGLSAPITEIAWKAQHRLHDRYCKLLARGKTKQHAVVAVARELLGFIWAIGVQVERPSCSQLAAVRA

SEQ ID NO: 160656 - protein, 386 aa, unidentified
MQKPNDLNQSRIVLKQDSTLIAVIEMSLSSWLVAGIVPGVERQPLKKLAVDESALLKLLHRWREEAEKAGRRIKRIVVAFEAGRDGFWLARWLKACGIEAYVIHASSIAVSREHRRAKTDRLDTELLKRAVLGWLRGERDHCKMVAIPTIKDEDAKRPNRERDSLVGERSRIVNRMKAALVRLGIRGFNPKLKRAAERLDGLRTPEGEPIPPNTMAELRRDMERRRLVNNQIRQIEEARLERLEQTPSDGPHAMVRLLARVIGVGIETADMLVHEVLTRNMRDRRAVARYGGLTGSPDESGRRRREKGLARSGNARVRRGMIQLAWRFLLHQKNSALAQWYRARTENARGTRKPMIVALARKLLIALWRLVRQGVVPDGIVLRLAQ

SEQ ID NO: 160657 - protein, 391 aa, unidentified
MNRIIKIGMDVHSTNYTLCAMEPTIGAEDRIFGEIQVAPDYKEVLCFIESLKMKLGFFDDYSIECGYEAGCLGYTLYHQLTGAGIKCVILAPSTMLTQQGQRIKTDRRDARLIAQCLCYGGYHPVYIPTGEDDAVKEYVRMRDDHKLALKKLKQQINAFVLRHGHQYAGTKWTIKHLIWLSKLELHPMYRETLNEYMTSYEEQEAKIERYDKRIEEIAAEARYKDKAEKLGCFLGIRTHTALSLIVETGDFKRFAKGNTYAAFLGLAPGEHSSSTSIKRLGISKAGNTHLRCLLIEAAKGICKGAIGHKSKELRSRQNGQPAEVIAYADKANTRLRRKYYKMIRHGKKKNVSVAAVARELACFIWGMMTGNIGIISGTPTSALAVSICKEL

SEQ ID NO: 160658 - protein, 377 aa, unidentified
MHSENIAAYVGLDVHKETLAVAIAAPERLGEVRYYGTINNEAQAVRRLFQKLQGLYGNILSCYEAGPCGFGLYHQLTAMNIKCQVIAPSRIPKSPIDRIKNDHRDAISLARLLRAGELTPVWIPDLTHEAMRDLIRARAAAKRDSRVARQRILSMLLRTDKHYAGKHWTGKHRTWLANQSFSQPSQQIAFQHYCQSLEQIEDRILQLDQEISRLLPEWSLCNLVCQLQALKGVGQLIAITLVAELGDFSRFSNPKQLMAFLGLVPGEYSSGNSIRPRGITKVGNSELRRLLYEAAWSYRTPAKVGAWLIYYRPDSVTQYSKDIAWKAQQRLCSRYRSLTAKGKKSQVAITAVARELTGFMWDIALAAQSSFSQQKQN

SEQ ID NO: 160659 - protein, 409 aa, unidentified
MEVLYSKCAGLDVHKDSVVACIRIQEGPQASYRTETFGTTTQALLKLSEWLIEYAVTHVAMEATGVYWKPVWHILDGEFELVLANAMHIKNVPGRKTDVKDAHWIADLLAHGLIRSSFVPPTTIQDMRLLMRTRKQLVRERGQHVQRIQKTLEDANIKIASVVSDITGASGQAILRAIVKGQTDPDQLVAETTGRLKASAATLREALRGRIRQPHRILLKLHLDQIENIEKSIADVDREVGALLEPFRAKSKRLTTIPGVSDVVAQVIISEIGTDMSRFPTAAHLISWAGLCPRHDESAGRRRSNRLRAGGHWLKTTLVQASWAAARSKSAGYLPAQFRRIQSRRGPRKAIVAVAASILTAAYYILRDDVDYRDLGAGHFDSSHREKVAARLVKRLTALGVNVQIVAAI

SEQ ID NO: 160660 - protein, 372 aa, unidentified
MSKYSTIVGLDLGDRYSHFCVMDPDGEIVEQGRLRTTRAALLRKFGAMERARVAMEVCTYSPWVSRQLKGYGHEVLVANPRKVALIYGSMRKRDEIDAESLARLARLDPQLLSPIEHRGLHAQQDMAMVRAREVLVKARTQLVNSVRSVMKSMGYRAVQCSTDCFHRKVLLQLPAVLTDALAGVVTMIGELSAQIAVYDKMLAQLAQERYPETVLLQQVTAVGPLTALAYVLTVEDPYRFAKSRSVGAYLGLVPKQSQSGQSDPQLRISKTGSRLVRRLLVGSAHYIMGPFGPDTELRRWGLAMAERGGKNAKKRAVVAVARKLAVLLHKLWITGQVYEPLGYSDKKAPLAVAACDETNQVPFSATTAGGSD

SEQ ID NO: 160661 - protein, 343 aa, unidentified
MSEQYVGRQIVGMDLHRRRSVLVRMTETGERLETVRISNDPEYLREVMARAGEAPEVVLEATYGWYWAADALAELGATVHLAHPLGVKMFGLRRVKNDERDAADLADLLRMGRLPEAWIAPPATRELRGWVRHRAKLVALRSCVKNQIHAVLAAAGVQVPMSDLFGPSGRKLLAAAPLVVESRSRVESLLRIITALEFEIDLYTRLVAGRLREDPGYRAIQAIPGIGPVLAAVFVAEIGDITRFHRAAELASWAGLTPKHHESDATVHRGPITKQGDRLVRWAAVEAVQRIPAHTRLGQVRDRVGERRGRNIGVVAAARELITLVFYGLRDHHLRCLPTRPAA

SEQ ID NO: 160662 - protein, 407 aa, unidentified
MLNAVGIDVSKGRSTVAVLQPGGVVVRKPFDVYHKQSELQELSSFIKSLDGETKVVMECTGSYHRPIVEVLHRAGIFVAAVNPHLIKNFGNNTIRKVKTDPADSKKIARYTLDNWDRLQEYSGMDAKREQLKTMNAQFDFFMKQKTAVKTNLISLLDNTYPGVNDLFDSPVRSDGSEKWVDFAYSFWHVDCVRKLTLNAFRDRYMAFCKRHGYQYSESKADEIYNASKELVAVFPKEEGYKQLIQFSIKQLDLESEHVEKLRADMNELASQLPEYSVVMSMYGVGPTFGPQLIAEIGDIMRFSHREALTAFAGVDPGKDDSGQHNSKSVSASKCGPARLRKTLFQIMSTLIQKMPPDDPVYKFLDKKRSEGKPYYVYMTAGANKFLRIYYGKVKEYMRSLETDQSQS

SEQ ID NO: 160663 - protein, 420 aa, unidentified
MVYLERGYNLKELPWSKTVSNSFLFKEACMILVGVDVAKDKHDCYIMTSEGEVLFKSFTIANNMEGFNQLYEKILSVIDNFDNVKIGLEATGHYSYNILGYLLDKGLTPYVINPLHSNLYRKSLSLRKTKTDKVDSRIIASMLMSDVSLKPYSNTLYHNEELKSLTRYRFTKVQERAKLKISISRLVTILFPELEKLVPTLQMNSIYALLYEFPSAHAISKAHLTRLTNLLNTTSKGHYIKDKAVLIREAAKNSIGSNMPAKSLELKHTIKLIKELTSEINEIEEEIKIIMNKINSPILTIPGIGLSTGAQILAEIGDFKNFSSPDKLLAFAGLSPSTYQSGNMYSSNAKMEKRGSKYLRFALFNAAIYVSYWEPTFSQYLKKKRVEGKHYYVAISHVVKKLVRLIFHLEKTNERYSTVV

SEQ ID NO: 160664 - protein, 352 aa, unidentified
MMIIGCDFHPRFQQISFLWEETGECGQRRLMHTAEAVEYYRSLCGTRVRIGIESTGSYGWFRRLLSELGHELVVGDATQIRASNPRRQKTDKRDAEHILRLLMEDRFPAIWQPPAENEQLRQLLLHRSRLVRLRTRVTNQLDGMAKNEGLLVPGGWSEKRRKAIEAFPLPGWYGERRKDLLALLDRVKERIAPLNKAVGQAAANNREACLLMTHPGVGPVVSLAYVLTIGNWQRFPRGKQVGSYLGLIPSEDSSSDKRRLGHISKQGNTLLRWLLVEAATTAQRCDPSWHRQYLRLSMSKHHGVAKVAIAHKLAVRLYWMLRSGEDYSQVMERGSHARQSECPVGRSKRPIE

SEQ ID NO: 160665 - protein, 412 aa, unidentified
MTVTNKFAAHVGLDWADKKHDVCVQFKNGERVFHVIEHTAEALDAWLTELHQKVKGRIAIALELKKGPVVYALQKYPFITVFPVHALSLARYRQAFSPSGAKDDPQDAELALELMLRYPQKIKAIEPDNADIRLLQQLVEQRRQLVEDKRRFVNRIINTLKQYYPQPLEWFSHRGSLLLCELIIRWPSLQQLKCARRDTIRNFLNAKGGRAMALTEQRVVSIDNAIPLTADPSVIEANALMATALATQIKVVSEIIKTYDERIETLFDTLPDAGLFKSLPGMGPCMGPRMLAALGDNRDRFNSAEEIQNYAGIAPVTERSGQKSWVHWRWQCARFVRQTFVEWAAKTVNSSYWARLYYQGLREKGKSHQSAIRALAFKWIRIIYRCWKTRTQYDEAKYLLALEARHSPLLKP

SEQ ID NO: 160666 - protein, 398 aa, unidentified
MQRIGPDTWVGVDAGKEFHWARALDASGEVLLSRKVQNDEGSLLELVEEVLSLAAGGRVVWAIDQPGGGAALLLALLWEREQRVLYVPGLVVDRARDAYRGESKTDERDAHVIADQARMRADFSELAPQEGTLAELRLLLARRRDLVVDQTRAVTRLREALLALFPALERVLDLNTKGALVLLTRYQSPAKIRRTGHKRLATHLKGRGVKGADELARKALAAAKTQSVELPGQEVASRIVAEIAGEVLTLKERLPALDKEVASRFFDRPEAQILASLPGIGPVLGAEFLVSVGDLSAFESADQLAAYAGLVPAARDSGKRVGNNRRMRGGNKVLKRVFFLSAFSSLRSSPHSRAFYDRKREEGKRHTQALIALARRRVNVLWAMLRDDKTFESPPLRA

SEQ ID NO: 160667 - protein, 399 aa, unidentified
MDPVIGLDIAKGKSQVQAFLQKKDPYKKSFVFEHNVLGLHDFHRFWLEVEEITGRPPVVVFESTGHYHEPVLQFLEEHQIVYYLVNPVLSHEAKKMSLRKVKTDAIDAFRLGELYYLYDDLQPFKKKAVKIMNLRNLTRQHDALTGTYVQIKLQFQTVLDQVFPEYKTVFGSLYSPTSLRTLLHYQTPQGVREETKEKIAEVILQQGVKRSYGWALDKAHQLKEAAGRDPFKRNLYSSHVVSLTMFIQLLLQYQRHLSKLLKEIDALAEEFDEYKIIRSIPGIGGKIAATILSEIGDIDQFNHPKKLVAYAGIDPSVHESGQFKATINRITKRGSSSLRKSLYNAVQCGITKNRNPKLRAYYDKKREEGKPHKVAIIACANKLIHWIYAILKSKKAYVI

SEQ ID NO: 160668 - protein, 369 aa, unidentified
MSDYIWVGLDVHVESITAAVLEGESQEAEVIKLSGDLHKVRRLMRRLSKKGPVRCCYEASGAGFVLHRRLKKDGFHCEVIAPSLIPRKPGDRRKCDRLDAVMLARLYRSGHLTPVHVPDEWQEAVRQLIRLRCSYQWQSKATKNRIYGVLKTHGYIYREGKKLWTRKHRIWLAKLRKELEGPLATVIAAELEHLEYLEMQRGALDDEIDRYAQQPPYRGSVEALCCLRGVKTLTAMTLLSEIGDIQRFLSPRALMAYSGLVPTERSSGEKERKGPITKAGNSHARRILVEAAWNNRHRAGADLIVNRRRQGQPAEVLAIAIKAQHRLSKRFHHLDQKKHRNKVVVAVAREFCGFIWAMMKAAPLCRDAA

SEQ ID NO: 160669 - protein, 343 aa, unidentified
MQTVTTIGLDIAKSVFQIHGVDAAGNVIVRRQLKRRYVLPFFQKLPPCLIGIEACASSHHWSRELKALGHTVRLMPPAYVKPYVKRQKNDAADAEAICEAVTRANMRFVATKTPEQQSCLMLHRTRHLFIRQQTAVINAIRAHLAEFGIVAPVGRNGVEQLLDVVADASDRRLPEVARACLLALGAQLRTLKAQILNFDQQIMAWHRSNEASKRLDDIPGVGPALATALVASVADPKAFRSGRDFSAWIGLVPKQHSSGGKDKLGSISKQGDRYLRSLFTAGALAVIRYAKIHGTRQRPWLTALLARRPTKVAAIALANKIARMAWAMMARGDRYKEPVALAA

SEQ ID NO: 160670 - protein, 338 aa, unidentified
MTVVTVGIDLAKNVFAVHGVNAAGKAVLVKPLVRRAKLLELIATLPACLIGIEACTGAHYWAREFQKMGHTVRIMAPQLVSPYRMSGRHGKNDAADAAAICEAVARPNMRFVPIKSVEQQGQLFVHSAHQGYVSERTALINRIRGLLSELGIVLPQAFKAFLSGVAQVLEDLPGYCNQVIGDLLNELYHIEEKIKNSEKLIQQLARDNSAAQLLMQFRGIGPMTATAIVASIGNGHDFKNGRQFSAWLGLTPRQQSSGGKARLGRITKAGDSYLRTLLVLGARSVLLGAAKNDDPVSRWALQLKERRGYGRALVAIAAKNARMCWAMLHLRDEFRFPA

SEQ ID NO: 160671 - protein, 335 aa, unidentified
MNQARVHIGVDVGKECLDICYPDGSREHIGNTKRSRAKLIRKARAASAIVSLEATGPYEENLADECLAAGVPAVRLDAWKTRKYAESQGMLEKTDAIDCEMIRDFAASLKPEQLRFVRPVSDGYRRLKRATSVRRNLIKAKTPVVNQLENILDREVRASVSRVIDALERQIEKMDALCAEAIGSDDKMNALAVRFEQVVGVGPVLISTMLSSCPDIGSFTSKGIAKMAGVAPIENKSRTIRKRSRPRRGRRELRSALYMAAVSACHSNHLLEPVYKRFTDRGTPRRVALIALARHIAILMNYIAKYPDFNPAVDPKKSALPALPRRKPGRPRKNP

SEQ ID NO: 160672 - protein, 325 aa, unidentified
MQAVTTIGLDIAKSVFQVHGVDAEGNVIIRRKLKRRYIVAFFQKLPPCLVGIEACASSHHWSRELHALGHTVRLMPPAYVKPYVKRHKNDAADAEAICEAVTRANMRFVETKTPEQQSCLMLHRTRHLFIRQQTAVINAIRAHLAEFGIVAPVGRNGVARACLVALGAHLRVLKTQILEFDRLIMAWHRSNETSKRLDEIPGVGPALATALVASVGDPRAFRSGRDFSAWIGLVPRQNSSGGKEKLGSISKRGDRYLRSLFTAGALAVIRYAKLHGTKHRPWLTALLARRPTKVAAIALANKIARMAWAMMAKGERYKEPVALAR

SEQ ID NO: 160673 - protein, 340 aa, unidentified
MKLKTLAIDLAKNTFYLVGFDLDNQPVWRKKQSRRQLEIFIAKQEPHLIVMEACASAHHWARRFSQLGHQVKLLPPQHVKAYLRGQKNDYNDAQAIGEASLHGVTRSVPVKTVEQQDKQAFHRIRRQLMGEQTRIINQLRGLLGEYGIIIDTGIHQANKAIPLILEDAENGLTPKLRELVCRQYQRYLVLREELAWYEQQLEQVAKTDPDVKRLQDVPGFGPVNANVLCSWLGDGTQFSRARDASAALGVVPRQHTTGGHDRLYGITKRGDSYVRSMVVHGARAVVSRAKGKTDALSRWINQLVARRGFNKAAIALTNKMIRIAWVLVTRGERYKPSLSM

SEQ ID NO: 160674 - protein, 454 aa, unidentified
MAKKREKRECRAVVLEPDAAGIDIGAEEIYVAVPPDRDEESVRMFSSFTCDLHALADWLVQCRIRTVAMESTGVYWIPLFQILEARGLEVYLVNARYLKSVPGRKSDVSDCQWIQYLHSVGLLRASFRPSMDICAVRSLWRHRGSLLQMASEHILHMQKSLSQMNLQIHHVLSDITGASGQAILDAILAGERNPVQLAQLCNCRVKSPREKVAKALEGDYRPEHVFTLKQSLDGYRYYQRLIAELDREIQHLMQTLPSAVETVQEMPRRTKHSAFQRQGNDPGFDLRGQLYRIAGVDLTDIPGVSAVTAQVILTEVGPNLRRFRNASAFASWLGLCPENRVSGGKVLSCKTRKVKSRAALALRLGANSLCRAKGYFGEFFRRMRAKLGTAQAITATAHKIARVLYHVLLTKEPYAETVFHQSDEHARRRAEMRLRKHAALLGFQIVPTPARSTT

SEQ ID NO: 160675 - protein, 374 aa, unidentified
MANIIEAFVAFDTSKLRNAVAIAEAGRAGEVRFLGEIENTEAAVAKLVRKLAAKYGRLTFCYEAGPTGYGLYRQIKSLGHECMVVAPSLILKKPGERVKTNRRDAVNLVKQLRGGDLTAVWVPDPRHEAMRDLTRAREVAVEDLRRKRQQVSAFLLRQGLHYPGERAWTKAHRDWLASQKLEYAEHRIAFEEMLLAMRQAQERIERLEQAIRMAVPDWSLAEVVTALMALRGIDFISATAFLAEIGDLSRFRTPRELMAYLGLVPSEASTGDTVKRGPITKAGNRRARRVLVECSWSYQHPPRVGKEKQERVAAAPRAVREIAWKAQCRLSARYRALTRKGKLKTVAVTAVARELSAFIWAINRQIANPDAAAR

SEQ ID NO: 160676 - protein, 416 aa, unidentified
MSGKREIACGVDVHNSFIVATILSSDGMKLQDRFDTNLEDLLKFKNWLKENNCHKVAVESTGNYWIPIYNVLEGSVNFILANAYQIKHIPGRKTDMLDSEWIAEICLKNLISPSRIFFRDHRELRSLTRSRENLVKLRTKLKNWITHELEAACIKLSTVLSDIFGKSGRHIIDGLTNGIDLEKILETIPSKKVRANKEEIRGIIHANLSSSQIFLLRSHLDTVDSISNQIAEIDGKISDLISLRKDDLQIALSMPGMGIVSASTILAEIGDFRDFSSPNKLAAYCGLVPSVYQSASKLINGHITKHGSPHIRGMITEVAHAIVRSKRNSKLKKFFLRIKTRRGTKIAVVALARKVLCILYHLLINQELYQDDLIDKPKRIRPLYVLSTKSLSLDEMIQTVIKAGYEVRRNEYMGSG

SEQ ID NO: 160677 - protein, 339 aa, unidentified
MTEEKGFIWAGIDVSKRTFFAAIDIENEAEKLPIAKLPAKEFKRSKDGVASFIKWADELLEDQEFAVVMEATGSYSLELISLLKNQRTDLRISMQNPRMVSDFIRSLNQPHKTDKTDAQAIARFGTERKPEEVSLPEPHWAELRELERLRSAMVRVRVELENRAESLFTAFARRTNQRTIGSLNMEISELEREIKHLVIEHEDIHSEVRILTSMPGVSFVSACAILAELGSLKQYDQKQISAVSGLAPRRMSSGSSLNKSFMGRNGSKRLRQILYLDSIYAVAKVPLLNSMYDRLIAKGKSKMTARCACMRKLLLILRAMVVNNKPYDENYFKTFPKSA

SEQ ID NO: 160678 - protein, 340 aa, unidentified
MEKRYIGIDLHRNRFTCCIQLENERTYLTEWELADLGKFVKKLRPTDEVAVEITGNTRLFHDAVAGHVARIVVVNTSQFRVIRQSVKKTDPHDARTLALYLSKDMLPEVRMKDKQRGQLASLTQTRDTLVKLRTALKNKINNILSARGLNLPKEALSSEKKLTEVLELPFDEIVQIELRVLVGQIRSLNQSIAELEKTIGEEGSKLDGHRNLASIKGIGKTTGAILLSVIGDVKDFADEGHLASYFGIVPRVSNSNETEHSGRIHKRGTKLGRTALVQSSLIAARYSPYLKRFYEQVKARRGAGKAIIALARKFLGVICRTLKNGWVFEDFPNFVLAEAS

SEQ ID NO: 160679 - protein, 353 aa, unidentified
MTSTKYIGMDVHKESISIAVRSDSGKLVMECVIETRANVILGFIHGLHGKLHVTFEEGTWATWLYDLLKPHVTRLVVCDPRKNNRQGNKNDQIDARELSDRLYMNKLSSVYHGGAGVRTLKELARSYLTISKDLARVMSRVKAIYRSWGIPCAGKQVYAPRHRAEWLAKITEVGVLRRAEFYFQQLDALRSLRQAVRRDLLAESKKHKATKLLRQIPSIGPIRAALLIALIQTPNRFRTKRPLWKYSGFGIETHSSADYRSVKGELQKSRKQVSVRGLNRDCNHDLKNLFKSAATIASVKPGPFQEFYAALLAKGMRPEMARLTLARKIATIVLIVWKKGVSFDAQYLKPQTA

SEQ ID NO: 160680 - protein, 413 aa, unidentified
MDRIVERCCGLDVHKSSVTACVRITEEGGRVRQITEEFAATTQGLLLLRDWLASFEVELVGMEATGVYWKPIYYMLEDNFELWLLNAEHLKHVPGRKTDLKDAEWICQLVEHGLVRPSFVPPKEIRELRNLTRYRKVQIEERTREVQRLEKVLQEAGIKLSSVATRVLGVSGRAMLDALIEGTTDPEILADLARGRLRSKIPALKEALEGSFSAHHALMASRILAHIDYLDETIAELSSEIERVLDPFSEEIALLDTIPGVNRKVAEMIIAEIGVDMSRFPTHYHLASWAGMCPGNDESAGKRRSGKTRKGSKWLRSALIGAAHAAGHAKESYLAARYARLKGRRGPKKAAVAVGHSILVIAYHILERGAPYHELGEGYLHQQRSEEAYSKRLVRQLEKLGYRVVLYSLPQPT

SEQ ID NO: 160681 - protein, 404 aa, unidentified
MIFVGIDWAEAHHDVCVLDEQGRVLAKGRVTDDVEGLGRLHAIVAEHAEDPGEVVVGIEIDGGLLVGALIAAGYRVYAINPFAASRYRDRHATSGAKSDPGDAKVLADLVRTDRQNHRQVAGDSDLAEAIKVLARAHQSLVWARQRQVNQLRNTLREFYPGALQALRGDLASHEACSILGMAPTPEWGRRLTRARIRRSLAASGRTRNLDRRTEQIYRALHVPQLEAPPVVAEAYGQVVGSLVLVIDGLTHQIGQQERQLAERFEGHPDAEILRSLPGLGLILGARVLAEFGDDPTRYADARARRCYAGSAPITRASGTRLVVLARVARNRRLADACYLWAFSALGASPGARRYYDARRARGATHHQALRALSNRLVGILHGCLTHRCRYREDVAWPGSLEAVA

SEQ ID NO: 160682 - protein, 412 aa, unidentified
MEPIYTSCCGLDVHKKSIQACVRCIGKDGKIQQEIRPFGTMTQDILALADWLSREEVTHVAMESTGVYWKPIYNILEGRFNILLVNARHIKNVPGRKTDVKDCQWIAHLLQSGLLKGSFIPDRVQRDFRDLTRHRAKLVDQRASVVNRVHKVLEDANIKLGAVATDIMGKSGKDMIRALIRGENDSVEIAELARRQLRGKIPQLRLALEGHVTDHHRFMLDKLMDQLDYLDRQIDEFSQRIEEVSRPFTEAIEEVARLPGFEKRAAENTIAEIGCNMDQFPSDNHLSSWAGICPGSNESAGKRKSGKTTKGSKWLRATLAQAAWAASRKKNSYFHAQYGRLAGRRGKKRAVIAVAHSLLTVIYYVLRDHVEYKDLGQDYFDKLNSKRLVPYLVNRLKNMGYEVNLVPLESAA

SEQ ID NO: 160683 - protein, 408 aa, unidentified
MNAVGIDVSKGKSMVAALRPMGEVALLPQEFLHTEVGLEQMAYAIVALGEDTRVIMEATGRYHEPIAAALHEYGIYVCVLNPLFIKQSGGGSIRKVKTDKADAMKIAKYGLDNWVELREYTPMDTVRQQLKLCSRQYNLYMKTVVSLQNNLISLTDKTFPGVNELFSSPERADGHQKWVDFVMTFWHCDCICRVSEKAFTDRYQKWCKRKGYHFSTEKALDLYAGSCGHFTTLPKNDNTKLLITTAAQQLLAGKTTLAALRTEMTRLAKQLPEYDTVRAMYGVGETTAAQLMAEIGDVRRFPRRSSIVGFAGVDPAVDQSGKHSAKSVPTTKRGSPHLRKTLYQIVCTYLKRSPADEPVYQFLDKNRAEGKPYFVYMTAAQNKFLRIYYARVKECLEAFDERQDTVQN

SEQ ID NO: 160684 - protein, 413 aa, unidentified
MRPRDQKGVQVIFVGIDWAERHHDVCVLDEAGTVLAKGRVPDGLDGVARLHAMVATDAEEPGEVVVGIETDRGLMVGALAATGYRVYAVNPFSVSRYRERHTSSGTKSDPRDAKVLADLVRTDRHNHREVAGDSELAEAVKVLARAHQGLIWSRQRQVNALRNTLREFHPGALDAFGDLGSPDALAVLAIAPTPSGGRALSFAKIRRALQAGGRTRNLDRRATEVFEALRRPQLEAPPMVAVAYGESVRSMVGVIRELVTQTERLEKELAERFEGHPDAEILRSLPGLGLILGARVLAEFGDDPTRYRDATARRCYAGTAPRTRASGTRLVVLARVARNRRLADACYNWAFSALNSSQGARRHYDLRRARGNTHHQALRSVANRLVGILHGCVQHRSTYRENIAWPSLADVAA

SEQ ID NO: 160685 - protein, 413 aa, unidentified
MKVFCGIDWAEDHHDIALVDADGSLLARRRISDDAAGLGQLLELLADHGDTGDDQVPVAIETPRGLLTACLRATGRKVYPINPMAVARYRDRHSAAGRKSDRGDAVVLANVLRTDAHAHRPLPADTELAQAIAVLARAQQDAVWARTGAHNKLRSHLREYYPGLLAAFAEVRGGIMRPEARVILAAAPDPAAAAQLTLAQLRALLREAGRSRGIDAEAARLREAFRAPQMRQLPLVEQAMGRQTLALLGQLNAACHAAAGLEQAVIESFNQHPDAGIITSFPGLGPLTGARVLAETGDDRSRFADAKGLKAYAGAAPVTRASGKTTAVLHRRVKNQRLAAAGYLWAFSAITASPGARNHYDKRRASGDRHAAAQRNLFGRLLGCMHHCLATGQYYDENSAFPPPISTDPAIAA

SEQ ID NO: 160686 - protein, 450 aa, unidentified
MLLVGIDWADDHHDICLLAGSTDRADESRVPIPERFQIAHTADGFNELSTRLRKRESVPGQILIAIETPHGLLVNELVRQGYVVYAIAPKSVSRYKDRHQSSSAKDDKRDALALAHLLRTDRERFRPLALLPDEYRLLDALSKDLRQLIEDRTRLLNRLKAALKDYYPQALDLFSELDGAIGLAFLKAYPEPASLSSLSEKQWKGFCTKQHYTCPKQIPHLYRKLVKAAPQADTVAVQSGKRHMLALREQLALLRKQIDEYERRIQTLFGSMTAHQNLPSLPGVGPRLAPELAAILGPSPINKPAAPVETKTTDEIAQEPDGQAKQAEQNVQPFAARFHSGNDLARLGGCSPVTRQSGKYRNVLYRRACDRGLRRTLRDWTQACIRRSAWASAYYDHARSKGRRHETTLRNLACKLLDILYKLWLTGEEYDEQRHIQQLKTHNVEWAMNL

SEQ ID NO: 160687 - protein, 351 aa, unidentified
MTVYVGMDVHRKRSQIAVVDAAGEEQRNRNVPNDPVKLVPILGVLPPGTPVAFEAAYGWGWLVELLEELELEPHLVHPSRCKAIAAARLKNDKVDARTLAQLLRADLLPEAWIAPPEIRDLRALLRHRASLVRLATGLKNRVHAVLADRGITPPSSLWATPGRAWLQALELPPTPRAIIEDCCGVLDALATPIARLEGEIGALAKPDPRVQALMALPGVGKLTAMTLLAEIGDIGRFPTARKLCAWAGLTPQVRNSDRKVRHGHITKQGSPWVRWILQEAAQTAKRSPLFADTYGQLARRRGRNIATVAIARRLLARSFHILTQLEAAPAPEKARPGALASLHEPATRPLS

SEQ ID NO: 160688 - protein, 421 aa, unidentified
MDKERRWFVGIDWGSQEHVGSLCDDTGKKIGQRKFAHGGTGLTDMIIWLLKASGGKPGEIHVAIETPHGPIVEALLERDINVYSINPKQLDRFRDRFTVAGAKDDSRDADVLADSLRTDMRAFRKLSIAEPIIVELREWSRIDEELKVEHVRLANRLQHQLWRYYPQMLELADDVGANWFLDLFEAVPTPEKAANVREKTIARILKDHRIRRFGAAHVLSELRKPALAVAPGTIEAATARIRGLIERIRLINGQLADAGRQLDRLCKMLSEPVAEQDGETAPGQKNEQRDAAILDSLPGVARTVLAALLAEATDTLRRRDYHALRALCGSAPVTRRSGKSCIVVRRYACNRRLRNATYHWAQNAIQHDATSRAKYDALRAKGHGHARALRSVIDRLLSVACAMLNSGTLFNPEFASKQTTG

SEQ ID NO: 160689 - protein, 371 aa, unidentified
MDSSSPIGINVPNWSLHHQLTVKPEESAMKISRVGVDLAKNVFQLHGVDRNGETVLKRRLSRDKWISVLVSSAEPGCEIGMEACGGAHHWARLLMTKGFRVKLIPPQFVTPYVKSNKNDAKDAEAICEAMSRPTMHFVKAKTVEQQDIQATHRIRSELMCHRTAKANQIRGLVTEYGLVAPLQMTSLRVAIPRWLEDAGNGLTDRFRALLHGLWDDLLTLDQRIETLDGDIESIAKSDPVAQRLQQLRGVGPLVATALIATVGNGDQLTKGRQMAASLGLTPRQHSSGGKDRLLGISKRGDAYLRTILIHGARSVVATARHKEDRLSRWVTGLAERRHPNVAAVALANKTVRMAWAMMNRDADYDPECAVS

SEQ ID NO: 160690 - protein, 390 aa, unidentified
MRSTHDVVIGVDPHKASWTAAVMNAEQHVLGKIRVPTSQDGYQQLRTFTAAWPQAAWAVEGAIGLGAPLTARLLDSGATVIDVPAKLSARVRMLDRGHSRKTDEADAVSTAAAAMGNGSLRPVVLDPAAQAMRLLSDRRDDLIAARTLVINRLHAMLVHLIPGGAPTSLSAPVAAQLLGSVRPRDQVNRTRRALAKDLLVDLRRLDSQITAMDKDITQAVRESGSTLTALFGLGPVLAARILGRVGDVDRFPTEAHFASYCGAAPIEASSGDTVRHRLSRAGDRTLNHALHMMAITQVRSHPDGRAYYQRKRAAGKSHNEAMRCLKRRLVSVIYRTMAADAQRRKVDPGGQAGATLTSSAAGSTLTASSSKKSLPEPTRIQTKTGAARGA

SEQ ID NO: 160691 - protein, 366 aa, unidentified
MEKSSTAFVGMDVHKESIDVAIADANEARHYGRIGGDAASVDKLTRRLRSAHRKVVFVYEAGPCGFWIHRRLKAQGLECMVVSPSMTPRNAADRVKTDRRDAMKLARLARAGELQPIYVPDALDEAMRDLVRAREDAVCMQRQARQRLQALLLRNEIRYVGRSSWTRAHRRWLSEIKLPNAAQQIAFEEYVLACEECERRVERFEQAILAQLEHWRWRPVVKELQALRGISSLHAVRIVAELGDFRRFETPRKLMGYLGMIPSEDSSGARRRQGSITKAGNSSARRALIEAAQAYAHPARVSWVIARRQVNASKRACDIAWKAQLRLCARFGRLAARRLPRNKVIVAVARELAGFVWAIAREVQPS

SEQ ID NO: 160692 - protein, 377 aa, unidentified
MSNCTRYLGLDVHAETITAAIAEGRGRIRSLGKFPNRPEAVRKLMDKLGGGKNLKVCYEAGPTGYALYWQLTRLGVECEVIAPSLIPTKSGDKVKTDRRDAEKLARSYQSGDLTAVWVPTPEHEALRDLVRQRAAAKSDESRAKHRLITLLLRHAAREPNGSRAWTHPWWRWVQALKFDHEARQVALADCIAEVLHMGERLGRLDQAIDRLVESAPPHMRAVIEALQALRGVAKLTAVTVVTEVGTFQRFHRPTQMMGYTGLVPCEHSSGARQAQGGITHTGNAHLRSVLVEAAWHARHRPWLNRRLKQLLPTLPAGVAEIAWKAQERLHRKFGKMIFSRKHTGVVAAAVARELVGFMWAIGTLVEAKHSETMARAA

SEQ ID NO: 160693 - protein, 346 aa, unidentified
MRYIGLDVHQRQTRVAMLDAETGEVSSRSVPTVELRTHLATVADELRIVLEAGGNSWFVARELLSCGWEVVVVHPAEARRRLGPRGRAKTDRCDAEALVQAFARGHLDDTVIWLPGPWIADLRELTRTREQLVRQGTKLRVLIRQALVRWGETCPYDNLLGKGAQGWLDGLVLRLRPAQQLALASLRRALATQAAEIAVLSAEIEAYVRDHPDCQRLCTLIGVGVQSAAVIVAEIGDIGRFATAAQLRSYSGLVPQVKQSGERQSTGPLTKAGNPHLRRTMVLVAQHFARSQQTRDLRVRRWYARLVYKHGPNPAKVALARRLLDLIFAMLRDATTFDAERHALAA

SEQ ID NO: 160694 - protein, 334 aa, unidentified
MDRHESPAPAAWVGIDVSQHTLDACLLPADGSKPRFEVFDNDPAGHAALAAWADTHAGGAPVRFCLESTGAYGEALACALADAGRHVAVVNPARVKYHGVAAGQGNKTDRADARLIAEYARDRRPPAWQPPGPEVRELQALVRRRDELRSLAAREKGRLAQPGHTPAARRSIKRTAAFLAREADRLQAEADALIDAAPALRADRDLLASVQGVGPQTASTVLAELPAVGQLPSAQSAAAYAGLAPREFTSGSSVRKRTRLSKAGNARLRKALYLPTLTAIRFNPVIKAFFERLLEAGKSRMAAVGACRRKLVMICYGVLKNRTPFDPEWSKKTR

SEQ ID NO: 160695 - protein, 360 aa, unidentified
MTSTAPASLPQVTIGVDTHKHFHVAHAADELGRPLGSYTMPTTSIGYGDFLAWAQDLGQLEVVGIEGVGHYGAGLGRALRAVGVRVTEVGRPNRQRRARHGKTDSIDAAGAAAMVLAGDDLGDPKTADGITEMLRVLRIARVSAVRARAKAFNALKDLIVSAPAELRERLAGEHKLHLIGACAGLTTSEIPSTPEEAVSIAVKSLAERCLQLDAETKALDRQIEALTAHACPALRQVYGVGPDSAATLLVALGDNPERIGSDAAFAKLCGVSPIEASSGKTVRHRLNRGGNRDANRALHVICVVRLRRHQPTRDYLARRIGQGRTKPEIMRCIKRFIAREVYHAVLPTRQEIPTQTLATT

SEQ ID NO: 160696 - protein, 287 aa, unidentified
MSITIGIDVSKLKFDVCILKSDGTKTHIEFDNKKTGFEKLYKCLKSQSDKHFALEATGIYGENLCAYLYMKKQSVFLLNPVQTARYFQCMMRRTKTDKCDAINIAMFLNHHKDELTPWKPRSKTFNTIKNLHHCLQDLNCDRKRVLGRIEACTYTDQDGRAQALKHYKKQKKFYDAQKEFVLKQLRLLVNDDLEVKAQYDLLISIPGIGEITAFGLIANLPDLTRFKCAKQLAAYAGLNPGVRESGSSVRGRGSISKTGSKTLETFYICQHWLAKSVVNLCLNLPIG

SEQ ID NO: 160697 - protein, 442 aa, unidentified
MATKLVNPNAAGIDVASNEHVVAVREDKSKDSVRTFKGFTRDLHQLAKWLLSCKVETIAMESTGVYWFDLYTILLDYGFEVYLVNAHHVKNVPGRKSDVSDARWLQQLHTFGLLRASFQPDNLTRSLRNHVRQRKNIVQQMSRQTQHMQKAFDQMNIKLNNVIRDLNGATGTKIITAILEGERDPKKLAQHRDRRIKASEQTLIKSLEGNWREEQVFNLQLAYDHYIFLQQQLKQCDAESEKIIQKMTSGNSPKSRTKKIQKSKNNPDFDVAQYLHAALGVDVTQIYGIKEVTALTIFSETGANLKEKFPTEKQFLSWVNVVPNNKITGGKVISSKVKKKKNLAGQAFRDGASALWRAKNPIGDYLRRKKAKSGAKKAVVATARKIAAIYYKMVTEKVEFNPLELTKGKEQYLQKRLKQLEMAKEQTQMLLSDFQQQNSLVI

SEQ ID NO: 160698 - protein, 351 aa, unidentified
MVVVGVDVHKHTHTLVAIDEAGRQRGAKTVKAVTAGHREAVMWVREQFGADVLWAVEDCRNMSVRLERDLLTAGQTVVRVPTKLMALVRSSARTRGKSDPIDALAVARAALREPNLPVACHDGVSREMKLLIDRRDVLVAQRTSAINRLRWLVHELDPEAAPASRKLNTAKHQHALAHWLTTQSGTVAEIARAELADVIRLTAEITALAQRIAERAHEVAPTLLEITGCGELMAAKLVGEAAGVTRFKSEAAFANHAGVAPIPVWSGNTTGRMRLSRSGNRQINRALYVIALTQIRIAGSDGNAYHQRLRDEGKTHAEALRCVKRRLSRIVYKALLTDHTATTKPVHAAAA

SEQ ID NO: 160699 - protein, 312 aa, unidentified
MDQVTIGIDISKDRLDVHRHPDGAAQQFANTRGGLTQLIRWIGTTRVERVVFEATGRYHRDLERRLGEAGLPLAKVNPRQAKRFAQSLGVRAKTDKADAAMLARMGAALALVPHPAKPEILHHLNDLGVARRALIQDRTAEKNRAKGLRLALLGRLNRARLAQIDADLETIDNAISQIIAANPELRARRAILVSIAGISEVTAAAILTMMPELGHLDRKQAASLAGLAPVTRQSGRWHDKAFIQGGRAALRQALYMPAVVACRFNPDLKAKYDQLIAAGKPAKVAITAIMRRLIILANALIRDKRLWEKSRP

SEQ ID NO: 160700 - protein, 367 aa, unidentified
MKKVSIAATKQRKNISQRKLTIGLDLGDRNSWYCVVDEAGQIQLEQRVRTNAKALQEVFGTMPRSRIALEIGTHSPWISRLLSELGHEVIVANARKVRLIGESRKKDDRMDAQTLARLARIDPQLLYPVKHRSAKAQADLTLIRARAGLVRARTALVNTARGLAKSYGERLRGCNVRNMNPEKAEGLSPELQRALEPLLACIESVSEQIREYNERIEDLAQESYPQTALLKQVKGVGTLIALTYLLTLEDPHRFQKSRDVGCYLGLQPGRRNSGKSEPQMHISKEGDPYLRTLLVQGAQHILGPFGIDCDLRRWGLRLAERGGKSGKKRAIVATARKLAVLLHHLWVSGEAYEPLHNSSRTTVAAAA

SEQ ID NO: 160701 - protein, 351 aa, unidentified
MTTTRTVLPGKDTAGGGDLYMSFELGDKHWQLSIGDSRHRVSRYTVGAGDTAAVADCIVKAGARLRTGAQAQVHSCYEAGRDGWWLHRWLSELGVDNIVVDAASIEVNRRARRAKTDRLDADKLLAMLIRHHAGEHVWSVLREPSSEDEDARRVHRELQRLTHERIAHTNRIGSLLVHNLRPGIVIGGRDWTVWWERHRNQVPPMLRAEIEREGARLKLVKEQVRAVEAARCKELAEGKQPLVAHLARLRAIGPKGAWVLVKEVFGWRHFANRRELAGSLGLVPTPYASGDSDIEQGISKAGNRRVRGLLVELAWSWLRLQPGSALTQWFNRRFAGAGKRMRRVGIVMVAS

SEQ ID NO: 160702 - protein, 292 aa, unidentified
MRFYTNQHPFYCGIDLHARSMYVCILSHDGEIVLHRNMKAAPEALLQAIAPYRDGLVVAVECIFTWYWLADLCAQEGLPFVLGHALYRKAIHGGKAKHDQIDPQQIAALLRGGMLPQAYVYLAERRATRDRLRRRTHLMRKRSELLSHVQNTNSQYNLPEIGKKIAYKANRQGVAERFEEAAVQKTIAVDLALITYDDERLKDLELTIWKTATQHDANTLYRLQTVPGIGQILSLLWLDDIHRIDRFPRVQDVASYGRLVKGSKESGGKRLGTSGNKIGNAHLKWAFSEAAT

SEQ ID NO: 160703 - protein, 342 aa, unidentified
MAGIDLHGNNLVIGVINQDGKRITHRKLDCDLKQVTEFLEPLKPKLQSMAVESTFNWYWLVDGLNAQGYKIDLANPAKIEQYSGLKHADDKHDAFHLAELQRLNILPKAHIYDVQLRPVRDLLRRRTNLVHQRTALFLSFKSLYARTTGQVMPLKVLKITQPKEAKDLYAHPANQLIAQVQLEHIEALNKSIARMEKAVLHCAREIPLYEKLLTMPGVGRILGMTITMEVGDIKRFKTDGDFASYCRAVDSRRLSNGKQKGENNQKCGNKYLSWAFVEAANFAKRYDLNCRRWYDRKKARTSTVIAVKALACKLAKAAWHIMAKGTDYDATRMFPELALKRN

SEQ ID NO: 160704 - protein, 367 aa, unidentified
MKKVSTAARKQSRNFSQQKLTIGLDLGDRSSCYCVLDETGSIVLEQRVATTPKALPATFGAMPRSRIALETGMHSPWVSRLLSGLGHEVIVAHARNVRLIGESRRKDDRLDAQTLARLARIDPELLSPVKHRSAKAQADLTVIRARAGLVRARTALVNTARGLAKSYGERLRGCNVRNMNPEKAEGLSPELRAALQPLLAGLESLSEQIREYNERIENLAQESYPQVALLKQIKGVGTLIALTFLLTLEDPHRFRKSRDVGCYLGLQPGRRNSGQSEPQMHISKEGDPYLRTLLVQGAQHILGPFGPDCDLRRWGLKLAERGGKSGKKRAIIATARKLAVLLHHLWVSGEVYDPLHNSSRVAIAAAA

SEQ ID NO: 160705 - protein, 366 aa, unidentified
MSETSVAFQSFVGVDLHKCTVTLGVVQADGQSKRLRISTKSTGKIEDWLRKLPGPVWMAVEACPFVEWFIDRFRECVDRIDIADATELANRRGKRRKTDPKDALDIAWRLSRGECPLGFIADEQLMQLRKLGRHWRQLSRLLTRTKHSMKSMLNAANIRGPKFDATGGHRWYLANRDLLKPVQQQAFADFLDILLLVERQRERLRREIIFATRSGRFAPLVALLMSVPGIGEIWAAIIVAEIGPFDRFPNADALEFWAGLTADLKESAGRTQSGNITKAGSVTLRWALCQAALSLCHSDAKQEATRQRLITRIGKPKANVAMGRRLLRILYAMVRDGKWYQGGARRDRTAAANKAKQSRKQTKEAA

SEQ ID NO: 160706 - protein, 352 aa, unidentified
MQHFIGCDVHTRNQVVAWIEEETGEIKKRRLEHEGKEVREFYAQFPRGTVVGIEATFPAYWFERLMGELGHELWVGDAARIRASEVRYQKTDCRDAELLLDLLRTGRFPRIWVPSLAERDLRQLLVHRMKQVRARTQVKNQLHALAISQGVCRKGKLWSVKGRKELESLALLPWAARRRKELLESLDRLDEQVRELDRAVEEAGRARPEVALLRTHPGVGMVVSLAFVLTVGPIERFSNSRKLVSYWGLNPRENSSGGRQRLGSISKQGNTMMRWLLVEAAQTAARLDPQLRRTYQRLKKQKTSAVAKVAVARRLAVRLFWMLRTRHNYTQLVHMSGSPSSAVVPPTAEPNL

SEQ ID NO: 160707 - protein, 348 aa, unidentified
MAMTIVEAGRTVIGGVDTHLDIHVAAALDPIGGVLGVESFDASPRGYKAMFEWMGTFGTVSKVGVEGTGAYGAGLGRFLRRAGIEGIEVDRPNRQARRTSGKSDPADAVEAARAVLSGRATGTPKSRDGNVEAIRALLVAKRSARDARLRALHQMRQLSYTGPDQLRSRLKDLSITDLVAETAAMRPRSSGDPVVYATKVSLAALGRRVLSLEDELVGIDELLSDLVTRSAPEMLQLFGVGIDTAATLLVTAGDNPQRLRSEATWAHLCGVAPIEASSDKVTRHRLDRGGDRNANQALWRIVMTRLACDPRTRKYMERRTKEGRSKREVIRILKRYVAREVFKYLPSA

SEQ ID NO: 160708 - protein, 396 aa, unidentified
MFGPIIAIDVSKDSSHAQLFESFKKPMGKPFVFDHDKQGFDLLSEKLKMLEEFTGEKVSVVLEYTGHYSIPVVRWCLQNDVKVYAISPLLSAKFRKKDLRGTKTDKKDCANIAGVYFSQDNLREARPTDPLQELSRRYQRTNKRIVGLKCQFMKCLDQVFPMFEKKIGDPYADKSINVLINYSHPEKILKAGRGNLGKFIAKVTSHTEKVSEKYADELIRFAKDCVSGCSIDSCVTEELSEYGQAIIDLTEKCESIIARIKEIEGERQIESVRKVCNFKSSKLIVLILAEIGDISRFKAKENLVSYAGMDPVVYQSGEQTGKGLSITRKGNSLLRKYTYLAVCCIIREDPSSPITQYFQKKIKEGKPAKVARIACCVKLLRLIHASLTLQDNFKLV

SEQ ID NO: 160709 - protein, 420 aa, unidentified
MAYPHPVVQKDTTHGGLPQISSVHEHEHIADGHSERNMTLAYWGFNSCTLILCRKNDINQLNIYMTTQQKQSCLYVGIDVHRDTHTAVGISPWGDKVFELTVGNYNPDFKKLEEKVEEVRGTLSPCIGLEDVRGYGEKLAGYLYDKYPVYHVPSVLVDRLRQNATHPEKSDSLDASGVAKVMMNSIDSLLVYTISQESQKAKQLKEISIDRESLVLERTRLKNQVHTLLYRIYNTEYEQKFKDPFSIKALRFWRNAKPKCDPFLLKTMKRKVRRLLDIHIEVADLEKDMEKLLENNYTIQTASGCGIVLASTIIGEIGDINRFHSPGALSKYAGCSPRERSSGKKVRHFKSRSGNRRLNCAFHRMALSQISRMGNDRAKQYFKRKISEGKSKSQALVCLRRQMVNIIWMMLKHKTIYRNT

SEQ ID NO: 160710 - protein, 311 aa, unidentified
MKDSIGIDVSKDHLDLYCLDDGRSARFGNDAAGFRKLKAWLPDAGCIARVVYEATGPYHAALERRFGGELPLVKVNPLQARRFAQSKGSRAKTDAVDARMLAQMGAALDLAPQAPMSESLRELKELQVARQALVKDKTRLENRIKTQSVAFVVKQGKARLALIKRQLRDIDAEIQTRIGAETPRARAFEIIRSIPGLGAVSTAAVLIECPEIGTMNRKQVASLAGLAPMTRQSGHWNGQAFIQGGRHHLRAALCMPAIVAMRFNPDLKAVYDKLRSAGKPAKVAITALMRKLIELANTLVKADRLWVQKGA

SEQ ID NO: 160711 - protein, 356 aa, unidentified
MTKILAIDLGKFKSVTCLLETETNETEFWTLTTDQHYLEAVLKNYEPDLVVMEACGIAAWVHDVCTAAGYEVLVCNPAQEAWKWKNVKRKTDRDDALKLARLAALDQLVPVHIPCQQQREYRRLVKYRKVVVSRVTRVRNNIRAIFAQRGIPMERGQKAWALERLNQIEQHRKPLSKCAVDELWRGELDLELTELDRLREHQDQLHKKLEALAKEDERVQLLQTIPGVGRKTAEVVVAYIDDPHRFKNARQVSSYAGLVPRRYQSGEMDRTGRINKRGPKLLRGALVEAAWMMLRYNPWARSVYDRLCSKQKTRKKKAIVAVARKLLVRCWIMLLRKEPWNAEAGLPKPAAVALVP

SEQ ID NO: 160712 - protein, 379 aa, unidentified
MHGPAHPTTFARLLALDLGKFTSVLCVYDPLAPGAHRFVTGVRTTPQSLHDLLAAHATDDAARTLLVIETCDVAGWVFDLATALGLTVLVANPAHEAWRWTRVKRKTRPASGCPDDALKLAKLAALGQLPLAHMPSPAQRQRRRPVHYRRVLVDRRTQVKNQVRSIFSQQGLSLPPRSKAWTRAGIQQLAREARPLAECADVLDLWRGRLHLELQQLESLTAQVAQVDAQLDALGAADEKVRLLRTVPGVGPRLAETVVAHLDDPKRFKTAAQVASYAGLVPKQFESGTIKRSCRITRRGPALLRGMLVEVAWMVYVRNGWARAFVQRISRGVASRKNVAIVALARKLLVTLWAMLRENALWREPSCAAGRSAAAVATG

SEQ ID NO: 160713 - protein, 370 aa, unidentified
MLDTTTFVGLDVHARSIKAVSLDVMTGEVRCATFGYDAGAVAAWVRSVDPGARCVYESGVTGFDLQKRLSGLGVDCVVGAVSKMIKPSADRRRKNDRNDAEFLARMLSVGNVVEVWVPDDECEAARDLTRALEDARDDLSRSKQRLSKFLLRHGLVFDERTPTGRRKGNWTRAHWSWIESIRFAEGADNEVLAYYVEAVRRAAEEKSRLEGLVGAEARKPRWRRRVDSLRCLKGVDTATAADLVFEAGEFSRFRNARSFAAWVGLTPSEHSSGENDRRGAITKAGNKHLRKTLVEAAWHYLTCSGRPKDLAKGQAPDPAARRHAAKGVRRLVERREALLARGVHGNKANVATARELACWVWAVGLMAEEA

SEQ ID NO: 160714 - protein, 389 aa, unidentified
MYRIIKIGMDVHSKNYTLCAMEPTIGAEDRIFGEVQVAPDYKEVICFIESLKMKLGFYDEYSIECGYEAGCLGYTLYHQLTGAGIKCVILAPTTMLTQQGNRIKTDKRDARLIAQCLSYGGYHPVYIPTGEDDAVKEYLRMRDDHKLALKKLKQQIHAFVLRHGYQYSGTKWTIKHVTWLKKLELDPMYRETLNEYLASYEEQEAKIERYDKRIEEIASERRYQENVKKLGCFLGIRTHTALSLIVETGDFKRFAKGNTYAAFLGLAPGERSSSDNVNRLGISKAGNTHLRCLLIEAAKGICKGAIGHKSKELRARQSGQPAEVIAYADKANTRLRSKYYKMIRHGKKTNVAVAAVARELACFVWGMMTGNISIRPTTAGTSMPAVRQG

SEQ ID NO: 160715 - protein, 357 aa, unidentified
MRKRLNTNKIDVNGKTVNIGIDVHKKSWQVTALVEGVVVAAVTIQPSYGVLQKLLAQFKGAKIRIAYEAGPAGFNLYDDLTADGIECIVVPPSLLPVESGNRVKTDKRDSRKLAQYLENNLLKRVYVLSREERADRQFVRTRRQLSDHRTDVMRQIKSLILFHGIPLPGVDASFWTRPFLASLRAVATDEYVSRSLNRLIDLYEYLTQQVKEMTKEIRRLARTEKYEKRVKLLKTIPGVDVLSAMEILTELQDVSRFSTADQIAAYLGLTPSQYSSGQMVRMGKITHMGNHRLRTRMVGCSWILIKKDPELHRMYEALKKRRGGKRAIVAVSRKLIIRIRRILLDGVTYRTELAVAA

SEQ ID NO: 160716 - protein, 373 aa, unidentified
MEERTKVHVGLDVHKDSITVAAAEAAGREKARLIGKVAHDVPKLLKVLARIGAVEELHIVYEAGPTGYGLQRALAARGYVCEVIAPSKTPRQAGNRVKTDARDGMELAEYSRAGKLAAVWIPDPADEAIRDLARAREDAVNSRRTARQQLKGFLLRHDRRYGGKTSWCGAHDHWLARQSFEACAAQTAFTEYWQAVKSCDERVERLTKALQGSIAGWRFEPVVNALQALRGVAAVTAIGLVAEIGDLSRFEHPRKLMGYLGLVPSEHSSGEHTSRGSITKTGNGHARRLLVEAAWNYRFKARVGKEIHARQEGLSEAVRTLAWKGQLRLTGRFAALQKRGVQANKVCVAVARELAGFVWAIGMQAQQENLEAT

SEQ ID NO: 160717 - protein, 342 aa, unidentified
MKQYVGLDVSQKETSVCVVDEVGQVLFEGKAKSDPGALTTLLRRRAPHAERIGFETGAMASWLWHELRRVDLPVVCIDARHAHAALSVRMNKSDQNDARGLAELVRVGWYREVKVKSEESQKIRAILVARSRLVAIRRDIENQVRSLIKEYGLLFPRAIGLQFRNQVSELLGEDHQLVSAIAPLLSIHEQICKQQGTFDNEVRRLAKSDETTRRLMTVPGVGVVTALTFRHTIDDPSRFRSASSVGAYLGLTPRRSQSGETDINGKISRWGDRLLRTYLFEAATVLLYRTKKWSSLKAWGIKLANRIGMRKAWVAIARKIAVILHRVWVDGTPFDWGQAKEA

SEQ ID NO: 160718 - protein, 360 aa, unidentified
MQAQSNKLNFEVQNIYAGIDVHKKSWTVSIFSKQMEYAIFSQPPSAEALKTYLHRHFPGAIYHSVYEAGFCGFHVHEKLKAAGINNIVVNAADVPSTHKEKVNKDDKRDSRKLGRSLRSGDLKAIHVPQRKTQEDRSLLRTRYTVRKDLSRIKVRIKMLLHLYGIEHPEVFSSPSTHWSHRYMEWLRTIKMEQDSGQDTLQLIISEVVAMRNALLTATRKIRALSQTESYVKDYELLRGMKGIGLIVGMSFLTEIEDINRFPSTDRFASYVGLTPSCHSTGEKERNGTITSRHQQILREMIIESAWKAVQDDPSLRLAFLELIKRMKPNMAIIRIARKLLNRIYHVLKTKEEYVCGVVKK

SEQ ID NO: 160719 - protein, 414 aa, unidentified
MQSCLFVGIDTHKSSHTAAVLNSYFDTEDSVTFNNSYQGFCVFLEKLKTISEGKSFCFGLEDSQGLGNYLAEFLTEKGYLVLDVNPVYTDRGRKHTIHRDKSDDRDACLIAKTLIREKNNLHPVTINRNSLALREMVRHRQILVEESTKLKNRLHGLLFNQYGQTLGIFSSLFSKVALAFFARYPNPSMLEGICPNSLACFLKANSKGRYGKQKAIAILSSLNISIADNLTDTRAYIIRKHIERLAQITEELAQIKEMLSSLVEISSYSCLLSIPGLDTVTAAKIISSVTDIGRFSSSAKLAKFAGIAPREKSSGKKQIFQKSKHGKKYLRSTIYFMALAHISKARNGKDKNPISRAYYLKKIAKGKTKKEAITCLCRRLIDLIFAVMRDRSIYNFSKSEFTKQHNVILNTIVA

SEQ ID NO: 160720 - protein, 472 aa, unidentified
MPDAITRKMEEKKGSPEVVSSTGGQKEKPAEAVVGIDPASVAGKAMVEVIAGVDVHKRMLAVVVRIVRADGKLEYQKRKFGTTRQELEMHLMSYLQFYGVTMVVMESTAQYWRPVWYALEKHFELRLVNPLQVKAPRGKKQDYRDAQRLADRWAASDLQASYVPGQEQREWRLMTRQRDHLRKRIGVTRNLVEGLLESGTYKLSSVVSDIFGATGWAVLQLIAKGETKVDVLVKEARGSLRKKESALREALKGEFTVVYRLALQQYLAQVALYRAQIEELNRQLSEAMKHHLAALTRLMKIPGVDLYGAQELLAEIGPKAAAFPSADQFASWVGVCPGSKESAGVNYSSRSAKGNRFLRRLLLQVAWAAIHTKETFFAGLFKRLKPSIEGKGAAWAVAHRIARVVWLVLHQEVEYQEKGPGQVSPRTLSKKLKRILKECARHGIDPRKIMSEIPESELLPVQTSDADAEATI

SEQ ID NO: 160721 - protein, 369 aa, unidentified
MPVVRGERAARFTFGTPSPRGSIWRAFATVLWKPEQLIDFNSHLQGWETENMPELIHVGIDVSKDALEVACGPESPTQCFTNDDAGHEALVNVLHVHRVDLIVVEATGGYEAPCACALQAAGLAVAVVNARQARDFAKAMGYLAKTDRIDAQVLAALAAVLANRADRQKLIMALPSDEQQRLHALVLRRRQLVQMLVAERNRLPMSHQAARVSIEALIKAIRKQIVDIEADLSSHIAHHHADLAGLLRSAKGIGPHTSMALIADLPELGKLSNREISALVGLAPFNRDSGKMRGKRMIFGGRTQVRCALYMATIVAMRHNRVIQRFYQRLLAAGKPKKVAIVACMRKLLTILNAMVRTGKQWDETFHFA

SEQ ID NO: 160722 - protein, 342 aa, unidentified
MQITTIGLDIAKNVFQVHGVDAAEKVVVRKQVRRGQVLAFFEALPPCLIGMEACATAHYWARELTRLGHRVRLMPAKDVKAYVKRNKNDAADAEAICEAVRRPTMRFVQIKSVEQQGRLMLHRARDLLVRQRTQVINALRAHLAELGIVAVQGREGIKELLKIIAHEEDARLPVDAQAGLIVLAAELQAMQTMIGSIDKRIMAQHRSSEASRRLESIPGIGVTGAAAITATVPDPKVFRSGRDFAAWIGLVPRQDSTGGKQKLGPISKRGDRYLRRILVVGACAVLRYARQQPQKYPWLTQLLARKPFKVVAVALANKMARIAWALLAKGGTYRMPALAAAV

SEQ ID NO: 160723 - protein, 343 aa, unidentified
MEYYVGLDVSLKQTSICVVDQTGSVVREGVVDSDPEAISVYVRSKAPDAVRIGLETGPTSTWLWTELKQLGLPVICIDARHAKAVLKMQINKSDRNDAIGIARIMQTGWFKEVHVKDIDSHSVRALLASRALLVKIKRDLENHVRGLLKNLGLVIGRATFNVFVLRAEELIEGRPELIAAIRPLLEARNAVGQQVSELDRKVMKLARHDAQVRRFMTVPGIGPITALAFKATIDDPARFARSRSVGAYVGLTSRRHASGEVDWSGRISKCGDAMLRSYLFEAAGVLLTRVPKWSAVKAWGVRLAKRNGLRKAKVAVARKLAVILHRMWIDGTEFNWSKQEIAA

SEQ ID NO: 160724 - protein, 422 aa, unidentified
MHTTTDFAATIGLDWADQKHDLWIRPADGSKSEHLRLDQTPETLHEWVAKMRQRFGNRKLALALETSRGPVISALMAYDFIVLFPVNPKALKDYRGAFAVSGAKDDRTDAQLLEEFVRLHPDKLWALEPDTELTRKLAGLVENRRRLVDERTRLVNQTHATLKTYYPLAETLLEGQLNTPMAAAFLLRWPDLAALQTARPKVVRAFFYQHNSRSARKTEARLAAIATAKALTTDPAIVVPARDLVLAFAGMLRPLHQAVARLDQLIEQAMDQHPDAPIFRSFPGAGPALAPRLLVAFGTNRQRFEKAADVAQFYGVAPVVVQSGHSRQVHFRHRCPKFGRQSFHENAGCALKKEPWAKDYYDQQKQRNTGKHHQACRALAFKLIRIYFACWKQRKAYCPEVYLKALETHASPLHCKRKPLTK

SEQ ID NO: 160725 - protein, 525 aa, unidentified
MSEMKLYCGLDISKGRAEAALMDHQGIRLGRSKQFVDTPEGRKELCTWVYHQAVRRGLSEVEFGLEPTGGYEVHFQRDLSDLHWEEIQTRVRQLPTTAVGGQNKTTGQRTRTDSTSAWALAEVLKGHPDLQIPILTADQRAFRSWVRRIEKQMVQAQQTQTELQQVLYEVMPFMVPYVEKDPPQWVLTLLSQYGSAQAMAQARRLPNIPRAPQRKLKQLFGLARQQAARLPQHELQKELLQDLVSQFQQLRQRIEQKQNQLIQWVQQTEDWKKIEHWLSLSNLGTYTAIVVYSELFLGDKHYTEAEQIVKSAGLDVDLFQSGDKGILRLSKRGPKAVRRVLYLAALRQVKTPGVFRDYYDRLVQRKGEKHKVWALVAVMKKLLRVMWKLWNEEKDFDPQHETLWKANHPVVQSQAPQPDPAVQNLCTLPSQQRQQAPLSSAMRRKIHKELKRRQNSEDLSPENNPQTSFEKKEKKTTGRKKALPLKRRSPSPPPLPSVKQSSNQNIPISRREVKGPKESKKMMDL

SEQ ID NO: 160726 - protein, 454 aa, unidentified
MEQKSETLSMEIVNPHAAGIDIGSRSHWVSIGQKEKDIREFGVFNDDLKVIADWLSENKITTVAMESTGTYWQALYAVLLAAGFQVILCNGKFTKNIKGRKTDIQDCAWIQKLHSIGLLSGSFLPDEATEQLRTYCRHRANLLDMAASTQKKMQKYLRLLNLRLDVVVNDICGLTGMAIIEAICKGETKPEKLAELRNGNCRKSEAEIAKALVTNGRMDYLFALQQELDMYKIIQTKITACDTEIEKMLNNIINCDDNKRQHYIDKKSHKRVNKNTPKNIDLNMVGYQYFEGVDLMEIEGFSHGTILHLISEVGLDGIKKFQTAKHFASWLRLSPNNKKTGGKIISSKVPKGSNRLKIALRNAANAIGNLKDSTPLRDFFQRINFKKGRVSAISATARKLAVIVWNMVTKGTKYINPEGYLFLDQKRKLGLTKRIQKQINKFGLTSEDLQIVTN

SEQ ID NO: 160727 - protein, 401 aa, unidentified
MQSVAARPEALSAIRSDLGAIFVSLELSRSTWLITSLSPGGGEKMSKHSVRGGDVGGLLERFAQLQEKARARTGRNFPIIVIQEAGLDGFWIHRVLQNEGIQSHVVDPSSVTTSRRSRRAKTDRIDGEALLRTLLAYKRGEPRVCAMVKAPTSEEEDRRRLCRERKVLTNERVLHVNRIKGLLFSQGVSGYEPLRRDHRQRLDELRTGDGRPLLKHLKAQISRELNRLELLLEQIKAVEAERNALLAAQQVAASAPAAMLLDFNGIGPEFAAVLWSEGLFRHFDNRCQVASYAGLAPTPWKSGSIDREQGVSKAGNPRLRTTLIQLAWLWLRHQPQSALALWFKERVTRNGGRLKKTTIVALARKLLVALWKYVSAGVVIEGAVMKAVRLEAGRILKSSRT

SEQ ID NO: 160728 - protein, 385 aa, unidentified
MNKLFVGMDISLDDVKVHILDQDGNDACPRFSVDNNPSGCDILVSHILDCCNKYKIQKVFIGLESTSVYGWHIQYYLADHVSLKPFNLSVTTFNANTVKAFKKSLGNLPKNDWVDAFTIAEKLRFGRLPKSCPVDFRYLALKRLTRHRFHIVDSIVREKNYFLSNLFLKFSGLCQIKVFSNNFGTAATEIFNEFLTLDDIAARPLEDLIAFLVDKGRDHFNDPNATAKLLQDAVRKSYKINANVNDSLNFVIKSCLDNIQYLEKLKKASEKTIANEVKGFKNQFLCLTSVNGIGPTIAAGLISEIGGISKFDNDNALAKFSGIYWSEYQSADFKAEDTYLKRTGNEYLRYYFIQAALNLGNIVLSFHNTMLANLMKVKLINTNVL

SEQ ID NO: 160729 - protein, 353 aa, unidentified
MRTYYVGMDVHRASIAIVVLNGAGKIVEQVILQTSAERVRGYLKQLRGKVYVTFEEGTQANWLCDIVRPLVTEVVVCDPRHNKLLQSGNKNDRVDAQKLAELLRNRALKAVYHGDNGVRMLKELVRNYDCLVADTTRVMNRLKAIFRGRAIACCGHDIYRADRRAQWLEKLREPGARQRANFLYQQLAALKPLRHEAKLVMVKEARRQTAYPWLMSVPRLGAVSVAQLLAVVGTPHRFRSKRQFWTYVGLAVVTRSSADLEVVNGVLRRSRRPIATRGLNRNHNHLLKRVFKNAATSACHTGPFKAAYDTRLAQGMDPSLARLTIARQIAAITLALWKRGEQFKLERMKQQAA

SEQ ID NO: 160730 - protein, 420 aa, unidentified
MEEVTEEPAELVKRVAALDIGKASLVCCVRVPHETKPGARLQEVRTFATTTPALLELRDWLICQGVTRVVMEATSAYWKPPFYLLEDDIECWVVNARDVKNAPGRPKTDKLDVVWLAKLAERGMVRPSFIPGRPQRQLRDLTRYRRTLVQERTREKQRAEKLLEDAQVKLSSVISDIFGASGRDMLAALIGGQRDPRALADLARKNMRAKMSVLQEALTGHFTEHHAFLLGMMLDRVDALTAQINALTARIEQAIAPYAHQVAQLDEIPGIGVAAAQDIIAEIGTDMSRFPTPGHLVSWAKFAPKARQSAGRSKAASTGKGNPWLGGTLGEAAAAAARTRTFLASRYKRIVKRRGKKRALVAVGNSILTVAWHLLSAPDAHFTDLGPDWHDRLAPLRRKRQLIAELERLSGMKVTLQEAA

SEQ ID NO: 160731 - protein, 389 aa, unidentified
MEQPMQQLNDLSRSLTPLKPDGTLIAVIEMSLSSWLVAGIVPGVERQRLKKLEVDESALLKLLNRWREEARKAGHRIERIAVAFEAGRDGFWLARWLRARDIEAHVIHASSVAVSREHRRAKTDRLDTELLKRAFLGWLRGESDHCKMVAIPTIKDEDAKRPNRERESLVGEQSRIVNRMKAALIRLGIRGFNPKLKKAAERLDGLRTPEGEPIPPNTLAELRRDMMRRRLVSDQIRQIEDARLERLKQAPSDGPHAMVRLLARVVGVGVETADMLVQEVLSRNMRDRRAIARYAGLTGSPDESGRKRREKGLTRSGNARVRRGMIELAWRFLRFQRDSVLAQWFRTRTENARSTRKTMIVALARKLLIALWRLLREGVVPDGVVLRPA

SEQ ID NO: 160732 - protein, 322 aa, unidentified
MPIQSIGIDVSKKTLAVAFLSDARSYTLDEYENTKEGIDGLLLYLQTHGPRYAGPCVIESTGDFHFLSSFMLKEEGFEVNVINPLLSKLYQRASIRDAKSDSVDAKRLAFIGTQETNLPKFTLERKDIVARKALASLHTLERLRQELSTHLSRTEETMKTLGIAIDLSSAHQAKKSLDCQIRELEKLIMEKTSDAGKILSKNTPGLTERKIAVVETYLSGRSFENRDQLIAFCGLDVRARRSGNWKGKERLSKRGNPYLRKTLYHIGWGLSRYNEEYRKYYDELKARGLHYTTRLIAVARRFLRRLYREYYGSFPQGNFAKK

SEQ ID NO: 160733 - protein, 315 aa, unidentified
MEVVYRRCAGLDVHKKSICACVLISGPGEGQPEVDKRTFGTFTSDLVELKNWLTACGGTHVVMESTGVYWIPVWNVLEDGFDLLLVNPQHFRAVPGRKTDQKDSEWLAQLLQCGLLRGSFVPPQGIRELRELTRYRVKLLGERNRAHNRIEKLLQQADLKLSSVATDILGVTGRIILVPLLRGNADSESLAECAKGKLRGKRTELVRALQGQMTDHQRFMLQELMEDLKYVEGKIARIEETIHGRMAPHEEVLNRLNTIPGVNRLTASTLVAELGVQMQQFPDAMHLASWAGLCPGDCESAGKRKNTRIRKGNPQ

SEQ ID NO: 160734 - protein, 349 aa, unidentified
MGNDTTKQTIDVLGIDLAKNSFQLHGINKDGNIVYKRALSRNKLKEFMVNLPACLVGMEACGSSHYWARLFQSYGHNVKLMAPQFVKPYVKSNKNDAADAEAICEAVQRPNMRFVGIKDIDSQDMQSLHRMRSLAVAARTAQVNQIRGLLQEYGIDIPQGITSVRKRLPQILEDAENGISILFRELLSGLYEELTHLDGRVSSYDKKIEVLSQQNEKAKRLQTIPGIGPITATALVGSIGSIDTFKSGRELAAWLGLVPRQHSTGGKTTLLGISKRGDTYLRSLLIHGARSVLRFVKNKNDSRSQWAKRVIERRNKNIAAVALANKMTRTVFALLKYEGTYSSDVTLAI

SEQ ID NO: 160735 - protein, 372 aa, unidentified
MYNDTTVFVGLDVHKDSITAACVGSHPAEQPVDLGTLGTQQYAIDRLIKKLSGRGPLRFVYEAGPCGFWLQRYLHSKGQDCVIAAPSLIPKRPGERIKTDRRDARNLALSLRAGTLTAVHIPTPEQEAFRDVVRAWQQSKRDITSAKQRLKSFLLRNDIRYAGRATWNAAHRRWLSELVLPSAPQQIVFQEFVDAINERERRRDRLEQQLDTLAPDWAGYPFAQALLAFRGIQKTVAYTLIAEAGDLARFSHPSRFMAWLGLVPGEHSSGTTRRQGPITRCGNRWARTLLVEAAWAYRYTPKVSAVIERRAQSIDPCVRELAWKAQLRLTHKFRRLSARGKHSNLVVTAVARELAGFIWDAARLIEHPATKA

SEQ ID NO: 160736 - protein, 331 aa, unidentified
MPERKVRSNKAGSTKMTQISITAGIDTSKAKLDVAIHGRSEHWQFANLPDDWQRLAVELSRAGVTRIGIEASGGYECGVVDCLRECGFTVLVLQPIQVKAYARLHLRRAKNDKLDAVLIAACAATIDQLRVQPDRRLLKLAHHLTFVEQIEEDIARLKVRLEHVGDARLRRMVMADIARLKARRLGELRRIVAALRAHDDLDRRLDLVLSIPGLGERTALAIIIRMPELGRVSREQAAALAGLAPFDCDSGQHKGERHIAGGRRRLRRSLFAAALPAAFHWNKALIALYARLTKAGKAHNEALIACARKLLIYANTVVQRGTPWINTIKTA

SEQ ID NO: 160737 - protein, 375 aa, unidentified
MIENSTPRSTRFVGLDVHKATIVVAVAEDGDQQPESWDKIPNDPSAVRKMVKKLGQDGHRLKAVYEAGPTGYGLQRQLADLGVECIVAVPTLIPRAHGRVKTDKRDAILLARLLRRGDLVPVWVPDPTIEALRSLARARYDAKENHQRERQRLNKFLLHWGVRPPAGVRAWTNRHYRWLKEVQLSEPAAQVAFEDYRAFEQLAQERVRRLEQELRTWAEQHPRLALIVAALQILRGIGFLSAATIAVEVGDFRRFAAATSFMHFIGITPSEHSSGESQQRGGITHAGNRYLRHVMVQSAHHSRHQPGVSRELQKRMEDMPKDMIEIALKAQQRLHYRYRSLSRRIGQPKAIVAVARELAGFVWAMGQHMEETLAA

SEQ ID NO: 160738 - protein, 355 aa, unidentified
MRNSSTEGRSVGITKKDHVYVGLDVHKRSVYAAVRINGKENGLKSLPADSEVVKRFLEKYRSGLKKVVYEAGPTGYGLARRLRESGIPVEVVAPGRIPRPTVEGAKSDRLDCRKLAEYAEKGLLKSVMIPTVEEEAYRQVLRLRSSLVEKRRRVKQQIKSFLLQYGLEEPEGLNHWSRKAMKALGDLELYPALRFTLDHLSEELSHLEEQLRKVGGQIKEQYSSKAYEKKAQILRSHPGVGEVTAAQMLAEVYQPERFENARQVAAYVGLAPRVRQSGESRKEGPLLKAGKGHLRAALVESAWAWIRVDRQAAKLFRRLMRNTGNANKAIVAMARKILVHLWTMLIRQEVYRPIV

SEQ ID NO: 160739 - protein, 342 aa, unidentified
MKIYVGIDLHSNNSFVALVDEENKVVYKKRLPNDLVSFLEALNPYKNSIEGVVVESTYNWYWLADGLQEAGYKVHLANVSANVQYSGIKCTGDESDALWLANLLRLNILSTGHIYPKEKRGIRELLRKRLILVRQQTACLLSLQGMITRYENICITSSKIKSSSNEKDSNKILSFIKDKNVEFAAQSQLKVLDCIMEQINSLEKQIQKIIKPDPLFTLLKSIPGIGPILAMTILLETGDIKRFKSVGNYSSYCRCVESKRVSNEKKKGINNRKNGNAYLCWAFIEASNHAIKSYPEIKKYYQRKLSKTLRVVALKTIANKLSKACYFMLRDNVEFDMKKLFA

SEQ ID NO: 160740 - protein, 427 aa, unidentified
MNEIKTNRVDEFRQFKRHIRGSKDYLVVGLDIAKRKHHAFFGDANGRTLLKGLIVENNAEGFRHLLTQVRFYMDREGLGRVVFGLEPTSVYHKPLAEHLIEQGHLVVYATNEAIKKNRSLLDGRWDKNDTKDSANVADLVAQGKCHYYDLPELRLRDLRSLLLYRRRLKKQLHSCRVRIRNNLVAQYFPELDLFWNNAEAENLAIVRWFLDPACIRQLTCEQFIAKVTTHNGGLRQQRRLRHIWEAAGRSIGCRPGPAMGLEAELVVEALKSVKGQLDRVEEAIEQLAEGFEEYGYLKSIPGFGPYVSAMTLAAIGNPHRFENRAQLIRLAGFDLSASRSGEKSKSAVPVISKKGKADLRYALYQAALVASSFTSHFRAYYHRLLEGRQREVGIRTKMLVKIAAKMLVIAWTLMKRKEPFNPAHIQV

SEQ ID NO: 160741 - protein, 407 aa, unidentified
MQVFMGIDWGHAHHDICFMNASGQVLSRLTVEHTAEGLAELEQARVQLGVSREDCRIGLETAHTLVIDFLWDQGYPLVFVISPGAIKGARRRYRQTNAHTDESDAWLIADVVRTDPATLYPWRPDSLLVRQLRTKVSLIHFLTKEIRRLTNRLGAVLARYYPAGRHVFRDFASPVSLQFLQAFPTPEAAAGLTRQAFGQFARARRYRQPELVLSAAYARLQASYPRASATTVAAYHEEAVWLAGHLLATLQQKQTEIARLQALFQQHPDHELFAALPGAADFLAPALLAKFGDDRERFPEPGCLQSIAGTCPVTEKSGKSRRISFRQACDHEFRDIAQQWAKSSITQSSWAATYWHQVREHSRSANHAYRCLANRWLAIAWKCWQTRQPYDEGVHLQNRARRLAKRA

SEQ ID NO: 160742 - protein, 463 aa, unidentified
MSKPIIVAADVSKGYGDFIVIDSDKKLLMELFQLDDNKAGHTKLGELLISLKKKHKVKRVLFIVESTGGLEDNWLRMAKQASLSDFVEGYRLNPKLIHHEYRVQKRNSISDGVSALTLAHHVAKNLEYFEPSEIVVDPAYAPARNLIRHITSLKQDCTGHKNSLQQLLYQYLPSLLPFLPANWSQYFLKILITHGGRRAIQLAAKQGFKSVPRVPKGKANQIYDALKDGIDMKETPPLVVAAIRSKARQILSLLEEIKELEELLCQVAPVAGKQVEQLCSIKGMGKVSATTLLCFFEDIDRFDQASSMAAFFGVQPRVKKSGDGTIKIGMSKQGNGLDRREVYLLAFRTLSNEPYLKSIYAKFRKQGMTHDGALGVLMHKLIRIMYGILKSGTPFNPGIDQLNQIDPRSKEEAQEAESIVRDDPKRRFQSVSQDAPLSNRQRQKRKKDQESQAAIVAESTGSS

SEQ ID NO: 160743 - protein, 343 aa, unidentified
MNYYAALDVSLRSVHLCVMDENGQIHAEGQVDSEPQDVDAFLRKLTLEITTIGLEAGTLTQYLTYGLRAAGYSVVCMEARQVKVALSAMRNKTDKNDARGIAQLLRTGWYSPVHIKSIESHQIRALLSSRKAVLTKCVDLENEIRGLFKIFGIKLPPKLGHGSFDHSVRETIENDPALCHALLPLLDARLVLYHTFRELDNRTRHMAHQDPVCQRLMSTPGVGFVTALTFKAAVDDPTRFKHSRTVAAHFGLTPRRFQSGEMDNPGHISRAGDPDVRCTLSVAANAMMTRSSRWSPLKVWGIKLAKQRGHKRAVVAVARKLAVILHRMWLDGTTYRWGTEGAP

SEQ ID NO: 160744 - protein, 365 aa, unidentified
MIVIGADTHKHSHTVGAIDAMSGRVIADRTVKAKRRSFDDLLLWARRLDGERVWAIEDCRHVSGALERFLLRRGERVVRVAPKLMAETRRSARERGKSDVIDAVAIARAATREGLDTLPVARLAGRELDIRLLVDHRERLVAQRTALINDLRWHLHDLWPGFEIPARVLTSGCWQDRVAGRLARAEQTPRVRIARDELRRIRELTRSIDALQRELAVLVAQLAPRLLAEPGCGVLTAAKLIGEIAGIERFASDAKLARLAGSAPIPASSGRTTRHRLDRGGNRQLNCALHRLAINKGRLDPETAAYLARKQADGKSRREALRCLKRHLARRVWHLLQPPLSQRPPSPPKAIITIHCNTRPTAASP

SEQ ID NO: 160745 - protein, 386 aa, unidentified
MKRNDLSRCLVAFGQNSTLVAVVELSLKSWLVAGLVPGLARKPLKKLGADEDALLALLHRWRGEAIKAGSKIDRVVVAFEAGRDGFWLARWLRARDIEVYVIHPSSVPVSREHRRAKSDRLDTELLMRAVLGWLRGEAKHCSMVAIPTLAQEDARRPNREHEHLSGERTSIVNRMKAAMARHGIRSFKLKLSKASEQIEKLRTPEGGALPANTLAELQRDLTRLRLVRDQMRQIEQQRLQRLSQAPQEGSHPMVLLLAKVLGIGIETADMLVHEVLSRNLRDERAVGRYAGITGSPDESGSKRREKGLARAGNARVRRGMVQLAWRWIMFQKESALAKWFHARTAAAPRDVRKTMIVALARKLLIALWRYVTTGEVPAGAKLRPAI

SEQ ID NO: 160746 - protein, 361 aa, unidentified
MGDATTSKETKVTVGLDLGDRHIQVCVVDEAGEVIEEARLATRPPALRRRFCGADPLRIVLEAGTHSPWVSRLLAELGHEVIVANPRKLRLIYANDSKSDRVDAQYLARVGRLDPALLAPLRHRGAETQVDLALLRSRNALVRARTRLISHARGTTKSLGARLPACSSESFAARAGACLPDELRPALDPVLAVIARLDAQINALDERIAEMARQRYPETALLTQVPGVGTLTAMVYVLTLEDPQRFPKSRSVGSYLGLRPRQRDSGSAQPQLRITKAGDEHLRWLLVGAAHYILGPFGPDTDLRRWGLALAAQGGRAAKKRAAVAVARKLSVLLLRLWTTGEVYEPLRNARLHGELLAAPS

SEQ ID NO: 160747 - protein, 389 aa, unidentified
MKIFVGIDIAKLNHFAAAISSDGEILIEPFKFTNDADGFQLLVSKLESFDKNSIIIGLESTAHYGDNLVRYLVAEFYQVCVLNPIKTCQMRKNNVRKTKTDKVDTFVIAKTLMMQDDLRFITFFDLDMMDLKALGRFRQKTIKQRTRLKIQLTTYVDQVFPEIQYFFKSGLHQNAVYALLKEAPSPKEIASMHMTHLANLLKVNSHGHFTKEQAKELRVLAQKSVGANDSAISIQITQTIQQIELLDSQLEKIEAEMTDIMKFNDSVIMTIPGIGYINGGMILGEIGDIHRFSNPNKLLAFAGLDPTVYQSGNFQAKTTRMSKRGSRVLRYALVNAAWNVVRNNATFKAYYDAKRAEGRSHYNALGHCAGKLVRVIWKMLTDEVEFNLE

SEQ ID NO: 160748 - protein, 441 aa, unidentified
MSRELSVPAAEPEWAAFVAIDWADQKHYWKLVAAGSQKPEQGELNNTPEAVAVWAADLNVRFGGRPVAVCLEQSRGSLVYMLLKFPQLVLFPVHPKMAASMREAFHPSGSKGDPSDTAVLLTILLCHREQLRRLKPDTAETRLLQRLVEQRRLMVNEKTRQSNRLTACLKLYFPQILQWFDEVTSPLVAALLERWPSLSELQRAHDGTLRKVFHQHNCRSEERIQQRIDAIRQAVPATTDSAVLDGEAMAAGGFIALIATLRANIAALDERIAKAFTAHPEMALWNCLPGAGAALAPRLLVAFGTDRQRYAQAHEMECYSGIAPVRAASGQSEWIHFRWACPQFLRQTFHEFAGHSIVRSKWARAYYESQMSKGKSHHAVVRALAFKWIRVLFRCWKNRTPYDEPVYCQSLQKRNSPLKALLADTAWKDVAGFQKLSEDPS

SEQ ID NO: 160749 - protein, 316 aa, unidentified
MTILGCDISKDTVDSVLLAPDFVLLQRLDCPNTVEELIKILQELKKDFFDLCVGCESTGMYHLPLVEACDALGIPCKLLNPILTKEFNRSSIRKKKTDRDDALVIAKLLAQGEGSIIHADDCTDRLKATVRSARKIADLSRSLLLHSRHAGKLLPTELPRYEHVQKELLTLQKALKKSAITMCDASLRSLLESIPGIGAWTASIILAETKNFERCRNADAFVAFAGLDPRVQQSGTTLNRNSRLTKRGSPHLRAALFIAANVGRMNDPELGAYYHAKKEQGKKFTAITCALSRKLCYRIYAVIKRKTPYEVHEKQS

SEQ ID NO: 160750 - protein, 345 aa, unidentified
MHIASIGIDLGKTTFHRVALGERNKVLLRKKFSRPQLLAYTANLPASLVGLEACAGAHFLGTALREQGHQVRLIPAQFVKPYRKSNKNDFLDAEAIAEAVTKQNMRFAQLKTQEQLDWQAMHRVRDRLVRRRTALINEIRGFLLERGITFAAQPIHLRKNLPTVIEDAEQNLSPRLRWLLDRMWQEWKQTETEIQAITDEIERISNEDARCRQLRQIPGFGPLVSTATVAAIGNGSAFRRGRDFAAWVGVVPRQYSTGGKQKLYGISKRGNVYLRRMLIHGARSVLFRVKYDTGGFGQWVRRLAQRAPHNKVVVAIANKLARIAWAVLSSGQDYRHQPLQQRAAA

SEQ ID NO: 160751 - protein, 324 aa, unidentified
MGMDISKNTLDCHLYVQQKSLAPVSNDLKGFKAIKKWLTKELKCKTEGLLVVMEYTGIYTYSIERFLNQQGISYVKRPALDIKRSLGMVRGKSDKADARFISKYGWMRKDELKPMTPPSDAQVALQQLMSHRDKLVADKSSYQCKLKELSSQMGKKLNETMAASMEYIMDVLTQEIKEAEKEIKELLKADESLQTNYQLMCSITGIGFASAVHLLIATENFTRFTDVRKLICYCGVAPFEHSSGTSIRGKVRVSQLANKKLKSLLTMAAISAIQHDPELKIKYEQKVKEGKAKMCVINIIRAKLLERVFAVIKRQSPYELRIAA

SEQ ID NO: 160752 - protein, 377 aa, unidentified
MSEGTTVFVGLDVHKATIAVALADAGAGEVRSYGVIPNTPAAVARLVKKLGPAGRLRVCYEAGPCGYVLLRQLTTLGVACAVVAPALIPSKPGERIKTDRKDATKLARLHRAGELTPVAAPTPEQEALRDLTRARQAAQQDLHRLRQRLRTLLLRLGIAEPGTTKRWSARWRIWLAGLTLEQPLQQAVLDDLRQAIGETAARVDRLTAAVEAQASSGPFAELIGALTSLRGVGVVTAVTLVAELGDPGRFDSPRQLMAFAGLVPSEHSSGGREFRGRITKTGNAHVRHVAVEAAWHCRRKPHVSRELARRQRGQSPAVIAIAGKGQARLHARYVHLVVKGKPKPKAAVAVARELLGFVWAIARQVAAERATATAIAA

SEQ ID NO: 160753 - protein, 429 aa, unidentified
MAIWEDGVVRQAGQIKTTPEELRIFAESLGPDDEVALEATCNTYAVATLLERHVARVVVSNPQKTRAIAEAKVKTDKVDAEILAQLLAADYLPPVWLPDEDTHALRRQVARRAHIVRQRTRLKNQVQAILHRNLIPRCSAADLFGHKGRAWLGEQDLPPDERQAVHALLRQLDFYGEELRLVDAELGRVGLERAEVHRLMTIPGVDATVALAIVAAIGDFSRFPSPERLVSYMGLNPRVRQSGGQPASHGRITKQGRAHARGMLVEAAWVATKIPGPLRAFYERIRARRGMQIAVVATARKLIVLCWHLVVKEQDYAFARPSLTAQKLRALELRAGMAARRGQKGKAATYSLKEVRRREREIAEQAEHAYRQLVANWRPKGPETVEATKVGVAAATGARLLRPSKGKAARQGLQPQHPALRSGVDHARN

SEQ ID NO: 160754 - protein, 338 aa, unidentified
MQAITTIGLDIAKSVFQVHGVDAGGQVVLRRQLKRRYVLAFFGKLAPCLVGIEACASSHYWARRLQALGHNVRLMPPAYVKPYVKRQKNDSTDAEAICEAVSRANMRFVPTKTPEQQSGLVLHRTRHLFIRQQTSVINAIRAHCAEFGIVAPVGRRGVEELLNVIANAKDEQVPAIARACVVALGAQLHRIKQQILEFDRMITAWHRCCDTSRRLDEIPGVGPALATALVASVANPRAFRSGRDFSAWIGLVPKQNSSGGKPKLGSISKQGDRYLRGLFTAGALAVIRYAKIHGTRHRPWLTALYAELEPNVANAADESYVRAYSKRVTASQAPARRA

SEQ ID NO: 160755 - protein, 372 aa, unidentified
MRHPSVASKGWHHHHDTPAPPQAPQVTVGVDTHKDLHVAAARDQLGRRLGTTQIPTTSAGYGDLLAWAHGLGEVRAWGVEGTGSYGAGLARFLAAHAQHVVEVNRPDRASRRRRGKSDPVDADAAARAVQAGEATGIPKTADGTVEMLRALRAARQTAVKARTQAINAFKALLVTAPAELRESLTGLPTRRLIGTTAALTPGALTTPTAATMLAMRSLAERYQYLDTEIGQLTEQLEMLTTRHAPLLRARLGVGPDSAAALLIAAGDNPTRLTSEAAFAALCGACPVEASSGKTVRHRLNRGGDRQANAALYRIVLVRLRWHQPTRDYAARRTAQGRTSREIMRCLKRYIAREVFALLREPGNQQSQHPTAA

SEQ ID NO: 160756 - protein, 388 aa, unidentified
MQIAADRPQASTAIRTDLGAIFVSLELSRSTWLITSLSPGGGEKMSKHSVRGCDVAGLLERFAHLREKARARTGQRFPIIVIHEAGLDGFWIHRMLNAEGIESHVVDPASIATSRRRRRAKTDRIDGEALVRALLAYKRGEPRVCSMVKAPTPEEEDRRRLCRERKVLTAERVLHVNRIKGLLFSQGITGYEPLRRDRRERLEQLQTGDGHTLPDHLKGQVRRELDRLELLLDQIKAVEAERDALLAAERAAARTPAAMLLDIKGIGPEFAAILWSEGLFRHFDNRRQVAAYAGLAPTPWQSGSVDREQGVSKAGNPRLRTTLIQLTWLWLRNQPHSALTLWFHERVRRNGGRLRKTTIVAVARKLLVALWKYVTAGVVIEGAVMKPA

SEQ ID NO: 160757 - protein, 317 aa, unidentified
MSITRHIAVGIDVSKRTLDVCLMPDGKTFAVANDQEGIDSLTERLEQMRPELVVLEATGRYERPAAAAIAASGIPVAVVNPRQARDFAKATGRLAKTDRIDACVLARFAGAVGPKPSVLPDEEAQLLQAILTRRRQLSGMLIAENNRLQMAPEAVARRIRAHMKWLEKELSRTDRDLDEAIEASPGFKENEALLRSVPGVGPVLARTLLAEVPELGTLTHKRLSALVGVAPFNNDSGQRRGKREVWGGRAPVRAALYMGALVATRHNPVLKEFYERLLAAGKPKKVALVACMRKLLSLLNALMRNRTLWRSTHALTP

SEQ ID NO: 160758 - protein, 333 aa, unidentified
MQFELFIGIDVSKLTLDIAFRNQDAEVESFKIENKPVSIKRFFKKLSKQLNLENALVCAEFTGHYCYPLRKVCLEEGYSLWLESGAEIKQRSGVTRYKNDKVDAIRIADYARRHQDKAKVQRIEDYTLESVRALSAERELFIKERAKYKSQIKDLKGFMDEALYKARSKRLTKQVESLTKLIKEIDQQIKLLLESSEKLTNQKAILTSIDGIGDQVAIHTILATSAFTKFNSGRKFACHAGVAPFSFESGTSQRSRRKVSHRANMELKKLFHMAALSAIQMKGEFKDYFDRKVAEGKNKMTVINAVRAKLINRIFALIRDNRINEKNYLITLA

SEQ ID NO: 160759 - protein, 457 aa, unidentified
MSQRRRKSRKSQINMNNLPPHLRHINLFAAGIDIGSDRHLVAVPEGSDKVSVRQFGAFTSDLHEIADWLKRCGVTTVAMESTGVYWIPLFELLEQRGFEVKLVDARHVKNVSGRKSDVLDCQWLQQLHTYGLLQGAFRPSDEICVLRSYMRQKEMLTQASSMHVQHMQKALQQMNVLLHNVVSDLTGVTGMKIIKAIIAGERDPNVLALNRQKECRNTEQTIAKSLVGNFRDEHMFALKQALDLYEFYQAKIAECEAAIVKHLGSRPDITDDQPPESGKTVRARERMRAGVDVRHKLFKMTGVDLFATPGLAADTLLTLASEVGFDLRSWPTVKHFTSWLGLCPGTRVSGGKALDRRTKRNANRAAQAFRMAASSLARSQTALGAFYRRIRSRTGGKQAITATAHKLARLFYFMLTRGTTYVEQGQLQYEQKFKEQRIKALKKQAHSLGYQLLQLAS

SEQ ID NO: 160760 - protein, 340 aa, unidentified
MEKRYIGIDLHRNRFTCCIRLENGRTYLREWALKDLARFVKELRAGDEVAVEITGNTRLFHDAVAPHVKRVVVVDTNQFRVISQSVKKTDPNDARLLSLYLSKDLLPEVRMKDKQLAQLASLTQTRDTLVKQRSALKNKVNNILSARGLNLAKEALSSEKKLAEVLELPFDEIVRIELRVVVEQIRNLNKSIAELEKTIGEEGSKLEGHKSLSSIKGIGKITGAILLSVIGDVNDFADEGRLASYFGIVPRVSNSNETERSGRIHKRGTKLGRTALVQSALVAAHYSPYLKRFYERVKGRRGAGKAIIALARKFLGIIYRTLKNKWVFEDFPNFVLAEES

SEQ ID NO: 160761 - protein, 342 aa, unidentified
MYYIGLDVHKKTISYCVKDASGQVHQEGKVGATRWELDDWMKTLPQPWTVAMEATIFTGWIYDHLLPHAQQVKVAHPLMLRAIAAAKKKNDRIDAGKIADCLRCDFLPECHMASTAIRDRRRTLRYRHLLVRQMVQMKNRISGLLMETGVSHNKQRLHKVGYFRELLASNEEVNESIRPLLRVSRDSIVRLQKTEYALVSSLQRDPLLAERIKRLRTVPGVGPITALTWALEMGEVSRFSSIRQAISYCGLCGDERSSADKVTRTPLSKQRNKHIQRVLVEAAKLAPRQDHNLALVYEREKQKGNANRATLAVARKMVAYLLAVDRGQRDFVPFADSQSAAA

SEQ ID NO: 160762 - protein, 386 aa, unidentified
MDQTSSSTLSSNTLHCVLELSKNSWLLAVQFADHEQPSIYSMRGGDTEGLMAKLTAARDRWAKASGTVPAITLCYEVGYDAFWLARFLKARGIECLVIDPGSLKVNRRGRPVKTDRVDVQMLLRTLIAWCRGERHVWSVVRIPSIDEEDLRRSHRERRRLICERTAHINRIKGLLFGQGIRDLNVKSKYKTLAIDTLVTGDGRRLPPRVSSEIKREINRLAMVQEQIDEIERERDMAPTTCEATEKKRHLLLQLKSIGPAIAAFLSREVYYRQFVNQRQVGSFLGLTPSPYNSGAGERCQGISRAGNGHTRAVVIEAAWLWIKYQRKSALTQWFIERTEGQSKRVRKILIVAVARKLAIALWRYVEHGLVPRGAMLSVSMTSKAKQ

SEQ ID NO: 160763 - protein, 339 aa, unidentified
MREVSTIGLDLAKNVFQVHGVDGTGATVVRRVLRRARVLAYFAELPPCLIGMEACATAYYWARELGKLGHRVKLIPPAYAKAYLRRNKNDAADAAAICEAVSRPSMRFVEIKSEAQQAAAGIHKVRDMLMKQRTMLINALRGLMAEFGIVVARGTRHVGELTAILADPEEHRIPALLKDGLRRMAEMLRALERQLLGIDKQIVDWGRGNATCRHLITAPGYGPILSSAMAAIVVNPAVFRSGRDFSASLGLVPRQDSTGGKVKLGPISKRGNGYLRRLLVNGAMSVLVSKRAKQDPWLVKLLANKERKVAAVALANKMARIGWALMMRQEDFRATPVAA

SEQ ID NO: 160764 - protein, 466 aa, unidentified
MENNYILYVGMDVSKGKADAAILKVSDRRSVKPKFLRKKLSFKFVKSEVTSFLETVRSYSDDNCTSICFALEVTGIYSTNVYNFIKDNLNDNESIKFLNTDFVNQWRNAHNIAKSDPLDAQTISTIIGTDSDVQYVNDNVFENKNGYQDLKALVHRHYQIKKIYSQEINRLIAQCDCLFPELQYVFEPKSAAFIAVLSSYPTTHDIINASRLEVFNVVYEATKHRCSMDKIDKLFDLCHDTLVPDNISSYGRSIILDLVENIKNIKGQLKMIERYIRDVASLNPAYKLLLTITGCGPITAATVIAETGNIRRFKNADCFVSYSGTSPRNKRSGTSVETMGKISKKGSRYLRHAIYIIAEFARRHNPVLKHQFERIKNGNKKRHKLANIAIANKIARYIYSIMKNESSFVILHEHIMRLPEETQNTFFNSISLDFPKNTRKQIYQYSDINGEVHKFVYTKLEETMII

SEQ ID NO: 160765 - protein, 386 aa, unidentified
MTHSTNILPRSVDYDQTLVLAIELSNKSWVLAAQVPGLSQTKAKRTIEPDKNDLLAAIDAYRIRAAAAGRSVKRVITSYEAGWCGFWLARWLMAHGIEVNVVQPSSVPVDRRMRRGKSDGIDAELLLRTLLAWLRGEPRVCSMVPIPDEADEDARRCVRERSELVSERVGLVNRIGAVLATLGTDDYNPLLQSRRRRLTELRTGLGDPIPPNALAKIERLLTRLELVLTQIAELELERDAVARTDAPDQAGKMIQQLISLRGIGVQSATVLVREAFVRRFANGKALGSYAGLTSTPYSSGGIDREQGIGKAGNRRLRTVMVELAWLWQRYQPGTAQVVWFRERVGSTGRRLRKVMVVALARKLLIALWRFVIDGLMPEGAVTKPSI

SEQ ID NO: 160766 - protein, 344 aa, unidentified
MTSMNFIGLDIHKKTISYCVKDAAGAVLAEGTIPSTRQSLDDWIRTLHQPWTVAMEATMFTGWIYDQLLPHAAAVKVAHPLMLRAIAAAKKKTDRIDASKIADCLRCNFLPECYMASTEIRERRRTLRYRKLLVRQNVQLRNKVSQMLMESGVVYNKQKLHKVGYFKELMTTNPDIGEGLRPLLAICREAIVRIGKTEGALVRSLARDLLLSERVERLMTIPAVGPITALTWVLEVDDVARFGSVKQAISYCGLCAAERSSAEVVKRMPISKQRNKHLQSVLVEAAKLGPRLSPDLALVYEAEKQKGHANRATLAVARKLVAYLLAVDRSGREFVVAGEPRAAA

SEQ ID NO: 160767 - protein, 282 aa, unidentified
MKYVGLDWAYRWAQWCALGPGGDVAGEGRIPADRDGLARLVLGLGDEVKACLEMMSGALWVRDQLVACGWQVEVADARKVKTVAPLAAKTDKVDARLLAELSRRELVPALWLPSFDERALRERLRRRMHLVRLRTSAKGRIFGLQTQWGVRVSMARLRRADGLMLLERAGVPAVWRHSVSECLALIDFLDARLEPLDQELKPFAKADPRAVLLDTIPGVAELLALTIAVEIGDISRFRRPAHLVSYGRLAPRVHQSGQARARSGPLSKSGSRLLGWAAVEAA

SEQ ID NO: 160768 - protein, 348 aa, unidentified
MTTMTETPRRITGGVDTHRDVHVVAALDENGAELGVESFPTTPAGYRAALRWLKKFGELGRVGVEGTGSYGAGITRFLRAQTIEIVEVSCPNRQRRRSHGKSDPVDAIAAAKAVLSGDATAEPKSKDGNVEAIRALRVADRSARHARVKALNQMRALLLTGPDELRVQFRGTTVWRLVRGAARLRPGDPTTAVGGTKYALRLLAKRVLELEDEMAELNAILKPLVTATAPELVARHGVGTETAGALLVAAGDNPERLRDERAFAHFCGVSPIDASSGTVVRKRLNRGGHRHANEALWRIVMVRLVSDPSTRAYMERRTKEGMSKLEAIRCLKRYVARELYPFLVSSAP

SEQ ID NO: 160769 - protein, 343 aa, unidentified
MDYFAGLDVSVKETSVCIVDDAGKIVREARVASEPEALLQVLTNTIYRFKRVGLEAGPLSQWLYSVLAAVGLPVICVETRHMRAMLKAQINKTDRNDARGIAQMMRVGLYRPVHVKTLRSQKLRMLLTHRKLLQSKAIAIENDLRATLRNFGLKVGMIGTVKFETRIRELVEKLPDLAMLAEPLLIVRRVIREQLDILHRRLLAVVRDDDVCRRLMTIPGVGPVVALTFRVTVDVPARFRNSKAVGAVFGLTPAKYQSGENERTGAISRCGDEMMRMMLYEAAQSMLMRSTKWSWLKAWAMKIARHRGMKKAIVALARRLAVIMHRMWVDGTQFRWTKQAAAA

SEQ ID NO: 160770 - protein, 386 aa, unidentified
MRKPNDLSRSLSVLNRNSMLIAVIEMSQSSWLIAGIVPGVERQPLKKLAVDESALLKILHRWREEAEKAGHKIERIAVAFEAGRDGFWLARWLRARGIEAHIIHASSIAVSREHRRAKTDRLDTELLKRAFLGWLRGERDHCKMVAIPTITDEDAKRPNRERESLVGEQSRIVNRMKAALARLGIRGFNPKLKKAVERLEGLRTPEGEPMPPNTLAELKRDMERRRLVRNQIREIEKTRLERIEQAPSDGPHVMVRLLARVIGVGVETADMLVQEVLIRNLRDRRAVARYGGLTGSPDESGKKRREKGLARSGNARVRRGMIQLAWRFLMFQKDSALAQWFYARTKNAPQTRKTMIVALARKLLIALWRLVREGTIPEGIVLRPAS

SEQ ID NO: 160771 - protein, 412 aa, unidentified
MIYCGIDWAERTHDVALVDDSGQLLAKRHITDDAVGYKVLLDLLAEYGDTEENPIPVAIGTSRGLVVAVLRTGKRQVFAINPMAAARYRDRHSVSRKKSDPGDALVLANVLRTDMHAHRPLPQDSDLARAVCVLARAQQDATWNRQQISNQLRSLLREYYPSALADFEPWKNGLCRREAHELLKTAPTPTRAARLTRTQLQAALKRAGRQRGIEAEADRLREIFRADWAHQPSLVEDALGQQMLALLVQLEAACTAADNLAEAVEETFPQHPDVEIILSFPGLGIQLGARVLAETGDDRNRFAAARGLKAYAGASPITRASGKKSSVTRRWVKNDRLNHVGYLWAFSAITASPGAKAHYRRRRDGHGDWHAAAQRNLFNRMLGQLYHCLQHGQLFDEAIAFPAAASADVVVA

SEQ ID NO: 160772 - protein, 360 aa, unidentified
MKVGQEVLVCSVVGGVDTHKDLHVAAVVDERDHVVGSQCFATTRHGYKQMLAWMRSFGQLRRIGVEATGTYGAGLLRYMQNAGVEVLEVTTPDKHDRRKRGKNDDLDAQNAAHAAFTGKRTVTPKSRDGMIESLRVLKACRKTAVAARRVALQMIQNTIVCAPDELREALRKMTRMQLVRTLAAWRPDLTDYRNVVSAYRIALKSLGRRYLELHDEIADLDTMIIAITDELAPTLVARNSIGHGSAAQLLLTAGDNSERIHSEASFAALCGVSPVPASSGKTTRHRLNRGGDRAANSALHIIAIGRLRTDPRTKAYMAKRIAEGHSKLEVIRCLKRYIAREVFTLISQRRREINQAQVPA

SEQ ID NO: 160773 - protein, 367 aa, unidentified
MEVVHERCCGLDVHKETVVACVVVPSAGKQPHKEIRTFNTMTADLLQLADWLTAQGVTHVALESTGVYWKAPWNILESSFTLLLVNAQHIKQVPGRKTDVRDCEWIADLLRHGLLRASFVPDLPQRELRELTRYRTTLIRERAAERNRIHKTLEGAGIKLGSVASDVLGSSGRLMLEALVEGTTDAATMADLAKGSLRTKLPQLERALTGKVGAHQRFLIAHQLAHLDGLDELIDQLSQEIAERLRPFQNKLERLDGITGVGLRTVEVFLAEIGTDVARFPSAAHLASWVGICPGNNESAGKRKSGKTGKGDVWLRTALTEAAQAASHTKDTYLASQYQHLAARRLHDHAEPLAFRMRHKTVPERQA

SEQ ID NO: 160774 - protein, 345 aa, unidentified
MTEAYDGRQVVGMDLHRRRSVLVRMSMDGRKLETVRIGNSPGALRAVLARCGERPLVVLEATYGWYWAADVLAGAGAEVRLAHPLGVRAFSYRRVKNDERDAADLADLLRAGLLPQAWIAPPEVRALREVVRYRHKLVGQRTSCKDQVHAVLAKLGVPVTHSDVFGTGGGLWLDQLVLPEPYAAKVASLRALIGVLDGEIARLGQRAAGVLGADPGYAALRELPGIGPVLAAVIIAEIGDVTRFRRAGQLCSWAGLTPRHYESDTKVIRGHVSKQGSKMLRWALVEAIQHQPAGTRPRQARDAIIARRGKEARNIAKTAAARVLLTQVFYALRDGHVRSAGRPAA

SEQ ID NO: 160775 - protein, 399 aa, unidentified
MFVGIDWAAESHDVCVVDPAGKICGRATVAHSQQGFDELTKHLVRWSEQGEILVGIERPEGRLVDAILEAGYAIVLIPTFAMKDLRRRYAVSGAKSDPGDAYVIADVVRTDGHRLRRLEPLSEQTRALRAVVRARDDLVDQRVALGNQLRACLEAFWPGAAVIFADVASEICLSFLERYPTPESAARLGELRLQSFLKKAGYSGRRSPAELLERLRSAPEGIVGAQAEARSDAVRCMARVMRSLLRSIKDLDRAVVAHLGEHPDAEVFTSLPRSGRINAAQMLAEWGDCREAYPEPDAVAMLGGLCPVTHASGKHRDVSFRWACNKRLRLALTTFADNSRHASPWAAEVYRRAVARGCDHPHAVRILARAWVRVIWRCWQDRTPYDPALHGAAVLLEAA

SEQ ID NO: 160776 - protein, 340 aa, unidentified
MTIRTIGLDLAKSVFQAHGIDERGATVLTKRLHRKQMLPFFSKLPPCRIGMEACGTAHYWARTLAAMGHEVRLIPPSYVKAYVKRGKSDALDAEAICEAVQRPTMRFVPVKTVEQQSILMAHRARSLLVRQRTMLANALRAHLAELGLVTNPGIANLAKLVQQALSDKDALPSYARTTLEILVRQIMTLSEEITALDRKLLAWHAESEASQRLTAIPGLGIVTATAMAATVTDPEQFRSGRQFAAWLGLTPQQYSTGGKTQLGGISKQGDRYLRRLLVVGATAVIRHTKDKPTPMANWIRKLLEKKPFRIVSVALANKLARIAWVVLTRKEAYRPSQLAA

SEQ ID NO: 160777 - protein, 409 aa, unidentified
MLSVGIDAALKEHQGEMRNDSGKVYWNYRIVNDREGLEKLIGRIQEIEKMTGDQVIGIYAEAMGSYFAPFQYHLTQRGYRVVLVNPKKVKSARTLKNLNKNKSDVIDATTLASLPWMDEEFREKNTHQRHPISELTRLYQKMQRIETQLKNSLNSDLARVFPEFLRFVNDRDSKTVLKLLEKNPTPAKILEVSEAKLLKLVSSTSRGGFGIEFVKKLREMAKDSIGVPDTEGVLAYRIKYFIKRIWEIKESLKKIERKINKKTKGIEEIQMIDDIRGIERLKAVSIYGEVGPIEQFETARKLQGYGGITPKRSQSGSKEWIGRPTKIANHYLRNIVSVCSRPLALHNEEFKEIYFREKTKGKTNTQAYIIISNRLLYHVFTILKNKKPYRKRLPMSAFQHPHPSTSCKG

SEQ ID NO: 160778 - protein, 344 aa, unidentified
MTSNDYIGLDIHKKTISFCAKAQDGTILDQGTIVARRDTLLAWAKARPRPWIGAMEATLFTGWIYDLLKPLAQELKVAHPAMLKAITAAKKKNDQVDARTIADLLRCNLLPECYMAPSAIRDLRRVLRYRNLVVRQATRMKNRIAGLLMETGTPYNKERLHGRAYFSELLGGLREVPRSVVELLQLSRGQLEFFATIQRRLLKGLCQNPDLSERVARLQTIPGVGEIMALSWALEVGEVKRLPSIAQAASYCGLTSAQHNSAGKEQRGPISKQRNKHLQTILIEAAKLAPRHNPQLAVVHERELQRGDRNQATLAVARKLVAYLMAVDKSGKPFAMRASGEEAA

SEQ ID NO: 160779 - protein, 442 aa, unidentified
MAMRRREDSPEMFPNAAGIDIGGSSHWVAVPRTADDQPVREFGTMTDDLNAMADWLLACGVDTVALESTGAYWIPVYEVLERRGLAVWLVDARQMKYVPGRKSDVLDCQWLQKLMSLGLLRAAWRPGDKVCVVRAVARQREVLLTEQGSWVQRMQKTLVQMNIQLTEVLSDIMGTTGQAIIRAIVAGERDPKVLARYRHGRIRRSADDIARALTGNWREEHLFVLKQALSMYDDIARHLGECDARLQTLVDESGHHHVDMGTGPRAGTRLRGNFDQRQRLANWAGVDLTRINGLGVSTVLTLLSEIGPDLSRFASVKHFCSWLGLTPGTKISGGKVLSSGTKRSANRARQALKMAAMTLSHSDSALGAFYRRLCARMDKPRANTAVAHKLARMVYFMLTRGEAFVDQGQQRYEEQQRQRSIAALKRRAARLGFRIESVPATP

SEQ ID NO: 160780 - protein, 345 aa, unidentified
MELHTIGIDLGKTVFHLVGLNLRGEVVVRKKFSRKQLLHFTSNLRVELIGMEACGGSHFLGRALREQGHEVRLMPAQYVKPYVKTNKSDYIDAEAIAEAVERPKMRFVPIKSDDQLDLQSLHRVRERWVMRRTAVINQIRGLLLERGITLRQGRRHIDAALPGILEDASAKLSSAVRLLLAQLRLELDHLQMRIDEADAVINKAAGENEACRRLVAIPGIGPVTATAIIAAIGNEAAFKKGRGFSAWLGIVPGEYTTGGKQKLLGISKRGNSYLRRLFVQGARAVLQQSAKQSSGLSAWLAQLSTRTHSNVAAVALANKLARMAWAVLAKNEPYRPPVMVGAATP

SEQ ID NO: 160781 - protein, 320 aa, unidentified
MSANERFVGIDVSKDHLDVAIRPDGTHRRVPNTDEGLDQLVALLGPVGPVLIVLEATGGYQRRAVAALALAGLPVAVVNPARAREFARAAGRLAKTDAVDAAVLAEFADRMRPPVRPLPDAEAQKMQALLARRGQLVGMRTMERNRLGSATDRTVRRSIEAHLAWLEEQINGTEKGLDEAIEGSPAWKAKDELLQSIPGIGPGVSRTLLFEFPELGGMSREQIASLAGVAPMNRDSGRRTGKRFIAGGRAVVRTAVYMATHAARKWNPALKAFADRLTAAGKPPKVVLIAVARKLLVIANAVLRDQKPWRNVTENVAVVA

SEQ ID NO: 160782 - protein, 338 aa, unidentified
MMYGAIDLHLRYSEIRVVEADGRVVRERRVATSRETLTAAFAGLGVLRVLVETGTESEWVAQTLEAAGHAVVVADPNYAPMYGEVRRRVKTDRRDVAALAEANRHGWYRATHRRSRAQRTLQQILRSRRQLVAMRTGSISVVRALLRQEGYRLPSGSAAQVPARLARVPLPEGLAATLAPLRQVIDTVTRAVAEIDTRLRTYAAADPVVTRLQTVPGVGPVVALTFRATLDEVARFQAAGQVSAFLGLVPREDSSAERRHRGHITKAGSGELRSLLIQAAWACWKSRGSGTLRAWAERLAGRRGRRIAVVALARRLSRILYAVWRDGTAFDVARGAAA

SEQ ID NO: 160783 - protein, 456 aa, unidentified
MPRFVGLDLARATVQVAILDEHGHQLRNQKLPLRREELERFIPATLDPTDEVAVEATGNTWAVVDLLTPHVTRVVVSNPLRTRAIASAKIKTDKVDARVLAELLRCRYLPEVWQPDATTRHLRGLTHHRAALVGQRTAIKNRIHAQLAHRLLHVPTSDLFGTKGLAWLHDLSLDAAGRAMVDAELRLLTAVDAEIAREDAALAGHGWKDDQIRLLMTLPGVSLVVAIGLLAAWGDLARFPSGAKAAAYLGLVPSTHQSGNVCYHGRITKQGASRTRWLLVQAAQHLDRHPGPLGHFFRRLSRKKNRNVAVVATARKLAVIAYHMLRASEPYRWAQPLATATKLAALRVAATGARRRGGSPKGKPRPTSYGSGERTRAVPSPAGVCKAEGLPAPRTLDDLPAGEIRVIKLTHSLTHARAIQNPTTRPRPTAKHLEEKTQPTKGPSQIIDSQRHAQGT

SEQ ID NO: 160784 - protein, 402 aa, unidentified
MNAVGIDVSKGKSMVAIMRPFGEIVSAPFEIKHTTRDINSLVELISSVEGESRIVMEHTGRYYEVLAHQLSEANLFVSAINPKLIKDFDNDSLRKVKSDKADAVKIARYALDKWQNLKQYSFMDELRNQLKTMNRQFDFYMKHKTAMKNNLIGILDQTYPGVNTYFDSPARSDGSQKWVDFASTYWHVDCVRKMSRNAFVDHYQNWCKRKKYNFSQSKAEEIYGKAKELVPVLPKDDITKLIIKQAVDQLNSASTTVESLRTLMNETAAKLPEYPIVMAMKGVGMSLGPQLMAEIGDVSRFTHKGAITAFAGVDPGVNESGSYEQKSVPTSKRGSSNLRKTLFQVMDVLIKTHPQDDPVYQFLDKKRAQGKPYYVYMTAGANKFLRIYYGRVKEYLASLPES

SEQ ID NO: 160785 - protein, 419 aa, unidentified
MFKIILNNCCGLDVHKTWIYACVGITDRHNRTYYHEARFTAFSKGLRDLCGWLAKLNCTQVCMESAGKHWIPVFNILEKTCKVTLAHPKYTKPMKGNKTDRKDARWICDLFMCGMVKPSFIPPPVIRQLRDLVRYRGKLTNMITGEKNRAQNCLTVSNLKLDDVFSDVFGKSARSITEYILAHPGETFDVAPFVDRRCKTPISEIQAAVDGAVSHEQAVKLRQCLDHIDELEKHRSKIEAEISRLVSPFTTTLDLIHTVPGFDKNPLTAITVVSEIGVDMSVFPSSKNLVSWAGCCPRNDKSNKTVKSTRISTAGSCLKPTLVQVANAVIKSKDHPKFGIRYRRIKAHRGHKKAIIAICRMLLTAIWNVLTKREPYSPDGYAVPQPSFVAKPLTKSQGLALLRQMGYVIKDDNPPSVTA

SEQ ID NO: 160786 - protein, 394 aa, unidentified
MHNLFVGIDVSKDFSSAHGLDSKGRSNFSLSFSMGSDGFTTLLKHITSNCKDFSEVIVALESTACYHINLYSFLTSKHINTVIINPLLISNFTKLSLRKTKTDKKDALTIARFLLVHTESISQLSKSQDLQDLRDIARERESLCHLIAATKTEIKRILQSTFPELETVCNINTKVMLNFLKRFPSARLITSARVKTIAKALEPSGQGNRISSFAPEDIIKAAQSSVATLSPAKELILPGKISTLQHLQQRRDELTKALTDFCKAMMIEDLEIVTSIQGIDTGTATSFLAEMGDIHNYQSHKSLIAFAGIDPTVYQSGKYEGTSRISKRGNRHLRRVIWLMTFNVIHFNDTFKQYYLKRKRDGLPAKKAIFATAHKLIRIIFAMCSNGDIGYKRV

SEQ ID NO: 160787 - protein, 318 aa, unidentified
MSEIYTIGIDLAKTVFQLCAFDRTGKKLINRSLRRNQVIKFLSNIEPCLVGMEACGSSHYWAREIEKLGHEVKLMPPQYVKPYVKTNKNDSADAEAICEAVRRPTMRFVSVKSEEQQALLLLHREREGVIRDRTALINRIRASLQEFGVSVPAGRFQLRKWFREGFGSVEEQLPKLLVNHIKSMQKRLVDLEQYVEELDIQIDMASQTSDECRKVREIPGVGRLTSSALVASIGDAKAFSSGRQLAAWLGLVPSQHSSGGKSLLLGISKRGDTYLRRMFIHGARAVIRHMKEGKPFYEWVTSLLKRMGNPPFLNSAQK

SEQ ID NO: 160788 - protein, 372 aa, unidentified
MTNHEAFVGFDVHKETIAVAIAKGGAGGDVCGFGTIKNSKQAVALLARKLARTHGKLSFCYEAGPCGYAIYRQLADLGHDCQVVAPSLIPTKPGDHIKTDHRDAVTLARLLRAGELTAVWVPDQAHEAMRDLVRGRIAVMQSVRKARQQLQGFLLRQDLRYPGKSPWTKLHRDWLRSLTFAYPAHHVLVHELLHVIEEGQRRQQRIEQQIQALLPTWSMAPIVRAIQAMRGVSVIAALTLAAEIGDFRRFDNPRQLMAYLGLVPSEFSSGKRVTRGSITKAGSAHARRVLIEGAWAYQQRAGISKLHMQRLTNLPTQIREIAWDAQLRLCARYRRLAAKGKCKNVVTTAIAREMAAFVWAIAREVEPVRIAA

SEQ ID NO: 160789 - protein, 313 aa, unidentified
MSQNNPSILHVGLDVAKDSLQLDLAGQSHALANDAKGHAQLLKLLRPHPGAHVVCEATGGYEQPAVRALHAALVPVSIVEAGRVRHFAKAQGQRAKTDPIDAAVLSAYGRTFQPTATAAPTPQQARLAECSTRRQQLIVTLTAESNRAAHYLDAESLRQTRALQRLLEKQIAACNVALAALIAADDTLKVRAERLDAIPGVGAVTAATVLAELPELGRISDAAAAALVGVAPFNRDSGQHTGGRHIAGGRKLVRCALYMAALSAVRHDAILKAFYQKLRTAGKKPKVALVACMRKLVVLMNRLLRNPKFQLAN

SEQ ID NO: 160790 - protein, 343 aa, unidentified
MGQYVGLDVSMKETAISIRQDGKRIWRGKCASDPQLLATVIRKRAPQAQRVVFETGPLSVWFYHALVAEGLPAICIDARHAKAALDMAANKTDANDADGLAQLAEVGFYREVRVKGFDSMLIRTLVSARRQLLKMRLQISNQIRGLMKTFGLVVPKGAGSVFERNVRALLQDYEKLGRIVLPLLQAWSDLRHRTAELHKQLVMMAGEDSRCRLLMSVPGVGTVTATAFAAAVEDPANFKNSRAVGAWVGLTTRRFQSGEVDYDGHISRRGDTQLRHLLFEAAAVMLNRSRDTSTLRTWALGLKERLGFKRAAVALARKLAVIMHAMLRTGELFDPHTGTPTAA

SEQ ID NO: 160791 - protein, 412 aa, unidentified
MKDLLEISCGLDIHKEKIVACILTGPLGKPTHSEIREFTTLIPDMLALRDWIISENCHHIAMESTGIYWIPIYEILEDAFSGDITLLVVNARHMKNVPGKKTDIRDSEWISTLLRAGLLNASFIPEKRIREFRDLNRYRKSIIRDITSQKNRVEKFLQSSGFRLSSFISDIFGASGRNIILHLMEHGRIDKISLDSYLKTKTRKRIDEILMSVNGTLSEHQKSFLKILMCHYDSMKEHLIEIETHLQEDMLPFALQIEQLNTIYGISTTASCAIIAEIGTDMKPFKTAEHICSWAGLCPGNNESAGKRKSTSITKGNPYIKSMLCEIAWVIAGKRNTYLSAWYWRIKQKKGARKAIVALARKLLVIIYTMLKQGTNFDENCFEVRRKNCEQKQLSRYIRELEKHGYTVEAQV

SEQ ID NO: 160792 - protein, 319 aa, unidentified
MNTTTAAHIDRSERNVGIDIGKSMLDMCIYEVDIYTQHSNTPEGVRQLLKQLSRYKVTRIIVEATGGYERALVEACADKELPLVIVQPMQVRQFAKAQCIIAKTDKLDSRLIAQFGAVMKPEPRPLNSKKIRYIRDLLSRKRQLNDMRTQELNRQHKAPVALAATHKRLIKVLNKEIEWVNKLLVKEVSEVTEWQRTYDIVSSVPGIGDGAAFTLLGELPELGNLSARKIAALCGLAPFNRDSGAMKGRRRIQGGRAPIRTVLYMAMLSAIQCNPIIKRFYQKLVAQGKHKKVALTACMRKMVTILNAMVRDNCEWQAN

SEQ ID NO: 160793 - protein, 427 aa, unidentified
MSTAEANRYEAFCQFRISVRGSRDYLLIGIDVAKERHHAFFGTATGKTLLKRLIFDNNRPGFEQLIERVEQLMVAHSCRKVAFGLEPTGNYHKPLANWLLDQGQLLVLVSNKAIADNRESLDGRWDKNDTKDSANVADLMAQGKCQFFERPSADLTALRSLLSLRKRLKRDEHSVRMQIRNGLLVRHFPEMDRLWGSCLKENLAIVRSCLDPRTISAMPFNEFVRRVTDRHRGLRQIKRLQRIHDAAAVSIGCPTDAAARFEARLLVDRLYDVRARIERTENRIERICQRFPSYRRLRTIPGFGPYVASQVIARIGDPHRFAGRKQLIRLAGYDLNAKRSGKSSDKAVPVISKRGNGDLRYALYQAALIATYHNDRFRALFTRYLQGRERERGIKTKMRVKLAVKMLVIAWCMMRDDTDYDPALLST

SEQ ID NO: 160794 - protein, 342 aa, unidentified
MTLYIGVDIHARQQTLSYLDTSEGSTGVVELSHERDDIREYYSQFQGEVIIGIEACGYTNWFEELMEQLDHKLLVGDAAEIRRLARRRQKNDRRDAQLILELLVHGEFPTLFRYTKESREVLRQLRYRHKLVKLRTMVVNSLHALAINAGLSLRAKLLTRDGRQQLRRLSLSPISHQQREELVSLADELTRRIGKVEQWLEAQAKQDVRVQRLQTHPGVGLLTSLCLVHTLGDSSRFSSLRKVAAYAGFDPMEDSSAERKAYGGISKAGSKLLRYLLVEAAQTAVKDDEQLKQFYRRLLPRRGKARAKVAVARKLLIRCFIMDRSEIDYAEFLRRGKQIETE

SEQ ID NO: 160795 - protein, 340 aa, unidentified
MKIIGCDLHASQQTIAMLDRDTGEVAEHTLTHEGAVVRDFYAALPKPVVVGIEATGSMGWFLRLMEELQVTCRVGHPAAIRHAETRRQKHDRRDAHLLLKLLVEERFPAIWMPSTEVRDLRALLLHRHQWVRMRTRVQHALQAMALSQGLRRGPTLWSHDGQATLAALPLPPHAAHRRSELQMLYQHLAAQVALLDDRVTQAAAQRASAARLMTHPGVGPVTGLATDVFLDDPSRFADGKALASYVGMIPSEYSSGARQRLGALSKQGNPLLRFLWGEAAMHAVRRDPALQRFYRRKLVQKGLGKARVAAARKLGIRLWIMLRDQIEYDEFCRRSPARQS

SEQ ID NO: 160796 - protein, 346 aa, unidentified
MFYAGLDLSRKRLDFHLLDAEGATVEVGAAAPDAGGLHGLTRRLDRHGEPIRAAIESMNGARFVHDQLEPAGWQVEIADAQKVKGLAPLACKTDRIDAWVLAELARRDLVPAIWLPDPLVRAERERARWRLHLVRHRSSLKQRVHAVLLTHGKPCPVSDLFGVHGRQLLARLALPEPWQGTLEASLRLIDELDREIESCEGELRRLGADHRYVPLLCTVPGIGWVLAYTIAAEVGDIDRFPSPRKLAGYTGLCPRVYQSGESDRRGPLAKQGPKYLRWALIEATAHACKHPLYHDRYQRTKTRLGKQRGAKVAQVDLARRLTEAIWHMLTRNQPFAPKGATDPLAA

SEQ ID NO: 160797 - protein, 338 aa, unidentified
MVYVGVDLHRKRSHVVALDPTGEVVLSRRIGNAPAEFLRIFGELEPQPIEVVFEATYGWSWLADLLADVGIPAHMAHPLATKAISAARVTNDAVDATTLAHLLRTNLLAEAWIAPPDAREARRLVRTRAGLVRMRSRVQSQLHALLADLGIIPELTTLFGPAGRRWLAELPMAASARSRLDAGLRLIDAITVEVAHADADLRACFAGDHRVRRLLPIPGVGLVTAATVVAEVWDIQRFPSPERLCSWAGLTPGERTSDAHTRRGHITKQGSRWLRWMLVEAATSAVRDPQLGRFTAQIAQRRGPKIARVALARRLLTLCYYALRDDGGCRAYPAPSRS

SEQ ID NO: 160798 - protein, 342 aa, unidentified
MHVTTVGLDLAKHVFQVHGIDQDGQVLIRRQLRRGELINFFRRLPPCLIGMEACSTAHFWARELAVLGHEVRLMPAAYVKPYIKRGKSDVLDAAGICEAVTRPTMRYVAIKSPEQQAVLMLHRTRELLVRQRTMLVNALRGHLAEYGIIAPQGLPSVPKLREVAEKARGAALPDLAWRCVRLIIAQLKEAHVRITEVEQEILVWHRTNELSQRLETIPGVGIITASALAATITDPNSFRSGRHLAAWIGLVPRQSGSGGKVRLGHISKQGDRYLRRLLVLGATTLLRHARGKASPAAAWINMLLARRPAGIVKIAIANKLARVAWAVLQGNQRYRAPTAAAA

SEQ ID NO: 160799 - protein, 342 aa, unidentified
MEMVAIIGVDLAKRSFQVHGATAGGDVLFRKRLSRAQVVPFFAQQPNCTVAMEACATAHDWGRQIRALGHEVKLIPPIYVKPFVKRHKNDAADAEAIAEAASRPTMRTVAVKTHEQQSRAVLFRTRDLLLRQRTQLINALRAHLAEFGRVAPKTPANIKRLKEILEDPENGLPQVVTDVGSIYLGQIATLTEQIGRLEKQVRIEATRDDDARRLQTMPGIGPITAMAVSAFAPPMEIFRRGRDFAAWVGLVPKQHSTGGKQKLGRTSKMGQRDIRRLLVIGAMSVVKVAVHKGAPEGSWLQRMLARKPRMVVAIALANKMARRLWAMLVKHEDYRDPAIAAA

SEQ ID NO: 160800 - protein, 341 aa, unidentified
MKSIYYVGLDVHKKSISYCVKKLSGEVVDRGSVAATRPALDGWVETLPSPWQGALEATLFSAWIYDHLRPYADDLAMAHPAMLEAITRAKKKSDRSDAEKICDLLRCDLLPRCWAAPAWIRDLRRVLRYRNALVRQAVRAQNRISGLLMECGEEHVKSKLHGKRYFYSLLDSLAHTPESAIELLAYSRGMYELFVELETSLRRGLLRHPRLEERVALLRTIPGVGEVTALSWTLEIGEVERFSSIGRAVSYCGLSARQDESAGKSKRGPLSKQRNAHLQTILIEAAKLAPRYNPQLKAVHEKALGSGSRNRATVAVGRKLIAFLMAVDRSGRPFTPRTKAA

SEQ ID NO: 160801 - protein, 351 aa, unidentified
MENPTTIAVDLSKSVFEIAVERQGRICQRKRLSRGQMITFLSQCAKATVLMETCGTSHYWGRKAQEFGHTVKLLPAQRVAKNRIGNKTDRRDTGAILRSGTDERVVPVPVKSVEQQTICALHRVRAALTKTRTARLNTVRGLLREFGVTIAEGAERVQPALVEALSKAPSPVPEPLHAALVSMMAEARELDERSGQVEKQLKALARTVPLVERLETIPGVGVLNATALSAMVGNFPRFKSGRRFASSLGLTPKESSSGKRRWLGSISKAGDPYLRTLLIGGARSMILAAHRTKRPHRLQEWALEVEKRRGRNRAAVAVANKLARIIWAVATRGEPFKARFDVPIVPTNVPA

SEQ ID NO: 160802 - protein, 357 aa, unidentified
MKSQEIKYVGIDCGKKTLEVIRIGDNSLHQRQQFSTTEIGISKLINWLNPNDVVGLEAGSQSFRIAKSILNKGIQVIVLNPGDLATIYQSLKKTDKEDSLKIARLIQRFPIEELPTVPIPNDEEEDNRRLCTEQENWTRQLTQSKNLLHSLFTQAGLTHITKKHLRTKANREISVALLPSRYQKEAERILKVLDLVEQNLKLIEEEIKEALKKNKAYAQTIMSMPGIGMITSLAIMSYMGNCKRFSSAKQAAYYVGLVPRVDISGDSAYYGRIVNRGCHSIRRVIVQAAWSLVRCQYGGKIKEFYQRLYPKKGAKKSIIATSRKMIEILYTMIKRVELFDSMPEKVLNRKLTQYGLM

SEQ ID NO: 160803 - protein, 395 aa, unidentified
MYFLGIDIGKRTHVASIMNEEGKVLLKGFSFPNTTEGAESLIERMVDYSGAPSDFVIRMEATGHYWLSIFSYLHESDYLIHVVNPLQTDGWRKGTEIRKRKNDIIDSVLIADLMRYGSFVETVLSDENVFSLKQLSRYRTYLVGTASDFKRKIIAVLDQVFPEYATIFTKQGVFGKASKELLLAFSAPIDLENISSETLAQYLAELSRNRIKAEKADQLKQAASNSFGVKFAQEAFTFQLRSMIEQLKFIESQIKETEREIKHIMDTLNSVILTIPGIGPINGATILGEIGDIQKFSNPKKLVAYAGIDASVTQSGQYEATHNVMSKRGSPYLRKALFSAALVASQCDPVFSAFYQKKVSEGKHHLTALGAVSRKLCYVIHAILTKNEPYIIVSD

SEQ ID NO: 160804 - protein, 323 aa, unidentified
MFYLGVDVAKKKLDCMLLDSSSGKMKSKAVDNTAAGFVKLLEWLDKQKAAKSHVVMEPTGMYHEGAALALADAGFTVSLVNPAQLRAFAQGLGVKTKTDKQDSTVLAKYGATQKPAAWQPPSMSSRRLKALLARRDAVADDLQRERNRQEANDYSLAPEAVRDSITQSIAFLEAELKRLEKMIASHIDDDPDLRVKKDLLETIPGVGPRVATHMTTLFAGRTFESAEQLAAYLGLVPVEWQSGTSVRGRPRMSKAGPAHLRKVLYMPAVVARRCNPHIKALNERLLAKGKSKMAAIGAAMRKLAHLCFGVVHTAKPYDPKFAM

SEQ ID NO: 160805 - protein, 333 aa, unidentified
MIGESGKRQGSHVVETNGQALVEQLKTITGKRHVVFEEGTQSRWLYEILSPHAEEIVVAMVSESRGQKSDERDAFRLAEQLRTGAIKTRVFKEVGEYKTLGELGRTHAMIVQDVVRVQNRIKALLRSRGVAVAGKSVYSEQGRGEFLEKLPNASRAAATMLYAQYDAVEAVRRRAEKGLVAEAHRHPMSRVLESCPGLGPIRVAQMMPIVVSPARFRTKRQFWSYCGLGIVMRSTSDWIQNKEGGWRRAEVQKTRGLNLNHNRTLKNVFKGAATTVITQLPNEPLQQDYQRLIDAGTKPNLAKLTIARKIAAIALSMWKSKEKYDLTKHRKQG

SEQ ID NO: 160806 - protein, 341 aa, unidentified
MADVRVIGLDIAKSVFQLHGVDDAGATVLQKRLTRARLLPFFEKLPPCLVGIEACATSHFWARELAKLGHEVKLMPAQYVKPYVKRQKNDMADAEAIAEAVTRPSMRFVGPKSPSEQSAMMLHKVRLMLTRQLVMITNATRAHLAEFGIIAPVGRGGIDRLIAIIDDEADERVPVSARHCLQMLVAQLKLVKLQILDNDRQVLALARSTELGRRLMEVPGIGPLVASALVACVPDPSMFRCGRNMAAWLGIVPKQNSSGGKERLGSITKAGNRYLRQMLFAGAMAVIRRAMQGTRRTWLIRLLERRKPKVAAMALANKNARIAWAMMMSGEGYREPMAIAA

SEQ ID NO: 160807 - protein, 339 aa, unidentified
MNATTKAVFGVDVAKLVFQIHTVVQATGEVISKQIKRAAFLEYFANLAPCLIGMEACGGSQHWARRLKEMGHEVKLMAGKQVKAFVSGNKNDVADARAIWLAVQQSAIRPVAIKTEAQQAVLAMHRMRQQLVKFRTAQSNNLRGLMGEYGEVMKIGFKALNEAMPGVLARLADRLPAPLIDTWREQWAMISTLDAQIQQIERRLQEWMRLDPASKAIEAIPGVGLLTATAAVATMGDPKAFQSGREFAAWLGLVPAQTGTGGRVRLLGISKRGDTYLRTLLIHGARAVLLHSKQKSKWVEELGKRRPPNVVVVALANKMARTIWTMLAHDRAYDRDYAR

SEQ ID NO: 160808 - protein, 362 aa, unidentified
MNSNNNQNIAGRALVETGVTIKVGLDVHAVKIAVCVQIDGATAQPAQLMASEHLLPWLAKLGAKHPGGNIVSCYEAGPLGYSLHRELTAMNITNYVVAPQRLDDRGKRQKTDRLDARALLERLDRYVRGNRHALAIVRVPTPEQEQARARVRLREQLAATRRQHEARGRSVLLAQGIRVQGPWWRPARWPKIAAALPRWLKELVGVWQQLALSADTQERAVRAELEAVAPAVLPRGIGALTWTILCREILDWSRFQNRRQVASYTGLCPGISQSGGKSRDGCINRCGNRAIRHALLELVWRLVRWQPQYPPVRALVDGALSARQRRKQAVAAARRLAIDLWRLATGQCTPQQLQLDAAFVPA

SEQ ID NO: 160809 - protein, 340 aa, unidentified
MNTTTYGLDIAKQVFQLYWVELETGQIFNRRFSRDQLIRFLATRAAGRVALEACGGAHWWARKLTQLGHEAVLIHPSYVRPFVQTNKTDAADARAICMAAQQPGMRTVAAKTEGQQAILGLHRIRSGLIDSRTRDINQIRGLLSEYGLSFKRGRRSVMKELQVRIAEIEMSVPGLIWQSIQRQISRLGELENDIAKLDLAISQWMKGSPEALRVEAMAGVGPLTATALVAVMGDPGTFRSGRAFAASLGLVPRQTGTGGKVRLGGISKRGDPYLRKLLVHGARVVVTCAKERPQWIEELLKRRPVNVVIVALANKMARIAWALLAHGKQYEHDHVSVRPA

SEQ ID NO: 160810 - protein, 348 aa, unidentified
MTTMTERRTRVTGGVDTHRDLHVVCALDERGAELGVESFPTTPTGYRRALRWLRRFGEVERVGVEGTGSYGAGLTRYLHAEGIEVIEISCPNRQRRRSHGKSDPVDAVAAAKAVFSGEATIEPKTRTGSVEAIRALRTADRSARNARIKALNQMRALLLTGPEELREQFRDTTPWRMVRTAARLRPGDPTTAVGATKFTLRVLARRVLELEAEMKELKAILKPLVAATAPELIARHGVGTQTAGALLVAAGDNPERLRDERAFAHYCGVSPIDASSGTVVRKRLNRGGNRFANEALWRIVMVRLVSDPTTQAYFERRIKEGLSKREAIRCLKRYVARELYPLLAPNAP

SEQ ID NO: 160811 - protein, 400 aa, unidentified
MDLDTSRTPVGIDLAKDSFAAAVSGGDTEVVRAFPLTREGLADLIRFLEPFGPFPEAFVFGLEASGPYTEPLLSWLLQRNAKVYQLNPLLISRFRRAQSLRRTKTDAIDARTILHFIGQLPPSVQPCEPGDDLQALAAEYEQITQQVARLKTQIRQQVHALFPELASSSSLFSHRILRLLLTFPSAQAIARATPAQLEAAWANLSSGRRSRFTAQLLHDSACASIGFSTPQREAVLQSKIRQLQHFVQESTTMRNTLIRAVRAAHPAAWRVLLSIPGLGQITAALFLAQVRSLSRFPSHRQLAAFIGIDPTTYESGQFKAQGHISKRGSPHLRRTLYLMAQSVARYSNTFRLYMAQLRDRGKAYRVAVIACASKLLRVIMALNRSLTLFVDSSLQEVSHS

SEQ ID NO: 160812 - protein, 424 aa, unidentified
MKNTQNEKILQIKNDTLVVGVDIAKRFHFARAFDYRGIELGNLLRFENSAQGFEAFDAWLEKIKRENRMTEAIVGFEPTGHYWFNLGDHLITCGHKLAIVNPFHVKCARELDDNSPSKSDRKDPKTIAMLVKDGRYRDVYIPEGFYQELRELVCERERLQAQLSSLKNQIVRWLDIYFPEFTTVFKDWSKQSSWLALRHFSTPQRVVDAGAQEILQTWREEMKRPSLKRAEKLYQVAKDSVGRKEGTMAATSSLQFMLTQYELITMRLEQLRGEMEACLHQIPNASHLLEIKGMGVVAAAIIVSEIGDISRFTDPRQLIKYAGLNLRENSSGMHKGKTTISKRGRRRLRHGLFQAMIPILATNLEFRALHKRNITRLENPLSKMESLTALCGKLLRVTFALLTKDLPYDPEKLAINKSHLAQAA

SEQ ID NO: 160813 - protein, 354 aa, unidentified
MSQKPHTAIAVVGIDIGKNSFHVVGLDQRGAIVLRQKWSRGQVEARFANMPPCLIGMEACVGAHHLSRKLKGFGHDARLMPAKYVRPYSKGQKNDFRDAEAIAEAVQRPTMKFVATKTGDQLDLQALHRVRERLVSQRTGIINQIRAFLLERGVAVRQGLRFLRAELPHILATPPDVLSPRMVRVIEGLAGDWRRLDERVESLSHEIEAVARQDAGCERLMSVPGIGPIISSAMVAAIGTGDGFSKGRDFAAWLGLVPKQMSTGDRTILGKISKRGNRYLRVLFVQAAWVVLIKPKSWERHGLKPWIEAAKKRLHRNVLAIALANKLARIAWSVLARDRAFEVSKLDETAAQPA

SEQ ID NO: 160814 - protein, 340 aa, unidentified
MSEITFYTVDLAKRVFQVHGFTGHARRVSARRLSRARFMRFFECEAVAGVPVIMEACATSHYWGRWLAARGYQPVLLPAHRVRAMSPGNKTDAVDADALALAWCCGRVKAVAVKSEAQQTLQFLHRLRERRVRTRTAVINQLRALLRERGSVAARGSAALRRVLAEQLDPVAGLDPTTRRIAEELREEWRTLDAGIQRIETELRACYRDDEACQRLGEIPGIGLITATALVAAIADPQVFRRGRSMAVWLGLTPREHSSGDTRRLGPITKRGDTELRRLLIHGARAVVTRAATRDDATGRWIQRLVARRGHNRAVVALANKNARIAWALLAHGTRYRAVS

SEQ ID NO: 160815 - protein, 364 aa, unidentified
MLIIGCDYHPGFQQIAFVDSETGELSERRLAHREEAEQFYREMKRQNRCARVGMESSGHSRWFERLLHELGFELWIGDPAEIRTKRVRKQKTDRQDAQLLLRLMLEGRFPRVWVPDAANRDLRQLLWHRHRLVQMRTRVMNQLHVVPLNEGLRRKKALWRPAGRKELESIALAPWASRRRQDLLDVLDQLTPKIQELTRALEEEVEKRPVTRLLMTHPGVGPLTALAYELVIGTPGRFHCGKQLASYVGLVPEEKSSGDRRRLGHISKQGNVLLRFLLVEAAQVTVRSHPAWRSKFFHLAMRRGRKIAKVAMARKLAVHLYWMWRQGCDYGQMQKLGSHAGEPGNPDGVQPITDVMIGYPAPSK

SEQ ID NO: 160816 - protein, 356 aa, unidentified
MERYIGLDSHGTSCTFGVVGPSGRKLRHDVVETNGKALVSYLRSIPGRKHLCLEEGTQSAWLYEILSPHVEEIVVAGIRESRGQKSDVLDAFQRAEELRTRAIKKPVFKAPRLYSRLREVGRVHSMLVRDVVRVQARLKAMYRARGVGTPGKSVYGPRAREQWLRQLPVSSRWATEKLHEQYDQLLDLKREAEQELVVEARKHRISRVLATAPGLGPIRVARLLPVVITPHRFRTRSQFWAYCGLGIVMRSSSDWVQTPNGGWMRAQVSRTRGLNRNHNSSLKNIFKGAATTVVTRLPTDPLCEHYVQLTSAGTKPNLAKLTIARRVAAIVLRMWKDEEEYDPGKLKQTIVAPAVR

SEQ ID NO: 160817 - protein, 323 aa, unidentified
MIEQRIQTTRERFAALFGDRPKARILIEASTESEWTARCLEQLGHEVIVADPNYAPMYAQRSRKVKTDRRDARALAEACRLGAYRPAHRTSEVQWHVRAQVAVREALVQTRSKYISLMGALLRRDGIHLASGGAETFASRIAAVSLPDRLQHETAPLLAMLTSLNKRIRIADAQIEHLVESDPRTQRLCTVPGVGPVTAATFVATIDHVDRFAAAHQVEAYLGLVPRELSSAERRCRGRITKAGNGRARWLLVEAAWSILRYNKPETLALRLWANRIATRRGKSRAAVALARRLAGILFAMLRDGTVYQPQQLGAGAERKPAA

SEQ ID NO: 160818 - protein, 387 aa, unidentified
MQPAHTQDLTLDDQTLTASFELASKHWKVGLQDGMHRSPSVHTTEQEGAEDRLAEAIALIETTRQEWRLAPSSRVVIVYEAGQDGFWICRALQKQGYEIVIVDPASIPVERQARRAKTDRLDAIRLLCCLRGWLRGERDRLHAVRVPEVEAEEMRHLVRDRGQLQKEVGQHRDRIRKLLRTVGCWVQVGPAFAAQLERGEVVCHDGTALPRCLRQRLMRECERLDLVTRQLKELEATLPEQLPDATAQSVAALKRLRGIGQVGAHRLVLELFWRRFNNARQVGSCVGLVPQPYDSGQSRVDQGISKQGNRRVRALLIEMAWMWLRYQPDSALAQWFMRRTATGTGDPSAGKRGKRVAIVAVARKLVIALWRYLKDGVVPDGAELKFG

SEQ ID NO: 160819 - protein, 346 aa, unidentified
MSRVPDFYVGIDFHQKFSTVCVMDSAGKIVFQQNCDSTAEYIHKFVHWHLETQEIHLCAAVEACGGAAKLAEDLRSHGWEINLAHASTVARLSKNLDKSDKQDAQVLADLVRVGYLPCVYLAPERQRQLRSLIRYRQQLAKQRGQMKLRIRGLMRESHLKISSASAWTLTWIAELRERISELGEERAWICEQQLEELKHVHKRLVPAEKRLQLAVAKAPGSDQLLEQPGIGLVTAAMLLAEIGDFTRFRNGKQLSRYCGLAPVNCSSGEHERQSGIGKACNGDLRRVLIEASHRLSRYVPRWREMKKHLLRQGKKRSVATVAVANRWLRRLHYEMTCPVAHEEIAA

SEQ ID NO: 160820 - protein, 324 aa, unidentified
MSLFVGLDLHKAYSEFAVMDIFGNVLRQGRVENTLDKMKEFSESVPERSSMVIESSSTWYWAHRLLSERHDVTLSNPIKNKAIASAKVKTDKIDSTTLANLLRGGWAAECYVPSKETMEFRELVRFRANLVRQRTRMKNRIHAYLLMNNISIDAGPFTKGFVEKVRGIDDARVQSYIDGLNREIREASMTIRQKAGSNEDANLLMTIPGISYYSALLIVSEIAEIGRFEDSSSLVGYSGLAPSTHSSGGKTHHGPITKTGSRYLRWIMGQCTRAHMRVEPEGTVANFYARIARKKGDQKAIVAASAKLLKIVFWVLKEKRAYHS

SEQ ID NO: 160821 - protein, 465 aa, unidentified
MARKSKNVKSKDHKRLPRSLKTIYANAAGIDLGSRERWVCGPPREDGTPNVERFGTTTPELFRLAYWLKEQGVNTVAMESTGVYWIPLFEILDSRGLEVLLVNARHISNVPSRKTDMLDCQWIQLLHACGLLRGSFRPSDDICWLRALIRERNTMVEQRSDWVRRMQKALDQMNVCVHHAVSDITGVTGMAIIRAIVEGERDPLALARLRDARCRKSEKQIAEELTGNWRPEHLFNLRQALKMYHQLCAVIEDYDAEILTYITKHQPKDAASHPAPAHSSKSKARALAKRGQEPLRQALYGFSGFDLTTIDGIGVDTASVILSELGLDFSMFPDESHFVSYLRLAPNLSISAGKKVPNKFKPTTCTRVSTALRMAALTLRHSKSALGGLYRRIAWRKGASVAIFATARKLAQLIYRLVRYGQAYLDTATEAYDARFNQRRLRFYTKALKEMGYTLQPLTENALTT

SEQ ID NO: 160822 - protein, 360 aa, unidentified
MQTKVNEKLFDGQSIYVGIDCHKKNWTVTILGEQYEHKTMSQNPDPDILASYLRRNFPGAVYNAVYEAGFNGFYSCRRLRELGINCNVIHAADVPTRQKEKIQKMDPVDSRKLARSLRSKEFETIHVPEPSLEADRALVRQRFRIMKDVTRTKARVRSLLFQFNISVPDRFTLGQARSWSKVYINWLKELQIVHESLKQTLDNYIRIGELQRKELLSVNKQVRSLSQTGAYRSNYNILISIPGIGFLTAMTFLVQIGDIKRFERLDDLCDYIGLVPMMHGSGDKMHIGKLINRGRKELKIMIIEAAWEAVRLDPTLMARFNELTRRMNKNKAIIRIARKLVSRMRYVLMAQEPYKLGITE

SEQ ID NO: 160823 - protein, 342 aa, unidentified
MQITTIGIDLAKTVFQVHAVDADGATVVRKRLRRSEVLSFVSGLEPCLIGMEACATSHYWGRELAKFGHTVKLMPPAYVKPYVKRGKNDATDAEAICEAVSRPNMRFVPVKSADQQAVLMLHRTRALLIRQQTMLANAFRAHLAEFGIVVAQGIRHVRALIEKVFGEDTVDLPALARTALRPLVAQLMELRLQIKTIEKELLAWHRTSQQSRRLETIPGVGFITATAIAATVTDPSHFRSGREFSAWLGLTPRQDSSGGKDRLGRVSKMGNGYLRSLIVVGATAMIRYAREKGPVSARWINVLLEKKPARLVSVAVANKTARIAWALLVRKENYRVSVPVAA

SEQ ID NO: 160824 - protein, 401 aa, unidentified
MRKVIMIGCDLHDGSMLLRVAVDRAGAETLQVKNARQGRQAMIAELQRRAQALGGARIAFAYEASGQGFGLYDELTAAGIECYVLAPTKIARSQRQRSQKTDERDAQQLLELLRGYILAGNRLPTVWIPSAQTRDDRELVRMRLDVGEKISALKAQVQSLLKRYQLRRPEETGKGWTRRFWAWLRGELAESSRSPLGPGGKAALASLLRQLPWLEAEQVRLDEQVLLLAWSPRYAAAIAEITKLCGVGVLTALVFLSEMGELGRFANRRQIGAYLGLVPSSQESGEATDHKGHITHQGSSRVRKVLCQATWARVRHDPQEKAAYERIKAKNPKHRKIAVVASMRRLAVRMWYRGLAASAAWPFGFPAMAAGNGGKQAVPASSRGRTQQNGRIGFSEEWQGK

SEQ ID NO: 160825 - protein, 262 aa, unidentified
MEKIGIDVHKVATQVCILTDAGEYVEFRIRTERDALTKAFASRARARILLEAATESEWVARHLEALGHEVIVADPNFAPMYASRSRKVKTDKRDARAPCEACHLGAYRAVHRVSDASRMLRKQLAGRAALVKTRSRMISLCRALLRQEGIRVPSGGAVSFPKRVRTLELDAELKRMAEPLLQTHEHVCEQIKHLDALIAEAVEHDERAKRLTTVPSIGPVTALSFVALIDKIERFSSSAKLCSYLGLVPRSVNPSSANLLDE

SEQ ID NO: 160826 - protein, 378 aa, unidentified
MKRVRFVGLDVHAETIAVAVAEKDEEVRSLGVIPNRGESIRKLVKKLGPAEELRVCYEAGPTGYVLYWQLTALGAPCEVVAPTLVPVKSGERVKTDRRDALKLARSYRSGDLTPVWVPDAAHEALRDLVRAREAAKKDQLRARNRLSKFLLRHGKRPPAGVKSSWTGNYLLWVKQEVHFEQFAQEFTLLDYWHEVEHAAGRVERLDRAVEEAVKSAPPQMRAVIEGLQALRGIAQVSAVTIVAELGQISRFARARQLMGYSGAVSSEDSSGERVRRGAITKTGNAHLRRIVMEAAWSYRHRPAVSRALRQRQEVVSEEVKEIAWKAPHRLHTRYRKLTARGKNKGPVITAIGRELLGFIWAMGVKVEGAQKEPLPRAA

SEQ ID NO: 160827 - protein, 322 aa, unidentified
MAMLSFAGIDVSKDRLDVMVLPEEQCSSVSNDPTGWAKLVEQLRGSSIAAIGLEASGGYERGVMRSLLAAGMSVRQVNPFKLRQFAKASGVLAKNDPLDARMIASFVAIMPTRPAQPRAPALERLVEMLAVRRQLSAEKVAAENASRLLENAMLQRLSRRRIARLAADIDMLDERLVEIVVADAALAHRYRLLTSMPGVGPVLACTLIALLPELGRMSRKQVAALVGVAPYAFESGKLKGKRCVWGGRAPIRHVLFMAAMSASNWNPLLKRFHDRLAATGKLPKVVIVAVMRKMITTLNAMVRDDVVWADRHRGRHIAPTAR

SEQ ID NO: 160828 - protein, 366 aa, unidentified
MQKISTMRTGGKKIFKGQLTIGLDLGDRFSCYCVLDEAAEILLEQKLATTPEAMKQTFGRMPRSRIAMETGTHSPWVSRLLTALGHEVIVAHAQKVRLIVKSRRKDDRLDARTLARLARIDPELLSPVQHRSAQAQLHLTEIRARAVLVSARTALVNAARGLVKSYGERLRKCGTFQFSQETATGLSAGLREALQPLLLEVESLNERIKEYDRRIGRMAKERYSETALLKQVKGVGDLIATTYVLTIEDPHRFRKSRDAGCFVGLQPGRRNSGESEPQMHISKEGDEYLRTLLVQGAHYILGPFGEDSDLRRWGQKLAARGGKNGKKRAVVAVARKLAVLLHRLWVSGEVYEPLRNSQKAMNAVAA

SEQ ID NO: 160829 - protein, 310 aa, unidentified
MPLYVGLDVSRDALDLARSDGHAARLCHDDDGLAALVALCDGATLVVIEATGGVERAAAAELVGAGVPVAVVNPRQVRDFARATGQLAKTDALDAAVLARFAEAVGPEARPLPDAEQRALAALVARRRQLTEMLTAERSRLRTAEPAVRGSVEAVIAFLEGQKADADRALAEAVEASAAWRERDDLLRSVPGVGRVLSATLLADLPELGRLTGKQAAALVGVAPLARDSGRLRGHRTTWGGRAPVRRALYMASLSASRFNPALRSFYERLLARGKARKVALVAVMRKLLVLLNAVVRDGRRWDENVAAAA

SEQ ID NO: 160830 - protein, 342 aa, unidentified
MEVSIVGLDLAKHVFQLHGADARGRPVLRRKLRRTQMLRFFQALPPCRVAMEAGASAHHWARELRALGHAPVLIPPQFVRPFVKTNKSDAADAEAIVEAALRPTMRFAAVKSAEQQSVLTLHRARELLVRQRTMLINAIRSLCGEFGLTVAQGAPNACKLVAIIRDIDDPRLPDLGRTALKTLADHLDGLTVRIAEIEQRIGIWHRSQAASRRLAAVPGIGPITASAIVASVGEAAPFRSARQFAAWLGLVPQQRSSGGKERLGSISKRGDGYLRRLLIHGARVVLRWRRARPGTQSAWLQKLLERRHVNVVTVAMANKMARVVWALLTRGETYRQGTLSAA

SEQ ID NO: 160831 - protein, 340 aa, unidentified
MRVAGIDTHKATLAACCVDDIGQALAEQTFPNDPAGFEALLAWLAGLEVDRVGLEGSAGYGAAAARFLLDQRVAAVEVPPQLSHRERSRTRRAGKSDPGDALAIARVTLREPELPPVRTADATRELGLLVEAREDLVAEATRIRNRLHADLVVLVPGYSASAANLVAEVHRKTAGRLLRRLPGIQAELARDRLARLARLTVEVDGLEDRIAGLVADHPLRSLHGAGPLVTARLVAEVGDVHRFRSADAFAMLAGVAPIPASSGQVNRMRLNRGGNRQLNRALHTIAVSQARTYPPAQAFIARKRAEGKSWREALRALKRHLARTVFRILSASAQPSFSGS

SEQ ID NO: 160832 - protein, 416 aa, unidentified
MNAVGIDVSSRKSTVAVLRPLGEVVCLPFDVTHDIAGLASLAEKLKALDGETRVVMEHTGRYYEAVAKALHEAGLFVCAVNPLLIKEYGANSLRRVKTDKADAVKIARYALDNWADLRDFTPMDAIRYDLKTLNRQFQLASKQRTASANNLIALLEQSFPGIRKCFDSPVRSDGTQKWVDFAHSFWHVDCVRKQPFPAFCERYRKWCKRHAYLFKLSNAEEVYALAKRAVVLTPKSKVVKVLVQEAANQLISISRSVEVYRAEMDRLAAMLPEYPVVMAMYGVGKSYGPQLMAEIGDVRRFERKQALVAFAGIDPMPNQSGDKNVRSNKSSKRGSPYLRKTLFNVIRTYLQCAPQDEPVFQFLNRKRAEGKPFYVYMLAAANKFLRRYYAKLRDYFASPDTLQSVDPIPTTLKASL

SEQ ID NO: 160833 - protein, 341 aa, unidentified
MLTESTDDEQIIERVAALDIGKAEVVCCVRLPSPVAGKRRLQEVTTHSTMTGSLTELANRLVELGVERVVMEATSDYWRPPFYLFEAHGLEPWLVNAKDVRHLPGRPKTDVLDAVWLCKVAERQMLRPSFVPPRPIRRLRDLTRYRIDLVGARTAEKNRVEKLLEDACIKLSVVASDIFGVSGREMMAALIGGERDPKVLAQMARSRMRAKIPQLEEAFTEIGVDMSRFPTPGHLASWAKFAPGVSSSAGKDKGNGFTGHGNRYLAKALGDAAAAVGKTNTFLGERVREALVPSACSAGRATSSPDRSCSSQGCRCCPRSNTTRTTRWSRSTCSSWGRVSA

SEQ ID NO: 160834 - protein, 426 aa, unidentified
MEIRFPRCAGIDVHKRTAVACRIVLTDDGEWLRETRTYGTTTEDLLRLSDWLAAGDCTHVGLESTGEFWKPIFNILEGSFAVWLLNAQRVRAIPGRKTDVKDAEWIAELLRHGLVEPSFIPPRHQRELRELTRQRTNFVRGRATLVNRVQKVLESTNLKITSVISNVAGTSGRAILAALLGGEEDVAVLADLAKGKLRKKRDQLRQALSGRLAPHHRFLLIELLAQIDGLDETIVRFDAEIARLCTVNAEEDVIALLDTIPGIGRAMAELLVAEIGVDMGKFPTADHLAAWAGVAPGSNESAGRQRSGRTRKGNAWLKTALVQAAHGAARMRGTALAAQYRRVAARRGARRAIMAVAHRLLIIAYHVIARREPYRELGPDYLEGRRPAAVVDRLVQQLRQLGVEVTVMAGVPDGGPLAGGVPSATA

SEQ ID NO: 160835 - protein, 339 aa, unidentified
MNSMAVGVDIAKRVFQVHYVDRGTGEIVNKAIKREKFLEHFANRAACLIGMEACGGAHHWARQLTQTGHEVRLMPAEFVKAFNIRNKNDAADARAIWLAVQQPGKPVAVKTEMQQAMLALHRMREQLVKFRTMQINGLRGLLTEYGEVMSKGRAKLDTEIPAALGRIAERLPAALIDTLREQWNGLAKLDEQIAEIERRMREWKKEDKAVKAISEIPGVGLLTATAAVAMMGDPKAFSSGREFAAWAGLVPKQTGSGGKVNLHGISKRGDTYLRTLLIHGARSVLTHAKEPGEWVEQMKMRRPPNVVIVALANKMARTIWAVLAHERPYRKDYMSVKPA

SEQ ID NO: 160836 - protein, 346 aa, unidentified
MNSTYYIGFDVHKKHINFCSKTAQGEVLAEGRLVAERSALRSWAATQTNPWYGAMEATLFSGWIFDTLQPYAAKLEMAHPAMLKAIACAKKKNDRMDARTIADLLRCNLLPACHVAAPQIRELRRLLRYRQLVVRESVRMQNKMAGLLMECGAPFVKHKLHGKKYFSRLLENLQEVPDSVKDLLGLSRGAYEMFQAVQKRLVEQLLSHPQLRQRVERLSSIAGVGEITALTWALEIGDPARFSSCAKVISYCGLTAALRSSADQQQRGPLSKQRNHWLQTALIEAAKLAPRWNPQLAALHARELERGHRNRATLAVARKLAAYLLAVDKSGLPFQSRPVSLLPATG

SEQ ID NO: 160837 - protein, 345 aa, unidentified
MNMNAVGIDVSKGKSMVAILRPYGEIVSTPFEVKHTVSGIRSLIEHIQAIDGESRIVMEHTGRYYEPIVRELSQADLFVSAVNPKLIKDFGDNSLRKVKSDKADALKIARYTLDSWTELRQYSFMDEIRNQLKIMNRQFDFYMKHKTAMKNNLIGILDQTYPGANTYFDSPAREDGSQKWVDFATTYWHVDCVRKLSLNAFVDHYQKWCKRRKYNFSQSKAVEIYEASKEIVSVLPKDDLTKLIVKQAVEQLNMASQTVEQLRAMMNEAASKLPEYPIVMAMKGVGRSLGPQLMAEIGDVSRFTHKGAITAFAGVDPGVNESGSYEQKSVPASKRGSGTLRKTLF

SEQ ID NO: 160838 - protein, 313 aa, unidentified
MSLEEQRIVVGIDVSKARLDIAAKGEEWPVNNDLDGIGKLISLLQTLNPGLTVVESTGGLERLVVAELWAAGLPVALVNPRRVREFGKSIGLLAKTDRIDARLLVRFGEAVKPDPVCLPSEEEQKLSALMTRRRQVIEMLTMEKNHLCSSHPAAKESITKIKTVLQQELDELDHQIENFIDQFPSFKKKDEILRSTPGVGKVTAAILLSDLPELGKMDRKKIAALVGVAPFNNDSGRFRGKRRIKGGRPSVRTVLYMATLSATKFNPVIRTFYEHLVLQGKAKKVAIVACMRKMLIFLNSMIRDMQPWRSSIA

SEQ ID NO: 160839 - protein, 443 aa, unidentified
MSRKEKTHLRGERGQNFADKIRGLNPEQFLCVSLDISKYFHVVMIHKGLGEIVTPTFEIDIFQTGFTKLCQAIDEALVQTEASLVLVGMEPTSHYFENLARHLDEQEQPVTLINSYAVSQNRKQQMMRREKTDPIDVAAIGDLLRRGEGSIFQPLQGIYLELQHLDRVWLGKVKMRTMLKNQIIGHLDRIFPGLVIIGLEATKRYTPLFATDFWNCQTLQHLIRVCPDPRQLAAMSTDDLIAAFHAHHYPMGPKTAAKIITYAQKVLLPDEQVIAIRCELLHHDLILLEAVEQRIAVMEERLVALVAQTPYQIWTNFKGFSDIQVAHLAAAIGDPSHYTHAKKVFRRSGLVSGRNDSGVQQKRGKGNRILKTGDVYLRRALLSAISTFLLHQPVLFRYYTKLKLSKPDPVARIATARRANGMLWAALRDQYSTTLVYKRGAQM

SEQ ID NO: 160840 - protein, 389 aa, unidentified
MKIYVGIDIAKLNHFAAAISSDGEIIIEPFKFTNDADGFQLLVSKLESFDKNSIIIGLESTAHYGDNLVRYLVAEFYQVCVLNPIKTCQMRKNNVRKTKTDKVDTYVIAKTLMMQDNLRFVSFFDLDMMDLKALGRFRQKTIKQRTRLKIQLTTYVDQVFPEIQYFFKSGLHQHAVYALLKEAPSPKEIASMHMTHLANLLKVNSHGHFTKEQAKELRVLAQKSVGANDSAISIQITQTIQQIELLDSQLEKIEAEMTDIMKFNDSVIMTIPGIGYINGGMILGEIGDIHRFSNPNKLLAFAGLDPSVYQSGNFQAKTTRMSKRGSRVLRYALVNAAWNVVRNNATFKAYYDAKRAEGRSHYNALGHCAGKLVRVIWKMLTDEVEFNLE

SEQ ID NO: 160841 - protein, 330 aa, unidentified
MNVAGIDVAHKTLGVVLSVDEKAGKAQEFANTASGHQALVKALKAARVERVCLEATGSYHLDLALALDAAGLALMVVNPKAAKRFTEALLTRTKTDAVDAAVLAQFAQRMPFEPWQRPDNQALALRACARRLDALNRAKTEAKNQLHALTQTQTTPEVVLADVRLTITQCEAQIKDLHTWAAGQIQAQAHLKEVFDLLISVKGIATASAIQLMGELLVLPADMRAKQWVALAGLDPRQSVSGTSVHKKPRLSKAGNRYLRLALFMPALSAARHDRHVNGYYRHLIEDRGLKKIQAVCAVMRKLLHAIHGMLKSRQPFDGSRFYTLTETPA

SEQ ID NO: 160842 - protein, 388 aa, unidentified
MNYMGIDISKYKHDCFVLSDFGEAVNEGFSFANDAEGFRKLEQELCLCGRGNVRIGLEATGNYGINLKLFLEKIGFDFMEINPLLIKEYIKSNSLRRTKTDKLDAKAIAGYLLEKGYRPHRTEFYNKFALKQLTRLRSRLVSIRSSYLVRMTNVLDCIFPEFKPLFGNKFSVTALYILAHYPTPEAISNMNSRSYDILRRKSRGSFSMDKFVTLKELARNTVGVYEKCYGVELETLLDLHSQIDCKIDEVEAEISQIVNELNPPTLSVKGIGEISAAVIISEFGDFSRFDSPNQMLSFAGLEPGYFQSGTSEHNGHMVKRGSPYLRNALLTCCRPLRLHNEVFAVYYRKKISEGKHESVALSHMAKKLVRLIFTLETKRIPFDSEKLR

SEQ ID NO: 160843 - protein, 344 aa, unidentified
MSKHSIRAGDVAGLLVRLAQLKEKARGRTGRDFPIIAIQEAGLDGFWIHRVLQSEGIESHVVDAASILTSRRRRRAKTDGIDGETLVRTLLAYKRGEPRVCAMVKAPTPEEEDRRRICRERKTLVGERVEHVNRIKGLLFAQGVSDYEPLKRNRRARLEELKTGDGRPLPAHLKAQISRELDRLELVLPQLKAVEAERDALLKPVSEGCPAPAAMLAQLKGMGPEFTAILWSEGLFRSFSNRRQLAAYAGLAPTPWQSGSVAHEQGVSKAGNPRLRTTMIQLAWLWLRHQPTSALSVWFQERVQSNGGKMRKTTIVALARKLLVALWKYSTSGVVIEGAVMKAI

SEQ ID NO: 160844 - protein, 392 aa, unidentified
MYIVGIDIGKNHHEASIVSPEGKQIGRSLRFATTHKGADSLMSFIFKNIGNSPCVFGMEATGHYWYPIYSFLKAKGYTIYVINPIQSDSLRKMYIRQTKNDSIDSFLIAEVIRFGQFGTTSMADENILAMRQLCRYRDSVISSRTEIKLRIGTIMEQIFPEYEKQFSSLWVSTSMGILEKYLTPENIENAPIDELFEIIKDKSHNRLTRAKAISIKEAAADTFGIKIAQDAFSFQLKQLIDRMNFLDKQIEALDTEIIKYYEQFDCYLHTIPGIGMIGAATILAEIGDISRFKNSSALVAFAGIDPTVRQSGEFNSTHNHMSKRGSPYLRHAIFLAATTCSFHNSPLNAYYKKKRDQGKHHLTATGAVARKLTTVIYAVLRDSKPYEPKKFC

SEQ ID NO: 160845 - protein, 359 aa, unidentified
MGSMLAGVVDFVVGVDTHRDTHTAAVVDARTGGVIDQITVPTDAFGYRRLRSFADQQAPERRVWAIEGTGSYGAGLTTSLLEHGEWVVEIDRPARPARRDGAKSDDLDAVRAAREALSREHLAAPRARGDREALRVLTAARQGAVVARTKAIGQLKALIVNAPQSLRDQLRRGTTDQQLQRCARLRTLPQHSIEHRATIRAIRGTARRALALEAEAAEYETELEQLVVAICPVLLAQPGVGTITAAQFLISWSHAGRIRSEAAFASLAGAAPIPASSGTVTRHRLNRSGDRQLNRALHTVALSRLRIHEPTKAYAARRQAEGKSPREIKRCLKRAIAREVFRLMNTHAAAVTGSLPITA

SEQ ID NO: 160846 - protein, 397 aa, unidentified
MIAVGIDVSKSKSTVAIINADGTKRVTPFEVKHNLPELNALVKYLNDLNENIVILMEHTGHYHYPILKKLNDEGFQVCLVNPYQMKKYGDTELRRTKTDKKDAIRIATYALEKSYQLVPYNSMEQKYEDLRLLSRQYSQRMATLTFNKVHLGNLLDETMPGITSILSLNTRDPDTSLSMLFIKKYKSYDYIRKMGKTKFLESYLKLLKKARNRRADHLGLSIYELATQSITTHGENTYTIMAQTQCLNLVAEAQKAADAIISQMQSIAITIPEYKVLRSMNGVGDRLGPLILAEIGDVRRFHSGKALNAYAGNDAPPYQSGNFESHNRHISKRGNAALRKYCFEVMQALKLLKPQDDPVYLFLVKKEQEGKPYNVAKMAGVNKFLRIYYARAMELEQ

SEQ ID NO: 160847 - protein, 379 aa, unidentified
MEIITRNEKILYVGIDVHKDTYSLCCFDFFRNELSDEMTIKATTKAVIKYLEAIKKKYKEEILFACGYEAGPTGYGLCRGLQKAGYGCVVMAPTTMSNPDGKKRVKTDRIDARAIARILAYKSYSQVHLPSEEMEALKEYTRARDAKKRMFKKAKQELLSFLLRNGKSYPESGNYWTEKFFKWIKTVQFSEKWMQEAFSDYLSEVYSLKDKIKLMDTKIREIAELEIVKDKVDRLICFSGIDVITAVETVVEINDFSRFATAAQFVSYLGLCPGEDSSGKTKNMLPLTKAGNKRVRALFCESAKAIKRTNPYGEKSKRILERQKNASPEIVAYADKATKRIRTKMKHLEERGKNYNVSSAAGARELACFVWGMMNSKIA

SEQ ID NO: 160848 - protein, 394 aa, unidentified
MKLVGIDVGKNSHHFCVMDKETGEFNVAPSSFSNNKEGFDFLINSLKPYSKKSILIGMEDTGHYHVALLKFLLSNGYTVALINPKTTDLTRKMEGGITKNDKLDTITICDVLDTPERKKQYRITKVDRFDLYEQRQLTRHHHNLKEELNVYCNRLQKSIDLVFPEFNTLFSSKYSIVYMNLLKTFGSAEAIASTDIRTIRKCFEIKGKGGRISLTPEKLKECAKNSIGISSEVETIQIKHLVSQIMLIKEQIAEIDKKIEEFSIKNNSPILSIPGISHFSGTSILSELGDIGNYSKPSQIIKFAGVAPYHYESSQYNAQHTAITKKGSKYLRKTLYQIILPVINNNPVFKKYYLLKISQGKGHRCAQGHCIRKLLRIIYHLLETGQSFDPALLR

SEQ ID NO: 160849 - protein, 460 aa, unidentified
MKDHQDPARLAQPARPASEPLRVVHLDAAGIDIGSQKHYVAVPPDRDPEPVRSFGCLTPELQAMARWLVGCGIRTVALEATGVYWIPPMQVLEEYGLEVYLVDARQAKNLPGRKTDVKDCQWLQQLHTHGLLARAFRPADTICVLRSYWRHRKDLVEMAAMQIQLMHKSLEQMNLQLHKVLSDVTGVTGWKILKAILAGERNPVVLAQMKHPLVHSSEDTIAQALTGDWRAEHLFTLRQAMELYEVYQQKITACDEEIQKYMQSLEPRAERKDLEPRGGGRRRKHQVHFDLRAQLYEVTGTDLTCIDGIDALTAQTVVSESGIDMSRFATEKHYSSWLGLCPNHQITGGKVRRRRTRKVRNRAAQALRVAAQSLHRSKSALGAYFRRMRARCGPAKAVTATAHKLAILIYRMLKYGMNYVDQGQEAYEKQYRERTLQMLKRRVKQMGYALVDLRSGEVVS

SEQ ID NO: 160850 - protein, 310 aa, unidentified
MDMITVGIDISKDRLDVAVRPSGEMFVVERKGAGLEVLVERLQALSPHIVALEATGGFETVVTAALAAAGLPVVVVNPAQIRAFAKALGQRAKTDPIDAAVIAHFAEATKPEPRPLPDEATRLLADLVARRRQIIEMMVAERQREKRLSVPRLRKGIARHIKVLENELKSLDDDIGGAVRGSPAWREKENLLESVPGIGPIIARTLIAELPELGQLGRKQIAALAGLAPFTRQSGQWRGRSFIGGGRTAVRTALFMGAMVAKRRNPVLKVFFDRLVAAGKPKMVALVVVRRKLLTILNAILRDNRPWQTA

SEQ ID NO: 160851 - protein, 366 aa, unidentified
MFYLGIDQHARQITISLRGEDGDVLQARQVSTQPEKINAFFRQLTRERLPEGESFVAVLEVCGFNDWLIRMLHAYRCHKVILIQPEERKLRKTDRRDAAALSELLWVNRDRLLQGKPVRGLRQVDIARTTDQENRRLTTLRKEAGQARTRLVNKVRHLLRRHNLQWGMPTKKFPSQSGIAWLKQLALPEIDRLEMDHLLVDLEQIQGRRKELEQVIARRCGVSAEAVLLSSMPGVSYFTAVSLACRVGRVGRFPRGHSLANYWGLTPGCRNSGENNQRLGSITKAGSSMARWLLAQVTIKVLRKDARLREWFKRLKRRRGASIARVAVMRKLATIIWHMLSKRTTYAQCRAVAETGTAEREKQPCG

SEQ ID NO: 160852 - protein, 330 aa, unidentified
MKISNIMGIDVSKNTLDCHLYLQRQQLDAVANSAQGHKQLGKWLKKQCKGNMDGVLVVMEHTGIYTYGLEQYLYKEGIAYVKRPALDIKRSLGMVRGKTDKADARFISKYGWMRKEELTPMKPVSDNLVELQQLMNYRDKLVADRASYQARIKELQGQLGGKLSSKIGESSEYVMDVLTREIKELEEAIKELISQDQSLVTNYELATSVTGIGFATAVHFIIATENFTRFSDARKLICYCGVAPFKHESGSSIRGKTKVSHLANKKLKCLLTMAAICAVRWDPDLKRKYEQKVAEGKPKMSVLNIIRAKLIERLFAVVKRQSKYEIRVAA

SEQ ID NO: 160853 - protein, 431 aa, unidentified
MDDVSRFDQFCKLRREIRGSTKYLIVGIDIAKDKHHAFFGTAKGRALWRRLIFTNDLAGFERLIEQVNTLIAQHKLEQVVFGLEPTSNYHKPLAHWLTGHEYLVVLVAGKAVKDNRELLDGRWDKNDTKDSANVADLISQGKCLFYETPEDEIISLRNLLAVRKQLKKEEHRLRMRIRNGLLAKYFPEMDRHWGKCLEENLAIVRWYLDPRKITETDFNLFVQHVTATDRGLRQVDRLRKIYEAAQHSIGLPVNAAAVYEAKMLVERFKTVREQGLQTMGQIATICRKLPAYKLLLTIPGFGPYIAPLVLSALANPLRFQSRKQVIRLAGLDLNASRSGKKSQESVPVISKKGDADLRYGLYQAALIASYHNDCFRRIYHRMLEGRQGERGIKTKVRVKIAAKMLVIAWTMLKNNASFNAARMAAEPDQQR

SEQ ID NO: 160854 - protein, 383 aa, unidentified
MTDPAQVSSFIPRDYDVFGGLDVDKKSIAVTFTDHGTMRKSLKLPYSATQLLNYTRKHFPGQRVAFVYEAGPTGFGLYDELTAAHHPCLVVSPSMVPTAPGQRVKTNRLDSRKLSEGLRGGQLRSIHVPAESYRELRHLVQLRDTQVAQLKATKCRIKSLLLYEGIAFPAANGKWSGRVLRELAALPCNATVRFKLERLIDALQFHFQSAAVVQKEIRRFCQNDPELRQSISFLASLPGIGSITATHALARLGDWREISNVRQIAGFLGLVSSEHSTGDKENRGPITRSGDSRLRNKLIQCAWVAINKDPDLRAFYRRIYERQPKKVAARKAIVAVARKLTTRMYAVLKEQRPFVIRVDSSIAPLTAEETVSPRVRLDTAQSD

SEQ ID NO: 160855 - protein, 445 aa, unidentified
MLLYLLCDGAVTVPPGLMRRYSMKLTYPICCGVDVHKTFLVATVITSSYEAPKYKQKRFSIHYNQLLLFRQWLIDNNCRDICMESTGKYWIPVWNVLEDSFHVVIANPKWVSAVKGNKDDKKDSKWIGDLFRMGLVPSSYIPEKDIRILREFTRYRSKLVSMRSSEKNRFQNAFTVCNLTLDAVVSDMFGKSATDIENYLLSTDTFDTDRCISLLRGSLKKKSSDVIEAVSGFNMTAEQKERVRIIQGHFADIDRRIAQIDGVIANLTVGYEGAIALLCTVPGIDRRLAITIISEIGTDMSQFGSSKRLCRWAGLTPGRNESAGKKKSVKISRAGVYLKPALVEAAHAAVKSTEKQPYFRNKYERIMKRRGKKRAIIAVARMMLTAIFAMFKTGEVFNPCDLQKFDMPEELKKKQTVSQAKDAIKLLVSLGLISEGSISLDSLAS

SEQ ID NO: 160856 - protein, 402 aa, unidentified
MNFFVGLDWASQAHAVCVLDATGQVRWQGSVPHSAEGWAELLRQLARFGPPASIPIALERPSGLVVDTLLDAGHPVVPIHPNALKASRPRYSAAGGKSDPGDAFILGDLLRTDGHRFRPLQPLADDTRALRALVRSRDDLVVQRVALANQLRALLDRFWPGAAAIFADIDSPIALAFLSRYPTPHSAERLGEKRLARFLGQHAYCGRRPVPELLARLRSAPLSQTGELEAEASGEIVRALVAVLLPLVAQIQQLSAAIAAALPQHSDGPLLQSLPRSGSVNAAQILAELGDDRTRFPTDEQLAAEAGVAPVTRESGKHRAVSFRWACNKRLRQALTTFADNSRHASPWARATYANARRRGCDHPHAIRILARAWVRVLWRCWQDRRPYDVTLHRAAQRVAAA

SEQ ID NO: 160857 - protein, 404 aa, unidentified
MVRYIGMDVHREFAQLAVVEDRLVRDEGRIGVTPEALRQWAAGLRADDQVALEATGNSDAIANLLVPLVARVVVSNPSKTRAIAEAKVKTDKVDARILAQLLAADFLPPVWLPDERTRCLRRQVTRRAHIVRQRTRIKNQVHAILARNLAPTPPVSDLFGTTGRHWLSRQDLPADERAAVQALLRQLDFHGAELNAVDRELAVEAIGDPVVARLMTIPGVDSIAAISIVAAVGDFSRFDDPDKLVSYVGLNPKVRQSGNSAPVHGRISKAGRAQVRGVLVEAAWSACRAPGPLRAFYQRINARRGFQKAVVATARKMTILAWHLATRDEDYAFARPGLVTHKRRKLELAAGAQSRRGNHGQPGAAYNSKQQRSEERAVAEQAERAYQILVAHWQQKKPATRAPA

SEQ ID NO: 160858 - protein, 369 aa, unidentified
MKNNNLSVSGIGESQASIEQNNSRLLKLGLDMHYRQVTVGMQEEAGQIKAVGKMGHEAFSSWVEKKLKEGWEIHSCYEAGASGYWLHRLLMEMGVNNLVVVPKAMDQGAQKQKTDRRDAGQLCDALDRYLRGNHKALSPVAVPTPEQEEKRALIRYHRQIMADRSRYEARGKGLLCAQGIAVQGKWWQAKRWKELNSDPRLKGWMKEQLEGWRSKLLGAEQQQQKLRCRIEALAPAMLPKGVGAYSAVVLEYEMKGLGRFKNPRAVSSYTGLCPGIHSSDGRGKEGSINRCGNAVVRWNLVEMVWRLLKWQPHYEPVRQLAAGLVRSKRAKKRLVVKAARQLAIDLWRLRTGQTTPQKLGLVMQYNPIK

SEQ ID NO: 160859 - protein, 354 aa, unidentified
MVFLIAIGVDIHKETSTFYAIGDDGEPLEEFNRRFRRVRSDEKGYGEVTAFLNGTECEFLMENSTKTHDSYWTLKGFGFDRLYVAHATDLALITRSDKKNDDNDAQKLATYMRVKQQNIDQFRTCYICAPEDMMKRRLCRVAKQEMMEAGKYSRRVRAEFLMFGIHCPYDINTKKAHEWMMEHRDPALAALGRAMEDNRVRLRDLETRIKKEFKGHPVYEKLIKIPQFGPVTAGYLASIIVDIRRFTSAKELVAYLGIVPRQRDSGETVSHCRITKTGDPIARWLLIQAVFRLVSDEESDSELKRFFDEKNGGSIAERKSKGLKPECSRKALVAASNKMCRIIFAILSHDGRGW

SEQ ID NO: 160860 - protein, 397 aa, unidentified
MIGVDPHKGSHTAVALGADEAPLGQVRVRASAAQAQRLLAWAQAWPERTWAVEGAGGLGHLLAQELVAAGERVLDVQPKLAARVRLLAAGAVNKNDPNDARSAAVAALRSPSCLPVRPDDHAAVLKIWAKRYRDLSRARNQVACRLHAALCDLVPGGLSTEICADQAEQILAGAGPCGAVQQARAELVADLRRVDALLRETKKKLAVAVRVSGTSLTELFGVGPVVSATVIGDVRDVSRFGSRDRFAAYNGTAPIEVSSGNRVIHRLSMRGNRRLNHAIHMAAITQIRYKHSEGRAYYDKKIAEGKTPKEALRALKRQISDAIYKHLKADAARAAAAGSQGPGGHAGNDSGASVAGSHPESRLFGQATPGPAPTLLPPAQLQERASSRVNRKTPRTT

SEQ ID NO: 160861 - protein, 343 aa, unidentified
MYYIGLDVHKRTISYCVKDAAGHVHSEGKIGSTRRELDAWIKTLPQLRMIAMEATIFTGWIYDHLLPHAEKVKVAHPLMLRAIAASKKKNDRIDAGKLADCLRCDFLPECHMATREIRDRRRTLRYRNLVIKQMVQMKNRVSGLLMETGVSYNKQRLHKVGYFGELMTTNKEVQQSIRPLLKLSRDMISRSQKLEYALVSSLQRDPLLQERLRRLRTVPGVGPITALTWALEIGDYTRFSSIKQAISYCGLCGEEKSSADKVMRMPISKQRNKHIQRVLIEAAKLAPRQSHELALIHARELERGHRNRATLAVARKMVCYMLAVERRQQDFVPGEEFSRTVAA

SEQ ID NO: 160862 - protein, 349 aa, unidentified
MILVGCDLHTRKQQVAVLDTNTGEFFERELSHDGDAVEQFYAALAPPVTVGIESTGYALWFHAVLQRIGHTLIVGEAAKIRAMVVRKIKTDRRDARHLLDLLQHDRFPTVWIPDPHTRDLRALLKHRLRLVRIRTMIKNGLHAIALNQRLALGPSLWSRRGLAQLHALVLLPHTARRRDDSLELLQWLDRRIDELDVHVAAVVSTDPHARRLMTHPGVGPLTALATVLVLGPVTRFPSSKHVVSYVGLAPAINASADKYRLGHISKQGSALLRWVLGQAAPLATRADGELKRAYFAVCRRRGRPKAKVALARRLLVRLYVMLRDEIDYDEFCRRGRARRHGLVPAPGTE

SEQ ID NO: 160863 - protein, 439 aa, unidentified
MPRYVGLDVHKHFIEAYLIDEQGKQLHRCRVAVTRESIQTFAAKCLQPSDQVVMEATTNTWEVTELILPRVAKVAIANPLKVKAIAEAKTKTDKVDAEVLAQLFRCDFLPEVWIPDKKTRLLREMCAHRAALVADQTRIKNRIQSLLAQRLIPIPVRVLFNGHGRNWLSHLELRTEDRAVIDGYLRILDQIESEEISLQKASTQLSYDNEQIRLLMTLPGVGPAGAQALYAALGDWKRFKDGAHAASYLGLTPSTRQSADHCYHGSITKAGNSLARWLLTQAARQVTPHPGPLGVFFRRIQKRKNYNVAAVATARKLVTIAFLMLKNNEPYRYSLPGPTQRKLSAFRVEATGRRRPKSKLRLPMQRREPGTRVQSIPSLDEVYLSENLPPITKAEALPAGERRMLQRMSIADLPQRLQVVQTRTYECRKTAPAPKTKQL

SEQ ID NO: 160864 - protein, 342 aa, unidentified
MNKVTIIGIDLAKRVFHAHGAAADGSVVFRKRLTRAQVLPFLAGRPRCVVAMEACASAHEWGRAIQELGHDVRLIPPTYVKPYVKRQKNDMADAEAITEAGSRPTMRFVAVKTEEQQARSMVFRTRDLLVRQRTQLINALRGHLAEHGVVAPQGPAHLKTLAAAMDGAGRSLPQLVRDVGGIYLEQIEQLNRRIADLEKVLRREAQFGTETRRLQTMPGIGPITAMAVEAFAPPMATFKRGRDFAAWLGLVPVQHSTGGKQRLGRTSKMGQRDIRRLLIIGAMAVIQWASRREAEAGSWLHRMMERKPLMLVAVALANKMARSIWAMLTKKEDYRNPGNAAA

SEQ ID NO: 160865 - protein, 314 aa, unidentified
MPLFVGIDVAKKHLDLAVRPTQETWQVPYDDQSIQEIVTGLKRLQPTLVVLEATGGLEVPVAAALGVAGLPIAVVNPRQVRDFAKATGRLAKTDRLDAQILAHFAEAVRPQPRPLPDAQSQELAARLTRRQQLVQMLTAEKNRLSSALSPVRPGLQSHIRWLEQELAELDRGLRDTIKESPLWRAKDNLMQGVPGIGPVVSLTLLADLPQLGVLSRQQISALVGVAPLNRDSGAMRGQRGIWGGRARVRAALYMAALVATRYNPTIRDFYQRLLGAGKAKKVALVACMRKLLTILNSMLKHNRPWDPDLAAQNS

SEQ ID NO: 160866 - protein, 430 aa, unidentified
MTENNYISVGIDVGADFSYMSIALPNRTLVGKPFKITHANQNSLLTALERIRETEKHNSLKARVFLESTGVYHYPLFRWFRNEGFDVAVINPLITSSSKNFNVRKVHNDKFDSKKLALLALNPELKISVIPSELVLSIRNLVREYYRLKDCQSAYVNKLTAALKVSFPEYIGVFSKITVKTSLSLLKRYPTPDAVLSARKSTVIKIIKNESCFGDKYAEEKYQKLIQAAESAKIFSCPVSSDAILIRSFISFIKNYEKEMQQLLRTIRQILDEHPEKTFVKQIQLLESIKGCGFLSAVTLMCEIGDFSVFSSPKQLYAYFGLDPEVKQSGKFNGNDVKISKRGSRLARRVLHMMAVNNIAVSKNKVSKNPVMRSFYEKKCQSKPKMVALGAVIHKLCNIIFAVLRDNKPFEIRTPEQHCSVYLTTQKSAA

SEQ ID NO: 160867 - protein, 369 aa, unidentified
MTDFTLFVGLEVHKKTISVALVDAAAKADVRFYGTIANTPDALRSLCRRLSTEGRLLHFCYEAGPCGYGVQRHLTRLGHRCDVVAPALIPRKVGDKVKTDRRDAMMLAQTLRAGQLTAVWVPDEAHEAMRDLVRLRAQAMRDLRKTRQQLLSFLLRHGLSSPYGHWTKMHRRWLGELTFAHPAQHLAHEEMLLRIERAEALCDRLKQAIAELVPQWSLAPVVQAIQALRGVSLVVAAVIVAEVGSFGRFDNPRQLMAFLGLNPSEHSSGATIRRGPITKTGNALARTCLVEAAWTYRFPARVTQTIRDRLQGLPEPIRNVAWKAQVRLAARYRRLTAAGKPAPKVVVAIARELVGFIWAIARMVEPKFA

SEQ ID NO: 160868 - protein, 495 aa, unidentified
MIQIPAVIERCAGIDVGKRELAVVVIAGPADEDGEIKTRTFGTTVPALEELREWLIQEGCTSVAMESTGSYWIPVKNVLEPSLKIVLVCPKKHKPARGDKTDFRDAKNLAHLHRHGLLKGSFLPPRTVVELRDLTRRRKKLLANLAAEKNRIQKVLEVANVKIGSIMSDLFGVSGQAMVSALVSGKEISAEQIAGMSKRRLRQRIPELTEALQGHHMNDHHRWLIAQSVEHTVLLDRQMEELEAKIEEKLQPYREPYELLQTIPGVKGMTAATILAEIGPDMSQFETAKHLCSWAGISPGNNQSAGKSKHSRIKKGSKFLLSALVEAAWAAARKRDSIFQRKFHRWMHKLGAAKANVALAHSLLELAYVMLKERRPYQEPDPQQMHELEKAKLVRHHAKRLQQLGADDGLVNELVAKMNQPEVCSSIETNQTAIPRPIRKVCPAKVCRGALGFRARQTGKREYSTVKKPAPEALLPTRSQSKRRKHPETNAQRPE

SEQ ID NO: 160869 - protein, 338 aa, unidentified
MALYGGIDLHSRISWLVILDGGLKLVRQVKLANSLAEFLRILEPYREELAGLVVESTPNWYWLVDGLQDAGYRMHLANTYAAQQYSGLKYTDDRHDARWLAHLLALGILPEGYIYPAHERPLRDLLRRRGFLVQKRTSMVLSLQGAFGCHTGHRVNSDTVKKWTAAEIEEQLDDPMVVRSFTCLLEPIKAMSSQIQMLEKEILAQVKLRDEFALLKTVWGIGPILALTVMLEVGDIKRFEKVGNFASYCRLVKTDRLSAGKRKGAGNARNGNPYLSWAFSEAAHFAIRYHDTAKRFYQRKRAKTNGIVAVRALGHKLARASYYVMRDKVEFDPERLFA

SEQ ID NO: 160870 - protein, 421 aa, unidentified
MKKHSYRQVDIAKLDWTVIRARTENHAIIFSVDVAKNMFVGALFTKEKELISTLKWRHPQNTQSLVEHLCKDLGASSLEVVMEPTGTYGDVLRWQFTRRGIPVYRVNPKHTHDMAESFDGVPSNHDAKAAQIIAELHLNGRSALWHETPEEQRDLRGLASELSIYQVTHKANLNRLAALLVRHWPELEEVANLHTLSVLTLLRDYGDPHTVATHAAAALELLYKIGRSGLKEEECQAILTSAQDSLGVPCAPGERTYIQHLAADLLRTLAASSEVEKRMAKAVGERQEIAEMASMCGKTSCIVLSAILGDIGSYKNAQSLLKAVGLNLREYSSGKHKGELRISKRGSGKTRFYLYWLTLRMIQRDALIKCWYECKVARDGGRYKGRAVTAVMRKLVKALWHVAQGERFDSKKLFHLAEVTS

SEQ ID NO: 160871 - protein, 486 aa, unidentified
MESKTANESGTQKRLTRKQRRELGRQLQTSNPGLDVVHRDAAGIDIGSREHYVAVAPNRSSKPVQVFGCFTEDLRRMAEWLKECGVKSVVMQSTGVYWMPVYDVLEQHGFDVWLVNARDTRNLPGRKSDVQESQWLLKLHTYGLLRKSFRPAPEIRELRTCWRERGEYVQQAGVCIQRMQKALTEMNVQLATALSDLSGVTGMNILRSIVAGERDGKRLAEFRDPRVKASKETIAKSLEGTWLPEQLAVLKRQLADWDHIQRQIAACDVDLQGMMQKMPSAEVKAAQPEEGTATTGKRKRRKKGKSSKNEPAFNLEEELKRVTGVDLSRIDGIKVMTIQTIVTEAGLDMSKWATEDHFVSWIGLSPRNEVSGGKVLKRKTKKVKSRLACAMRTAATTLRESDSYLGAQYRRLRTRLGAPKAITAMGARLSRLVYRMLKYGQEYVDKGAALYEERYRQQQIQYLQKKAAQNGFTLVPAPKSVLRNTL

SEQ ID NO: 160872 - protein, 385 aa, unidentified
MQKLNDLSRSLTALEPDGTLIAVIEMSLSSWLVAGIVPGIERQPLKKLAVDESALLKLLHRWREEAEKAGRRIERIAVAFEAGRDGFWLARWLKARGIEAYVIHASSVAVSREHRRAKTDRLDTELLKRSFLGWLRGERDHCKMVEIPTMKDEDAKRPNREHDSLIGERSRIVNRMKAALVRLGIRGFNPKLKRASTRLDGLRTPEGEPIPPNALAELRRDMERRRLVNNQIRQIEEERLKRIEQAPCDGPHVMVRLLARVMGVGIETADMLVHEVLSRNMRDRRAVARYAGLTGSPDESGRKRREKGLARSGNTRVRRGMIQLAWRFLLHQKNSALTKWFRSRTENARGTRKPMIVALARKLLIALWRLVREGVVPDGVVLRPA

SEQ ID NO: 160873 - protein, 449 aa, unidentified
MKQKKASKKKPMRLPKHLVHLNACAAGIDVGSKSHFVAVPEGVDPEPVREFSTFTDDLERLTDWLISCGVTTVAMESTGIYWIPVFEILESRGVEVKLVNARHVKNVPGRKSDVLDCQWLQQLHTYGLLRGAFRPAEQVVALRAYVRQRTTLVKISGSHIQHMQKAMAQMNLQLHNVVSDITGVTGMRIIKAILAGERDPNKLAAFRDKRCKNDAKTIARSLHGNYRPEHLFSLQQAVELYEFYLTKIDECDRQILQQLRVFDAKNSDGDSGGGKPPASFEEALMRMSGVDLTEIDGIDTASALKIIAEIGIDMSRWKTDKHFTSWMALCPGAKISGGKVLSSATKKITNRAAQAFRMAAYGLVKSKSALGAYFRRQKARLGAPKAITATARKLATIVYAMLKNGTSYVDVGQDYYEERYQTRIIQNLKRKAKHLGFELIPTGEQTVAS

SEQ ID NO: 160874 - protein, 373 aa, unidentified
MPRYSTAFGMDVHLRSTTVCALDAETGEAVTRRFRGNPWGEVAEWMSGFPGPSLAAYESGYLGFAPQRELSGLGVDCVVAAVSKVPRSSADLSSKNDRNDAARMAKAILSHDVTPVWVPSPEIEGLRDLAAAHDAATARLAAAKQRLLAFLARRGYAYGGTTPAGNPRRYWTYGFLRWLDKVRPADDGGIRALAALRSEVEAADETREAVLAEYRAAVAGGPLSAEVEALQSIKGCGFALAAAFASEVGDFSRFRSGRQVTSYFGLAPKQRSSADSVRLGGISGAGNALVRKLAVEGSWCYAQAGHQPKLMPKGSGVPLEVRMHGRKGSERLLRRREEMLARGMPQAKANAATAAELVRWLWALGAMCREATE

SEQ ID NO: 160875 - protein, 366 aa, unidentified
MLIIGCDYHPSVQQIAWADTETGECGEKRLMHSDGEAERFYRELKQKGVQVRVGMEATGHSRWFERLLAELGFELWVGDPAEISARRVRKQRNDRRDAEHILKLLMEDRFPKIWTPSPENRDVRQLLLHRHRLVGMRTRVMNQLQAIAMNEGMRRKKGLWSKKGRARLESFSLAPWASRRRQELLELLDRLRPMIDELSKAIEQEAERRTEVRLLMTHPGVGSITALAFVLIIGTPERFHCGRQIASYLGLIPCEDSSADHWRLGHLSKQGNALMRFLLVEAAQTVARCEPEWRQYYFHLVLRRGRSIATVALARKLAVRLYWMWRKGQDYQQVKKFGSHAGQLETPNGVKSITVKLIEHPAPSIA

SEQ ID NO: 160876 - protein, 323 aa, unidentified
MTGTICGVDVASKSLEARIGQHGAAGCFPNNAEGISELGAFCRSHQAELVAMEATGGYEQQAFALLSEQGLGVAILNPRAVRQFAESMGSLEKTDRIDAGMIAWYAEVKKSRPVCLAPQSQQHLRALVTRLRQLTEIRTAQLNQQRLVIDRSVQASFTKLLTFVGRQIRDLEQRITKLIEQDPLWRELNQTFRTIKGVADRTVARLMAEMPEIGTLSNKTISKLAGVAPIARDSGKHQGKRIVRGGRPAVREILFIVASVVGRYEPDFIAFQQRLRAAGKPPKVVRIALAHKLLVRLNAKAREVRQHSAALQPASSALLLEKI

SEQ ID NO: 160877 - protein, 476 aa, unidentified
MAALQKADEKLNRQQRKDLVRRLWSSNPGLDVVHRNAAGIDVGNEEHYVAIAPTQDEVPVQRFNCFTAELIRMAVWLKGRGVQTVAMQSTGVYWIPLYDILEEHGIEVYLVNARDTKNLPGRKTDVQESQWLLKLHTYGLLRNSFRPASEIRVLRAYWRQRDQHVKTAGQCVQRIQKALTQMNLQLANVISDLSGKTGLQILRAVVNGERDPAKLADFRDPRIKASREDIIASLRGNWRTELLFQVKQELARYDFCQTQIAECDRELEQQLQSLPELRAGEEKSGTKETPRPPKKRKRRKDGNIPRFDLHHELQRISGVDLTRIDGIDVMTGQTVISEVGLDMSRWPSENHFASWLGLCPSNELSGGRILKKRTRKVVNRAATAFRMAASTLRTSQSYLGAKFRRLRSRLGPPKAITAMARTLAILFYRMLKFGQDYLDRGTEFYEQRQRDQQLQYLQKKAAQLGFQVVALPQTPK

SEQ ID NO: 160878 - protein, 413 aa, unidentified
MEGLQPIFRRVAGIDVHRMLHAVTVVVEQSDGSIEQNSREFGGFKRDCRALSAWLVEMNVELVVMESTGIYWKSLYSHIERAGIEAWVVNAHFVKHVPGRKTDMSDSQWLAVLARFGLVRGSFIPPQDMRELRMVSRYRRKLNTMRASEINRLHKILDDGGIKLGGVVSDINGVSAREMVAGLIDGKSISELLDMARGALKLKREDLQAALDGDLTKRHIFVLKHLQEHIDILEQNLAELDAYILGAMTPYQWAHRLLQTIPGIDQIASALILIEIGDDMARFGAPDRLAAWAALCPGNNESAGKRKSGKTRNGNGIIRYILCECANAARMTKSSLAAKYKSLMVRKTHKKSIVAIAHKMIRLIYLMLTRKEPYHDPMVDYHAMSAKKNAPRWIRQLKLIGQWPDRTPVPAKT

SEQ ID NO: 160879 - protein, 380 aa, unidentified
MNTTTVGIDLAKSIFAVCEGDSRGHGSRSSILKSGEFLKWLRTLPTGTVVAMEACSSAHSWGRTMQALGLEPRLIAAEFVRPYRKNQRIKNDTRDAEAVLTALHAPGMRFVTIKTEDQQQRLAWHRLREGWKAERTALFNRIRGLLTEFGIVVELGAAKIRRKLAELESDTAYPQSIQLMAQSVRAQIGILDQRLAECERQIARQSKSDPAVARLRSRPGIGPLTADAIVATVGNARQFKNGRQFAASLGITPRQHGSGGKTHLGAITRRGDSYLRCLLVQGARCVLQAALRLHKNKPTTLNRLQLWMITLNERVGYHKAAVAIANKHARQVWAMITRGETYNAEAYKDWEAAHATVRPGDIQEASDYDLSTAALAAASV

SEQ ID NO: 160880 - protein, 436 aa, unidentified
MQSQNPVVYAGVDVAKATLQLHLQGQQSEFSNSPKGLQQLCAQLQKVPSVHVVCEATGGYERAMVKILHQEQIPVSVTNPARVRAAAQAQGQRAKTDRIDAQGLTDYGQRYQPEPTPPTSATQDQLVALTQWLKQLIHGRALAKTQAEHHQDAFVRRQHAKLMTHLQSQIEAVEKQIEALLEQDAALQERVTCLDKIQGVGPRTAWMVMAHMPELGRLNRNEVAALAGLAPWTRESGTMKGMRCIGGGRPEVRLALYMAALSAARCNPVLRTLYKRLRAKGKLPKVALTAVMRRLLTYMNRLCSRIRGPKWPSSTAGPHLPNGTEWRTAPLAAGNDEFFALDHGLQRHPREWDRVVTACRRVFSGRSGPKTGRFPRSGANVHPQILLRRRISMRGALEWNRAFANCGRIMRYARFPPEPLLPTHSTWRWCAWPTIW

SEQ ID NO: 160881 - protein, 356 aa, unidentified
MSNITRVGVDLAKNLIQVHAVDAIGKVVTNRTLKREKFLAWCADLPPGCLVAMEACSGAHHWCRKLRERGFDARMIPAPFVAPYRIQGKSGKNDANDAAAVCEAASRPHMNFVPPKTLDQQGMLCVHRLREALKEERTACMNRIRGLLAEFGVVLPQTPAILRQHLNDVLEDASNDIAGMARLALQRAQEHWRELEAHIQWCDERIAAHQKDDEQVQRAAELKGVGPITASAVVATVGDFKQFRNGAQFGAWLGLTPKQNSSGGKTSLGGITKRGSNYLRNLLIQGAKSVVFTGKNNDDPVSQWAQRLRERCGWQKAAVALANKNARILWAVMTRDKRYDAHHVSVSPAGAMPAAA

SEQ ID NO: 160882 - protein, 438 aa, unidentified
MSNESSSEPQWAAYVAIDWADREHVWKMQPVEGGHCESGKLEQTPEAIEIWASQLATRFNERPIAVALEQSRGALVFSLTKYSHLHLFPVHPSMLAHFREAMVPSGAKNDPSDTGLLLELLLHHHARLRRLQPDTEQTRELQYLVEHRRRLVDDRTYFSNRLIAQLKLYYPQILRWFYKPASPVACDFLLRWPTLEAAQKAPPRALKTFFSKHNCQDADDRIAEIRRTVCATHDPAVIRSAMFMVQATVRLIQTVKQDITQCEERIEQLTKSHPDFAIFESLPGAGEALIPRLIAALGTQRDRFSSAVEIQSYSGVAPVVKQSGNTRMTHCRQAYPRFLRQTFHEWALHSILKSGWARAFYELQLSRGKKHHTAIRALAYKWIRILFRCWKDRLPYIESAHADAQKKRIPVNAAPENAAVELQCKKVAGFFKVVATNY

SEQ ID NO: 160883 - protein, 458 aa, unidentified
MGRNKSKNKDRRTMSVVHPNAAAIDVGATMHMAAVNANRTPEPVRSFGTFTTDLHRLVDWFAECGVDTVVMESTSVYWIPIFELLDARGFAVFLVNARDAKHVPGRKTDVSDAQWLQRLHSFGLLRASFRPKGQIAELRAYLRQRERLLEYGASHIQHMQKALTEMNVQLHHVVTDITGSTGLRIIRAILAGERDPAVLARMRDRRCHATVETIEKALAGNYRIEHMFILEQALALYDTYQQKAFACDARIEAVLKELSVRRGREGGQLPAARQNRSRQQNSLLFDVRAALFALLGKDLTQINGLGPYLALKLIAECGDDLSAWPSAKHFTSWLCLAPSNKISGGKVLSARTRRSGSRAAALLRLAAATVGRTDTALGAFYRRLSARIGKAKAVTATARKIAVLFYNAVQHGMNYVDPGASSYETRYRARVIDNLRRRAKAFGFVLQPAGPTPGIAVS

SEQ ID NO: 160884 - protein, 413 aa, unidentified
MKVVYPRCAGIDIHKESMTVCVIVDRQDGSAPEYQKRKLPTHTEGIQELSAWLEECQVTDVGMESTGVYWKPVWNALEGKWGLHLCNPQHVRAIPGSKTDIRDGTRISELLAYGKLPESFIPPVWQRELRDLTRLRARFTQELGRTGNRILKVLEDAQIKLDCVASDALGVSGLRILNALVEGETEAGKLAELAVGKLKKKRAELRTALSGNFREHHRFQVRLLLEDMKECENKIFQLDLRIAPYLEPYEEIVRRLDAIPGVDRLGAAIILAEIGPDMSSWEDSRKLASWSCLCPGNCESAGKRLSGRTRKGNRWLRRAFCQMAWAATRKKGSYFKTQYRRLLGRRGKQRALLAVAHTLVTVVYHLLKTPQLEYRELGEDYFDRRDAEQTKRSLIKRLDKLGYNVTITPKAAT

SEQ ID NO: 160885 - protein, 339 aa, unidentified
MSSLHILGIDLGKHCFHLIGHDSAGRELLRKKFNRNQLILFLSKLSPTTVAFEACGGAHWLARKCLEFNHQIKLIPPQYVKPYVKNNKNDFIDASAIAEAACRPSMRFVAVKSEEAQVIASIHRVRDGYIKERTACMSRIGAMLLEFGLSLPTGHAKMKGLFQWLAEQNQPLPALFIQELQGLHEYYSYLNERIKSQDKKLHQVIEHNELALLLKTIPGVGDLTATLCLADISSPANFTNGRNMAAWLGLVPRQYSTGGKPKLLGVSKRGNKQLRTLFIHGARAVLSKPDKTGKVFGQWLIDLRASKPFNVAVVALANKLARIAWAVMYNRQAFRMTTI

SEQ ID NO: 160886 - protein, 353 aa, unidentified
MLNEKSIVVGVDVHKYSHTAVAMNAWGEERGTLNFTNNTLEIYRQWLEEMGLKENIVIGLEDVNSYGLHLVEELRSRNYQIRYVPAILTERERNASTKHHKSDEVDARRVGKVLLTKYEETLPAKESIADKRELEIAKSLDLLLMERRDLTKQKTITKNQLRCLIHQHYTESYRLHCPRSFSKKAVKWFLSDLRENQTILATSITRRLKRLLFIEEQIYAISKEVSLIGETSKEAKALTVIHGCGMVTACSIVAEVITIKRFKNKHHFSMYAGIAPMPHSSGRKNRMHTNPFGNRQLNRAIHSIALSQIAIKGDPIGKEYYQKKLKEGKTKLWALRCLKHQIAKVVFQKLRYA

SEQ ID NO: 160887 - protein, 343 aa, unidentified
MDYFAGLDVSVKETSVCIVDDAGKIVREARVASEPEALLQVLANNTYRFKRVGLEAGPLSQWLYSVLTEVGLPVICVETRHMRAVLKAQINKTDRNDARGIAQMMRVGLYRPVHVKTLRSQKLRVLLTHRKLLQSKAIAIENDLRATLRNFGLKVGMIGTVKFEARIKELVENVPDLAVLVQPLLIVRQVIREQLGILHRRLLAIVRGDDVCRRLMTIPGVGPVVALTFCVTVDIPARFRNSKAVGAVFGLTPAKYQSGENNRTGAISRCGDEMMRMMLYEAAQSMLVRSAKWSWLKAWAIKIARHRGMKKAIVALARRLAVIMHRMWVDGTEFRWTREVAVA

SEQ ID NO: 160888 - protein, 316 aa, unidentified
MTETPTYAGIDVAKDRLDVVLRPSGGYVESTNDERGIESMVRRLRKEDVALAVLEATGGLEQPIAAALALAGVPVAIVNPRQVRDFAKATGKLAKTDRIDAAVLAHFAEAVRPQPRPLAEEHARELSALVLRRRQILAMTTAEANRARTAPKALRKRIEAHLRWLRKELARVERELERVVKESLVWKERADLLMSVPGVGPTLSATLLAELPELEHLDRRRLAALVGVAPLNRDSGTLRGIRTVWGGRSGVRTTLYMATLCATRHNPAIREFYGRLVASGKPKKVALTACMRKLLSILAAILRNRTPWQPRSLPAS

SEQ ID NO: 160889 - protein, 340 aa, unidentified
MSRLNIIGIDLAKTNFYLFSLSPEGKPGGRIKLSREKLIGWFTTQSRMIVAMEACGASHHWAREIQKTGHDVVMLPAQHVRAYQRRQKNDYNDAQAIAEACWHGTIRPVPVKTLSQQDEQIFLKMRRLVSEERTQLINHIRGLMAEYGIVLRKGATELRRKLPELLEDAENGFTPQMRELLQRQYQRLAALDDELIWYDNRQRKNAAGDSVCQRLLSIPGFGPLVSLAVKSWMGDGKQFKRGRDASAALGLVPRQFSTGGQQVLLGITKCGNSYVRSMLIHGARAVLFRSAGKTDQLSSWVNLVREKRGFNRAVVALANKLIRIVWVIITRNEVYRVSVA

SEQ ID NO: 160890 - protein, 357 aa, unidentified
MKKIYRLQHCVVRGKEIFVGLEDSKRTWKLAVRSEKMLIHQVSMEAKYPALIGYLRNQFPECIIHLIYEAGFKGFNLYDQLTEDGIECVVIPPHVVTEPKVNRVKTDKRDARRLAKVLENHDFKDACFVPDKERREDRQVSRTLIALQKDVVRTRNRIRKFLQFHGIEVDFPDRWGRNEFRALKKLEISEPLRISLDIFLTQLEELWAHQVALRAALRALCKKERYHKAFTIARSLPGIGWFTAIRLVLELGEDLTRFTSGKKIASFVGLTSSEDSTGETEHKGHITGMGSGFIRSTLVENSWMSITKDPVLLAKFTRVWHASGSRKKGIVAVARVLIVRYRACLMAGTPYVIGVAA

SEQ ID NO: 160891 - protein, 362 aa, unidentified
MIGQRRSVGLDVHARSVVGCGLDVQTGEVLRTRLTPAHEQVIGWLRSLPGPIRVTYEAGPTGFGLVRALEAAHIECVVAAPSRLLRPSGERVKTDAKDALHLAQLLAVGQVTAVAVPDEETEAARDLVRARDDVRAELMSARHRVTHLLLRQGIVYSGGTPWTRVHENWLHIQRFPRPALQVAYDAALEALAAAEGRRDRLDQAIAQMAADSRFTPVTDRLTCLRGISTLTGFGLAVEIGDWSRLSPTTIGAYLGLVPSEDSTGESRTQTGLTKTGNGHVRRLLVEAAWHHRPPYRPSAQVQRRWQRAPSAVIAHAAKGNRRLHARWRSFDARRKRPVVANTAIARELAGWCWALAVMDPEH

SEQ ID NO: 160892 - protein, 326 aa, unidentified
MTLSHLTDNTFIGIDVGGAGLDVAWHRGDGAHYANRPDAIATLVERLRTGPEVTRIVVEPTGGYEKTLVKALRQAQLPVEIIHTTRFNAYRALVGVKAKSDTSDARLLAAYAAAPDEIRGRKAGHVELPEDTIREALSELASRRDQLKHMIHAETCRLGTVRMAELRQAITAHLEALRAEDKQVHRMMLELVRHRIDLRRDQRLLKTIKGIGVKSALGLLASVPELGRIDNKAAAALIGVAPFVRKSGTMIAPARIHGGRAAVRSILYMAAVTASRHNPVLRPFYERLIAKGKPPKVALIAVLRRLVVFANAVLRSGQPWRGAITS

SEQ ID NO: 160893 - protein, 352 aa, unidentified
MSQTTLAHRWSVGIDLHKDTLTACIYCSCCGEVRFQKIACKCRAQVVEFFSALPRPHVVAIEAVGFYRWLWDLLEPVVEKLVLADATAARALAGRRLKTDREDAQNVAELLAVDRLPRAYAPPLEVQILKDQSRHRNQLSRLHARVLHQVKSLMNANNRPGPARLQSAGLIRYLKAFEGKLPARHVAILWKCVDQLTLIERQMAQAEIELRHLLDGERFRDTAALLQTFPGVGLIVAATVLAEVGDFGRFSYRKAIACYAGLHPRVFASGGKQRQGHIAKTGPRDLRWVLQQAAWVAIRCEPGIKKMWLKMSRSAGKKAAAVGIARKLLSWMWAAVIKGQVYQPRGSTVVAT

SEQ ID NO: 160894 - protein, 309 aa, unidentified
MKPYVGIDVAKATLDVAIGSAGEVVQVENDEAGIAQLIERLREIAPTLVVLEATGGYESLVAGALAGDGIDVAVVNPRQVRDFAKATGVLAKTDRIDARVLARFAEAVRPEPRPLPTEEAKELEEALRRRRQIVDMLTMEKNRLSIAATERLKKELKKHITWLEEALRRANDDIDTAVRKSPAWREKEDLLRSVPGIGPVSARTMLAELPELGSLNRKKIAALVGVAPFNRDSGTSRGSRVCWGGRASVRQVLYMAAVTAVRCNPVIRRAYLALRGRGKKHKVALVACMRKLLSILTAIVRDQRRWSPS

SEQ ID NO: 160895 - protein, 343 aa, unidentified
MEYYAGIDVSLKDSSACVVDSSGKIVREVKVASEPEALLRFFANFGFPMTRVGLEAGPLSQWLREGLVGAGLEVVLLETRHVKAALSAMTVKTDRKDARGIAQLLRMGWYRPVHAKSASAQEVRALLVGRKLLQSKLLDVELSIRGILRGYGLKVGEVSRGRFDARIRELTEGQAMLETVIGAMLQARAILWSEFTRLHREMLKIARADRVCLQLMSAPGVGALVAITYRSAVDDPGRFEKSRTVGAYFGLTPKKYQSGETDIDGGISRVGDAMVRTALYEAAHIMLTRATRFSALKRWALEVAKRRGMKRAKVALARKLATVLHRMWLDASEFRWGKAAVAA

SEQ ID NO: 160896 - protein, 414 aa, unidentified
MELLYTHCAGIDVHQNSVSVCVLTPGPTTTGAPRSEIRQFGTKTCDLLALADWLEQLQVTHVAMESTGVYWKPVWNILESQFTIILANAQHIKNVPGRKTDTADCQWIAQLLRHGLLKASFVPPLQIRQLRDLCRTRTSLTREKTAVVNRLQKTLEDANVKLAAVVTDILGVSGRAMLKQIVAGESDADALADLARGAMRKKRTELQQALTGRITPHHRFLLKQHLEHVEYLEKAIAGMVVEIERQALPFEATITRWRSIPGIEQLAARSLVAEIGANMDQFPTARHLVSWAGLCPGNHESAGKRLSGKTRNANPWLKGLMTQVAWAASHTKDTYLSQQYRRLVIKRGKRRALLAVANTVLTIVWHLEKHQTLYRDLGPDYFDRLKGEQTQRYHIKRLERMGFKVTIEPAKHAA

SEQ ID NO: 160897 - protein, 343 aa, unidentified
MEYYVGLDVSLKQTSICVVDQAGLVVREGVVDSDPEAISVYVTSKAPNAVRIGLETGPTSTWLWTELKRLGLPVICIDARHAKAVLKMQINKNDRNDAAGIARIMQTGWFKEVHVKDIDSHSVRALLASRALLVKIKRDLENHVRGLLKNLGLVIGRAKFNVFAVRAEELIEGRPELIAAIRPLLEARNAVEQQVSELDRKVMKLARRDAQVRRFMTVPGVGPITALAFKATIDDPARFARSRSVGAYVGLTSRRHASGEVDWTGRISKCGDAMLRSYLFEAAGVLLTRILKWSAVKAWGVRLAKRNGLRKAKVAVARKLAVILHRMWVDGTEFNWSTKEITA

SEQ ID NO: 160898 - protein, 337 aa, unidentified
MIGVDLAKRVFQLHGASMAGHVQFRRRLTRGQFRSFMAEQPPAVVVMEACGSAHYWAREITALGHEVRLIAPVYVKPFLKRHKNDAADAEAIVEAAQRPGMRFVEPKGPDQQARAMLFRVRDQLVHQRTELLTALRAHLYEFGYAVPVGLAGLRRMQAIIDDPDSTLPDLVRDLGDDMLQQIAEKSACIDATSSRIKSMAEQTGPARRLQTMPGLGPITALAIEAFAPPMESFRSGRDFAAWLGLVPRQHSSGGKQRLGRVSKAGQADIRRLLIIGAMSRLTWRNRKVIPKGSWLARMLERKPRMLVAIALANKMARAIWAMMTKGEDYRDPVSAAA

SEQ ID NO: 160899 - protein, 337 aa, unidentified
MKYCGIDLHSNNSVVVVSDGEDRIVLQRRLANDLGQIRGVLEPYREELVGVVVESTYNWYWVVDGLMDAGYRVHLAHPSAIRKYEGLKHSGDVADAAYLAQLLRLGLLAEGYIYPREQRGVRDLARKRMQLVRYRTAQILAMENILIRQTGARMKGEAVKRLTAEQVDTLAFAPDVALAMEANRAVSQALGQQIEALERRLKERVSLRAEYRLLKTVPGIGEILATTIMLETGCIDRFAQVGNFSSYCRCVDSLRESNGRKKGEGNAKNGNKYLAWAFIEAANFALRCCPQAKSFYERKKSKANRVLALKALAHKLARACYYILRNQEPFDVSRCFG

SEQ ID NO: 160900 - protein, 351 aa, unidentified
MIIIGVDYHPSFQEIASLDKETGEYDERRLNHGEAEADKFYRDLKQRGVGVRVGMEATGQSRWFERLMTELDFELWIGDPAAIKAARVRKKKTDREDARLLLRLLREDRFPRVWVPNPENRDLRQLLWHRHRLVQMRTRVMNQLQAIAMNEGVRLRKALWSKGGRAKLESLELAPWAARRRQDLLELLDRLTPKIEPLSVAIEQEALKRPEVKRLMTHPGVGPITALAFMLIIGTPERFRCGKQLGSYLGLVPSEDSSGGKQRLGHISKQGNSLLRFLLVEAAHAAVRHDPDWKRRYLHLAMRREQGIAKVAMARRLGVRLYWMWRKGWDYQQVLQFGSHAGDLVLVRGVQ

SEQ ID NO: 160901 - protein, 371 aa, unidentified
MSVYVGIDVHRKRSQVAVVTQDGTVELNKNVVNGSEPMLRLIGGLPAGTPVAFEAAFGWGWLVELLEDYGFDPHLVHPLRCKAIASARLKNDKVDAAILAQLLRADLLPEAWIAPPPVRQLRALLRHRSSLVRLGTQLRNRIHAVAADHGYDRAASYWTGPGRGWLAELDLPPASREIVTDCLAVLDGLAPLIERLDGELHRHAKADPRVKMLRALPGVGEFTALVMLAEIGDISRFPSARKLAAWAGLTPTVRGSDLKVRHGHISKQGSAWLRWVLNQAAQTAKRSPEFAATYAAIAKRRGKKIATIAIARKLLTRAYHLLASMQATDTTTPAASAAPAATTAPTTGRVTKPRARSPQRHEQASRPRSIT

SEQ ID NO: 160902 - protein, 454 aa, unidentified
MVLPFINDDGEQAMAARKQEVAVFPNAAGIDVGATSHWVAVPPHLADGPVREFGPMTTDLNALADWLLACGVDTVALESTGVYWIPVYEVLEQRGLKVWLVDARQLKYVPGRKSDIQDCQWLQKLMSLGLLRAAWRPDGEVCVVRAVARQREVLLTEQASWVQRMQKSLVQMNLQLTEVLTDVMGVTGQAIIRAIVAGERDAVVLAQHRNRRVKASKDDVIKALSGNWREEHLFVLGQSLAMYDDIARHLAGCDTKLQALLTERSRGGIELGKPPRAGSRTRAVFDLRQTLADWAGVDLTRINGLDVTSVMKILSEVGPDLSRFANVKHFCSWLGLCPATKISGGKVISASTKHSANRVRQTLKLAAMSLSRSQSALGAFYRRLCTRMGKPSANTAAAHKLARLVYFMLTRGEAFVDQGQQRYEEQQRERSVAALKRRAAALGFQVAPVAPAAT

SEQ ID NO: 160903 - protein, 283 aa, unidentified
MSNVTTCGIDLAKNVFSIHAVDGHGVVVLRKTVVRARLAALVAQLPACVIGLEACSGAHEWARRFALHGHTVKLMAPKFVAPYRKSGKNDSNDAEAICEAVGRPSMRFVPVKSLEQQAMLTLHRVRLGFVEERTATINRIRGLLAEFGVVLPQRVVEVRRGAAATLDQLPSLAQRALRDLLAHVRVLDERIAEYERELEQHARRDERARRIQKLSGVGPISASAIVSSVAEAREFKNGRQFAAWLGLTPKQYSTGGKARLGRITAHGDAYLRTLLIMGARSML

SEQ ID NO: 160904 - protein, 313 aa, unidentified
MSNDLPQTIGIDISKANLDCHAYPAGAERQFANTAKGHKALIAWLSQWQVERIAYEATATYHRALEVALADWPCVKLNPERARRFAQATGTLAKTDRIDAMLLARMAATLQTPVRPAQSAEQAQLAELINARDGLVRDRTALKNRDKNLTIAILKRQCKQRLEQIERHIDALDAEIASLIAADAKLARRHEILTSIAGVGTLTANQLIATMPELGSLDNKQAASLAGLAPVARQSGQWKGKSFIRGGRSNVQQALYMPALVAARFNPDLKAKYQQLVGAGKPAKIATTAVMRKLIVTANALLKADRCWQQSIA

SEQ ID NO: 160905 - protein, 419 aa, unidentified
MKSIQTKKVKVVNDKTLIVTVDVSKDKHMGYARCPDRTETKPFEFFNNGRGFNEFWSRISMVKKANNLEEIIVGFESTGPYAEPLIQFLKKRDVKLVQVNPMHTKRLKELQGNSPNKTDDKDPKVIADIIELGHALTVVVPEGVAAELRRLTQARERSMQRRTALLNQLQGLIFIIFPEFLQIMKDIKTKSAQYLIKHYCTPHGIAECGVERLTSILRKISRGKLGKGHAEELFNAAGSSVGITEGQKSIVFEIKEILAQIEACERFTDELEKEMSQNLEQIPYSCFILSIKGIGEVTAAGIIGEVGDFNKFNTIAEIEKLAGLDLFEISSGKHKGTRRISKRGRSLLRKFMYFAALNVIRKGGILHKEYHAFVDRGMPKLKALIAIARKLLRIMFALVRNHSEFTVNYSKPSKLKMAA

SEQ ID NO: 160906 - protein, 370 aa, unidentified
MMNVTTFVGLDVHARSIKAVALDAMTGEVRCAAFGYDAAAVADWVKAIDPKARCVYESGVTGFDLQKKLAALGVDCVVGAVSKMIKPSADRRRKNDRNDAEFLARLLSVGNVTEVWVPDDGCEAARDLARALEDAREEVARSKQMLSKFLLRHGLVFDETNPSGARKKNWTAAHWAWIKSVSFAEKADNEVLAYYIDRVNQATEDKARLERLVAAEASKPRWKRRVDSVRCLKGIDVMTAADLVFEAGEFSRFESARSFAAWIGLTPSEHSSGEGVHRGGITKAGNRHLRKDLVESAWHYLSCSPHSKDLARGQVPDPRARRHATKGVRRLVARREGMLARGLNKNKANVATARELACWVWAVGRMAESA

SEQ ID NO: 160907 - protein, 321 aa, unidentified
MQTNPAVVYAGVDVAKATLQLHLQGQQSEFSNTLKGLRELCAKLQEVPNVHVICEATGGYERALVKLLHQEQIPVSVTNPARVRAAAQAQGQRAKTDRIDARVLTDYGQRYQPKATPPTSATQDQLVAQTQWLKQLIHGRALAKTQAEHHQDPFVRRQHAKLMTHLDSQIEAVEKQIEALLEQDAALQQRVNCLDEIQGVGPRTAWMVLAHMPELGQLNRHEVAALAGLAPWTRESGTMKGMRCIGGGRPEVRLALYMAALSAARCNPVLRTLYKRLRAKGKLSKVALTAVMRRLLTYMNQRIKALLSETATAQTKGLQKA

SEQ ID NO: 160908 - protein, 339 aa, unidentified
MSLYAGLDLHSSNTYIGVLDPQFNRIFKKRVSNDLDLILETLEPFRGRLQGLVVESTYNWYWLVDGLMDAGYACVHLANPSAIKQYEGLKHSDDQHDAFFLAQLLILNILPQGYIYPKEARPVRDLARKRLFLVQQKTANILSLQSLLARCCGQRVSSNQLRKVTGQDLKRWLKQEHLVLSAQANLDNIVFLKQQIGKLEAAIQKQVKLSEAFNCLLTVPGIGKILAMTIMLETGDIHRFADVGNFASYCRCVSTQRLSDGKSKGSGNRKNGNRYLSWAFTEASQAARRFNSRFRSYYDRKAAQTNSILATRALSNKLARVCYYIMRDQVEFREELTAH

SEQ ID NO: 160909 - protein, 325 aa, unidentified
MKSQNLVCGVDVSKDTLDLYYNDESGKEHYLKVSNDTKGHDLLIGKLGITRTYLMESSGPYYLRLAFAIKRLHGDVRVENPIVVKRFIQMHMERNKSDKKDARWLYVYTKSRDTNEWAVPPKEQLYCTQLMGSIDLYSRQLVMITNQLHSLSQGPVQMKEVIKSLNKIKVHIEREIKKLEMQLHNLLQAWESEQLKNISTIPGLGKRAVALLIVYTDGFKRVQNHRQLIALAGLAPREHTSGSSVRGRKGICKMGNGHLRSVLYMCSLSAIKHNQACKDLYDRLKAKGKRSKVALIAVCNKLIKQAFAIATKGTTYQSNYKSSLT

SEQ ID NO: 160910 - protein, 411 aa, unidentified
MIYKLRLNLNFGFMKVSGLDVHKDTIFCAIYNGKTPGEVKEFLTLTACIREMGSYLQEAGVEKIAMESTGIYWVPVWNILEEMGFLLMLVNPYLIKQMPGRKSDVKDAQWIAMLLHKNLLRGSLIPCKKIRELRTFSRKYIKLQRRMTSVLQEIERTLEMCNIRITSFVTNIESKSVLKVVKQLVQGEVSPDLLAQCIHGRIMNRHGKKIRQSLEGFIGEHHRFNLELLLEEYELLLHHSDRCEEEMYKLCSEQYHQELELLQTIPGIKRLAAMLIIAETGADMKAFENSGKFTGWTGLRPRNDESAGKFKSTAITKGNRYLCSLLVQAAWAATRTKGSFFQVKFSRLTIRKNRNKALIAIARKVAVIIWNMLYYKQSYNPDLIPIYEPEKLQAKMNYHQKEFDRLQQLLH

SEQ ID NO: 160911 - protein, 345 aa, unidentified
MLIIGCDFHPGFQQVAIFDKQTGEISGKRLQHPEQARAFYAGLAEAARVGMEACGYTQWFERLLGELGHELWLGDAAQIRASVVRRQKTDRRDAEHLLELLLEERFPRLWVPTAEQRDVRQLLLHRHHLVRSRTQVKNQLQALALNQGVQKKRQLWSKAGRAELEKLALPTYTAGRRDECLQRLDYLDGQIRQLSQKVVAEAEKGEAARLLMTHPGVGPQTALAFVLTIGEVERFPNAKCVASYVGLIPSEYSSGGKQRLGRISKQGSPLLRFLLVEAAQSAARYDASLKRVYVRLCMRRSRGQAKVAVARRLATRLYWMLRSGKNYAQLTASGAGKPVSSRFAA

SEQ ID NO: 160912 - protein, 420 aa, unidentified
METIVERPAALDVHKAQVTACVRVPAADGKGREQHVAEFKTTVRGLLALRDWLAAHRVQQVVMEATGVFWKPIWHVLEDDFPLMLVNARHVKQVPGRKTDVSDAAWLCQLLEAGLLKASFVPPKPIRNLRNLTRYRKTQIQERAREANRLHKALEDTGIKLDCVATDILGVSGRLMLDALVHGTTDPEVLADLAKGRLRAKLPALKEALEGRFDQLHALWIGAILAHIDFLDEQIDRLSDAIEEQIAPFGAAVELLCTIPGVQQRAAEVIISEIGTDMSVFPTEKHLASWAGQCPGNDQSAGKRRSGKSRKGSKWLDWTLEESALAAVRTKDVYLAAQYTRLKPRRGHKKALGAVKHSIICACWHMLSTGELYRDLGGDYFQRRDPEREAQRLVKRLEALGHLVTLQPTTTSTAEEAVAA

SEQ ID NO: 160913 - protein, 347 aa, unidentified
MRFYTRQHRYYCGIDLHARTMFVCVLSHDGEILMHQNLRCDPAVFLEAVAPYREDLVVAVECIFTWYWLADLCAREKIPFVLGHALYMKAIHGGKAKNDKIDALKIASLLRGGLIPMAYVYPREMRSTRDLLRRRLHLVRKRGQLLAHIQNTHHQYNLPEPSRKILYKANREGLVERFDDPAVRKSLAIDLELVEHYDHLIRDLELDLVRTVKVHDPQTFFRLKSLPGVGKILAMTLLYEIHDIGRFPRVQDFASYARLVKCSRESSGKRLGTGGAKIGNVHLKWALSEAAVLFLRSNPRAQAFLQKLRRKHGRGKALSILAHKLGRAVYFMLQRDKVFDMQKFLAT

SEQ ID NO: 160914 - protein, 352 aa, unidentified
MDRYVGLDPHPTSCTFGVMGPSGKRLKSMVVETNGAALVEAVKSIQGRVHLCLEEGAQSAWLHELLSPHVAEAVVAVAPESKGAKDDLRDAWARADELRTGSIRTRVYKAPLHLAALRNAVRGYGFAVRDVVRAMNRLRSVFLSRGVAVSDGIYNPKGRVKWLAKLTPPHRRLAEWLGGQLDQLVPLREQAEKWLLEEAKTHPIIRTLATAPGMGPIRTAQVVAITANPHRFRTRRQYWSYCGFGIVTRSSSDWVQAKDGRWVRSQVHQTRGLTRKRHPLLKSAFKGAATTVITQLPEDPLHKDYQRMLVAGIKPNLAKLTVARKIAATVLSMWKHQEVYDPQRHRAVSDEA

SEQ ID NO: 160915 - protein, 317 aa, unidentified
MNAEINQNEINVGVDTGKTQLDIYIRPLDIYFVVTNDDDGIKEAIVEIKKHRVTRVVIEATGRLEQPFIMACAKANIPFVIANPVNIKRFAGAINQKAKTDKLDAQLIAHYAEVIKPKLSQLKPEQIRLMSDLLSRRRQLMDMQTREKNRLQIMPKEITSSIKPVLTVLKNQLEKTDNKLHKLIESCEEYKIKNDIIQSVPGVGNVVAFNLISEMPELGYINNKEAASLVGVAPFNRESGSYKGKRMIRGGRSQIRTAMYMAMMSAIQCNPTFKAVYHRLIATGKPKKVAIIACIRKLVITLNSMVRDGVYWDPKMN

SEQ ID NO: 160916 - protein, 394 aa, unidentified
MIWAGIDAGKTHHHCVVIDATGCRLLSRRVANDEPELLQLLADVLALGEEVTWAIDLADGGAALAITILLNHDQQVLYISGRAIHRACEGYRGEGKTDAKDAGVIADQARIRRDLRPLRTGDEIAVDLKLLTGRRLDLVTDRTRAINRLRALLTSIFPALDRALDLNNTGPVVLLSGYQTPAAIRRLGVRRLETWLRNRKVRPADRLAEVALQAAESQYTSLPGEKVAALQIRTLANEVLVLNRQVAEIERVVAARFQDHPDAEVIVSMPGLGPILGAEFVAATGGDMSAFATPDRLAGFGGVAPTPRDSGKISGNLRRPQRYNRRLQRVFYTSALMSIRYSEESRRFYDRKRAEGKRHPQAVMALARRRVNVLWALLRDRRCYQVTPPVILTA

SEQ ID NO: 160917 - protein, 349 aa, unidentified
MTRIAERYEYVVGVDTHARTHTFVAIETRTGAVVDTREFPTHPAGLARAVTWIRTRTSGAVFAAVEGTSSYGAILTATLIDAGIPVGEVRPPSRKQQVVDGKTDRIDAEAAARSVLGREESHVAAPRSTGDRTALRILLAARRLLDQQRTASRNALTALLRTIDLGIDARRPITNPTIAAIAGWRATSGDHLTKVARAEARRLARAIIDYDTQLKSNHTHLNDLVNKVAPGLQDTPGIGPVTAAIIYCAYSHHGRIRSESAFANLAGVAPQPASSGNTVRHRLNRGGDRQLNRAFDIIVRTRLSYDPDTRAYAERSRAQGKTPREIRRNLKRYVCRAVFRQLQNTVAPA

SEQ ID NO: 160918 - protein, 343 aa, unidentified
MSEVTTIGLDIAKNVFHAHGADAGGSALFSRKIGRTKLLEFFSKQPPCLVALEACGGAHHWARELTLLGHQVRLIPPAYVKPFVKRNKNDAVDAEAICEAAQRPNMRFAAIKSEEQQASALVFRTRDLMVRQRTQLINAIRGHLTEYGWVAPKGPSHVAVLDDLLDGEMGSSLPDAATPMFRMMLDLLEVLNGKIAALDKEIARRAREDVIARRLMTIPGVGPITATAIAALAPPAETFTKGRDFAAWLGLVPRQLSSGGKQKLGSITKMGERTLRRLIIIGCSAVVLQASKRGAPAGSWLEQMMARKPRMLVTVALANKTARIIWALLISQQEYKAPVAAAA

SEQ ID NO: 160919 - protein, 412 aa, unidentified
MEILYARCCGLDVHKRSVVACLVVPGSEGKPAQEVRTFGTMTNDLLALSDWLAAAGCTQVAMESTGVFWKPIYNLLEGTFELLVVNAQHIKAVPGRKTDVRDAEWIADLLRHGLLRASFIPERPQRDLRELTRYRTTLAQDRANEVNRLQKVLEGANIKLSAVATDILGKSGRAMLEALVGGSTDAAALAQLARGRLREKLPQLEQALAGQFNAHHRFLIAQQLAHIDFLEASLERVSAEIAERVRPFEAACERVQTIPGVGRRTAEVLVAEIGTDLTRFPSARHLASWAGLCPGNNESAGKRLSGRTRKGSPWLRTALVEAAQAAARTKDTYLAAQYRRLAARRGAKRAALAVAHTILVLVYALLTRQEAYHDLGGQYFDERDRQAVERRMVRRLEALGYAVSLQPTTPAA

SEQ ID NO: 160920 - protein, 412 aa, unidentified
MTVTNQFAAHVGLDWADKKHDVCVQFKNGERVFDVIEHTAEALDAWLTELHQKVKGRIAIALELKKGPVVYALQKYPFITVFPVHALSLARYRQAFSPSGAKDDPQDAELALELMLRYPQKIKAIEPDNADIRLLQQLVEQRRQLVEDKRRFVNRIINTLKQYYPQPLEWFSHRGSLLLCELIIRWPSLQQLKRARRDTIRNFLNAKGGRAMALTEQRVASIDNAIPLTTDPSVIEANALMATALATQIKVVSEIIKTYDERIETLFDTLPDAGLFKSLPGMGPCMGPRMLAALGDNRDRFNSAEEIQNYAGIAPVTERSGQKSWVHWRWQCAKFVRQTFVEWAAKTVNSSYWARLYYQGLREKGKSHQSAIRALAFKWIRIIYRCWKTRTRYDEAKYLLALEARHSPLLKP

SEQ ID NO: 160921 - protein, 312 aa, unidentified
MKRYIGIDVSKARLDVAVHDSAQCFSCDNTEAAVEALVKQMKELEPELIVMEATGGYERLCAAMLAAGLALSVVNPRQVRDFAKSTGILAKTDRLDARVLAHFGAAIKPEPRALPDAQQQLLDELMLRRRQIVAGLVAEKNRLGMARADAVKKSLRESVRFYERLLADVDRQVGEHIERSPLWRAREDLLRSFKGVGPVSSRTLIGDLPELGTLDRKRIAALVGVAPLARDSGKRKGTRAIFGGRGQVRAALYMVAITAIRANDPIRQFYQRLRAAGKPAKVAIVACMRKILIILNAMVRTQSRWNEHLVIS

SEQ ID NO: 160922 - protein, 356 aa, unidentified
MTKVTASFENETVYVGLDVHKRSWNAAIYLNEQYIRNIHQPPTPQALYHYLQHSYPQAKYVCAYECGKFGYWIQREFKQLGVECLVVNPADIPSTHKDEVYKTDIRDARGIAQALSSGQLKSIYVPCEDQEADRHLVRQQKKIWRDLVRCKNRIKGFLEYKGVTVPSQYDNANWSRNFINWLSKLEFEHNSNRVTLNYLLTEMELLRKELLSISNTIRKLMRSKKYNKLYYLLRSVTGIGPLTAAALITEIGDMKRFTSFYHLNSFIGLMPMEHSSGERELKGRITVRKHRQLRSDLVEGAWTAKRSDPALALYYSEQIKKGKNGKAAIVKVARKLLSRIRYVWLSGETYQTAIVK

SEQ ID NO: 160923 - protein, 330 aa, unidentified
MKNWNFILGVDVSKLTLDIHCAELNEHIQIANGTEGFKGFKKWVKELRIDLEKSIIVMEYTGGYEYKLIQFCESLSIPYTRIPGLAIKNSLGITRGKNDKVDSKRIAIYADEKIKSLSPDKPLNKRILQLKEILSFRKRLVRTNAGLKASLKERLFMYDITSKDIIKKITEHSIKKNKADIKKLDIAMEDLVKDDPDMLKNFTIIKSIKGIGPVNALMTIAYTENFTSFSNPRTYAVYVGVIPFDHSSGTSIYGRKRVSHIANKELKQELNQAAKTAIQWDKELSAYAYRKLQSKPYPIVLNNVKFKLILRMFSLVKRGALYVENYEKAA

SEQ ID NO: 160924 - protein, 406 aa, unidentified
MEGPIITVDVSKGSCHYQPFIENGHPMRKPKQLSATIDGFQKLGQTIKDLEAKTEREDIPVIFEATGVYHRPLQKYLEDHKIRYYIISPLLSATYRKTDLHSNKTDALDCAHIAKAYYCEKELRQYQAQPQEYKRLYQLSRIYESELVHLRKRKVSLRSMLDIIYPRIDKTFKGNQNLYDPIPMEILKRYPHPLLLLSHREDTIVKTVGHRTGHLKGYTERIVHKIYEKAKECYSGCEINDIEVLKLPSLIENVQEQKKKCDSLLKEMIEIARTCPYFTSVVSIVGIGENLAARIIAELGDVSRFDNRAAIVAYAGLNPKIQQSGDIDGLHLKISKKGNKHLRCLLYLGAQCNYRLRKEDPLYEFTKKKRQQTQCPLSSKAAYTASAHKLLVIIYSLCKNGTRYHS

SEQ ID NO: 160925 - protein, 423 aa, unidentified
MAKRTAQRSEIKAVPQFLNESLYVGIDIGKGKHLAGFLSKTLLERHERFEACPALVFENSREGFRLLIERIRSLTPLEHVFILMERTGHYHRALAQYLQELDLPVYVMHVQSRPGGMLKTDKRDALTLANQLYSQLELGVQVANKLQLIRRVMPPTEAAAQLKGLIRHRYELIQESTQRKNKLTALCDELFPELTRIVKDPNALVALALREKFPTPQSLATASLTVLQEIRGGARSLSDAKLLELQRLAAQSIGVKEIARKPGLVLGQTQLIKELRLLREHVDQLESEIVSIVERAREGQILLSFPGIGPVMAATIIAAVGSIHNFPSASALKAYFGWAPVVVQSGSTLDHSRLTRGGTRTMKQMLFLAVFQAVRLRDNEWARLYERLVKAKCPYDERYVIQNRPYFPPISCFYHFPPASFRS

SEQ ID NO: 160926 - protein, 317 aa, unidentified
MNEKLPTVYAGVDVAKATLQLHLHGRQHCLDNTPKGCAQLLQQVQAVGQVQIICEATGGYEKGLLAACHVAAQPVSRLNPAQVRHFARAQGQRAKNDPLDAAVLTDYGTALQPAATPPTDPAHEALRELVQWRDHLQEQLTRACQTLEHGVPAFVARKQKQLVAHLEQQLQAVAREQTAALKRAPQLQAQVQALIQLDGVSTLTALSVLSRMPELGTLDRQATAALAGLAPWVRQSGPWEGQRHIGGGRALVRRSLYMPAVVLARMKHTPLGKFYARLRAAGKPAKVALTAVMRKLLLQMNRVLKDLANQNQTLQTA

SEQ ID NO: 160927 - protein, 430 aa, unidentified
MSFLPNYISVGIDVAADFSWFCILTPDGREFKKPFKVDHDNADSLKNAALSIKKAEEQFSMKSKIFLESTGIYHFPLFCHLKELGFEVFVINPLITNSNKNIGIRKVKNDRLDAKRIAVTGYSHDTKVSVMPAELILNLRCLCREYYSLVDNRTSYVNKLKAQLHIVFPGFCNVFSDVTGIAAISLLKRFPTPEDVINAQSDEIVKLISTSSRKGLNYAKAKYDKLFKAAKNALNFRYNLPSVYDVLKVYIYFIEEFDKKINLILSKIKAFVDKNKSEKFVQQIYYLDSIPGVGFLSAVTLMCEIGDFSAFRKPKQLFAYFGVDPSVNESGHFKGTDNKMSKRGSKIARRVLYAIALASVRVKRNGTAINPVLYDYYQKKKESKPKKVALGAIMHKISDIVFAVLRDNKPFVLKTPDEHKLQYQNIHKAA

SEQ ID NO: 160928 - protein, 379 aa, unidentified
MKRSGEVFVGIDTAKARNAVAVAEGGRRGEIRYLGEFDNTPDAVAKLVRKLTDRCPTAHFCYEAGPTGYGLYRQILALGQRCTVVAPSLIPRRPGERVKTNRRDAQTLARLHRAGELTAVWVPDETHEAVRDLVRTRAIAIEDYRRKRQHVTSFLLRHGRSYPGTATWRGRHLRWLDTQNFPHAAQRLAFQEMLNAIRTGAERIDRLDAMLLEIVPAWTMAPVVSAFQALRGVGFQTATTLVAEVGDIRRFDHPRQLMAFLGLVPSERSTGETRRQGGITRTGNIRARKALVEAAWTYRHPAGIGDAHQRRQAQLPQQIRDIAWKAQARLCARYRRLVAKGKRTTVATTAIAREIAAFLWDIARHVEPAQMKAAPGITA

SEQ ID NO: 160929 - protein, 303 aa, unidentified
MMVIGIDPHKHTHTATAVEPLRNQTVASLRVQASLVDYRRLLTWAGQFGERQWAVENAEGLGRHLSSWLLARGEQVVDVPTTATARVRQLSRGSGRKNDQIDAAAAACVAALQGDSRPLEAEGITDALALLDESRMNLAQTRVRLVNQLHALLRALLAGGAPTDLSATTAAALLRRVRPAGDVERVRKQIAAGLVTQIRSVDALLKSNAKQITELVTASGSTLRDTVGIGAITAGRLIGRTGRANRFPSSAAFANYAGAAPIEVASADKARHRLSRGGDRQLNAALHTVAITQIRTPGSRGHT

SEQ ID NO: 160930 - protein, 383 aa, unidentified
MDALKKVQKKRSQPMKKNSKNSRENARRKALQTRSRKTKLTVGIDLGDEWSQCCFLDEEGEIVEECRVKTTREAVKARFGELKPALIAIEVGAHSRWVSQLLSELGHEVIVANARELRAITGSDRKSDRVDAEKLARYARVDRKILRPLRHRGEEAQVDLLVIRGRAVLVKTRTQMVNSVRGMVKSFGYRMPKCSAEKFAQLKNLVPAVVKESLTPMMEALEQVQKKIEEYDERVKKLATEKYAETKVLRQVWGVGEITSVSFVLTIEDKERFGKSRDVGPYLGLRPRRSQSSGSDPELRITKAGDCFLRSLLVECGQKILSEKAPDTALKQFGLRIEARGKKKAKKRAVVAVARKLAVLLHKLWVTGEVYEPFPAAQERKAA

SEQ ID NO: 160931 - protein, 340 aa, unidentified
MPGPRARIRKVGRSGVLNPSRKEPVNSTKEIFVGIDVSKARLDIHVLPSGDAWATENQIDAITTLVSRLKSLHPTLIVLEATGGLERRVLAALLTANLPAVAMNPRQVRDFAKGMGYLAKTDAIDARVLALFAEKARPEVRPLPDTQTQELEALLVRRRQVVEMLTAEKNRLTSAPPSKRVIRAIRKTIACLESQLEDFDKNIDDAIRESPAWREKDEVLKSVPGVGRVLSRTLLGHVPELGTISTKKIGTLIGVAPLNCDSGKFRGQRHCWGGRTEVRNVLYMATLSAIRRNPVIKAFYDRIRSGKLRKVAIVACMHKLLTILNAMVRSNSRWSPAVSA

SEQ ID NO: 160932 - protein, 457 aa, unidentified
MRITIPRKRLTRAGKGTTVCRTRKRGARIAVSVTDLRRSQRLTKEALVQTLVERGCGRDVHQASVTACLLLVLRDGRVQKQIQTFGTTTRELLRLREWLLSEGCTHVAMESTGVYWKPVYALLEGALEIVVANAQQVRKVPGRKTDVKDAEWLADLLCHGLLRPSFVPPPPIRELRELTRYRRKLVETQAAERNRLLKLLETANIKLASVATDVFGVSGRQMLRALVEGQATPREMAQLAKGRMRQKLEELEPALEGKLEEHHRFLLQLQLQRVEAAEKDLAILEQRIQEKLQPYAAQFALLQEIPGVEATLAAVIIAELGVDMTVFQSAAQLASWAGVCPGNNESAGKRKSSRIPKGNVYLKTALVEAANAAARAKGTYLRDKFYRLKARRGYKRAVMAVAHKILTAIYHMLSHGVCYHELGDLYLDKLNQHHLTRSLIRRLERLGYTVTLQTNAA

SEQ ID NO: 160933 - protein, 316 aa, unidentified
MTAIGIDVAKKTLAVDAVLPDGKRRQKHCANTPAGHAELVRWIGRHAVTPVAIGLEATGGYQEAVALALHEAGYAVSVLNPSVIAAYGQSQLRRAKTDPTDAALLADYVRTQQPPAWTPLPRETRHLQALARRLDALLEMRTQESNRLDLAAAVVKPSIDATLAHLDAQIAAVKRQMATHIHQHPTLREQRDLVQSIPGIGATTAAIVLGELEVKRFASARQLAAFSGLVPRVRQSGTSVRGRGALVKIGSGRLRKALYFPALTALRCNPSLRRFAARLRAAGKAPMVIVAAVMRKLIHQIYGVLNSGRPYDPAKA

SEQ ID NO: 160934 - protein, 412 aa, unidentified
MNPVSNASPRFIAFDIHKHYALAAGLSRDGDIVLPPRKIPNDQLPRWAADHLIPSDRVVIEATTNAWHVYDLLAPLVAEVKVANPIRVKQIAQARTKTDKRDALILAHLLTANLIPEVWVPPVHVRELRHLVSQRRQLIRMHTKIVNRMHSVSHRYHLGHPKGKRFQKKDMPWREHLSPMERFQLDLDLETKKYLKNQIDRLTDKLAELSHQEPWASQAVYLMQMPGFGVITAMTVLAAIGDISRFPTPKHLVSYAGLAPGVDQSGTKNRAKPITKEGRKELRWALVEVAWRAVRSDPLWQRRFNELKRRKHPNDAITVIAHHILVVVWHLLTHKQVYRGSSHERIAYKFLTWSWRLDEAQRRHLTRPQFTRYYLLRLGIGHELTRIALNPKYPHRLASVDEVLALFPELAE

SEQ ID NO: 160935 - protein, 364 aa, unidentified
MSSVSHRSLTHLGMDVHKDSISVGILRPDDSMDVERLFHDEESVRRFIARMGDPRQLTACYEAGPTGYGLSRQLEGLGVRCRVVAPSLIPKAPGDRVKTDRRDCRRLARLDRAGELVAIRVPSSAEEAVRDLCRARGDMVIDLDRARRRLGALMLRHDRIWRGGSNWSLKHEQWLLSQRFDDPALAATFSQYRSVVEERRLRLVAIESDLLAYRDQDPYAEAVHRLCCYRGVDWIGALTLVSEVCDWRRFAKASSFMSFVGLVASEHSSGSHTHRGHITKAGNEHLRTQLIESAWAYQCGPYVGQRIAKAQEHCGAETRERAWKAQVRLCGRFRRLAARKNVKSVVATAIARELAGFLWGEMTA

SEQ ID NO: 160936 - protein, 416 aa, unidentified
MKIYPNTRAIQRYIALDIHKEYVLAGGMNTGQEWVLSPHKIEMGKFREWAKKNLCDTDAVVIETTTNVWDIYDIVQPLVGRAVVAHAGAVRQIAEARVKTDREDVKRLIRLLLADIVPEVWVPPQPVRELRGLVSYRQRLVKTGAMIRNRLHSLLHRHNLLVPEEGLADGEWWTQQEKIPALEKLQIRQELSMLQQIETHKAEVDHELGRQSLGETWGKAAVRLMQLPGIGVVIAMTVLSAIGDIHRFESADKLVGYSGLGAGVHDSGKEHIEKRITKSGRKELRWAMVEAAWRAVRMSPYWKEQYEKFLRRMRRPNQAIVVVARKLLVAVWHVLSKDETDERATEEDLAYKMLLWSWSLSEDARQGLTHKQFAKYALMRLGVQTDLTRFVRGKVPRRIASREEVLVRMAELGLSG

SEQ ID NO: 160937 - protein, 431 aa, unidentified
MGRWWAGIDWSWGLQDFVIIDEEGKVVLHLRVEESREGVEQILGALRALNPTSHRFSRRQVPIAIEDGTRLLVAELQRRRQPVVVIPPAVTSRYRGRHGAAVSKSDRGDAALLADIIRQNPGRRSFLPENSDQAAAIAVLARTQASSTQAARAIMLRLRSHLGLYFPAAVEAWSGTQHGLRRPEARAVLALAPTPRQAAALSKRRLHDTLAAAGRTRLLDEEAGRLRDLFAASALRQRPETEQAMGERTRLHLAELSIACQHAEHLSNLADTRFSAHPHHRIYRSFPACGPIVAARLFAEIGDAPERFPTGRHLRAYAGTAPITWSSGSSHTVVHRTVCNRALKATVHQWAFGALTRSPGCRALYDARRQRGDGYAAALRHVGNRLLSGLHHCVRTDQLYQEHVMFPTADGRDEVTGGQDEHLRVTLGREP

SEQ ID NO: 160938 - protein, 337 aa, unidentified
MIVIGVDVHKHSLSAVAVDEVGRQLDCIETSDGEELISWSKRVGRRRLWALEDCRHVTRGLERTLQRQRQHLVRVPPRLTAPERRRGRVRGKSDLIDALAIARAALREPLLDSPRPEEARLRELKLLVDHRDDLVDERRRCQQRLRWHLHELDPSLRVPLGALDRTVWLERLSRQLTRHQQTTQVRIARQLLARCRSLSRSIGELDRELQAQTTTLAPRLLELPGCAALTAAKLLCEIGPIDRFRSDAQLARHAGVAPLDASSGKHQRHRLDRGGNRQLNCALHRIAVTQGRVHPPAKAYLERKQAEGKTRREALRCLKRQLARTVYTTLKSELLLT

SEQ ID NO: 160939 - protein, 370 aa, unidentified
MSVRRILAKTINTDLEYEAIGIDLAKNCVSVALLTTDGEVVCIDRLDYSELEKSAQVLCPTTFAMEPCTEMNYLVQKLEAWGHRCLVIGGKNVQNYVENHYSGQKTDLNDAQALAFLAQDTQLRTIKAKDMEQQKYASLTTLREQYIKQYRQTIVSLKGICQAWGLNISKGISGKAQLKDLIENHAAFPEELRESLVDMVTHAQTTQKVLNKITKTLEVLAKNDKVCQLIQTIPGLGTICSCRLRATIGDIKRFKNPKDFPAYYGLVPRSIATGHNEKKGKITHRGDRTMRSLMVQGAGCVIRLATCGKLKSKQLTKWILKKQKEKMPWGKLVCAVAAKLLRIVRAILISSKPYNPKIAGVAKCSLSKGS

SEQ ID NO: 160940 - protein, 311 aa, unidentified
MNTKNDPIHYVAIDVSKSTLQVQDDRRAFAVGNDPNGHRELLVHLKTCANPLVVFEASGGYERGLLQSLHKAAMPLAMVNPARVRDFARSEGVRAKTDPIDGKMILAFAKSKALRPMEAPSEACVKLAALLDRRGHLVEQLAREKNRLQNSEVFIHRSIKRMMRILEKEIAAIEKAIDQLVGSDPGLKSRSEIIQSVKGVGIITAWTLLAYLSEIEDLNRNRLVALAGIAPFNRDSGKSSGRRSIIGGRAKVRKCLYMAAHTAASCNPVIAAYVQGLRDRGKPYKCAIVAAMRKLLIHIQSLMKNAQLSPC

SEQ ID NO: 160941 - protein, 466 aa, unidentified
MENNYILYVGMDVSKGKADAAILKVSDRRSVKPKFLRKKLSFKFVKSEVASFLETVRSYSDVNCTSICFALEVTGIYSTNVYDYIKANLYENESIKFLNTDFVNQWRIAHNIAKSDPLDAQTISTIIGTDSDVQFVNDNVFENKNGYQDLKALVHRHYQIKKIYSQEINRLIAQCDCLFPELQYVFEPKSAAFIAVLSSYPTTHDIINASRVEVFDVVYEATKHRCSMDKVDKLFELCQDTLVPDDISSYGKSIILDLVENIKNIKGQLKSIERYIKDIASLNPAYKLLLTITGCGPITAATVIAETGNIRRFKNADCFVSYSGTSPRNKRSGTSVETMGKISKKGSRYLRHAIYMIAEFARRHNPVLKHQFERIKNGNKKRHKLANIAIANKIARYIYSIMKNKSSFVILHDHIMRLPEETRDTFFNSISLDFPKNTRKQIYQYSDINGELHRFVYIKTDEMIPA

SEQ ID NO: 160942 - protein, 331 aa, unidentified
MDIKEVIGIDVGKLKNEARLHLAQKVFEFDNTLSGFKQMQKWVIKNTGLQKDQLMFAFEHTGLYSYPLSLFLTENQYNYVVIPGLELKRSMGITRGKDDKIDAKRIALYTYEKRESLSPYQLPQKEIIQIKRLLSLCEKLVKQRAGFIGTLGEYKRFLVKKDNQMLFDVHEKMIIELSKQIDKLEKQLDDIIKGDGQLKQMYDLITSIKGIGPQTALFMIAFTNGFSQFQNWRKFASYCGIAPFPNTSGISVRGKTKVSNLANKKIKSLLDLCAKTSIQYNIEMKIYYQKRVEEGKPKMATINIIRNKLLSRIFAVVQRGTPYVNTLAYAS

SEQ ID NO: 160943 - protein, 374 aa, unidentified
MSQKLESAIAVIGIDIGKNSFHVVGHDERGAIVLRQKWSRGQVEARFANMPPYLIGMEACVGAHHLSRKLKALGHDVRLMPAKYVRPYSKGQKNDFRDAEAIAEAVQRPTMKFVATKTADQLDLQALHRVRERLVSQRTGIINQIRAFLLERGIAVRQGQRFLRAELPQILATPPDALSPRMVRMIEDLAGDWRQLDERIEGLSSEIGTVARQDAGCERLMSVPGIGPIISSAMVAAIGTGDAFTKGRDFAAWLGLVPKQMSTGDRTILGKISRRGNRYLRVLFVQAAWVVLIKPEIWERYGLKPWIEAAKKRLHHNVLAIALANKLARIAWSVLARGRAFEVQKMMRQRTNLPDSYSAPTATGTAQNEEPAMT

SEQ ID NO: 160944 - protein, 359 aa, unidentified
MQTQSNKIDFNGQHIYVGIDVHLKSWKVTIMTEKLPFKTFSQDPKPDQLYHYLVRNFPNGIYHSAYEAGFCGYWIHNKFIALGIESIVVNPADIPTTNKEKDQKADKRDSQKIAKALRSGDLRGIHVLSTRTLEDRCLIRTRAAIVQDLTRNKNRIKSFLHFHGIEMPENFKQMNHHWSKRFMAWLKSLEVIEPSAKKSMDLFISEAEHLRSTILEATRGIRELSEKEPYINQVVLLRGIPGIGILTAMIILTELETINRFGNFDKLCSFIGLIPTTHSSGEKENIGGITHRGNSFLRGALVESAWIAARIDLALNKSYHDYCKRMEPNKAIIRIARKLLNRIRFVLKNNQPYVCSVVK

SEQ ID NO: 160945 - protein, 293 aa, unidentified
MSIVGGFDVHRRQITFDYVDTDTGRLQRGRIAPACRAVLRRWLAERFVGRSDVEFAVEACTGWRFVVEELERAGIEVSLAETADTAAARGRKRRAKTDPADAAHLRELLAGGRLPTSWIPPEQVREMRAILELYKDLRDEHTAWVQRIHATLFHHGVPQLGTGGVTSPAGRARLQAGEGLSPAGHQATMVALRVLDALDTELDALHRQIRTFANQQPGCKALQAQYGVGPLTATAIWAMMGDTRRFSASRQAVRHTGLDVTVYSSDGKRAPGHLAKQRPAAAALGVVRGGLPG

SEQ ID NO: 160946 - protein, 333 aa, unidentified
MQFETVIGIDVSKLSLDLALISRDGEVESFKVENKPLSIKRFFRKISKTFDMSKALICAEHTGHYGYPLRKVCLEHNIALWLEGGAKIKQRSGVTRYKNDRVDAIRIADYAKRHQDKAKIQTVEDTTLEAIRSLSSERELFIKERAKYKTHIKDLKGFMDEELYKARSRRLKKQVESLSKLIKDIDQQIKTLLEANETLSEQKAILTSIDGIGEQVALHTIIATGAFTKFGSGRKFACHVGVAPFAFESGTSQKSRRKVSYRANIHLKTLFHMAALSAVKMKGEFRDYFERKVAEGKNKMTVINAVRAKLINRIFALIRDNRKHEINYNLPLA

SEQ ID NO: 160947 - protein, 342 aa, unidentified
MKFYCGIDLSARDCHVCVIDQQLRVLVQQKLRNELPKICQLLEPYKANLKIVVESTFNWYWLIDGLQAGGFEVILAHTLGLYLITGAKVKTDRRDAYALAKLLLVGAVPTAYIYPAEIRPVRDLLRRRLHVVQVRAGEYGSLRRLLLRQGILSHKQQEIKSATESELEQWFAHPLVRLHASQELQRIELYSQQIARLEETILALAQTEQSYQLLQQLPGVGQTIALTILYEVGELSRFANAKVFSSYCRVIPGVAQSGQVTRRGRGSKQGNHYLKAAFSQAAVHAVRCYPQVRRYYDRQLKRHQGRGRQMICYNIIAHKLAQAAFHVLKEQTEYRAELLFGR

SEQ ID NO: 160948 - protein, 394 aa, unidentified
MRFAGVDIASETHVVALVDEDGKVLVKPTAFAEDAAGYEKLFAQLGASAELLVAMEATGHYWKNLFAALAARGFSVALLNPLRTHRFAEEDLQRTKTDAIDALGIARFAAQKRPPATRLPDPATEELRELVRLRERLLQDFGDRVRQLHRLVDLGFPEFTRYVKGLDSELASAILHDYPTAAAFRGVSAKRLAALRYDGRHQVGAELAGLLIAAAKRSVGHHHGEAYRVQVRYACEDLDILRRRLRQLDRDIAGTLGAHEVGTLLTSIEGIGPNTAARLIAELGDPAHFRSPGALAAYVGVVPALSQSGKRKNTRAATTPIGNARLRAALWMPTLTAVRRNPWLRAHYQRLLARGKLPKVALVACMHKLLFAVYSVAKHRRPFVARLATAETTP

SEQ ID NO: 160949 - protein, 330 aa, unidentified
MNNYVDVIGIDVSKLTIDAQIHVRAVHRVFSNTPKGYRALLSWVETYLEEQVYFFCFENTGHYSTNLSVYLSENDIDYVEESPLAIKRSAGIVRGKTDKLDSAMIARYAWLYKEELVLSSPKEQDIQELGRLLSFRDQLVRDRTGKMSSLKEILNLLSSPSTDDCCRIIKKTIHYLTKQIVALEDHIKKLMEKEESLQRNYELLNTLKGVGLILSCQILYHTGNFKRFDNWRQFSSYCGVAPFEHSSGTSIHRKNRIHHIGDRKMKTLLTLASVSAIQYDRELNQYYKKKVAEGKPKMVALNNVRNKIISRAFAVVRRGTPYVELQRFVA

SEQ ID NO: 160950 - protein, 355 aa, unidentified
MSSEKYIGLDVHQATICVAVMDAKGKVVMESILETKATTILEFFAGLRGTLSVTFEEGTWAAWLYDLLKPHVANLVVCNPRKNALLKHGNKSDKIDARKLANLLRLNDLEPVYHGETGVRMLRELARSYLTIVKDVSRVMSRLKAIYRSWAIPCAGRDVYYTRHRGEWLGKIPEAGCRRRAEQLYQQLDMLQPLRQQARRELLAESRKHTITAKLRQIPSLGPIRSALAVALIQTPHRFRTKRQLWTYSGLGLETRDSGEYHYVEGQVRRRKKQVFIRGLNKDHNHDLKGLFKAAATRASVQPGPFQDFYQRSLAKGIQPTMARLTLARKIAAITLTLWKKGENFDAEKLKAQAA

SEQ ID NO: 160951 - protein, 391 aa, unidentified
MIFVGIDVAKDKHDCFILNSEGTVLADVFTIANNRIGFETLLSRIQSCSQGESKIKVGLEATGHYSYNLLGFLLDSDLATYVINPLHTNLYRKSLSLRRTKTDRIDARTIAMMLMSDVDLKSYSNTAYHNEELKSLTRYRFDKVKERAKLKSSVARLVNILFPELEKLVSSLHIAVVYALLSNYPGASYIANANTEELAETLCTASKGRYTKSKTAEIQVAAGVSIGSKMPAKSMELKHTIALIRELDKEISEVESAIDKITSQMDSPIFTIPGIGRHMGAMILAEVGDFSNFASADKLLAYAGLSPSTYQSGQLQNCYAHMEKRGSRYLRYALFNAAKYVCLWCPTFSAYLEKKRSEGKHYNVAISHAAKKLVRLIFAMQRSGKAFLADY

SEQ ID NO: 160952 - protein, 348 aa, unidentified
MIIGVDPHKMSHTANAVDPATNSTAASLRIDASLVGYRELMRWAKQFPERRWAVENARGLGRHLAQWLVARGEVVLDVPSTATARVRELSRGSRRKTDVIDAAAAASVAALHGDATAVAAEDHTTVFALLEERRANVAAQRVRIANQLHAVLRDLAPGGAALALTAKSVATLLRTIRPDSPAERTRKELAQDLVRELRAVDASLADIEARMTVALDEHGTRLRQIDGIGPVTAVRLIGRTGIASRFASEHAFATYAGVAPIEIASGDHTRHRLSRAGDRRLNSAIHLIAVTQVRMRNSIGRAYFDKKIAEGKTRNEAMRCLKRRLANHIWRMMIADERRPPAAREIAA

SEQ ID NO: 160953 - protein, 418 aa, unidentified
MASGHENRASRSYEGGASKLRCGHPKLEDLLMLQTVAALFPAAVDYERTLVLAIEVSNKSWVLAAQVPGLPHTKAKRTVNPDAEALLAAIAGYRTRAAATGRSIERVIAVYEAGWSGFWLARWLIRRGVEVYVIQPSSVPVDRRMRRAKSDGIDAELLLRTLLAWLRGEPRVCSMVPVPDAADEDARRCVRERTELISERVGLTNRIGAVLATLGVSDYNPLLRSRNRRLAELRTGLGEPLPRNAHAKIERLLARLELVLTQIAELERERDAVVETEASDKASKMIQQLTSLRGIGVQSATVLVREAFVRRFANGKTLGSYAGLASSPFSSGGVDREQGIGKAGNRRVRTVMVELAWLWIRYQPAAAQVCWFRERVGSTGRRVRKIMVVALARKLLIALWRFVVDGVVPEGAVLKSAA

SEQ ID NO: 160954 - protein, 355 aa, unidentified
MNSSKYIAMDVHTATISVAVRDAAGKLIMESVIETKASTILQFIQGLRGDLHVTFEEGTWAAWLYDLIKPHVTNVVVCNPRRNALLKEGSRNDRIDARKLAELLRTNLLRPVYHGEKGLRTLKELARAYLTISKDLTRVMNRVKAIYRSWGIPCGGQSVYNPRHRKEWLSKITQASVRRRAELYYEQLDALVLLRKQARQELLAEGKKHQAWKLLRSIPALGPIRAAVLMAIVQTPHRFRTKRVLWKYSGFGVVTHTSADHRYVKGQLERSKKPVSVRGLDRDHNHHLKDLFKGAATQASTRKGPFLEFYEALVAKGMRPEMARLTLARKIAAITLTVWKKGVAFDAKYLKPQTA

SEQ ID NO: 160955 - protein, 345 aa, unidentified
MVMIGIDPHKRTHTAVAIDTAERVLDERLVRATSKQVPELLEWVKRLDGGDRIWAIESAGGLGYLLAQQLLAAGEQVVDIPATLASRVRLLGTGRSDKNDPNDARSVAIAALRAAELVPVRVEDHASVLRLVSRRHTQLGWSYNKTACRLHALVADLVPGGIGKEVVVCQVRSLLVDHPSIGAVAVERHALALDLVDELERLNRQRKALRKRIAVAVDASGTTLTEIFGVGDVGAAIILGQVGDVGRFRTADRFAAYNGTAPIEWSSGNPARPIHRLSRRGNRTLNHVIHIAAVTQLRHRHSPGRAYYDAKRTQGLTGRAALRSLKRRISDAIYRRLVADTARRH

SEQ ID NO: 160956 - protein, 343 aa, unidentified
MQTVTTIRFDIAKSVFQVHGVDAGGDVVIRRQLKRRHVLAFFQKLPPCLVGIEACASSHYWSRELQVLGHTVRLMPPAYVKPYVKRQKNDATDAEAICEAVTRANMRFVPTKTPEQQSCLMLHRTRHLFIRQQTAVINSIRAHLAELGIVAPVGRKGVTELLHVVADPNDKRVPEVARACLAALGTQLLSLKQQILEFDRMIMAWHRSNQTSKRLHCIPGVGSMLATALVASVADPRTFRSGRNFSAWIGLVPKQHSSGGKDRLGSISKQGDRYLRGLFVAGALAVIRYAKIHGIKHRPWLTALLARRPAKVAAIALANKIARMAWAMMAKGERYQQPAALAA

SEQ ID NO: 160957 - protein, 378 aa, unidentified
MHSMTQQDTVVVGGVDAHADTHHAAALDQRGALLSTNSFSTTTSGYRQLLDWLSSFGEIDAVAVESTGSYAAALVRYLREHDIRVVEVNQPHAHTRRRVGKSDPIDAEMAARLFQAGKAKAAPKQTNGIVESIRMLRVARHSAVKSRSAATVQLRDIIITAPQELRDQLSDRKTLRGKASVCARFRPSAGDLHSPSQAAKFALRSIAQRIDSLDHEITTLDRELEQLVQTAAPRTTQLLGISTGHAGQLLVTAGENIERVHDESSFSMLCGASPIPASSGKTTRHRLNYGGDRQANRALHLIAVCRMRYCERTRAYVKRRTAEGKTKREIIRCLKRYIAREVYNTLRSDLADVTRARPQLTTTIMCGAPGSGITRKRT

SEQ ID NO: 160958 - protein, 448 aa, unidentified
MSERTTACEAPCISKTPDSAAVRATKGKPMKPWIEITHYAGFDWARDHHDVVIVDRQGQIVADFRIEHSLAGWQAFHDQVKSYPGLAVAIETNQGTAVDQLLSLEATIFPVNPLSAKSYRERKAPSGHKTDRLDAWSLAEALRQDGQQWKALQPMDPLTQQLQLLCRDEIGLIEQRTALINQLQQALVEYYPAALEAFEDWTQPFCWDFIIQFPTPEKLVAAGQRRWEKFLHTQKLWRPETASKRLAIFQHARQFCGSAAVTSAKSLLALSLAKLLNALQLQLDQYRQQIEALFKQHPDHDLFGSLPGAAQTLGPRLLGEIGGDRQRFEDTEALQCVAGTAPVSFQSGQIHRVHIRYQCNKILRHTVHLWAQCSLRVCPWAEVYYRQKRAEGKSHACALRCLGQRLLKILWRMIQTRRPYDADLHARNQKKHGSWVLALMKPEPKAGG

SEQ ID NO: 160959 - protein, 357 aa, unidentified
MQRNEISFKGQTVFIGIDVHKNSWSVTTLTEAGLKRTHPQKASAKELFDFLNRYYPEGEYKAVYEAGFSGFSTYYALKEYGIDCIVINAADVPTSQYETVMKSDKVDSEKLAKSLRSESLKGIYIREKDNLDDRSLVRIRTTIRKDLSAYKHRVKHMLLNHGVEFPEKFERMNNCWCRAFIKWLKEDVKLMSETRRSLDILIDQVETTRKNLLKVTLEIRHLSQTEKYRNRYNLLFGVPGIGLITAMTILTEVYDVTRFRNEKQFASYMGLIPTCHSSGDKIIHGEKTFRGNKQLGPMLIEASWVAITKDPYLSVAYRTYLKRMTPQEAIVRVARKLSNIIFSVLKTGKEYVPFEGN

SEQ ID NO: 160960 - protein, 334 aa, unidentified
MDTHAGMHVAAALDSIGGLLGVQEFPATAAGYASLLSWLRSFGTLAVAGVEGTGSYGAGLARHLAAAGVRVVEVDRPDRQDRARQGKSDPLDAVSAARAALSGRASGAPRGRDGAVEAIRALMVAKRSARQERIQAINQARALIMTGPEELRARFVRRSPAQLIEAIAALRPRPGDVPGYATRVALRELGRRAQFLDAQLDRLDELIGPLVTARAPGLLALHGVGPDTAAMLLVAAGDHPERLRSESSWAHLCGVAPIPASSGKTVGRYRLNRGGDRQANSALWRIVIVRMNSHSATHAYADRRSEEGLSKKEIIRCLKRYVAREVYRQLRNGA

SEQ ID NO: 160961 - protein, 384 aa, unidentified
MTEQSAAATTFDHNSTLVLALELSGKGWQVGAVLPGVARRPRRSVAPRDVAGLLAQIERWKAEAQRAGRTVLRTVLAYEAGRDGFWIARCLLAHGIEVQIMHPASIPVERRGRRAKTDRIDLDMLLRTLLAWLRGEPRVCSMVRIPSETEEDMRRPERERERLVSERIALENRIENLLCLHGIAGFKPRLKKAAERLDGLRSFAGAPLPPMLLEELNRLMTRHRLLSEQLREIEAAREQAALAAEPDCAVQQIQMLARLVGLGLATASGLTREVFCRSFADRRAIAGFVGLTGTPFNSGGSEREQGISKAGNPRVRRILLQLAWRWLRFQPDSALSCWFVERTGGAKGRIRKIMVVALARKLLVALWRYVETGEVPAGARLATA

SEQ ID NO: 160962 - protein, 351 aa, unidentified
MNARSDAACFVGVDLHKDTLVACTIAAKDREVAYRKIACVAREKVREFLANLPRPSVVAIESVGFYRWLWTEAEPIVDQVVLADARGCRALAGRRIKTDREDAFNVAELLMTGRLPTAWAPPNHIQRLRDLTRHRNGLSRDHAKTLHRVKSIMNRLNRPGPARMDAAGLQRYLLASVERIEADDLMMLWQHQRRLVEVEQDRSAIERRIIDVMRAEEFRRLREILESIPGVGLITAATAIAEIGDFSRFPDAKAIGRYAGLTPTGYSSADKHRLGRICKTGSPDLRWVLQQAAWTAIRCEPAMKKVATKISKGSKTRKKAAAVAVARKLLVLMWTLARKDELYKAREPLAA

SEQ ID NO: 160963 - protein, 337 aa, unidentified
MNITTIGLDIAKRVFHVVCCNQQGHLMKKKMLRRAQVHSFFQSHPTCLVALEACATSHYWAREIKKCGHTVKLIPPQHVKAFLIGNKNDFNDAFAIAVAARQAHIKSVGIKSIEQQDNQAQHKAKSLAIRQRTALCNQARGLLAEYGICLPRGVSTIRKNIPILLDDNNEELSGVFKMTLRQLAEQLASLDASIAVFDKAIIQAVKNNDICKRLQSIPGIGPMVSSAYFNEVGNGSAYRKGRDVAASLGLVPKQHSSGGKDVLLGISKKGNNYLRCLMVQGSQSVVTSARKKDDKLSQWLNRLVETRGHNRACVAYANKMARMAWAVTVSGEEYSLS

SEQ ID NO: 160964 - protein, 408 aa, unidentified
MNTLYVGIDVSSKSNVVYLMLPNGDKHNNFSVANSHEGSTQLVKRILSALTSHSLDTVLIGLEATSVYGDNLVYFLREDATLAPFNRKIHVLNPKQVKKFHDAYNDLPKNDYVDSFVIADCLRFGRINKEVYMGDYRYKALQNLTRARFFAVQNLVKEKQRFMNVLFKKYSTMTQEKVFSDTFSTTALAVYDEFESAEALANMDLHELTDFIIEKGKNRFPDPDAVAKAIQKAARNSYRLPKTVNDSVNQVLSISITSMKALESQIKEFDKAIKAQMELLPNVLISIPGIGPVYSAGIMAEIGDINRFNSQAALAKYAGLAWKQHQSGGFESEVTRLIPSGNRFLKYYLCEAAFSLVRCDKEYSDFYHLKYKEVNRCQHKRALALTAHKFVRLVFRLLKDNRLYCPAK

SEQ ID NO: 160965 - protein, 349 aa, unidentified
MKECSTVSFKGQVIFAGIDVHKNNWNVNLRHCFRELDKFSMNPSPDELAAHLKRSYPEAEYRSVYEAGFSGFEPHRRLCAQGIKNIVINPADVPTSGKERAYKSDRVDSRKLARELESGSLDPIYVPPPENLVLRNLIRRETQIVSNIVRIKNRIKSHFFFSGLNFSGWSGRSLKKMESDAAQRFDDALLSKFRELHYLRLEKLQIVRDEKNCLLRLNRDELQTYLQSIPGIGFRTALILQAELWEMNRFATRDALSSYVGLAPHLVGSGEHEEVRSSGNRKKKELHYILIEAAWRAVTFDMEQRARYGALLHKGCNSQRAISVVAKKLLYAIHAVWTQQRLYRKAQME

SEQ ID NO: 160966 - protein, 370 aa, unidentified
MSIKRILVNTIDTDLEYEVIGIDLAKNCVSAILLTTDGEIFGIDRLDYQELEKSAQELSPNIFAMEPCTEMNYMVQKLEDWGHHCIVISGKNVKDYVESHFSNQKTDLNDAQALAFLTKDTQLRTVKAKDPEQLKYASLTTLREQYVKQYRQTMVSLKGICQVWGLSISKGISGKARLKDMIENHAAFPAELRTALVGMVAHAQAVQKDLKSVTKILEELAKKDKACQLIQTVPGLGTICSCRLRATVGDIQRFKHPKDFPAYYGLVPRSMATGHNEKKGKITHRGDKTMRSLMVQGAGIVINQTTKGNLHSKQLTKWILKKQKEKMPWGKLVCAVAAKLLRIVRAILISGKPYNPKIAGVAKCSLPKAS

SEQ ID NO: 160967 - protein, 392 aa, unidentified
MEQIHDRVAGLDVHRDQVAACVRTPGPRGGVQAEKARFDTTAGGLAALAEWLAGHAVALAAMEATGVYWKPVYYALEGRFLVWLCNAHHVKNVPGRKTDMSDAGWLADVAAHGMVRPSFVPPPPIRELRELTRYRKTQIDVRAAEIARLEKVLQDAGIKLTSVASKVLTQSGRAMIEALIAGQRDPAALAGLAKGKLRPKIPQLTAALRGHFGAHHAIVAARILAHLDFLDETIGALDAEVAARVAERYQSAARLLAEVPGLERRSVEVIIAETGADMSRFPTPAHLASWAGLCPGNHESAGKRRRVATTPGNQWLRRALIESARAAARTRDSYFGAQYRQIARRRGPNKAAVAVAHSLLDVIWHMLTTGEVFTDLGADYFTSRQDKEHQTR

SEQ ID NO: 160968 - protein, 454 aa, unidentified
MGRKSNMEKMPIVNPNAAGIDVGSKSHFAAVGQSDDQIREFGCYTEEMRELCQWFVDNGVTTVAMECTGTYYKGLFVMLQEYGIEVLLVNGRQTKNMKGKTDVKDARWIQKLHALGLLTGSFQPPEFTEAVRKYSRHRQGMVQDAATYIRKIQQAMRLMNLRLDVAISDVTGKSGRAIIEAILAGERDAQKLAGLCDRRIKKSKEEIARALTGHWRDEYLFELKQSWEIYQFYYTKIRECDTELEHLLEQGVEHNEQQDGEQRPAYDEKNRPVKKLNKNDPKFDIQQLAFQLSGGVDLSTIPGVGRNTILSIIAEVGLDMSSFKSAKAFASWLRLAPNNRISGGRTLSSHVPKGATPLANALRKAANVIGDLKTGGLMHFFKRIAYKKGRPAAITATAHKLAVIIWNMLTKKENYNYYNDEQYESKIRELQIQNLNKKIRALGIQAHEINFTTN

SEQ ID NO: 160969 - protein, 293 aa, unidentified
MDNHTQYSGFAGVDLAKKVMQIHFVTADGEITDKSAKRAEFLDFFRNRSKCLIGMEACGASQDWARKLETMGHEVHLMSPKAVKPFVSGQKNDHNDAIGIYKAMFNGVRRVPVKSTEIRDLQTLRRIRSQVTKDRVKEINHVRGLLAEYGIVMGKSLNAFNKDVSSALEILKERGDVSPLVAEELRTTVESIKTKIERQKKLDREIEQLARGCKNYENFLKTPGVGPFTAAMLCVLLCDPSIFANGRQFAAYIGLAPRSRGSGGKNYVTGIPSKFNCDSESRAVLVECAQAIA

SEQ ID NO: 160970 - protein, 315 aa, unidentified
MMNEQTYCGIDVAKRHFVIGLSNQKRTKTETNNPKGIAHTIEYLRRFSVDLIVLESTGGLELPLAKALHHAGFRVVIANPRQTNQFAMSQSLAKTDNKDAKMLAFYAQMLAMRDNVAQQLYIPPTPEQEQLEALVSRRNQLVEMRSAEKNRLEQVHSTQRLSVEQHIDYLSLRIDELDSEIEHHLKHFDDTIKKFKDIKGLGTQTIAVLMSMLPELGQYTHKQIASLVGVAPHPKESGNTKWKSRCSGGRKAVRNALYMATFVCVRFEPKLKQFYERLRANGKAFKVAINACMRKLLTILNAIVRDGSQWDAHAL

SEQ ID NO: 160971 - protein, 332 aa, unidentified
MLKLLHRWREEAEKAGRKIERIAVAFEAGRDGFWLARWLRTRGIEAHVIHASSVAVSREHRRAKTDRLDTELLKRAFLGWLRGERDHCKMVAIPTSKDEDAKRPNRERESLVEEQTRIVNRMKATLIRLGIRGFNPKLKKAAGRLEDLRTPEDEPIPPNTMAELRRDMDRRRLISDQIRQIEEARLDRLKQMPGDGPHAMLRLLARVVGVGIETADMLVQEVLARNMRDRRAIARYAGLTGSPDESGTKRREKGLARSGNARVRRGMIQLAWRFLLFQKNSALAQWFRTRTENARGTRKLMIVALARKLLIALWRLVREGVVPDGVVLRPAQ

SEQ ID NO: 160972 - protein, 383 aa, unidentified
MRIIHYIGMDVHTTNYTLCDLSRHINPISGDVEDRMGCPITIAPDYKLVVKFVDKLRSMNPTDDVYFICGYEAGCLGYSLYHQLTDCGIECVILAPSTMAVSRDSNVKKNDKRDAAVIAKCLAFSTFKSVFIPSEQDDQVKEYIRMRDDQKQHLKENKQQIMAFCHRHGMTCEHANWSQKHLKWLKEYPLSPIYRETLDEYLRTYAYLTDKIESLDQRIKEFAQTPEYKSRVDKLVCLVGVQEHTALATIVETGDFSRFPTANHYAAYLGLIPAERSSGNKQGLYSITKAGNAHIRTLLTESANCFSRRKTGQKSASLKARQSRNSREVIAYADKANERLRRRFQHLVFSGKKHNVAKVAVARELACFIWGLMTDHIDLLGVG

SEQ ID NO: 160973 - protein, 343 aa, unidentified
MEYYVGLDVSLKQTSICVVDQSGSVVREGVVDSDPEAISVYVGSKAPGAVRIGLETGPTSTWLWTELKRFGLPVICIDARHAKAVLKMQINKSDRNDAIGIARIMQTGWFKEVHVKDVDSHSVRALLASRALLVKIKRDLENHVRGLLKNLGLVIGRAKFNVFAVRAEELIEGRRDLIAAIRPLLEARNAVEQQVSELDRKVMRLARHDVQIRRFMTVPGVGPITALAFKATIDDPARFARSRSVGAYVGLTCRRHASGEVDWSGRISKCGDAMLRSYLFEAAGVLLTRVPKWSAVKAWGVKLVKRNGLRKAKVAVARKLAVILHRMWIDGTEFNWSKKEIAA

SEQ ID NO: 160974 - protein, 319 aa, unidentified
MAQNDLVVAGIDVAKDKVDVCIRSLSLKRAFASTAEGRGELASWLRRNKVGKAVMEASGGYEREWAKALRDAKIEVRIVDPRRVRSFAQSAGRLAKNDTIDAEMIAWFAETFDEARGQAYDATREQLHQMVHARQALKDMQSKLASQGEHAVPAAVQRVHARISKTIAAELVTIEAAISALIQATPHFTELAEIIESVPGIGRTTSAALIAAMPELGQANNKIVASLLGVAPFDDDSGRRRGERHIKGGRRRTRNVFYMACLGAATQHNPVLKAFYDRLVAKGKLKKVALTACMRKLISILNIMIERRQKWDAKRYAVG

SEQ ID NO: 160975 - protein, 348 aa, unidentified
MDNATRWIGIDLHRRRSQVAVIDEHGELALSKRIVNDRQTFLELLGDPDGAHVVLEATYGWEWLAELLEEADYDVHLAHPLRTRAIAAARVKTDAIDAKTLAHLLRAGFLPEAYIAPRELRDLRELLRHRATLTRMRSAVKNRVHAILAKHGITNEHADLFGKGGREFLASLELRDAPRRRLDSLIALICDFDREIETTTTEIEQRAKADDRVDVLTQIRGVGRYTAMLIIAEIGDIHRFPTARHLCSWAGLAPSVRSSDGKARLGHITRQGSPALRWALVEAAQKITTGSGPLREKFERIAKRRGRKIAKVAIAREILTLAYYGLRDGEIRCLARRSRASAKAKLAA

SEQ ID NO: 160976 - protein, 334 aa, unidentified
MENIALIGIDLGKNSFHIHCQDHRGKAVYRKKFTRPKLIEFLATCPATTIAMEACGGSHFMARKLAELGHFPKLISPQFVRPFVKSNKNDFVDAEAICEAASRPSMRFVQPRTESQQAMRALHRVRESLVQDKVKTTNQMHAFLLEFGISVPRGAAVISRLSTLLEDSSLPLYLSQLLLKLQQHYHYLVEQIKDLESQLKRKLDEDEVGQRLLSIPCVGTLTASTISTEIGDGKQYASSRDFAAATGLVPRQYSTGGRTTLLGISKRGNKKIRTLLFQCARVFIQKLEHQSGKLADWVRELLCRKSNFVVTCALANKLARIAWALTARQQTYEA

SEQ ID NO: 160977 - protein, 356 aa, unidentified
MAEGTWVGLDVHARKVVAGVLDGGSGEVRTLRVSALPVETVQWLRGLPAPVRVAYEAGPTGYGLARACSAAGIACLVAAPSKIQRPPADRVKTDRRDAERLARLLRLGELVAVRVPEPHEEAARDLVRAREDARGELMRARQRLSKLLLRHGVVYDASAWTGAHDAWLRRQRFASKPLTFVFEESYATVAQAKVRRDALEQAIAELAAAPPFGDLVGRLCCLRGVSTLTALALTVELGDWTRFRPQSLGPFLGLTPSEDSSGERRRLGGITKTGNTHARRLLVEAAWQQRRPMRDSATLARRREGQPASVCARADQSARRLHRRWQALEQRGKRRTVVAVAVARELAGHCWALATM

SEQ ID NO: 160978 - protein, 441 aa, unidentified
MQILFSRCCGIDVHKDSVTACVLIYAEGQEPEVRKKEFPAHFKSLGNLRFWLMAQKVTHVAMESTGVYWKPVWQALEGHFELILANPFQIKTVPGRKTDARDSQWIAELLAHGLIRPSFVPPRATRDLRDLTRYRVKLVQERNRVHNRIHKVLEDACIKLDTVASDILGATGRAIIQAIIAGQEHPDWLADKARGKLRGKRAELRLALRGQITDHHRLMLRELLEDLEFVEQKISRLETEIATQVDHGKLDRLCSIPGVDLITGCTLLAELGSDMSVFNSPHHAASWAGLCPGNHESGGKRLSNRTRKGNQWLRRALCQAAWAATRKKNSYIAAFFYRKAGKHGMRKAIVATAHKLLIISFCILRDGTEYQELGDNFFDRLHPERTRNRLVRRLQRLGLEVTLQPRSDIPPALDPPDRSTARKRGRPCKCTERGIPCKHVP

SEQ ID NO: 160979 - protein, 347 aa, unidentified
MLHVGLDLSRTRLDVHVMDEAGAPLAVTTAAPDAGGLASLAHRVGELGGPVAAVIESMNGARFVHDQLELCGWEVEIADAVKVKGFAPLACKTDKIDAWVLAELSRRDLVPAIWLPTPGIRGERERARWRLHLVRHRTALKNRIHATLLAFGHPCPVSDLFGAAGRRLLEDLQLPEPWAGDVTAALRLIDDLDGEIDACEAALRNLGAAHAYVPLLMTVPGIGWVLGYTIAAEIGDIGRFPTPKKLVGYTGLCPAVDQSGGHDWRGELAKNGPKYLRWALIEAATHAARHPVYAERYQRTKTRLGKQRGAKVARIDIARKLTEAIWWMLTTHKPFAPAGAPHSALAA

SEQ ID NO: 160980 - protein, 431 aa, unidentified
MKYKQSKKQNQRITRISDKTLVVGADIAKEIHVARAIDYRGIELGKDCVFSNTRSGLEQLVQWMKELQQEHAKSDVLFGIEPTGHYWFNLAEYLGQQGIPLVIVNPHHVHKSKELEDNSPTKNDYKDAKVIADLVRNGKYSEPKLPTNLYADLRILMNLREKIMVNLGQVQRRMQNWQDRFFPEYTEVFKDWEGKASLITLSEFPTPAEIVALGAEAIVKRWKKDVKRAVGTKRAEQLVETARRSIGLTEGLPAAKIEIKTLLEQYEMFARQLEEILHEVERLLAQIPGTKEMLTVPGVAVVTLAGFLAEVGDLSGYEHGRQIIRLAGLNLKENSSGKRKGKTGITKRGRARLRALLFRAVMPMVAKNAEFKALHQYFTTRRENPLKKKQSLVALCGKLIRVLHTLGTKQRPYDANDVLGPIRQAQLQMVA

SEQ ID NO: 160981 - protein, 393 aa, unidentified
MRVPHEDRPGRRLQEVRTFATTTPALLGLRDWLICQGVTLVVMEATSTYWKPPFYLLEDAVECWVVNARDVKNVPGRAKTDKLDAVWLAKLAERGMLRPSFVPPPWQRELRDLCRYRRTLVQERTREKQRAEKLLEDTQIKLSAVISDIFGASGRAMLEALIAGQTNPAVLADLARGSMRGKKSVLQEALTGQFRDHHGWLLRMMCDRIDALTAQIDALTARIDEAIAPFAHQVAQLDQIPGVGKTGAQELIAEVGIDMTRFPTAAHLVSWAKFAPRARQSAGRAKPGTTGKGNPWIGGTLGEAVIGAARTKTFLGSRYHRLARRRGKRRALVAVGNSLLVIAYHLLSDPGARFTDLGPDWHDRLAPLRRKRQLIAELERLSGKKVTLQEAAA

SEQ ID NO: 160982 - protein, 424 aa, unidentified
MKSIVYVGMDVHKESYTLCCYSFEKDELQYKQTIAPDYKMILKYLEQIRGHHSGEVEFECGYEAGCLGYTLYHQLTERGVKCIILAPTTMAVTNKNRIKTDKRDAGNIARCLAFRTYSAVHIPTAEDEAVKEYIRMRDDQKKALKIIKQQILAMVLRQGYRFEGGKNYWTIKHVAWLNSLDICGVLQETLDEYLVTYEYFTDKIVRLDKRIEEYACGERYQDKVNKLKCLIGVKTHTALSVIVEVGDFKRFAKAEKLAAYLGLVPGEDSSGGKQTRLGITKAGNTHVRKLLVESAQSYTRGAVGHKSLDLKRRQSVNAPQVIAYADKANERLRRKFYRMTLKNNINRNVAATAIARELACFMWGLMTDNIMAINGGEEITGKRQDHYTGPDLFHAPLDWPSALKTAVANKGKGKPLPLQSQYLF

SEQ ID NO: 160983 - protein, 398 aa, unidentified
MKVSGLDVHKDKIFCAIYDGKSYSEVKEFSTTTNSIRSMGEYLQSENVKKVAMESTSTYWIPIWDILYEMDFEQKLVNPFQIKQMPGRKSDVKDAQWIAKLLYQNMISGSLVPPPLIQELRSYTREYRILVQQRTTVLTKMDRVLVMCGIRLSSCISNMDSKSAIQIVDALIRGQTAPDYLVSLVYGNRKNKESGKLKECLTGNMKEHHRIKLMTFKQQYDLFEQQITFYLNKMQEVCNEHFSEDVKNLTTIPGVSLISAMIIIAETGGDMSAFENSGKFTGWTGLRPRNDESAGKFKSTATTKGNKHLRAIIVQVGWGAARNKGSYFMDKFQKLAMRKSRKKALVAIGRKILVIIWHVLKEKTQYNPNLVHIYDPVKVEHKIKYYEREIEKAKKLMS

SEQ ID NO: 160984 - protein, 344 aa, unidentified
MSNWDTCGIEVSAKELVVRLRRQAALEPLRNFTNTPAGHAILRRHLRRAGRGVRVCLEASGLYGLDLALALSAQEGLEVMVANPRAVRHFATALMQRSKNDQIDAGVLEEFAARMPFQPWTRPAPAALALHALARRLGELVQMQTAEKNRQPAAELSQAMPAAIRRDLARSLRAQERAIERLTREARKRIAQEPALTERFALLDSVPGIAETSAVQLLAELAVLAPELEARQWVAYAGLDPREYSSGTSVHKKVRISKAGNQHLRRALYMPALVAVQQDPHLRAFYQRLLARGKFKMQALVAVMRKLLHAFHGMFKTHQPYDGAKLFQLKPTPAQEVPLALVAS

SEQ ID NO: 160985 - protein, 411 aa, unidentified
MEKVYDKCCGIDVHKKLIVACLKKGNTQEIREFGATTRELLEMADWLKDGGCEMVAMESTASYWKPLYNIFESSDLNAIVVNARHMKAVPGRKTDVKDAEWIADLLTHGLLQASYIPDKDQRELRELVRYRKSLVGERNRELNRLQKMLEGANIKISGTITDINGKSARNILEHILSGKQIDSAEYDILYEKKVIAHNLKASKEQIIDDLNGVMSDIQRKMMRLLLKHLDELNAIIKELDDDIDSFMKPQEKQAAKVIQDIPGIANTSAQAIISVLGTDMERFPSDRHLASWAGLCPGDNESAKKRKSGKTRKGNALLRETLVICAHSAVRNKKSYFYAQFMRISAHRGKKRAYVAIAHTILIAIYHILKEGVTFKDLGADYYNQFNKERKINAYLKKLKALGWEAPVVAA

SEQ ID NO: 160986 - protein, 340 aa, unidentified
MGVFVGIDVSLENCAVCAVDEHGKLVKETKVASDPGALDACIKGIPGVVEAIGIEAGPLSQWLHKSLTDLGLPVVLMETRQVKAALKAAPVKTDRRDAAGLARLLQMGWFRPVHCKSLSAQELRVLLGARRSVQDAAINIEMSIRGMLRNFGLRLGRIGKVSFEDRVRELTEGNKLIQLSIEPMLRARAALRSELVRLERTARDITREDPVCRLMMTMPGIGPVVALTVRSTIDDPGRFRRSKDVGPSIGLTPRRYQSGETDIIGGVTKAGDLDMRTALYQAATVVIHRSKKQTWLRAWAERVVRRRGAKRAAVALARRMGVILHRMWVDNTEFQAARQV

SEQ ID NO: 160987 - protein, 348 aa, unidentified
MDHYAGIDVSLECSSVCVVDASGKIVREGKVASEPEALIGWFGSLGLSLTRIGLEAGPLSQWLYAAMREGGLAVELLETRHVRDAFKAMPVKSDRNDARGIAQLMRLGWFKPVHCKSMGAQETRAILTARKLVQSKLRDVENSLRGILRGFGLKVGKTTARSFAARIRDLVVGHSSLETIAEALLAVHAVLLREFNALEKRVRTMARLNLRAKLLMTTPAVGPIVALTYASAIDDPGRFKSSKAAGPHFGLTPRKYQSGQTDVSGRISKIGDAAVREALYQAAHVMLTKAVKGCPELKSWAMRIARRAGMRKAKVALARKLAVIMHRMLADGKPFNSAAATKTMAAAA

SEQ ID NO: 160988 - protein, 349 aa, unidentified
MTIVEDARVITGGVDTHADLHVAAALDRVGGLLGVQEFPATAAGYASLLGWLSGFGDIALIGVEGTGSYGAGLARHLAAAGVRVVEVDRADRQDRHRQGKSDPLDAVSAARAAQSGRASGAPKGRDGAVEAIRALMVAKRSARAGRTQANGQARALIVTGPDELRARFAGHRPAQLVEAIAALRPRPGDVPGYATRVALRELGRRAQFLDAQLDRLDEVIGPLVTGRAPGLLRLHGVGPDTAALLLIAAGDHPERLRSESSWAHLCGVAPIPASSGKVSRNRLNRGGDRQANHALWRIVITRLGSRPGHPATRAYVTRRTKEGLSKKEIIRCLKRYVAREVYHQLRAGA

SEQ ID NO: 160989 - protein, 528 aa, unidentified
MAAFRNGGMRGGQSDETFSSDELKSVTLDDGTRIVTSPVTDIKRPICAGIDVHKSILMAAICKTNPVTLSAVFYVRQFTTANSDIRRMADWLKSHGVQDVCMESTGKYWIPVYDILEQNGLKPILTHPKYVKQARGRKTDFRDAIHIANLFRMDLVAASFIPPSDIRDLRELCRYRLKLTFMRTSEKNRYQNSMTVSKVRLDSVFSDPFGKSAGGIMSYLIHTEPDRVRDDEILRLVDPRVKASAEEILDSIHGYEFIGVQRDKLEVIQIHMDNINACIGMIDAKLLYYRQKYAGVISHLETMIGISTESALYIIGEIGADMSVWRDSDSLASWAGLAPANNESAGKKKSTKVGKGGHYLKPLLVQCALAAVKSTRKDPYFYYKYQTLKKRRGHKKAVIAIARKMLVAIYHMIRDNADFLPVDYDDTITRNNKHAELNLENVIAFLGAHGADAEIIRMVEAQCTENTPEVEMETGAGDKSRKKKQPQSDTEPSTLPGQKTVRSKRSKKSPQTKDHDSSKQPASATATA

SEQ ID NO: 160990 - protein, 449 aa, unidentified
MIRPQEIEDEEHEQVLERVAAVDVAKASGMVCIRVPQPGRPGRRRTLVWQVDATTNAVLELADHLVGERVEKVTLESTSDYWRIWFYLLEAAGLEVQLVRAQDVKHAPGRPKSDKLDAVWLAKLTERGMLRPSFVPPAEIRQLRDYTRLRTDLTRERTRHYSRLEKLLEDALIKVSAVASKLDTLSVRDMLEALIGGERDPQVLAGLARGRMRAKHDRLVQALTGKFDDHHAELARMLLDQIDALTAQIGKLTARIEELIAAIPAAQGIDADGTTGPAAGRGEGAPVMPTVDRLDEVTGIGREAAQAIIAEVGLHMSAFPTAAHLVSWTKISPQTIQSGARSRAGRTGKGNPYLKGILGEAAAAAGKTDTFLGERYRRLARRRGKLKALVAVARSILVIVWHLLADRTTRYHDLGAGYYTSRIDKNRKTRNHIRQLEALGYTVTLTQAA

SEQ ID NO: 160991 - protein, 418 aa, unidentified
MSLNVAAGSAYYVGVDWAAVTHAVCVLDPTGKRVAAFTVEHCAAGLTALTQRLARLGAPDTMPVGIERPDGRLVDALLEAGHPVVPVKPNAIKAWRDGEVLSGAKSDAGDAEVIAEYLRLRQHRLQLATPYTAQTKALRTLVRTRGDLVELRVALTNQLTAVLDTHWPGAKEIFADVESPIALAFLTRYPTARHAQHLGVKRLTAFCVEHHYSGRRSGEQLRTRLRAAPAGTLDETVCHAVSDAVTALVTVLTSLGAAVKTLDRSVTATLGKHPDAEIFTSLPRSGQINAAQILAEWGDCRQAYAGPDSIAALAGVTPVTKESGKHRAVHFRWACNKRFRVAMTTFADNSRHDSPWAAEVYTQARTRGHDHPHAVRILARAWIRVMWRCWNDRVAYHPTRPGDAQRLTQPRQNEPLAA

SEQ ID NO: 160992 - protein, 353 aa, unidentified
MDASTVNQVVGMDLGDKYSVLCTLDEAGEIFEESRIRTTSAGVAARFEHLSACRVVLEAGTHSPWVSRQIESYGHEVIVANPRRVALIYGDHTKSDEIDARTLAKLGRMDPELLSPIRHRGAETLAHRAVLTARTAMVRSRARLIQVARGITKSHGQRLPSCGANGFAGKVKDKIPAELAPALIPLVEIIDDLTRRIRVQDREIERICEETYPDTALLRQIGGVGAVTALRFVLTLEDPYRFTSSRSVASYLGLRPRRSQSGGSDPQMRITKAGDREMRRLLVQSAHYILGPFGKDCDLRRFGERLAARGGKSGKKRAVVAVARKLAVLLHRLWVTGETYEPLRNGNKMKIAA

SEQ ID NO: 160993 - protein, 349 aa, unidentified
MIQDEQGKVLAEGSVPTTPEGLLQLRAHHGLSAGTRVALESGTMAFYVARQLQKLELDPVVVDAHEVRAKALRPNQKSDRRDAWELCEGIRRDVYRSRVHVPPETIERLRETLGRRRHFVRVKTMQVNAAKRLLRASGLQGLNRSLQADSGWQKLLEHTSSDASLHTFLQTHHTLWRCAHEQVALLERSLREQQSHFQEDLTRLQTVPGVGPIVALTVIAAFSDVQRFPTAKHAASYAGLVTSTYDSGERIQHGRITRRGSSELRSMLCEAAHHAGRSNSPFYPYFIGLCVRRGYKMAVVAVAHRLCRILYAMLRHGTTFNLKKLAIEEGRFEHTVVRRFRRQVEPTPV

SEQ ID NO: 160994 - protein, 443 aa, unidentified
MSHKSTTHLKGERGQAFADQIRNIPPERILCVSLDIGKYFHVVMIHNALGEIVTPTFELDIFQSGFTALCAAIDEASARCRAKVVLTGLEPTGHYFENLARHLRARPQPVTLVNSYAVKQNRSQQMMRREKTDEIDVASVGDLLRRGEGTLYRPASGPYLQLQQLDRTRIAKLKMQTMLKNQILGHLDRIFPGLVLQGEEALDRYTPLFSTSFWQCQTLQHLVRLCPDPCRLVTLSPSELVALFHGHHYRLGQQNAAKIIAYAQKTLLPDPELSTIRSDLLQADLTLLEHLQLQIDHLEQRLGELLAPLPTAVWAKLKGLSTVQAASLTAAMGDPAHYTYAAQIFRRAGLVSGRNDSGNRQRKGKGQGVLKVGDVYLRRALMTATETLILHQPALHTYYTTLKKTKHPGVARVATARKAMGILWATLRDQRSTLLILKKGETM

SEQ ID NO: 160995 - protein, 322 aa, unidentified
MAMLSFGGIDVSKDRLDVMVLPEEQSSSVSNDAAGWAELVEQLRSSSIAAIGIEASGGYERGVMRALLAADLPVRQVNPFKLRQFARASGVLAKSDPLDARMIASFVAIMPTRPAPRQTPAAERLTEMLAVRRQLSAEKVAAENASRLLEDAMLRRLSRRRIGRLGTDIDLLDKHLVEIVGTDAALAHRYQLLTSMPGVGAVLACTLLALLPELGRMSRKQVAALVGVAPYAFESGTLKGRRCIWGGRAHVRQVLYMAAMSACNWNPPFKTFHDRLKAAGKLPKVAIVAVMRKMITTLNAMVRDDVSWADRLTGRHSVPTAR

SEQ ID NO: 160996 - protein, 322 aa, unidentified
MTEKFIGMDINKEQIDVAMRGKKENWEFSNESDGIQELVSLMKQIRPTLIVVEASGGLEQSVVRALYLEKMPITIVNPTRIRAFARSIGQLAKTDPLDAKVISHFAQAVRPQVRPLRSAEEDHLDALVTRRRQIVQMLTAEKNRRSTTHPELQTSLWDHIAWLKEEQKRLDEAIEAFIQEKAEWKEKAALLRSVPGVGPVTASTLLAELPELGTRNRKQIAALVGVAPINKDSGPKKGKRRVFGGRASVRRTLYMATLVATRSNPVIRTFYERLLASGKEKKVALTACMRKLLIILNAMIRSKKPWQPNFVFRGCPSSSSPS

SEQ ID NO: 160997 - protein, 340 aa, unidentified
MFTNFVGIDVSKSKFDLALIKGQDKDHVIQGVFDNTHKGIKSMSKFLEREHKVQLSETIFCMEFTGVYCYPLTDFFVKKDCHVWIEMPVNIIRSLGLQRGKNDRVDAHRIALYAYKNRDDVKLWKPQREAILKLRDLLALRERLIVAQKSLQMPINEKISMGDKKGAEMVRKGCQKSMSSLENEIGQIDKNLDDIIKEDPQLKELFQLATSVPGIGKLTALFMICFTNEFSMYTNPKQLACYCGVAPFEHSSGSSIRGRTRVSHMANKVLKRMLHMGAMSVISRDPELRDYYQRKVAQGKNKMLVINAVRNKIIHRLCAVIKRGYEYQSENIFKERLVMS

SEQ ID NO: 160998 - protein, 361 aa, unidentified
MVRQRTFVGLDVHARSVVGHAMDEHTGEVWQQLLPTDPPGIWGWLESLPQPVKVTYEAGPTGYGLARFLSDRGVVCPVAAPSKLTRPAGNRVKTDANDAEHLCRLLRLDAIVEVRLPDPEQEAARDLVRAREDVRGDLMRARHRVSKLLLRHGIVDRGSKTWTATHQRWLQQQRFDAPPRQLAFEDAVEAVLLITDRRDRLDAAIEAMAADSSYTPLVRRLCCLRGISTLTGFGLAVEIGDWHRLSGSSIGAFLGLVPTEDSSGESRSQGSITKAGNGHARRLLVEAAWHHRKSYRSPSRDLRNRWQLAPSPARVRGHEGNRRLHQRWQTFQARHKKDTIAAVAIARELAGWAWSLAVMDD

SEQ ID NO: 160999 - protein, 408 aa, unidentified
MEQAQVKFDQVTACGCGIDVHKETIVATVRGIGIEEETRTFSTFTASLKECKRWLKEVGVTHIAMESTGIYWKPVYNIMEQDFEIILVNARHIKNVPGHKTDRKDSAWIAKLLLSGLLRGSFIPPLQNRELRELYRYKRKLIQQRVSECNRLHKILESANIKLSSVVSDVFGATGWAIICALIDGETDVVALANLAKGTLRTKKKELQLALEGHLTAHHIYMLKLSRSIILGLDEYISDIGMQIDKYTEQNSEQFQLLQSIPGVNEQTALAIIAEIGTDMEVFPTQHHLASWAGVCPGSNESAGKKKAERTNQGNKSLKTALTEAAWVATHMKGTYFKARFESLSIRRGRKKALIAIAHKILVSAYFILKNNEPYQSPNQEAWLEKRKQAQIKSYLKRLHELGVTPSQ

SEQ ID NO: 161000 - protein, 314 aa, unidentified
MEVILGVDVSSQTLDACLQSPKHVKPMFKTVAYTPEGCKKLLAWAVRHEVTRCAMEATGGYELAIAQRIMQSGIKLYIANPNRIRHFAKGDGILAKTDKVDAFVIAEFARKSNLPAAFEASPVQIEFKQLVARRIELKKDLQAEKCRMRLAAGAVLQSHENLIEAINIEVEKIDRLIDALVAQNPDIAQKVQVLCQQKGVGKATAQALIALVPELGRIDRRKIASLVGLAPIANESGKMKGKRFISGGRCEARRCLYMPAWVATQYDPEFAAFYQRLIDNGKKPKVAITAVMRKLLVRLNAKMRNHLLESTKST

SEQ ID NO: 161001 - protein, 417 aa, unidentified
MIDDVQWFVGIDWATQSHRVCLLDVEGRHVNERDFAHGGAGLTELRDWLLEKTKAAPGQIAVAIETPHGPVVEMLLDHGFLVFAINPKQLDRFRDRFTVAGAKDDSRDARVLGGSLRTDRQAFRRLVVDDPLVIELREWSRIADELQQERTRLANRIRQQLWRYYPQAIELTDDVADDWFLALWQQVPTPATAAKASEKTIARILKDHRIRRLDAATVLQTLRKTPLFVAPGTTEAACAHIRNLAARLRLVNQQIKEAHRALDGLCAKLEARESPSGQNREQRDVTILRSWPGIGRIVLATLLTEAAEPLRARDYHALRALAGIAPVTRRSGKQCFVIRRHACNKRLQNAVHHWSRVAIQHDAAARRRYDALRQRGHGYARALRSVGDRLLYALCTTLKRQTPYNPNYQTAQITAGR

SEQ ID NO: 161002 - protein, 368 aa, unidentified
MSEISAFIGLDVHKETLSIAVADAGREGEVRHLGTIGNPPEAVAKLARRLGRRHGTVEFVYEAGSCGYNIQRQLSGLGFTCRICAPSMTPRRPGDRIKNDRRDSIALARLLRAGELTYVWVPDALHEAVRDLVRARHAACQDVRRARIRIQAFLLRNDLRFDGKAWSHRHRMWLCNRGFAHPAQQIAFQTYLNALEYEERRKLELEAQIKEAIELSPWSDLARALQALKGVGPTVAATIVAEVGDFSRFSHPRQLVAYFGLAPGEHSSGNSIRPRGITKAGNATARSILCEAAWNYRTTPKVGQWMKQHRPEVPQKIIEIAWKAQLRLHKTYKRLTSRGKRTVVATAAVARELLCFMWSIGRVVQANG

SEQ ID NO: 161003 - protein, 356 aa, unidentified
MKIIGVDLHTRQQTIAMLDDRTGELVETQLPHEGEAVREFYAGLPKPVLVGLEATGSMQWFLQLLEELSIEFRVGHPAKIRAAEPRKQKNDRRDARLLLTLLAENRFPAIWMPSREQRDLQVLLRHRDQFVRIRTRVQLSLQAVALSHGLRRGHALWNRRGQHALRDLPLAQHAGQQRDTLLALHPHLQSPIDELDREVEKQAHQHPQAQRLMTHPGVGPITALATEVFLGDPHRFADGKSVASYVGMIPRERSSGGRQRCGRLSKQGNSLLRFLWGEATIHAVRRDADLRRFYRRKLVQKGMGKARMAAARKLGIRLWIMLRDEIDYTEFCRRGALRRQSSGAACAGMPGVGQWS

SEQ ID NO: 161004 - protein, 404 aa, unidentified
MELTAIYQCVAALDIHQAKLTVCILYANEAGEIITELKEFGAFKKDRRAMSEWVASFHPERVVMESTGIYWKSPYAALEKHGLKIDVVNARHVKQVPGRKTDLLDAQWLAILARNGLLRGGFVPPVEFRELRLISRQMQKLSSILSSEKNRLHKLLTDTGIRLSVVLSDLNGKSARAMIKGLLAGESPQQVLKYASKRLKATEEELLDALAGDISTSHHFVITEVMAHIEELENRIKTFQQALIQGLSSCKTVLECLQTIPGIDEMGAAMLLVEIGDDMSAFGSASHLASWAGVCPGNNESAGKKKSGKARKGNPYVRRILCEAANAASRTQCSLQDKFKGLVIRRGRKRAIFAIAHKLLKIVFLLIDRGEYYRDAKIDYDALSVQRNAPRWIKKLKQYGYIAA

SEQ ID NO: 161005 - protein, 379 aa, unidentified
MRQVCGLDVHKDSVFVCILNENGVVFQNKYGVLTTDLENMLGVMMGYHVDEVCMESTSIYWMPVWRVLEPYVSLKLVNPYFIKQLPGKKSDVKDAEWIATCLLKDLIKGSYVPEDRIQQLRQYDRRIFDLNNEINYKLTKLDMALQRCNIRISNYVSSTDGKSYREVARLISEGVTSAEELEKVIHSRTVNRVGKETIRGALTGVISSVDIDIIRQLREELELDYRHKDECQRKMDELCSQWFPSELENLKTIPGVSQRSATAIIAEMGTDMSSFQDAAHLVSWCGLKPRNEESAGKIKARKITHGNKYLRQTLIECSWAASRKQGCFYNRFSYHQTVVRRKNTMKVRVAIARKILTVVWYVLHDNLKYRDFSTDITTC

SEQ ID NO: 161006 - protein, 413 aa, unidentified
MNYEPITAVGIDVSKGKSTVAVRRPGGEVVLTPFQVNHDAAGLSSLVKTLQDVVGNIRIVMEHTGMYWRPIALALKEAGFFVSVVNAMLIHDFSDNSLRKVKTDKADSMKIANYALSFWAELRDYSPEDETRQMLKMQNRLYLRTQKSSVTLRNGLISLLDQAFPGVNTLFDTQPKRSNGHFKWVDFVRRFWHRDCVAGISFAAFSDAYRKWCARSGYRFSASDAEKLHTAARNSVATFPKSDSTKLLIAQAVDSLNAVYDALYVLRGEMLRLASLLPEFDVVMAMQGAGEVTGPQIMAEIGDVRRFTHKGALVAFAGMDAPPFQSGTFDAKSRRISKRGSPNLRKALFMVVSTILQHSDPDIPVFQFMDKKRAEGKHFYVYMVAGAAKFLRIYYARVKAHLMALDAGTSTVA

SEQ ID NO: 161007 - protein, 367 aa, unidentified
MADRITYVGLDVHKESIVVAEGGLRGEVREYGRIANTAAALDRLLRKLGGDGMTLRFCYEAGPCGYGIQRRLSAQGQECVVVAPSLIPKRAGDRVKTDRRDAASLAKLHRAGELTAVWVSDARHEAMRDLVRARLDAVHSLRRARQQLCGFLLRQGCHYGRPAWTKLHRRWLAGLKFDQAVHHLVLEDYIAAVEAAAARRDRLTAQIEAMLPDWNLAAVVAALQTMRGMALVNAATLIAELGDLSRFADPRQLMAYLGLVPSEHSSGASVKRGGITKAGNGTARRLLIEAAWSYRFPARLSRELLLRQENQPRPIRDIAWKGQVRLCARYRRLARAGKPANVVTTAIARELSGFVWAIARQVTATAG

SEQ ID NO: 161008 - protein, 419 aa, unidentified
MEHISTKKVKRINGKTLLVTVDIGKGKHTGYCRCPDGTERKPFDFLNNSKGFEEFWQRVCEIKRAHDLEEMVIGFESTGPYAEPLLHFLKKKGVRLVQVNPFHTRKLKELQGNSPSKTDHKDPKVIADIVELGHALTVVIPESASAELRRLTQARERSIQRRTALLNQLQDLVFLIFPEFLNVMKDIKGKSAQYLLKSCPTPEDIIETGSDSLTQILKRISRGKLGRNRAEALYEVAGKSVGIQEGQKSIVLEIAETISTIEACERFVANVEKEMARHLKQISYSQCILSIKGIGTVTAAGLIGEVGDFKQFRTISEIMKHAGLDLYEISSGKRTGRRRISKRGRSLLRKLLFFASINTVRTGGVMRGYYQRYLKRMPRRKALIAVSRKLLRIIFALVRDHNAFIYNYSKLPYQMKEAA

SEQ ID NO: 161009 - protein, 530 aa, unidentified
MTGRTGARRGNRSASHSGAKSRHRQTLQKPSGVIGPRVKQVGGEKFAIVCVDPAKHRSEWMMADYFGNLLIQHQTLPHQAAYFKLAVTQIRQAQEQHGIEDLIVVVERTGNYHLAPKRAFASAGFETRVVHPFATKQYRMPADPSNKTDENDLYAQHRAAVAGFGLCEQELESPYRELQLRVRHRRNLVEKATAIACQVRENLHLAMPGFALLFDHLLEHQSAMAIARRCVSPAIVLQLGRVGLSQHLHERKIRHQPRTIDKILAWASQAASEDIHDGALHHAIWTDLDELYQHVQRQILALERQLASDLVQTPYVRLLAIPGINVVSAAELAGEMGPMTRYANANAITGRAGLYPSRHQSDQTDQSGPLIQRANRRLRCVLMRIAETLVCHCAYYRGQADADRAIGVDTRASRVKTAKRFSRLAFACVAGDEPLKHPCMQKPDSILEKLRAFHQEHETPVDRILADLRTTVEQLPYNTRNHEAEVVAEVLRQQTERRRGPTPIGALLPAVLARLEIKTVKQNNQNRDRS

SEQ ID NO: 161010 - protein, 429 aa, unidentified
MRKKAYHGVCVKDVDVDSLASRRPGEAAAVGFDVAKKELLVVIRWPDGRFERPWRVQNPGEIGMAVEKLKGFAMGRSVRVALEPSGTYGDALRQALHEAEMEVLRISPKAAHDYAEVFDGVPSQHDGKDAAVVAELAALGKGRVWPFAVEDAWSEELTYWVDGLDGQRRISDLWVGRMEGLLARHWPEATRVLKITSGTLLRALARYGGPAALAGDAEAEERLRRWGGTMLTAQKRQALLHSARATQGIRQGPWQQREVRDCAREILQARKNVRQGQRELRRLAWNHRVLQAQGAVVGVPTACVLWVNVGDPRQFDSGAAYRKAMGLNLVERSSGEEVGRLHISKRGSARARRWLYFAALRMVQRVGVRSWYEAKKARDSDEAMRALVAVMRKLALALYQVGARQERFDSRRLFARILAKTRAAARPRE

SEQ ID NO: 161011 - protein, 342 aa, unidentified
MDHFAGLDVSVKETSICIVDETGKIVREVKVASEPEALLAVLSNAAYHFKRIGLEAGPLSQWLFSALAEAELPVVCVETRHMQAVLKAQINKTDRNDARGIAQMMRVGLYRPVHVKTLRSQKLRMLLTHRKLLQSKAIAIENDLRGTLRNFGLKVGIVGTVKFEARIKELVENLPDLAALVEPLLIVRRVLREQIIILHRRLLAIVRDDEVCRRLMTTPGVGPVVALTYRATVDVPARFRKSKAVGAVFGLTCSKYQSGEIDRNGRISRCGDEMMRVMLYEAAQSMLHSKKWSWLKAWAMQIARRRGMKKAIVALARRLAVIMHRMWVDGTEFRWTREAATA

SEQ ID NO: 161012 - protein, 454 aa, unidentified
MGKPRVVPDEDHEVMYQRVAAVDVAKASGVVCLRAPDPARPGRFTSRIWDDVPATRARIAELGAELLVSGVQMVTLESTSDYWRIWYYVLEGAGLAVQLVSASQAKNLKGRPKTDKLDAMWLARLTQAGMLRPSFVPPAEIRRVRDFTRARTDLVAERTRCLQRLEKLLEDAMIKVTAVAADGLKAKSVVAMVQALIAGERDPRTLADLAKGRLRASKDALAAALDGMFDSHHGVIAGMLLDQVAFLDQRITVMEDQAIAALAQVEESWGTDATGETGPAAGTAPGSPVLAAAHRLAEIPGISVWLAIVIIAEIGLTMAVFPTPAHLVSWLGLCRSASQSGTRRGKGKPKKGNSYARAAAGQAAIGAARTATFLGERHARIARRRGKAIAQVAVARSIMIIVWHLLNDPAARYRDLGPDFHATRTNRDKKIRTYLRGLKALGLTVAITGDEHAA

SEQ ID NO: 161013 - protein, 408 aa, unidentified
MDSTFRFFAGIDWGSEKHRVCLMNRDGQVLAERWIEHNGDSLAELTAWLRRETSDAPSLLAAAIEIPRGAIVETLLEHGFAVFSINPKQLDRFRDRYSPAGAKDDRRDALVLADALRTDMHCFRPVRLDDPAVIRLRELSRLDDELAQEQNRAVNRLREQFHRFFPQLLQLCECADEPWLWTLFELAPSPLRAARLTEARITRLLQQYRIRRITATEVRTVLKTKPLTLASGAAEAAAEHALLLLPRLRLLHQQRTDLARRISALLDELAAPTEGRKEHRDAAILLSLPGLGRKIAATMLSEASQAIADRDYHALRCYSGAAPITRQSGKKKTVVMRRGINERLRNALYHWARVSVVYHPQSKKRYAAMRACGHSHGRALRGLADRWLKVLTSMLTTGTLYDPQRSAT

SEQ ID NO: 161014 - protein, 375 aa, unidentified
MIYAGIDIGKAKHCIAAISETAEVLLKPVFVEQNHESFEAIAERLRQLGDPATVKIGMEASGHYWTHFFHFLSEAGWTVELFNPVLSNVHARCHLRGRKTDKDDALAVAKTLRDGGYTPWAIPSDEHARLKLLCRQRSFLVSELSNAKRRLGGLLDLAFPEFAALFSDPYGKAPAALLREAPTAKTMAEFSTRKLTGILSRNSRGQHGVQMARKVREAAQGSIAHAQHSDELAGIIQGMLEHLAFFQEQIARLEARIAQLFKSIDTPVKEIPGIGEKTGPMIVAEFGDLSRFHGGYKKLLAFAGLDPRIRQSGKWKGTVKMSKRGSPALRTALFQAASMAGFTTRACGRSMHATAMKKENTTALPSAMSPASSSS

SEQ ID NO: 161015 - protein, 322 aa, unidentified
MQGMAIETEAEATVYVGVDVSKASLDIYLHPLGLALRMENSKAGLAALAAALRSHRVAMVVIEATAKLHRLAHHRLSQAGFAVAVINPARSRKLAEALGQMAKTDRIDARLLALFGALVQPRITPAPAGIIAELQELVRARQAITADKTALLNRHATADSAFLKPLIEAQLEAALAAIQAIEARVAALIASDAGLKRRFDILTSIKGVGAACASMMVACLAELGQLSRGGIALITGLAPLNCDSGQMRGQRYIQGGRGHVRASLYMAALAAIRSNPDLKAFYGHLRAQGKAGKVALTAVMRKLVILANTLIREDRLWAPIHA

SEQ ID NO: 161016 - protein, 455 aa, unidentified
MAREGARRSAVLVVEDEQYQRRHDRVAGIDVAKASAVVCTRLPPASAGGRRASRVESVQATVPAISALGQRLLADGVEMVTLESTSDYWRIWFYVLEAAGLAVQLVSSSQAKRLAGRPKTDALDAQWLARLTEMGLLRPSFVPPAEVRALRDYTRTRLHLVQDRTREYQRLEKLLEGALIKVSSVASRLSTMSARDMVRALADGERDPATLAALARGRMRAKKDQLEQALTGMFDDHHGELARLHLDYITLLDRKIAQLDDSIAACLDAIPASWGTDADGTTGPGAGTSPDAAVLAAADRLAEIPGMSRDLARSIIAEIGLDMSRFPTPGHLVSWAGLVPETAQSGTRSGQKKGHGNGYARNAATLAANGAARTATFLGERYSRVARRRGKARAQVAVARSILTIVWHLLSDPAARYRELGHDYHARKVNKDKKLRSHLAQIQALGYHVTITPAA

SEQ ID NO: 161017 - protein, 380 aa, unidentified
MMRVTEPHTGEEPAVSSVSHQGFIHLGLDVSKDLIAVAVLLPDRDRATVQKIVHDEQSVRKLIGRFEDRSKLWACYEAGPTGYELYRLLGRLGVRCEVIAPSLVPRARGDRVKTDKRDARKLAGLHRAGQLTAIAVPSRSEEAIRDLCRTRGDIVGDRTRARNRLTKFLLRHSIVWCDGSNWTRKHQQWLNSLHFEDRALALTFGHYRANLELRDAQLAAVEEDLRPFCETEPFGPPAHRLGAYRGVTHMGGLGLAAEVFDWRRFPAARSFMCFTGLVPSEDSSGLHEHRGHITHAGNRHLRAQLVEAAWAYQHRPHVGSGIAARHADLPPEVVARAWNAQVRLNRRFRNLARRKNVRSVVAAAIARELAGFLWAEMNTN

SEQ ID NO: 161018 - protein, 400 aa, unidentified
MNIIGIDVSQGKSHATLISKETEKVTFKFEHNKSGFQILNSYIKSDTVIIFETTGVYSAQLTAYLKSKKVRFYELNPLEAKLRMASLRRNKTDKNDSFKLALLGATQLSEIKNHCNKQSTSPYDSLRILSLRYRQLIKCRTRIINFLRSGLEITFPELNQIFKNAYAVLALQMFRMYCHPDFLVGLTLKEMTNRVYQAVNKRIHKDVIQNYCAQVWLTAKNSYPAVPADSLEVEIISEYCDEIENYNKEIAYIQNKLIKTAASLDNFKFISSIPGAGQLNSALLLGFAGDISRFDNYKQLNAFLGLDLNRYQSGKYLKNDTINRRGSSQGRVVETDMIRSMLRNQGRIQNHLINYYYKLKKPPFNKHDKVALIACANHLNRTIINLVHTHQFYNYSKAIH

SEQ ID NO: 161019 - protein, 394 aa, unidentified
MGKLYVGIDISKDRSSAKGIDEHGRSCFEISFDMDGTGFAELLKAIEANSDGYKDVVAGMESTACYHINLYSFLSAKGIEAVVINPLLIANFAKLSLRKTKTDKKDASTIAQFILAHRASVKQLAVSQDQQDIRDMARERESLCHQMSAAKVEIRRLLNTTFPELESMCNPFTKVMLHFIQRFPSARLVSMAKPNIIAKTLKEKPCSCRIRFTPSDLIKMASKSIATVSLGKEIILSGKIDTLLHLQKRRDELTKALTKYCESSIVEDLKIVTSIDGIGNNTATTFLAEIGRIDNYASHKNLIAFAGIDPTVYQSGKYEGSSKISKRGNRHLRRVIWLMTVRVINHNPTFRKYYFKKKSERQPFKKAVFATAHKLVRVIFAMLSHRTYFQEECI

SEQ ID NO: 161020 - protein, 417 aa, unidentified
MIAAVVERCAGIDVGKKVLAVCIMTGAADAEPEIQQREFLTFNRELNQLRNWLAENGCTHVVMESTGSYWRPVFEILEDSVTVILANPEQVKSRRGHKTDWNDACWLAHLLRHDMVHASFIPPCAIRELRDLTRRRKQVLRDATSERNRIQKVLETANVKMRSVLADVFGVSGQQILEALLDGSASPEQMAQMVHGRAKAKIPALIESLTGHRMSEHHRWMIRQSLEHLAFLEQHLIALDERILQHIESSGYKPVMTLLESVPGIQTDSAACILAEMGADIKQFPTPEQLSSWAGVCPGNYRSAGVSRLGHIRGGNRWLRNVLVESAWAVAARKQGLLREKFWRWAGHGGRKKALIALAHNLLLIIHQVLLTQQPYAGEDAPLSEARRNHLIRQHIRKLGNLGIAVRARSSARYSAG

SEQ ID NO: 161021 - protein, 429 aa, unidentified
MQNESTPDARGPVFCGVDTHADSHWLCVLDWRGRKVLSRQFPADAAGYEALAGAIAAAGEPACVAMEGTSSYGALHTRHLASLGMPVREALSPARMQRRRPGQGKCDEADAERAARAAMSGSRLGTPKSQDGWVDGVRCMLAARSGAVKARTSAINTARSLLTTAPEGLRSRFRGVAGPRLMEELPSVRAEGALGAALGALADLWAAARDAALDMELAIEASLEENCPALLAMYGCGPVSAAKLAVAAGDNPGRLRSEASFAAICGACPIPASSGKTVRHRLNRGGDRQANSALHEIARQRVMRDPETAEYAERARGRGKSDREVMRCLKRYVAREAYRALMHPHEIRRPEDASELVAARRAAKVSQVRAASILGTSEKYISMLERGQRELKPIRRAYEAWVEAGLPLDWDRQAFEAERKMDSKKHLAK

SEQ ID NO: 161022 - protein, 323 aa, unidentified
MSQPNPLCVGIDVSKTTLDIATANNEFAQFTAGNDTDGFELIIAELRKHSVALVLMEATGGLEAAVACSLQAEGFDIAVINPRQARNFSRAMGYLAKTDRIDAKVLSQMAEVINRHPERERFIKAIPDAERQILAAMVVRRRQLITMLVAERNRLHPAHPQNRKSINTIIKALEDELSRIDEAMNNHIKTHFKELAARLSSIKGVGAMTVATLLSEVPELGSLSRREISALIGVTPVNRDSGTMRGRRTIFGGRAGVRTALYMAALVATRFNPVIKDFYTRLITAGKVRKVALVACMRKLLTILNAMIRKNEEWSDSYHKFSL

SEQ ID NO: 161023 - protein, 355 aa, unidentified
MNSSKHIGMDVHTATIGIVVLDATGKLIMESVIETKASTILQFIHGLRGNLYVTFEEGTWAAWLYDLLKPYVTNIVVCDPRRNALLQEGSKSDRIDARKLAELLRAELLRPVYHGEKGLRTLKELVRAYLTIGKDLRRVMNRVKAIYRSWGIPCAGQRVYDPRHREEWLSKITHPSVRRRAELYYEQLDALVLLRKQARQELLTESKKHQAWKLLRSIPALGPIRAAVLMAIVQTPHRFRTKRVLWKYSGWGVVTHTSADHRYVQGQLERSKKPVSVRGLDPDHNHHLKELFKSAALQASTAPGPFQEFYEALVAKGMRPAMARLTLARKIAVIPLTAWKKGVAFDAKYLKPQTA

SEQ ID NO: 161024 - protein, 430 aa, unidentified
MGLVVQTAIHPEQDEHDMPYEWFVGIDWGSQQHQVCVLDRDRRRVGDRSVDHDGASLARLATWLWSMSAGQPQRVAVAIEVPRGAIVEGLFERGFHVFAINPKQLDRFRDRHSVAGAKDDRRDAFVLADSLRTDRPSFRRLHLDAPQLLVLRELSRAEETLLEAFRRSANQLRDQLHRFYPQMLQLCSAADESWLWDLIDLAPTPAHVALLNEEHVQRVLKAHRIRRVKAQEVLACLQAPALPVAPGATEAAQAHCGFLLPCLRVLAEQLQACSHQVSALLHTLAQEPGEGEGPSDVAIVQSLPGVGRKITAWLFAEAAQPLAQRDFQVLRTHGGVAPVTRQSGKRRQVVMRRGCNPRLRQALYHMARVAMQRDAHFSQVYEALRAKGQRHGQALRTIGDRVLRILMAMLRERICYDASRMHREPVVQRG

SEQ ID NO: 161025 - protein, 352 aa, unidentified
MTEFIGCDMHKKYSVFVSMNEAGQAQPAVRVEHADRQAFRQYLGTLTKGSAVAVETTGTWYWLVDELEAVGLRPQLTNARTAKLLMGCRYKTDKLDAKGLATLLRNGTLPTVWIATAEVRDLRELTRTRMALSGMRTKVKNRTLADFAKYGIALEGYSDVFGLGGRRLLGRSLEALPEHTRQAVEDQLMVLDALCERIKAIEPRIEEVVQETPMLGLLRSLPGIGKILATVIGLEIGTIERFASAERLCSYSGVVPCVRSSGGRTRFAHTASDVNRYLKWAFVEAANLVVANRERWHHPSLRQLYERICRRKNHPVATMAVARQLAETAFWVLKKEQPYREPSPVRGSSSPR

SEQ ID NO: 161026 - protein, 354 aa, unidentified
MIIIGCDYHPGFQQIAFVDTDTGELQERRLEHREEAEKFYRDLEAKGATVRVGMEASGHARWFERLLSELKFELWIGDAAEIRTKRVRKQKTDRQDAQLILRLLLEDRFPRVWVPSWENRDLRQLLWHQHRMVQARTRIMNQLQAVALNEGLLCKKRLWREAGREQLESFALAPWASRRRRDLLELLDRLTPTIAELTQAIEQEVEKCPEAQRLRTHPRVGSLTALAFVLIIGRPERFQCGKQIASYLGLVPLEESSKERRRLGHITKQGNSLLRFLLVEAAQVTVRSDQEWRSKYFHLAMRRGRKIAKVAMARRLAVRMYWMWRKGWDYEQLKKFGSHAGQPGNRQGVPLNTE

SEQ ID NO: 161027 - protein, 397 aa, unidentified
MYIVGIDIAKRKHEAAVIDGDGAVIIKPFSFTNNCSGYNRLLAMLARAKLPLDEVSFAMEATGHYWLALFTRLQKEGFRVQVINPVQTNSIRSFYIRQAKTDPRDALLIAEVIRFGHFSESTLHPENIYELRELCRGRHAIVSMQADVKRKVVALLDQVFPEYETAFTNLFGDTSMAILQTCPTPKELSEIPLEELCHLIEVSSRKRFRMAKAQELQALARNSFGFAMAGDVFSTMIRLYVKHLDFLKQQVREMDRKIAEIMETLDTPITTITGIGPTLGAYILSEIGDINRFSSAAKLAAYAGIDPTMRQSGEYNGVRNRMSKRGSPYLRHAIWLAASSAVLHDPALKLYFKKKRDEGKPYMASVGHACRKMVSIIYAVMRDNKAYTPCIPNEISA

SEQ ID NO: 161028 - protein, 369 aa, unidentified
MVPTMPKRIALSNPDRAGEPLLVFGGVDTHADTHTVAAISHLGAMLGHQSFPATAKGYRQLYGWLAGHGTLMRVGMEGTSSYGAGLAAALTGHGVELVEVNRPARTTRRARGKSDPIDAEAAARAGLAGVATAVPKTHTGVVEEIRVIFVARRGAVQARTAAINTLHQMIITAPLQLRAQLQPLTRTQQITACAALHTGDITSPTRATKLALRRLARRIGHLTAEITDATNDLTTLVQAHAPHLLTQVGVGSLSAAQLLITAGDNPDRMTSPASFAALCGTSPIPVSSGKTNRHRLNRGGDRQANCALHTIVLSRLRYHPETQAYAAKRQTEGKTERDIRRSLKRYLARRLFTLILTASQATDNTLIAT

SEQ ID NO: 161029 - protein, 361 aa, unidentified
MFYGIDLSKESFKAALLKKDSDELRMISCNLHGEAFERFKAQLTEEDYVAVEASTNTFWFVEQIKGLVKECFVLDPFKLSIIYRANKKTDKTDAQKIAHKLKYHILYDPSGSEFPSIYIPSKEIQELRSLLTTYEMLKKELVMTKNRIRSILTQNGFFGLKSKDISLLKNQQIISSLPLPLTAHEQIEMLFESLNKKEKNIKRIKEIAIAQSSSFQHEIDILTSIKGISPFAAVVIMADIADIHRFKNAKHFCSYLRAAPKVDASGDSTKIGKVNKHSRHITMSILVESILHFRQSSPRLNAFYERKAAGKSRGKVRIAVVRKVLVAIFHMLSRDEYFRDMDIHNHDSKMREYGKIIKKAA

SEQ ID NO: 161030 - protein, 463 aa, unidentified
MERHARPRPPRRARPSLARRYPDAAGIDCGAAAHVVAVPPDRDAESVRTFATFTGDLHRLAAWLTACRITHVAMESTGVYWIPVFDILEAHGFQVLLVNARHIRHVPGRKSDVADCEWLRDLHIHGLLRGSFRPSAAIVALRTYLRHRAMLIELAATQVQRMQKALVQMNLLLPRVVSDIAGATGLRILRAIVAGERDPATLARHRDYRCHATEAEIVAALTGHYRPELVFTLQQHLELFDSCQRQLAGCDHAIEAQLAQLAATVPVPAAPLPAPRGRVTPRDNDPRFDVRTPLYRLTGTDLSQIDGIGPANALRLIAEIGTDMTRWPTAGHFTSWLALAPHNKISGGRLLSSRTVPSANRAAATLRLAAVNLGRTQTALGAFYRRLAYRVGKAKAVTATARKLAILVYRTLKEGLVYRDPGADAYDRAHRAAVVRRLRQRAVSLGFELVSTTTGEVTGGTVS

SEQ ID NO: 161031 - protein, 390 aa, unidentified
MDVLYQSCAGIDIHQANIVVCILHGPLTSTCPNREMATFDTTTKGLRACHDFLSQFHVEVVGMESTGVYWRPVWHALCDDFELILAQPAHMKAIPGQKTDKKDAHWIAKLTRIGLLPRSFVPNETIQELRELTRQRKHYVESRNRETNRIHKILQSGGIKLTTYIEDIMGLSGRNLLQLLVDGTPITPRIVHQSVYTSLKKKVPQLLEALDGYFSDHHRFMLKQFLEIYDFYQKQIELLEERMNVYLSQYENHVEILDSIPGIDVITASVIISEVGVDMSQFPTAGHLASWAGLCPGNNESAGKKRSTKIRHGNSYLKKCLCQAAFAVKKQKGSPLADRFYQIQSRRGSQKATIALAHQLLKIAYILLKEQITYLEFLAQKKTTRDELVA

SEQ ID NO: 161032 - protein, 313 aa, unidentified
MMASQDVFVGIDVSKDRLDVHVRPLGVGFSVGNEAAGYAGLIARLRPLRVKRIVLEATGGYERALWLALSEAGLVAAVVNPRQVREFARAAGRLAKTDRLDAAVIAHFAETFAPRIGKPDAVADRLAEHVLYRRSLQDELVALEHQRRRLETPALRERADRRHAALRAEVKEIEREMRAIVDGDPAKKALFACLTALKGVGLVLACTLIANMRELGSLSRHQAAALIGVAPLNHDSGARRGYRAIAGGRRRVRNVLYVATLSAVRSNPPIKEFYRRLSANGKPPKVALVACMRKMLVMLNGRVRDELAAATIP

SEQ ID NO: 161033 - protein, 331 aa, unidentified
MKKNVIGVDVSKEKLDFCLLENGKIIKEWIVANAAESITASLSSLKIDLSQTLVCAEHTGGYTYPLCCACEEIGLDLWLENPAQIKFRNGVQRGKNDKVDARRIAVYAVRFQDEARLFSLPEKNIASIKLLIAERDMYVCDKGKYQGQITDQKRFMPKKDYEQKVARLHRLIEELEQAIVAVERQIEQLVKSNETLNRQYNVLCSVDGIGRQTALKMIVTTNAFKNFKDPRKFCCYAGVAPFKYTSGTSQHSKSRVSQRADKSIKRLLHMAALAVIAHKKGELYEYFLRKVAEGKNKMTVLNAIRTKLIYRMFAVVRNNKFYDKNYDWKLA

SEQ ID NO: 161034 - protein, 365 aa, unidentified
MLLGSELIFPTPYMETQKMASVLNHRWCVGVDLHKDTLTACVFCGCCGEVSFQKLPCKCRKQVAAYFAALPRPHTVAIESVGFYRWLWELLEPLVEKLVLADATQARALAGRRLKTDREDSLNIAQLLAAGRLPTSYAPPLDVQILRDLTRHRNGFSRQHARILHRVKSIMNANNRPGPARLRSDGLIRYLKGQGEKLPARHVEMLWQCVDALALTERQMQQAERTIGELVRRDSFREVIEILLSFPGVAQLTAATVLAEIGDFGRFPDAKAIGRYAGLNPRVFASGGKQRIGHIAKTGSADLRWILQQAAWTAIRTDEYVRRVFLRIAKRSGRKAAAVAIARKLLTWMWSAVTKGEVYRSRTAA

SEQ ID NO: 161035 - protein, 423 aa, unidentified
MEVIHERVAGLDVHKDSVVACVRIMSGGKAKRECRTFGTTTAELEALRDWITSWECTLVAMEATGVYWLPIWKILLGGAFEMNIANARHIKAVPGRKTDMNDAMWIADLAAYGLIRASFVPDEEFHELRTLTRTRKQLVRDQTSHVQRIQKTLTEANIRLDSVISDIMGVNGRRMIEAIIEGVRDPVKLAALGDRRLKATRKELHDALHGRLTDHHRFLLKLHLDQHDALEKTIRVIDAEVERRIARLDKQAKPAETPLSRLIELLVSIPGVSYLSAITIISEIGSNMSRFPTAGHLIAWAGLCPGQNESAGKRKRSRLRKGAPWLKTMLVQCAWAAKRQKNSYYRAQFYRLQARRGPQKAICAVAASILTAIYHILKDGVPHQDLGIDYFDKRKPEAKVKRLVAQIAKLGFEATLHPIAKAA

SEQ ID NO: 161036 - protein, 461 aa, unidentified
MKKEKCYLGIDVSKGYADFTLLDEEKNPLEKVFQLDDNRKGHDALKKIIQDKIKEHQMDCLYCGLESTGGFENNWFNSLSGWSKTLAVKVARLNPSGVKNNIAAGLNRNVTDSLSSHYIAEYLIDHESKVSYDVEDNEYSEFRSLYAYVQLENKQKTQLINELKMLLYSGFPEMVRYCKQGVPFWVLELLSKYPTAEKAARLKSSQLIKIRNVTVEKAEAIIAKAKETVGSRSSSTQGFLIQNLAEQIMDKQKIIEKAKKFLTENCKGPEVDLVTSLIGVGEYSGSCIMIEIENIYRFASPKKLGSYFGLHPELKESGDKIKKYRMSKKGRSSMRSILYMCAMTAVLHDPHFKQIYHNHRSKGKNHRQAIVVIMHKLLRLIWGILTYKKPYEAATDIANQNKKVTAIKDENKRKENKVKRRYQEADLEAPISNRQTKIRKVQSDSQVDIVDQMRDVPIARL

SEQ ID NO: 161037 - protein, 453 aa, unidentified
MKKEEVKKGVVKMGTGLPVFNHHAAGIDIGDTLHCVAINDGNGGQEVKTTSAFTCDLHEIVDYLKSNGITTAAMESTGVYWLPLYIMLEDAGIEPYLVNAKHVKNVSGRKKDDTDSIWIQKLHTCGLLQKSFQPDNEIRLLRSYTRQRANLILLGSDSVRRMQKALELMNIKIHTVISDILGKTGMEMVKAIIAGERNPQILCALCDPRIKASKEEIIKSLQGIWKEEYLFMLEQAVENYEFHQKQIKSCEEKIKQQLLKQVAIIKDGDITCLEETLKKKSKAKAKKNQFDFAISPYLIAIIGVDLCKIPGISEVTALDFIAEVGCDMRKWKSAKHFAAWLNLTPNTKITGGKIVSSKMMKKKNKAGQYLRQAASCLSTNKTPIGDYYRRMRARLGGKGAALTTAHKLSRIIYTMLLKKTEYNIEMMIDNQEKIKEEKIKKLEKQLARLKQAA

SEQ ID NO: 161038 - protein, 337 aa, unidentified
MIHVGVDLHQRFCYVTVMDARGKILQQRAVGNEAGELKRWARSLPGPAQLVMEACSFWPAFQKNLSGEVEKMVLVHPARVKAIADAKLKNDRVDSETLAHLSRCDLLPEAWMADEATRQARQRVRLRVALGQQRARSKNLLQAVLHQEGQKKPVTDLFGKKGRAWLDEVELSTAGRESVNTYGELIEHYDRLIGERQQKLEQAAEQSAEARWLATIPGIGPYLAMVILAEIGDVARFRDKKALANYAGLVPRVRESAGKRHYGGLTYQGSKLLRWAMVQAAQGATRGSPAIRAWYEKLRQRKRPQVARVALARKLLTCVWALLRHGVSFEESVFATR

SEQ ID NO: 161039 - protein, 383 aa, unidentified
MKQQTKSSNITVGLDLGDRRHRFCALDERGEVVEQDSICNDRVSLKKLAGRYHGALGVMEAGAHSPWISRFLEALGWRVVVSNPRKVRAIYQHERKSDQRDALMLARIGRMDLALLYPVRHGTAEGQQDLLRIKLRDSLVRARVAVINSVRFTLKSLGYTVRNSSSARFHKVVMEEVPESVREMITPSVQALAELTARIKMLELEINTLAQMKYPQSAQLQQIPGVGPITALYFVLKIEDPNRFAHVRDVGAYAGLCPRRDQSGESDPQLRISKRGDAYLRRLLVSAAHYILGPFGPQSALRAYGLMLAADGTARAKKRATVAVARKLAVLLLSLWKSQQPYQPFPAACLNGEQEDRRSGTIALHRTRGPTIWNDCAASHGSD

SEQ ID NO: 161040 - protein, 343 aa, unidentified
MQYLGIDWGTRRASWCALDEHGALREGAIPADQDGLARLALTVGTDEEARGCIEMMSGAVWVRDQLALVGWDIRLADARKVKSIAPLACKTDRVDARVLADLVRRDLVPEVWVPGLEERANRERLRRRSHLIRLRTSAMNRSFGLLTQWGLRRNLTALRKPDAIAELAEHGVPPVWLQSITTLLAVIEDLDRQLAVLDGELRPVARADDRVKLLITIPGIGELLGLTLASEIGDIARFPSAGKLVGYSGLTPTIKQSGQSSRTGRLSKAGPNTLRWAAVEAAQQAWRPTNPWHRLYTDTKHRHGKSNPAKAAVARKVLIAAWHVLARQQPFKPSPAAATIPAP

SEQ ID NO: 161041 - protein, 444 aa, unidentified
MTRGDRNRNRKLEALREAVARDRAVLAVDLGEDKQVAVVMDHECRVLARKVVKAKAHQLAGLLDWGCERAVRAGSAGLTVACEPTGHRWKALMGLADAAGHGFCCVQSLAVHRAREGDDYTLGKTDHRDAYLIGKLVVRLECYLPERADEVWARLRHLGARRFALVADVTACMQQAGDLLGCAWPAPLGAAARPLESVTWLAGMAVVTDRCCGDPRRLRKLGYERFLAAVRRELPRWGGKYVRHSIVRGLWDALADAGGVAAQRPGALERLHLLLGDWRLLRARLADAEERMVAVLGELGLADLVAGIDGVSALSGAVILAETGDLHRFTSGRAVVKHAGLNPSEHTSATMNGQTRISRRGRPGLRAAAWRAVWGALRHNPVLQARHAHLTSRDANRLADGQARTACAAALLRWLWAVVITGQAWDARIAAGQLPARPVTTAAA

SEQ ID NO: 161042 - protein, 343 aa, unidentified
MQTITTIGLDIAKSVFQVHGVDAAGQVVIRRQLKRRYVLAFFQKLPPCLIGIEACASSHYWSRELQALGHTVRLMPPAYVKPYVKRQKNDATDAEAICEAVARANMRFVPTKTPEQQSCLMLHRTRHLFIRQQTAVINSIRAHLAEFGIVAPVGRKGVTELLHIVADPSDKRVPEVARACLAALGNQLLSLKEQIVEFDRMIMVWHRSNETSKRLHYIPGVGPMLATALVASVADPRTFRSGRNFSAWIGLVPKQHSSGGKDRLGSISKQGDRYLRSLFVAGALAVIRYAKIHGTKHRPWLTALLARRPTKVAAIALANKLARMAWAMMARGERYRQPVALAA

SEQ ID NO: 161043 - protein, 338 aa, unidentified
MTILTVGIDLAKNVFAVHGVNATGGVQLRQPKVARAKLNALVATLPPCTIGVEACSGAHHWARQFAAHGHTVRLMAPKLVTPYRMSGKRGKNDAADAAAICEAVQRPNMRFVPVKSEDQQSRLMVHRARQGYVAARTACINRIRGLLSEFGVVLPLKAEVVRASAREHLEDLPGYANLVIGDLLSEVSHLDERIKQYDKHIHAMAKDCTAAQQLMQLMGVGETTATAIVAMVGNGREFDSGRQFAAWIGLVPGQYSSGGKARLGRITKAGDPYLRSLLVLGARAVLNAAQNKTDSLSRWAMALWQRRGYWKAVVAIAAKNARMAWAVLNKGETFKLPA

SEQ ID NO: 161044 - protein, 339 aa, unidentified
MDTIRFLAIDLAKNVFQVHGVDAAGKLVLRRRVGRAQLTELVLRLAPCTIGMEACSSAHHWARQFLQQGHTVKLISPQFVKPFVKGNKTDGNDAEAICEALQRPSMRFVPIKSVEQQDVQSLHRARSRLVSNRTGLVSQMRGILAERGIVFAQSITRARREIPVIVADTSNALTPLAREMLADLMDQLRELDRRIAGFDRRIDLVFKASKTCQRIAQIEGVGPKTATAIVAAVSDPKGFRNGRHFAAWLGLVPRQSSSGDRTHLLGISKRGDRHLRTLLIHGARAVLRTAPTKHDKKHAWALALKARRGANRAIVAIANKMARVIWSMLATGQSYQKAG

SEQ ID NO: 161045 - protein, 346 aa, unidentified
MRFYDGQHKFYCGVDLHTKRMYLCIFDHEGNKRLHRNVRAKPREFLNAIHSFRDDLIVGAECMFTWYWLADLCQDKGIKFILGHALYMKAIHGGKQKNDKLDSEKIARLMRGGTFPLSYVYPREMRATRDLVRRRMFLVRRRGELLAHVQLVNQQYNHDPFEKMLKYASNRDVLDRFADDSARLNVEADLQMVGHYDQLLKQLEASLLRQATGHDPQTCCLLRTIPGIGKILSLVLLYEIHTINRFPSVGDFLSYARLVTPKQTSDGKVTGHGGAKIGNVHLKWAFSEAVLWMLRYSDDAKAFLKRKEKKHSKARAMTMLSRKIARAVYQMLKRKEPFDEVKFFAS

SEQ ID NO: 161046 - protein, 411 aa, unidentified
MRRVIGMDIHRTFAEVVFWEDGKLRPAGRVSMTRAGLEGFGRSLGKEDEVVIEATGNAMAVVRVLSPYVARVIVANPLQVKAIAHAHVKTDKIDAGVLASLRAADFLPEIWLPDAETERLRRLVARRNQVVRHRTQIKNEVHAILHAHLIPPCPHADLFGRLGRTWLARQIMPDDERGAIERHLRELDRLGEDLGVLDRDIAQGAIDDPAVKRLLTITGVNLIVAAGLVAAIGDVRRFPDPQKLVSYVGLNPRVRQSGLGLAQHGRISKRGRSHARAMLVEAAWAASKAPGPLRAFFLRIRARRGHQIAAVAVARKLAVLCWHLLVKGTDYQWARPALVANKLRAMELKAGHPARKGSKPGSAYAYNIKELRDREIELARHAEQAYERFVSQWQRHGKTKQRTGAANEERH

SEQ ID NO: 161047 - protein, 343 aa, unidentified
MKLFVGLDVSPEKTAICVISEHGKIVKEAQVASEPEALLRWISDQDGTIAAVGLEAGPLSQWLHRGLSEAGQPVVLMETRQVKGALKAMPIKTDRRDAEGIARLLHLGWFRPVHCKSVSAQEVRAVLSARKAVQQGFITLEMSLRGLLRNFGLKVGTISRGRFEQRIRELAAGNPMLVAATEPMLSARSALRRELAGLERHVRQLAQEDPVCRRLMSMPGIGAVVALTYRSAVDDPDRFTSSKKVGPWVGLTPSRNQSGERDISGGITKAGDVNLRRALCQAATVMMHRGRATWLRTWAAKLARRRGAKRAMVALARRIAVILHRMWKDDIDFRFDTPVINAD

SEQ ID NO: 161048 - protein, 454 aa, unidentified
MRHGQKKQRPAQVDENMPAMNPNAAGIDVGSTEVWVSIPPDRDPEPIRRYETFTADLQALAQWLRHRGIESVAMESTGVYWIPVFEILESQGLHVVLVNAKYAKNVAGRKTDWLDCQWLRMLHTFGLLPSSFRPAAAIATLRCYLRHRQMLIDYAAAHIQHMQKALTQMNVQLTNVISDITGSTGIRIIQAILAGERDPQRLAQMRDYRAKNDEATIARALHGNFEPQHLFALKQAFELWDVYQQKRWACDQEIAQYLRGLESAIDVDLQPIPPPRAPKKRRNSPEFNCRLETYRILGVDLTQIDGISESSALTILSEIGTDLSAWKTEKHFASWLTLCPNNRISGGRVLQRRTRKSSNRVHDVLCISAQTLFNSQSALGAFARRMRSRLGPQKAIVATAHKLALLIYRLLRFGKPYLDIGQEAYQQQYQQRKVRALARQAKHFGLQLVAVTET

SEQ ID NO: 161049 - protein, 344 aa, unidentified
MTHTIVGVDIAKNVMQVHWVDPDTGEIVNRPVKRAAFLEYFANRHPCLIGMESCSGSQHWARRLIEMGHQVKLMPAKFVKAFNIRNKNDAADARAIWMATQMDSKEVAVKTEAQQAVLALHRMRQQLVKFRTMQINSLRGLLTEYGEVMGVGRIALDRAVVGVLERLSGRLPAILIDTLREQWKGLDDLDRQICQIERRLNEWMKDDQSAKAIAVIPGVGLLTATAAVATMGRAKAFKSGREFAAWLGLVPGQTGSGGKIELQGISKRGDTYLRTLLVHGARSIIYRVKDPGPWVAQMKQRRPLNVVIVAMANKLARIIWAMLAHQRPYRKDYESVSRLLKYRR

SEQ ID NO: 161050 - protein, 321 aa, unidentified
MTKDRKIYGIDISKDVFDVYCETTGHLQLKNDEKGFKSLLKKLPKTALVVMEATGYYHYRLAQFLHKNDVAVSVVNPLSVKRFIQMKLAKVKTDKSDAKAICEYGTKNELPLYNALTDVQSECLQLFRLLDNYLKKRTQTKNKKHGEEVLGIPSKYVYQSLKRDLKHLDKEIKGIEVRLLELVKQDQQQQLTLLKSIPGMGVKTALFLIVVTDGFKKFESASQLCSYVGITPTIRESGSSIRGRSRISKVGNKKLRNLLFLCAFSACKHNKACREIYERIVNKGKSKKLALIAVANKLLKQAFAIAKSGLSYDENFVSKLA

SEQ ID NO: 161051 - protein, 371 aa, unidentified
MDESSKTLFVGLDVHKDTIAVAYAPDDRGAEVVVWGTTGTRQCDVDKLIRKLQAKGARLVFVYEAGPCGYWLYRYLTRKGLTCHVVAPSLVPRKAGDRVKTDRRDAATLARLMRSGDLTGIYVPSIEDEAIRDLSRGREDAMRDLKATKSRLKAFLLRHDIRYEGRATWNAAHLRWLATVVCPTAVQQIVFQEYVRAVTEQQERLHRLETELQSAVKQWRLYPVVEAIQALRGIDLTGAVIFLAEVGDLTRFDNPRKLMAYLGLTPSEYSSGERRRQGRITKTGNGHARRALVEGAWAYRYPAKVSRHLQLRAEKTSATVQAISWKAQVRLCKRYRQLSARGKHVNQVVVAIAREMAAFAWAIARTLPRPA

SEQ ID NO: 161052 - protein, 368 aa, unidentified
MQRVIMAGGDVHDKTILVKVAIGRGKVEKRCFQNTVRGRKELVLWLQSMGREACGDRIVFAYEASGLGFGLYDELTERGLECFVLAPTKIARSVKHRSSKTDERDAERILELLRGHLLAGNDLPSVWVPDKETRDDREVVRARLDAGDKRTGLKAQVRCLLKRTGVRKPRGVGKGWTAGYRSWLDSLCMAGSELPWGARTALASLLRQMESVEQEIVGLEKAVQALSETARYAETVAVLRRRGGVGLLTAMVFLTEMGDLSRFSNRKQVGSYLGLVPRSNDSGERDCKGHITRQGSGHIRKVLCQAGWNVVRLDPVEKPVFDRLVQRNPKAKKIALVACMRRLGIWMWHRGLEAQRAAGAFARQEPAA

SEQ ID NO: 161053 - protein, 337 aa, unidentified
MTIIRIGLDTAKHVFQVHGVDAGEQPVLRRRLGRGEVERFFAKLPPTRIGLEACGAAHHWGRVLQGLGHAVVLLPPQYIKPYVKRGKNDAIDAAAICEAMSRPGMRFVPIKSAERQAALTMLKTRDLLVKQRTMLINAMRSHAAEFGVVAAKGMAKVSELLQRAHAAEAGVPALALEMLRLLASQLDALDTRIKAIEAKLLAWHKADPVSRCLATQPGIGPIGAVSFALKVTDPKTFRDGRHFAAWLGLTPKENATGGRSRPGRISRQGDESLRRLLVLGATTVIQFARPGRASPWLIQLLARRPRKLAAVALANKMARILWAMMVSGELYRRPQPA

SEQ ID NO: 161054 - protein, 390 aa, unidentified
MDVLYQSCAGIDVHQATIVVCILHGPLTSTRPKREMAQFDTTTKGLKACHDFLSQFHVEAVGMESTGVYWRPVWHELCDDFELILAQPAHMKAIPGQKTDKKDAHWIAQLTRIGLLPRSFVPDETIQELRELTRQRKHYVESRNRETNRIHKILRSGGIKLTTYIEDIMGASGRNLLQLLIDETPITPRMIHQSVYASLKRKVPQLLEALDGYFSAHHRFMLGQSLEIYDFYQKQIDCLEERINGYLNLYERSVEILDSIPGIDLITASVIIAEIGVDMSQFPTAGHLASWAGLCPGNNESAGKKRSTKIRHGNSYLKRCLCQAVFAAKKQKGSPLAERYYQIQSRRGPQKATIALAHQLLKIVYILLKENLTYQEFVLQKKATRDEPVA

SEQ ID NO: 161055 - protein, 457 aa, unidentified
MMETKRRREQRSMLAVHPDAAAIDIGATVHVAAVGPARDPEPVRSFGTFTGDLHRLTDWFAQCGIKTVVMESTGVYWIPIYEILEQRGFEVRVVNARDAKHVPCRKTDVSDAAWLQCLHEFGLLRGSFRPQGAIAALRAYLRQRERLLDYAAAHIQHMQKALTQMNLQIHHVISDITGATGMRIIRAIVAGERDPDTLASYRDIRCHSSVKTVRQALIGNYREEHLFALAQAVELYEVYQAKVATCDEKIEGVLERLKQPGRAPAKPLRAARHKTRQPNAPAFDARGALYAVLGVDLTQIHGLGPYLALKLISECGTDLSAWPSAKHFTSWLSLAPGNKISGGKILSSRTRPSGNRAAALLRLAATTVGRTETALGAFYRRLSARIGKAKAVTATARKIAVLFYNAVRHGMDYADPGASYYEERYRRRVLTNLQRRAKAFGYVLQPTEIKVISMAVS

SEQ ID NO: 161056 - protein, 408 aa, unidentified
MRWYMGLDASDSEYFVLVFDDAGQEVHRRKVAHSAEGFADFGGWLNARIADGLELFASLERPHGRMVEILLDHGVTVYPVNPKSLDRARDRYRPNGGHADWFDAFVLGNSLRVDHMHLPALRPDSEESAELKMLTRDRLRASQNQTRCQNLLTQTLKEYYRRPLEVFPDLKTHMALDFLRRFATPESLDKMRWGQWLKFAREHRRSDSRAREMWEQLHAPQLPVKAHIARVHSRQLLHLVDELGIIVASVKDYDQEIERFFVTLKTVDIARSLPACKTGTILPTLWAELGDAVGRWESFRHLQGYAGTTPFTKQSGKSKAVLFRYGCNKPLRYAIHWYAIHSLKKCVWSKAYHQRQLDRGRSYNQATRALASKWLKIIFVMWRDGVPYDEDRHLASIAKQNINQVIAA

SEQ ID NO: 161057 - protein, 346 aa, unidentified
MVLIGCDYHPSWQQVCWFDRATGETGDEKLVHASGDAEEFYRRFSSPVRVGIEATGNCQWFLDLLNRLGNEVWVGDAAKIRASDSRQQKHDKRDARLLLQLLMEDRFPRIWTPTREQKDLRQLLIHRYKLVGLRARVKNELQHLAMNQGVTKKQKLWSKAGEQVLRELALAPWASQRRKDLFRVREMLNEQIDLLDRAVVEAAEKNEKARLLMTQPGVGPITSMAFVLTIGDVKRFPRGKQVASYLGLIPREYSSGGKQHLGPISKQGNRFLRMLVVEAAQAAVRYDPGFRNEYLHRCHKKAKGVAKVAAARKLAIRLYWMLRTNTGYPEVVRVESSSRVALVSAS

SEQ ID NO: 161058 - protein, 463 aa, unidentified
MAKRVTRRKKRGRAPEERFEMVRKSTAGIDVGSREIWVSVPPQRSEEPVRMFGVMTDDLRELATWLRECRVDTVALESTGVYWVPLYEILEEQDLDVWLVNAREVKSVPGRKSDVLDCQWIRRLHTYGLLRKSFRPAAEIVQIRQYLRQRDVLVRGAADEVRRMHQALTYMNIRLQNVVSDITGQTGMAILRSIVAGERDVAALAEHRDYRCRASSKTIEQSLTGNYRDEHILALKQAIELWDLHQKLIAECDAMAASALDAVSSQAGLSARSIVKKPRRKRRPKDATVDYCNRLLPLIGVDLTAIPGISDYSAAVIVSEIGTDISQWRTAGNFASWLRLVPRTDITGGKPKNRRTLPTQNRVTSILRMAALNAGRSNTALGAFYRNFARRKGKAEAVVATAHKIARIIYAMLRDRTEFHDIGFDGWEGQRRERNIRNLKRRAQALGVRIVEESTPEAPQMSC

SEQ ID NO: 161059 - protein, 344 aa, unidentified
MEPMYYIGLDVHKRKISYCVKDSSGKIYSEGSLSATRLDLDHWMKTLPQPWSAAMEATMFTGWIYDHLKPHAAALKVAHPLMLRAIAAAKKKNDRVDASKICDCLRCDFLPECYMASTAIRERRRTLRYRNLLVRQMVQMKIKISSLLMEAGVNYNKQRLHKAGYFRELLASNPDIDEGLRSLLRLCRETVVRLQKTEIALVRSLETDSLLIDRVERLMTIPAVGPITALTWALEVGEVQRFSSIKKAISYCGLCGAEKSSGNTVQRTPLSKQRNKHLQTTLIEAAKMAPRNSPELAMLYDKEKQKGNANRATLAVARKLVAYLVAVDRGQRNFQVVETSNIAA

SEQ ID NO: 161060 - protein, 406 aa, unidentified
MTSTSWPAFAGIDWGGEHHQLCVVDDTGKRLTQLRVTHDVAGLAQMRRELARFGAPMPIAIERSEGLLVEHLQEHGHVLFPVSPRISARARERYKVASVKDDRFDSFVLADTLRHEHRHWRPLSVPSPLLAEIKALTRDRDRLLETQQAVESQLRMILEAYHPAPVRLFSSVDRQITLSFVLDYPTPAVAGRIKTTRMAGFLIRHHYTGRVPAQVLAERMRANLLTGSPGTVAGKSFSAQSFTRLLQLLNSQLAEFDDAIAAAVAEHPDARIIASFPGVGPVTTAVLLAEIGEDRDRYPRPEVLLAEAGLAPVTRSSGRSRSVRFRYAANTRLRESAMWWAYNSMKDSPWAAAAFREARDQRGQRYHRALRGLSARWMRILWRCWTDHQPYDPGKHNAAALTTATA

SEQ ID NO: 161061 - protein, 417 aa, unidentified
MPVVYARCCGLDVHKKTVVACVLLTELDGRVRKDVRTFGTMTTDLLALSDWLCELGVSHVAMESTGVYWRPVFNLLEDDKRTVVLVNPQHLKAVPGRKTDVKDSEWLADLLRHGLVQPSFIPPAPIRALRELTRHRKALVQQRTQEVNRLQKLLEGANIKLGAVASDILGKSGRGMLDALAHGEQDPQTLAELARGRLRGKLPDLRRALHGQVQASHRVLLQQVRAHLDLLDAAIAHLQHEIAQRLEPSHEAVTLLQTIPGVGEIAASVLVAEVGTDLQRFPSAKHRASWAGVCPGNKQSAGKRLGGKTTGGNVWLKAVLSEVAWANARNPTSYLGAQFRRLAHRRGVYKALVAVAHSVLVIVYHVLTTNQPYHELGADYFDHLHQTPLERHHVRRLEQLGYTVSLTPQPNPPPSAG

SEQ ID NO: 161062 - protein, 369 aa, unidentified
MEQHTEVFVGIDVAKTRNAIAIADGERGGEVRFLGEVDASSENMRRVIQRIAAKHGRAHFCYEAGPTGYGLHRLISSMGHDCVVVAPSMIPRKPGDRVKTNRRDAVALAKLHRAGELTPVWVPDDGHEAIRDLVRARAAAVETVRVHKQQVSSFMLKHGRVFPRKTTWGARHMRWLQEQHFDYPAHQIVLQEAVEAVRLARERVERLEKIIEEFVPQWSLAPIVEALQVLRGVNLVIAVTFVAEIGDLRRFENPRQLMGYLGLVPSERSTGDTIRRGSITKAGNGRVRHLLVESAWTYRHAPRIGKAKLYKLERVPPKIREIAWKAQTRLTARYRGMIARGKKTTVVCTAIARELVGFMWSVAREAQTT

SEQ ID NO: 161063 - protein, 334 aa, unidentified
MNYKGFVGIDISKNTLDVVVIAEGKRTGEHQQFSNNLKGFKSLLKWSVKVIKCKQDELLFCMEHTGVYTYQLSCFLSENELSFCLENPLQIKRSMGISRIKNDKADAQLIARYAMIHHEDLKLYDLPLKIIFKLRHMLAYRERLIKSRHTINIASKELSKHTEKEDCEFISKESKSLVKVLSKRIEKIDAEIKQLIESEESLKKNYDLIISVGGVGKVTARHLLVLTNNFSSFSNSREFACYSGIAPFEHSSGTSIKGRTKISHLANKKMKSLLNLGACTAILHDKELKNYYQRKIKEGKAPMSVINVVRNKIVSRVFAVVKRGTPYVSIANYN

SEQ ID NO: 161064 - protein, 361 aa, unidentified
MKKHTQDLVAEIPRGCSQVGITIGIDLGDVWSHYCTLNEDGEVVDRGRFRTNPSSVDKWFTDLPRVRISMEAGTHSIWISEQLQELGHEVIVANVRELRAISHSDRKSDQVDAEKLARFARLDPKILRPIAHRTVAQQEALTLIRARNLLVRLRTAAVNAVRGLAKPCGYRLPASSTLCFARRCVAVLPPGLVQALGPVLEQIAEMTVKIKAYDRAIKKLTETEYSETLALTKVYGVGHLTALTYVLTLGSKERFQRSRDVGCYLGFRPRRSQSGERDPQLGITKAGNVYLRSLLVECANHVLGRHGKDSSLRQWGLHLASRGGKQSRNRAIVAVARKLAVLLHRIWVTQEPYVPFYAAAA

SEQ ID NO: 161065 - protein, 409 aa, unidentified
MEIVHPRCAGLDVHKKSVYGCVIWCEPHGEKHQEKRSFGTMTRDLLGLADWLKQHQVTHVVMEATGVYWRPIWAILEGQFELMLVNPHHVKAIPGRKTDAKDCEWIAELLQHGLVRGSFVPPTEIQDLRDLTRYRVEVTQAQARTANRIQKLLEQANVKLASVVSDTLGVSGQQMLDAIIAGEQDPEQLADLARRRLRGKIPELRLALEGRVRDHHRFLLKELLEEWRALGERIRRVEEEIERRIVPFEEAVALWESIPGMNRRTACNLVAEIGVNMGQFPSAQHAASWAGLCPGSNESAGKRMSGKTRNGNRWLRRTLCQGAWAVTRAKDCYLAAQFRRIAARRGMKRAVMAVAHSMLVIAYTMLKTGRTYQELGGSYLDEINRDQLQRYFTKRLERLGLTVTVVPVA

SEQ ID NO: 161066 - protein, 339 aa, unidentified
MFIIGCDYHPSFQQIAWLNQKTGECGCARLKHNAEAEAFYRGLQGQRVRVGIESTGGIGWFRQLLNQCGHELVVAHAAKVRARATRRQKTDQRDAELLLQLLQDSKFEWLSEPTAEQRDRRQLLLHRHRLVQMRTRVKNQLQSLAMDQGVREKKRLWSSKGRPQLEGLSLAPWAATRRADLLALLDDLNRRLVGLDQEVRQQARASAEVRRLMTHPGVGPVVGLGFQLTVLDPQRFATSRKLTSYLGFNPSEYSTGGRQRLGHISKQGNALLRGWLVEAAQVAVRRDVAWGRQFRRLAIRKNRSIAIVAAARKLAVRLWWMWKLGLDYGQMVQSGSHVE

SEQ ID NO: 161067 - protein, 360 aa, unidentified
MPTIADAGRLVTGGVDTHAEVHVAGMVDQAGRVLGTQEFPATTKGYQALLAWMRSHGELVKAGVEGTGSYGAGLARYLAAAGVQVTEVIRPNRQARRRRGKSDAADAVAAALAALNGEASGTPKARDGAVESIRALQVARRGAIKARTQAGNQLRDLIVTAAEQLRGKLAGLPTLQRVTVAARFRPGDLTDPAEAAKAAMAAVARRHQVLTAEITQLDTCLDALVAQAAPAGFLAKTGVGTQVAATLLVTAGDNPGRLVTEASFAALCGASPVDASSGKQRRHRLNRGGDRQANSALWRIVLVRMSHDPRTRAYVARRTAEGKTTKEIMRCLKRYVAREICKALVPAAGQAPAMPLTLAA

SEQ ID NO: 161068 - protein, 389 aa, unidentified
MPEDAPRPAQAAIRTDLGAIFVSLELSRRTWLITSLSPGGGEKMSKHSVPASDVSGLLRRFAELRRKATVRTGQDFPIIIIQEAGLDGFWIHRVLQSEGIESHVVDAASILTSRRRRRAKTDQIDGETLVRTLMAFKRGEPRVCSMARAPTPQEEDRRRVCRERRTLVGERVKHVNRIKGLLFAQGVFGYAPLRKGRRDRLEDLRTGDGRSLPVHLKAQLIRELDRLEVLLEQLKAVEAERDALLKPATEEAVSPAAMLTRLKGIGPESAAVLWSEGLFRQFDNRRQVAAYAGLAPTPWQSGSIDHEQGVSKAGNPRLRTTMVELAWLWLQNQPTSALSLWFHERVRRLGGRMRKTTIVALARKLLIALWRYTTAGVVIEGAVMKAATI

SEQ ID NO: 161069 - protein, 361 aa, unidentified
MKKKLAVAVQTALQSEHAVAGGADLRPTRVESPAITAPDRTWSDAPLVAECWVGIDVAKAHLDVAIWPTQERLRVTRDEAGMAELIAWLRPQAPALIVLEATGGLETLIAGMLIEAQFPTAVINPRQARDFAKALGVLAKTDALDAGVLARFGQSIQPEPRPWKDEETQALTALLQRRRQLVAMLTAEKNRLASAHRQVQADIRTTITWLEPRLQALDDDLHGRLRASPVWREQDALLRSVPGIGPVTAVTLLAALPELGTLDRRRISALVGVCPLNRDSGQYRGHRSIFGGRAVVRTALYMATLTASRFNPVIKAFYQRLRAAGKPAKVALTACMRKLLTILNAMLKAKTPWQPPEECRA

SEQ ID NO: 161070 - protein, 459 aa, unidentified
MVKSKCSVQGIGPSTKTTAQHCVRATYGSAIGVDVHAKQLVCCYQSSDGVDPLTHQPILKEQHAEFGTLRSELNEFAAWCLELKPEIILMESTGVLWRSPYEALEDVGFTTQELMLVNARDVKGIIGRKTDREDAVRLAQIARMGIIKASFVPPRIFREMRLIARRYQTLKKTTANLTNVYQKLLNAAGLRASSVFSDVRGLAATAILESKLNDAPDFAETVIERSARLKAPPEKIIDALDFEISDTMRAQLLDEKLLIERTQTHADAAMNRLRQLQKPYAKQIKLLMSIPGIKEDSARLIFAELCSDLKQQFPNSEKFCSWLGICPGNNISANKSHSGRSPKGNKWLRRTITECSQGIGLSHLCLRSRFEAFKLRRGKKRAVVAIGHLLCRIIYSVLVNGRMFKSVNEGDNLKNVLVQRLKSNLKNLRRQTPLVMCGNEMIERDTGVIICEMPAVFDP

SEQ ID NO: 161071 - protein, 378 aa, unidentified
MYRIIKIGMDVHTTNYNLCAVEPILGEEENVLAQIQIEPDYRLVVQFISRLKESLGVTDKECDILCGYEAGCLGYSLYHHLTNAGVKCVILAPTTMMSEKGKRIKTDKRDARLIAKCLCYGGYHAVHVPTADDNAVKEYIRMRDDHKIALKQKKQQMNALCIRYGCIYEGNNWTQAHLQWMRKLRLPELVRETLDEYLATYDELTTKIERYDKRIQELADQPQYQEKVKRLECFLGIKTHTALSLIVETGDFARFRKGNIYAAYLGLAPGEHSSSDDCNRLGITKAGNSHLRRLLIEASSGICKGAIGQKSKALKARQMGNTAAVIAYADKANIRLRRKYYKLIHRGKKRNIAVTAVARELACFVWGMMTDDIYGNAA

SEQ ID NO: 161072 - protein, 414 aa, unidentified
MQIVHTHCAGLDVHKKTVVVTIIVPDEQGGVRKETRTFGTMTRELLALSDWLLENGISHVAMESTGEYWKPIYNILENNFEVWLVNAQHIKAVPGRKTDVKDSEWIAELLRHGLLSASFVPPRGQRELRELTRYRSTFVRTRATLVNRVHKVLESANIKLTSVVSDVMGVSGRAMLAAILQAQSTPEAMAELAKGRMRNKRELLSKALEGYVQAHHRFVLLELLEQIDSLDETIQRFNEQIEVYCRPFEEAVVLLDTIPGVGRETAEVIVSEIGTDMSRFPTANHLASWAGVAPGNHESAGKRYSGKTTKGNKALAAALNQAAHAAARTKNTYFSAQYRRLAARRGKKKAIVALEHTILVIAYHLIQRKEPYRELGSDYFDKRRPEATAKRLIQRLEKLGYAVSLQTASALVPA

SEQ ID NO: 161073 - protein, 536 aa, unidentified
MACDQIKSLVFPGRCPDTLSKVIHSRAEHARQAKRSEAVNNFAGMNFESNLRSEHDVPGRKAPGRTRFACPNPTRIEPRTPADPGAFVKKSERTTPCEGLRIRTTHDKGLGPRARKKMTELIDWEKITHYAGFDWAKDHHDVVVVSPPGKIVDELTFEHTAEGWAQWKQLVKKYPHLAVAIETSQGAAIEQLLESGVIVYPVNPKSAERYRDRKAPSGTKTDLLDAWSLGDALRVDGHGWRALKPLEPLVQELRILCRDEVELIDKRTALVNQLQAALQEYYPTALQAFEDWTATPSWSFVQQFPTPQLLQEAGRRKWEKFLHVHRLYRPELNEKRLELFAKAHEFCGPAVVIRAKSRLALTLVKLLQALDKQLQEYRQEIRRLFNEHPDHDLFGSLPGAGEKLAPRLLSELGSDRTLFASAQALQCYVGTAPVSFESGQVRKAYVRFMCNKSFRHAVHLWADVSRKFCSWAQIYYHQLRQRGKSHAGALRCLGQRWLKILWKMWQTKTCYNGEFHMANQLKHGSWVLAVKPKEAQ

SEQ ID NO: 161074 - protein, 410 aa, unidentified
MSTQIEFEQVIHRGCGLDVHQKTIVSTVSGIDVATETRTFGTFTSQIEELKVWLNSLSITHIAMESTGVYWKPVYNILEEDFKIILVNARHIKHVPGHKTDKKDSEWIAKLLLSGLLKGSFVPAEWIRELRDLCRYKRKLIAQRVAQRNRVHKILEDANIKLASVASDIFGVTGTLIIDALIQKQEDAEYLANLAKGSLRKKMADLKLSLQGRLTEHHRFMLSTLRDSMDSISSQIGDIEARIETYAVEVQQEVELLQTIPGVGKETAINMLAESGIDMEVFPDHKHLASWAGVSPGNNESAGKKKSTRITHGNKYLKTALVEAAWAASHTKDTYLSRKYGAIAARRGSKKALIAVAHKIVIALYYILKNKEPYLEPDDTVYQQKRKQAQIKKSLERLRGLGVQVDIRPN

SEQ ID NO: 161075 - protein, 339 aa, unidentified
MTDVTRIGLDLAKSVFQVHGVNADEVVTIRRSLRRGQLLAWFSQLPPCLIGMEACAGAHYWAGELGKLGHTVRLMPPGYVKAYVRRNKNDAADAAAICEAVGRPSMRFVPAKTPEQQAAGGIHRVRALLVKQETMVMNSLRGLMAEFGIVAAQGRKGIADLLAILNDPEDARIPEPLHASLQALAATLRSLAAQLKTVDKALAAWGRRDATTRRLSTIPGFGVVTATAIAAHVTDPHVFASGRGFSASIGVVPRQQGTGGKVCLGPISKKGSRYLRRLAVSGAMSFLRSPHARKDPWVAKMLASKPMKVVAVALANKNLRIAWALMVRGEEYRSAAVAA

SEQ ID NO: 161076 - protein, 279 aa, unidentified
MDTETGEFQEKRLAHREDAETFYRALKGQKVRVGMEASGHARWLERLLSELQFELWIGDAAEIRTKRVRKQKTDRQDARLILQLLLEDRFPQIWVPSWENRDLRQLLWHRHRLVQARTRIMNQLQAVALNEGLRCKKRLWREHGRQQLESFRLAPWASRRRRDLLELLDRLNPTIAELTQAIEQETEKCAPARRLRTHPGVGALTALGFVLIIGEADRFHCGKQVASYLGLVPLEDSSGNRRRLGHITKQGSSILRFLMVEAAQVQCAACRDGAVSTFT

SEQ ID NO: 161077 - protein, 387 aa, unidentified
MSQSNDLSRSLEPLDQASTLIAVIEMSQSSWLVAGVVPGVERQPRKKLEPDQEALLRLLQRWRDEAARSRHTITRIAVAFEAGRDGFWLARWLRSHGVEAHIIHPTSVAISREHKRAKTDRLDTAMLLRVFLGWLRGERGHCSMVAVASIKEEDAKRPSRERENLVNERTRIINRMKSALVRLGIRGFKPELRRAPQRLEGLRTPEGLPIPPNTLDEFRRDLARLALVRKQIETIERDRLARIDQAPQVRSNAMVRVLASIRGVGVETADMLVQEVLSRNMRDRRAVARYAGLTGSPDESGSKRREKGLAKSGNARVRRGLIQLAWRFLLFQKDSALAQWYRARTAGPKGRRKTTIIVALARKLLIALWRMVSVGEVPKGVVLRPAV

SEQ ID NO: 161078 - protein, 394 aa, unidentified
MKLVGIDIGKKHFFCIMDKDSGEVLLQPSSFSNTKDGFDSLIQKLSSYSKDSILIGMEDTGHYHFALLKYLLEKNFTVALINPKTTDYTRKMQNGITKNDKLDTLTICDVLDTPVRKKQYRITKVNSFDLYEQKQLTRHHHNLKEELNVYTNRLQKCIDIVFPEFNSLFSSKYGIIYMNVLKTFGSAENIASTDIRTIRKCFEIKGRGNRISLTAQQLKDSAKSSIGISSAAEVIKIKHLISQIELINEQLAETDKKIEEFSIQNNSPILSIPGISHFFGTSILAELGEISNYSKPSKIIKAAGVAPYHYESSQYDAQHTAITKKGSPYLRKTLYQIILPVINNNNPVFKQYYDLKISQGKGHRCACGHCVRKLLRIIYHLSSTNQQFDDALLR

SEQ ID NO: 161079 - protein, 385 aa, unidentified
MSKPDDLSKPLVALDHDSTLVCVIEMSGSSWLVAATVPGVDRRPLQKLPVDPARLLAQVERWRQEAARAGRTITRTVVAYESGRDGFWLARLLRGHGIEVYVIHASSVAVSREQRRAKTDRLDTEMLMRALLGWLRGEPGHCRMVAIPTIAQEDARRPGREREGLVAERTRLTNTIKAELALWGIQGFKPGLRKAAEHLEALRTVEGEPLPPNTLARLHRLLKRRTLISDQIKAIELAAAQAIERDPTGPNAMVLMLAQIKGIGLETAQMLVHEVLSRNLRDRRAVARYAGLTGTPDESGSKRREKGISKAGNPRVRRSLIQLAWRLLMFQPDAALVRWYRERTAGGKGAIKKTMIVALARKLLIALWSYATAGVMPEGVVLKAV

SEQ ID NO: 161080 - protein, 418 aa, unidentified
MTDDARWFAGIDWASQTHQVCLIDADGKMIGERAFAHGGAGLTDLCAWLLSMTGAEAAAIAVAIEVPHGPIVETLLERGFQTHAVNPKQLDRFRDRFTVAGAKDDRRDAHVLTDSVRTDRHCFRRLAAEDALVIELREWSRMTEDLQQERNRLANRVREQLWRYYPQALAVSDDLAADWFLELWAAAPTPEKAARIRESTLERILKAHRIRRITAAEVLRILRQPALTVAPGTAEAASAHIRAVAERLELVNRQIHEAHRQLDGLCARLAEENTETPPGPEPEQRDVTILRSLPGVGRIVLATLLAEASEPLRRRDYHALRTLSGVAPVTKRSGKRCIVSMRQTCHMRLRGAVYHWARVAIQHDELSRRRYAEFRKRGHSHGRALRGVADRLLAVACAMLARQAPFDPRYRRAQAAAA

SEQ ID NO: 161081 - protein, 343 aa, unidentified
MQTVTTIGLDIAKSVFQVHGIDAAGQVVIRRQLKRRYVLAFFERLPPCLVGIEACASSHHWSRELHSLGHTVRLMPPAYVKPYVKRQKNDTTDAEAICEAVTRPNMRFVPTKTIEQQSCLMLHRARHLFIRQQTAVINSIRAYLAEFGIVAPVGRRGVEQLLEVVADTADRRLPEVARVCLAALGSQLRRLKAQILEFDRRIMAWHRSNATSKRLDAIPGVGPALATALVASIADPRAFRSGRDFSAWVGLVPKQNSSGGKDKLGSISKQGDRYLRSLFTAGALAVIRYAKIHGTRHRPWLTGLLARRPTKVAAIALANKLARMAWAMMARNERYKEPAALTA

SEQ ID NO: 161082 - protein, 370 aa, unidentified
MREPTPLFVGLDVHKETISVARAVGGTVEPPHFVGQIGTLERDLDKLVRRLQSLSPQLVFAYEAGPCGYVLHRYLTGKGLDCRVVAPSLIPKKPGDRVKNDRRDALELARLLRSGDLTSVYVPSVEDEAVRDVSRARDATRVTLKSAKLRLKSFLLRLGFNYVGRADWNAAHRRYLAQVVCPTPAQQIVFQESLRAVDEQVERLARMEQQLLELAPAWRLYPVVEALQALRGVQWLVALTVVAELGDLTRFDNPRQLAAFVGLTPSEHTSGEKRRQGGITKTGNGRARRVLIEGAWAYRYPAKISAHIQKRIENLPKVAQDIGWKAQVRLCKRYRRLIARGKHANIVTTAIARELLAFMWAIAKEVKISA

SEQ ID NO: 161083 - protein, 352 aa, unidentified
MPTITTVGLDLAKKVFQVHGVDAEGKVVVARKLRRKEVLAFFAKLAPCLIGMEACGSAHYWAREIAKLGHSVKLMPPKYVKAYVKRGKTDAGDAAAICEAVTRPSMSFVPVKGVEQQGLSMLHSARSQLIGQRTQLINAVRAHLNELGIIAARGLLGLAELAAIVRDESDQRLSATARTALMVLVRQIEIVSTEIAALDTALRKENKASELGPRLETIPTIGPVIASALRARVTDPKLFDNGRHLSAWLGIVPENDSTGGKVKQKGLSKKGDRYLRSLLITGAMAVVRQAKIRPDKRPSVTKLLTRMSKKQAAVAIANKTARIAWAIMVHGGVYDAAHRAPQCRAEACAATK

SEQ ID NO: 161084 - protein, 413 aa, unidentified
MKLFVGDDWAEAHHDVEVMDASGRRLSKARLPEGVAGMARLHAMIGEQLGDDADEDDAGQVTVGIETDRGPWVQALIAAGYTVFAINPLQASRYRQRHGVSGAKSDAADAHVLADMVRTDSHQLRPVAGDTAQAAAVKVVTRTHKTLIWERTRCTQRLRHALRDYFPAALEAFEDLDAPDALELLARAPDPASAARLTTAQISAALRRARRRHVPEKAEAIQAVLRAAHLGQPAIVTAAYAASAHALIAVLGTLNEQVKTLQGQVEAYFGQHPDAEIIMSQPGLGPILGARVLAELGDDPGRYASAKARKNYAGTSPITRASGKKKAVVARYVHNDRLIDALMTQAFSALQASPGARACYDRQRARGSEHNAALRQLANRLTGILHGCLKTRTRYDEATAWPQHAAKPEKAAA

SEQ ID NO: 161085 - protein, 442 aa, unidentified
METMYYIGLDVHKKTISYCVKDGSGRIYAAGSIPATRLTLDLWMKTLPQPWTVAMEATIFTSWIYDHLKPHAAAVKVAHPLMLRAIAVAKKKNDRIDAKKIADCLRCDFLPECYMASTEIRERRRTLRYRNLLVRQTVQMKNKIAVLLMEAGVSYNKQKLHKVGYFRELLATNQDIDEGLKPLLRLCRETVVRLGKTESALVRSLQRDSLLMERVERLMTIPAVGPITALTWALEVGDVQRFSSIKKAISYCGLCGAERSSANITMRTPLSKQRNKHLQTVLIEAAKMAPRNSPELAMVYEQEKQKGNANRATLAVARKLVAYLVAVDRRQKEFLTRLAGDHKLNLLCRPFGAETANGCLVLNRRGTTAERHERELKHPRILCTRFSEARRESFCPLDTDLSWMSGSQSKRNHRREARTQAEAPKNFMHALLRSASGELLPS

SEQ ID NO: 161086 - protein, 412 aa, unidentified
MRLFVGDDWAEDHHDIEVMDEAGKKLAARRLPEGADGMARFHSLVGRFVPGDDMDGTEVLVGIETDRGPWVAALIAAGYSVYPVNPLQASRYRERHHVSGAKSDAGDAHMLADMVRTDSHQLRSAAGDSPEAEGIKILARTHKTMIWDRTRAVQRLRHQLREYFPAALEAFDDLDAADTLELLARAPDPDRARKLTRAQVSAALKRARRRNVKDGTDAILAALRGEQLRQPGALAAAYAATVRSLLALITTLNEQVTALQGQVEEHFGRHPDAEIYLSQPGMGKVTGARELGEFGDDRHRYRDGKARKNYAATSPLTRASGKKKVVAARFVHNDRLVDALNAQALSALSASPGARAYYDELRARRIEHNDALRRVANRLVGILHGCLKTRTLYDEATAWGHRESLPQSSAAA

SEQ ID NO: 161087 - protein, 335 aa, unidentified
MENKQSYVGIDVSKDTLDYCLISEGRQIFHLQTENNIKGIKTFIKELSKSGIKDLNHTVFCLEHTGIYSHHLISFLSKSNLKIWLESSIQIKKSLGVHRGKNDKIDAIRIAVYAYKNRDEIKLWAPQRKELQKLKHLTGVRKRLLKTINILTAIFTEKSFYDADIMKLSKHSTKASVKALRADLKEINKAILEIIKSDERLNHLFNLVSSVHCIGEVTATQIIISTNEFKNITEGKKFACYCGVVPFEHRSGTSVRGKTRVSKMANMDLKRSLHMAALSAVHYKGELQDFFLRKVAEGKNKMSVVNAIRNKLVLRVFACVRDNRPFERTYEYKAA

SEQ ID NO: 161088 - protein, 427 aa, unidentified
MISFRKEVSFMNYCLSFDVGKNKSCYGFFRVKDVTLGIKDGMECIIKQTYFKHTAEEAEKIEDRITSYSKNEIAVIMESTAVYHRPLQKYFKDRGYKVTVINPFLTGHDNSSLRKTKYDKGDVAKIAFVYFKGNCNIQYDETVLEKNRRILSRLSEEITDTLSKKKTELLMKLAETAPEYEKTFKKSGIYTNSVLSLIDKYPHSDLIKEANEKAIAKAMHYAKKNYHVKDYAVWTEKLKRENGRWLPGTDRDSAELKSIHYLIAKIQEETIESDEKIAELVSVCEDEKIYKVLLTFRGIGPDIAAHLTAELGNLARFQKPQSIIAYAGFDPSKEQSSQSLDVNGKITKRGNKHLRRWLFVAVQSMIMHAKEGDREFADYYASKKGDKRKGGQSHHHFYAMTACCNKLIRKIYFRYFDACKAETEKTK

SEQ ID NO: 161089 - protein, 368 aa, unidentified
MKKHTTKTGALSSADISICSTVAVDLAKRVFQVAGENTLGQVLYEERIKSREAFQAFLQKLPTCVTVLMETGPGAQAWARLLQAQGNPVRILPAQHVATHRSGSKTDRNDAHAILRAGRDLKIQAVPVKSAAALAMQALHRARQGYVRRRTAVGNQMRGLLLEHGVSLAQGDAAFNRVVPRVLEDATQPLPDMLRELIAELLAEWSQVGERISVLTGRLEVAAQNDETAKRLMTVRGIGPIISTALLAKQTEPQRFANARQFAAYFGTVPTQHSSGETVRLGKMSKRGDAYLRSLAIQGAHAVLRQVRPDSQEPDDRRLLRWLSRLGRKEAAVRLANRNLRILWVLLQNNQTYRRQPAHGQEAAMSHV

SEQ ID NO: 161090 - protein, 402 aa, unidentified
MKASKQYLRFCGIDMAKHKHVACIIDQDAQYLLRPKSIRNDADGFQQILNCLKQTGRTKSILTGMEATGHYWYSLHDFLTRNGYDVAVLNPIQTAQQAKQAIRKCKTDKYDAFHIANLLRTGQYKAAVVPGELAMTCRQITRLRYRIVKQAAMIKQLVNSRLHPAWPEYERLFSNKFGTTSMKLLQIASTPKELIELDFDDLSELICKASRGRFGPAHTQKILHTAKKSVGMQRGHYGISIGIKLLLEQIEALEPVRKKLDVEIEKLTARLPEYLFTLPGATELTIVSLYGEVNPIEAFKKPSQLVAFAGLDPKVFQSGQYDAPRRRISKRGSPYLRRSLWQMAYRALCTEGDLRDFWRRKHRQNKHHLVAVTAVANKLCHIVWRIMTDRRDYIPKGYNPKS

SEQ ID NO: 161091 - protein, 429 aa, unidentified
MKIIYPRVCGIDVHKKFIVAVICISESVEPIYLKKRFSTFHNDLIRFRDWLIQNDCQNVCMESTGKYYIPVYNVLESHISNIVVANPKWVRAVKGEKDDDKDAKWIADLFKFGIVRSSFIPQKDFRILRELTRYRYKLVNMRSSEKNRFQNALTSGNCKLDMVFTDVFGKSASNIIDLILSDNPYTDEDILSKVHKKCKASPDMILDSVNGTDLTPVQKARIELVNDHIKQLSSNIQKLDKLIDLMIEPYEDYISFLCQIPGVSRNSAVIILSEIGIDMNQFTTSRRITSWAGLTPSSNQSAGKKKSVRISRAGVYLKPCLVEVAHAAVKDKSHPYYANKFNKISKRRGKKRAYIAIARKILVAAYHMLLTGEIWNPADLSEVETPVEQRLKYVKNNLKSDIKQLLDIGLTVEELTLMIQQNANIIATQ

SEQ ID NO: 161092 - protein, 480 aa, unidentified
MKARVYAGVDLGGTFHQVQVTTVEGERLGKSFRIGRGRAGLAELRDGVRRVAGDDVEAVYTVEATQNFWLELVHPLQRDGASVYLVSPAKSAALRTFYRRHTKNDAIDAEALSRLPVVDPKLRPASASPPQWDMLRRLVRQSWLLKSQMANRKRRIMGRVLTVYPGYESVFRDRYCGASLLFCRRYLDPAKARRLGRRRLVVLMRKRALGKFDDARAERLWQVIENAPELNLGYDDLQLLLNQDLDLLEAEERSQQALRERIAELYGELDPSTRLTSVPGLGDYLAATITAFIGEPGRFTNADQVVALSGLCARLKSSAGTDAANQPLTQHGDPVLRGCAYLAAEICRHYDPELRAFHRRLTARGKHYKQASCALAAKILRRCFALLREQRDYQIAHQDEMARARSEEGKTVRGSVHEVAERLNDVSGTPSPRAQGRSAPTSEQTLARSGKRPRRMRADPPSSLTMAPASCPIEPERSLS

SEQ ID NO: 161093 - protein, 424 aa, unidentified
MASHEFAAFVGIDWGDQKHAVCLRTEGVEVEHELSQKADGIDAWATELRTRFGGRPVAVCLEQSRGPLIYALLKYEFLVLFPLNPLQATRYREALYPSGSKDDPLDARLLCLFVETHHGQLRAWKPDDEATRLLRLLAEDRRRFVDQRTAHKNQLRQRLKEFFPLALELLRSGDLEDEWFLQLLIKFPSHAELRRAPPRTLERMLPKHHRLPDDESLDPRVARIRAAVPLVTDGAVVKAARLQVMELARLLLRLNTTIAEYDHELSAELARHPEAELFRSFPGAGAALLPRLAAAFGTDRERYADAQDLQQLSGIAPVQIRSGKSCSVRRRRACPKFLRQTFHEYADHSRKRSLWAKAYYRMLRDRGLRHNAALRALAFKWLRILFRCWQTRTPYDEHRHLKQLRLKQSPLLQYLDLPDPVEQT

SEQ ID NO: 161094 - protein, 371 aa, unidentified
MVALLGHSHEETGSNRSANLTAPRQSSTLPSIFVAVRDAAGKLLMECIIETKAATILEFIQGLHGSLWVAFEEGTSAAWLYDLLKPHVAHLVVCDPRKNALLKAGNKNDRVDARKLSDLLRAGLLTPVYHGESGVRTLRELGRSYLTVTKDLTRVMNRLKALYRSWAIPCAGQKIYAPRHRSAWLEKLSEAGVRRRAEHLYQQLNILVRIRREARRELLTESHKHPANQLLRQIPRLGPIRVALLIALLQTPHRFRTKRQLWAYCGLALQTRSSGEYRFTGGQLQHSKKLPALRGLNANHNHDLKNLFKSAATHASASTDPLGDFYQNLLAKGMKPAMARLTLARKMAAIVLKIWKKGERFDPGQLKRQAA

SEQ ID NO: 161095 - protein, 437 aa, unidentified
MHIPFHNIALLSLHMNKQNTTYTAYVGIDRADKKHDFCIRSAHESDSSKTFGVIPHNPAKIEEWVLSLQEKYGGKMAFAMELAAGPIVYALQKYDFIDIYPIAPTTLAKYREAFSPSRAKDDPTDAELALDLILRHPERFKMLKPQSTEMRSLIALVEQRRKLVQDKVRVTNRIRSTLKQYYPQTLEVFDRIDTFTFCDFIERWPTLDNVKRARQSTITSFFKDHSIRRKDLIDKRLELINSSMPLTKDKAVIATNSLQALVHIDLLRTILRSIKKYDETISELAPQHADYALFESLPGAGPSLAPRLLAAFGEQRERFTSAAELQQYAGISPVTERSGQKHWVHWRWHCPTFLRQTFVEWSAQTINKSFWAGAYYRQQRDEGASYNAAVRSLAFKWIRILFACWKTNRPYNESQYLSALQRRGSPLIANLGTVENA

SEQ ID NO: 161096 - protein, 388 aa, unidentified
MAQVNDLSRSLVSFEQSGTLVIVLEMSQSSWLAAGVVPGFERRPLKKISPDPAALLHLVERWRDQAVRAGQTVTRAVLAFEAGRDGFWLARWLRARDIETYVVHSTSVAVSREHRRAKTDRLDTEMLIRVFLGWLRGEPRHCKMVAIPTLEEEDAKRPSRERESLVGERTRIINRMKAALTRLGVRGFKPELLKAPERLEAMRTPEGVQIPPNMLDELRREMARLAWVREQINAIEQARLGRLEQAPAGGPDAMVRLLARVVGVGVETADMLVQEILSRNLRDRRAVARYAGVTGSPDESGAKRRERGLAKAGNARVRRGLMQLAWRFLRFQKESALAQWYYARTEGAAGKRKTTLIVALARKLLIALWRMVTTGEIPAGVALRTVAA

SEQ ID NO: 161097 - protein, 348 aa, unidentified
MHLYFVGLDVHKQVIAFCIKTADGEIVREGVVAARRTALDEWVKTLPGPWHGAMEATIFSHWIFRHLQPHAAKLEMGHAARMKAICAGKKKSDKIDARTIADLVRCNLFPACFVISPELGALRQQLRFRRLLVEETVMFKNKTAGLLMSAGVEYERRRLHGKRYFESLVKDNEWIDQQLRPLLEFNRAQMTTLQAMDRRLKGMLARHPALEGRVKALCRIDGVGTVTALSWALEAATPERFPSIKHALSYCGLTSALRESAGRQKRGPLSKQRNAHLQSALIETAKLAPIYNEKLKEVHRKAMEKGGHRNRATLAVARKLVAYLMAADRAFFASQGASAAVDEHTLAA

SEQ ID NO: 161098 - protein, 353 aa, unidentified
MRRQHRFYAGVDLHARTMHLCVLDATGTVVCDVNLPCRPDAFLAAIAPFRADLIIGVECMFAWYWLSDLCAKEQLSFLVGHALYMKAIHGGKAKNDQIDAHKIARLLRGGNFPLAYAYPKGMRETRDLLRRRTYFVRQRAALFTHLQILNSQYNLPPLAKKLSFAANRQEMDLAARFADKSVRQNASVNLAVINCLDEQIAALELYLSRTAKVDDVQTYHRLQTIPGVGKVLALVLLYEIHDVRRFATVGQFLSYCRLVRCQHESAGKVLGSGGRKIGNAHLRWVFGEAACLFLRSSERAKLWKQRQAKKRGEGKALAILAARLGRAVYHLWRKREAFDEDRFWQGSGVTAKA

SEQ ID NO: 161099 - protein, 355 aa, unidentified
MNQDKYIGMDVHQATISVAVMDSSGKLIMECILETKAATILEFIAGLRGTLSLTFEEGTSAAWLHDLLKPHVSHLVVCDPRRNALLKDGSKSDRIDARKLAELLHGNKLHAVYHGEHGVRTLKELGRSYLTITKDLTRVMSRIKALYRSWAIPCSGATVYAPRHRAEWLAKILEPGVRLRAERLYQQLDLLQPVRQEARCDLLVESHKHHAVKLLRQIPSIGPIRAALLVALLQTPHRFRTKRQLWAYSGFAVETHDSGEYRFVRGKLVRNRERITVRGLNHNHNHDLKNLFKGAALSASTRPGPLCDFYVALIEKGMRPTMARLTLARKMAAITLTIWKKGVEFDAKQLNRQAA

SEQ ID NO: 161100 - protein, 413 aa, unidentified
MEVMYPRCAGLDVHKDVVVACARVAVDGRVTQEVRSFATTTKALCELSSWLEEQRCTHVLMEATGVYWKPVWHMLEGTFELVLANAQHIRNVPGRKSDVNDATWLSDLLAHGLVRASFVPPTPIQEVRDLTRTRKQLAREVIQHTNRIEKVLEDTNIKIASVISDVLGKSGRAILNALVAGETDPEKLLALCSGRLKASRKVLIEALRGRVTDHHRFLLKLHLGQVDLLQQGMRDLEARMGESLEPFRHHIENLTTIPGISDVSAHVIAGEVGLDMSRFPTAGNLISWAGLCPHLDESAGKHRSTRIRKGAPWLKTTLVSAAWAAVKTKGTYLQAQFRRLRARSGAKKAIIAVAASMLTAAYHILRDGVPYKDLGPEHFTRRNKEHAAKRLKKRLEDLGFTVEVRSAEARVSS

SEQ ID NO: 161101 - protein, 337 aa, unidentified
MEYFAGLDVSMAETHVCVVTRNGAVIHQAKVPSTPADIAAELAQVPTCRRILFETGRMAPMLYHGLTKLGLPVVCVESRQAYQALKSLATHKTDRNDARGLAHLARTGFFKPVHVKSLPAHAVRSLIIARKKLVGQRVTLENQIRGLAVVFGVRLPRALSPAFIKQALGASEGIPGLSAAMRGLVAARAAVLAAVVAIDGDIRRMVRASDTCRRLMSIPGVGQLTALAFTAAVDDPGRFRRSRDIGAYLGLVPRRYQSGEVDYSGGISKCGDRRLRTLLYEAANVMLTRYKAPLKLKDWAFAIAKRSTMRKARIALARRLAIIMHAMLRHGTEFKPA

SEQ ID NO: 161102 - protein, 465 aa, unidentified
MAGREEREHSGSAESSKRRQLQGLPVVRRDVAGIDLGSEQHWVCAATLDRSGREVASFGATTAELIRMAEWLKARQVESVAMESTGVYWIAPHEVLEGQGLEVLLVDTRQLARVPGRDKKSDPTDCEWIQRLHSCGLLRGSFRPEEAVCMLRTLVRDKANLVAERSDWLRRMQKNLDQMNVRVHRAVSDIDGVTGMAILRAIAKGERDAQKLAQLRNARCSKTEQEIAEQLRGHWREDHVFSLQQALKMYDAVEERITAYEQEILRKLREMEQEEPDEPTPPLHNANKARAIKQRGQEAKRQALYRISGVDMTQIDAIGVETVEVVLSEYGPDLSRFPTEKQFVSHATLAPRVPRSGDKPVKKKKRNSASTRVAAALRMAALSLRHSQTALGAFYRKIARRRGGDIAVFATARKLATLIYRLLRWGQPYVDEGAAAYENRYRQQRIRSLAATAKDLGYQLTPVTA

SEQ ID NO: 161103 - protein, 341 aa, unidentified
MDTVSLIGIDLGKHCFHLHGQDASGRMVFRKKLTRSQMFTLLGNFPRCIVVMEACAGAHWIARGLQALGHEAKLISPQFVKPFRQGNKNDFADAQAICEAAARSSMRFVSPHNEAQQIVSALHRVRERLVRDRTGTINQIHAFLLEFGIGLPRGMAVIRRLPAVLEAESLPPRLVVVLERLQAHFKYLDEQIHQLERELLTQLHEDERSERLLEIPGIGPMTASVLMSELGDARQYGSARQFAASVGLVPRQYSTGGKPTLLGISKRGDKELRRLLVQCARAIMQRIEHRTDALGVWIRSLLARRHSNVVACALANKLARIAWAILAKGTHYRSIEAVPSV

SEQ ID NO: 161104 - protein, 462 aa, unidentified
MKEGEEKLSTTRGQLQGLPLVRTKVAGIDLGSERHWVCAPTEQGNGREVADFGATTPELIRMAEWLKARHVESVAMESTGVYWIAPHEILEAQGLDVLLVDTRQLARVPGRDKKTDPTDCEWIQRLHACGLLQGSFRPREDICMLRTLVRDKATLVAESSDWVRRMQKSLDQMNVRVHRAVSSIEGTTGMAILRAIAEGERDARKLAQLRDPHCHKSEEEIAEQLSGHWREDHLFSLQQALKMYDAIQARIAAYEKEILRKLREMERPEQRGQSAPPLQNANKARMIRNRGQEAKRQALFRMSGVDATQIDALGVETVEVVLSEYGADLSRFPDEKHFVSHATLAPHVPKSGGKPVKKKKRNSASTRVAGALRMAALALRHSNTALGAYYRHTAQRTGADVAVFASARKIATLIYRLLRWGQPYLDEGAQAYEDRHRQQRIKNLISKARQLGYQMTPATAAP

SEQ ID NO: 161105 - protein, 419 aa, unidentified
MSFKILKNNCCGLDVHKTWIYACIGITDSFKRTEYKQARFSSFTKGLQELCLWLAKYNCIDVCMESTGKYWIPVFNVLEKNNIFVTLSHPKYTKPQKGNKTDRKDAKWICDLYMCGMVKPSFIPPADIRQLRDLVRYRFKLTCMITGEKNRAHNCLTVSNLKLDDVFSDIFGKSSRSITEQILQHPGEVFDVAPFVDSRCKTPIEEIQAAVDGAISHEQAVKLRQCLKHIDELEMHKAEIEREIFRLSQKYESVLDLIRTIPGFDKNPLTAIQVLSEIGADMSVFPTAKNLVSWAGCCPRNDQSSRKIKSTRISRAGSYFKPVLVQIANALIKSKKHPEFTTRYRRIKARRGHKKAIIAICRMILTAIWHILTDLNPYTTEGFLESRPVNDSKILTTSQALNLLKQRGYVIKDDIVSVP

SEQ ID NO: 161106 - protein, 345 aa, unidentified
MLKIVYPVCCGMDVHKSFVVACVASTNDHGVTTYRSGRFSTFTGDLRRLAAWLHAHSCTDVCMESTGKYRIPVYNILESSCRITLAHSKYVKAIRGKKIDKKDAKWIADIFKHGLVCGSFIPPADIRQLRDLMRCRAKLTGFSTGEKNRVQNCLTVSNIKLDDVFSDVFGKTASAITQRLLEKTLDLILTVPGIQVFAAIGILSEIGADMSVFQSSKHLCSWAGLTPQNNESAGKKKTTRISRAGAYIKPLLVQCALCAIRKKSNPEIRSRYLNLKKRRGHKKAIIAIARMLLTAIYNIIKRNEKYNPALYRKADTPPRNREVSVNEAIYILQRQGYLVTAPQSA

SEQ ID NO: 161107 - protein, 352 aa, unidentified
MDHIGIDVHKRESQIYILAEGGEVIERRIRTEPERFDAVLGTRPRARIVIEASTDSEWVARCLEALGHEVIVADPNFAPMYATRTRKVKTDRRDARALAEACLLGAYRPAHRLSDPQRHVRSRLVVRDALVRTRTRYISIIRALLRQHGYRVPSGSAEHFVHRVQSLPLPGRLRSVVAPLLALMRPLNAQLTYSDATIEHLAVQDPRVPRLRSVPSIGPVTAAAFLAAIDDAQRFRHAHQLEAYLGLVPGERSSGETQRRGAITKAGHSRPRWLLIQAAVSILRRRPPQAEELRTWALRIAARRGKQVAVVALARRLAGILYALLRDGSVFEPQRVRSPRRPAAEAAAPVRI

SEQ ID NO: 161108 - protein, 394 aa, unidentified
MKLVGIDVGKNSHHFCVMDKETGEFNVTPSSFSNNKEGFDFLINSLKTYSKKSILIGMEDTGHYHVALLKFLLSNGYPVALINPKTTDLTRKMEGGITKNDKLDTITICDVLDTPERKKQYRITKVDRFDLYEQRQLTRHHHNLKEELNVYCNRLQKSIDLVFPEFNTLFSSKYSIVYMNLLKTFGSAEAIASTDIRTIRKCFEIKGRGNRISLTPEKLKECAKNSIGISSEVETIQIRHLVSQITLIKEQIAEIDKKIEESSITNNSPILSIPGISHFSGTSILAELGDIGNYSKPSQIIKFAGVAPYHYESSQYNAQHTGITKKGSKYLRKTLYQIILTVINNNPVFKKYYLLKISQGKGHRCAQGHCIRKLLRIIYHLLETGQSFDPALLR

SEQ ID NO: 161109 - protein, 366 aa, unidentified
MKKISTVQVFGNEIFKEQKLTIGVDLGDRWSFYCVLDEAGKIILEQKVATTPEAMKQIFEKIPRGLIAMETGTHSPWVSRLLKELGHAVLVAHAQKVQLITKSNRKDDRHDARTLARLARIDPELLGPVRHRSAKAQIHLTVIRARAELVSARTGLVNAARGLAKSYGERLRKCGTQQVSRELAAELSVELREVLEPLLKEIESLNERIKEYDVRMEQIARESYPQVELLKQVKGVGTQIALTYVLTLDDPQRFPKSREVGCFLGLRPGRRDSGESHPQMHISKEGDPYLRTMLVQGAHYILGPFGEDSDLRRWGLKLAARGGKSAKKRAVVAVARKLAVLLHRLWVSGEVYEPLRNSHEALRAVA

SEQ ID NO: 161110 - protein, 357 aa, unidentified
MEYSTFVGLDVHSDQITVARATLGGGDPEVLGRIPNTPQGVAKLVRKKLGDLDKLHICYEAGPCGYGVYRQLREMGVRCSVVAPSLIPRAPGDRVKTDRRDATKLARLLRSGDLTEVYVPSETDEALRDLVRARYAAKKDEKRVGNRLKKFLLKEGLFPPEGVNPGTIRYREWLQSLRFDSPGQAAIVAEHICAIDEEQARVARLDRMITELIPASGQYGVVTALQAMRGVKLLTAATVVLEVGDFLRFDHPRYLMGYTGLVPTERSSNNCRRQGGITGTGNAHLRRALVEAAWIYRHPPRVGRQLKARLLGVSPEVVRLAWKAQNRLHTRYRKLIGRGMPKNKVIVALAGQVRIVL

SEQ ID NO: 161111 - protein, 340 aa, unidentified
MMLVGVDLHTRDQSVATLDTSTGEVQQLRLRHDGNAVKDFYAALPAPVTVAIESTGYALWFHALMQRLGHRLLIGDAAKIRATVVRKTKTDRRDARHILTLLSEDRFPTIWVPDPGVRDLRALVAHRMRLVRVRTMVRNGVHAIALNYRLTLGASLFTRGGLARLGQLTLPAHTAHRREESLELLAWLDARIAALDARIAEVADADPEARRLMTHPGVGPLTALATLLVLGPVDRFPASKHVVSYVGLAPSIASSAGKHHLGGITKQGHRLLRFVLGQAGHTALRGDPDLKHLYYRVLHRRGKARAKVAVARALLVRLYIMRRDDIDYAEFRRRGQAKAA

SEQ ID NO: 161112 - protein, 398 aa, unidentified
MTESSDYESVQVFIGVDVGKDTHHAVAINRSGKRLFDKALPNDENKLRSLISDLKQHGQILLVVDQPATIGALPVAVARSEGVLVGYLPGLAMRRIADLHAGEAKTDARDAAIIAEAARTLPHALRTLKLADEQIAELSMLCGFDDDLAAQTTQASNRIRGLLTQIHPALERVLGPRLEHPAVLDLLQRYPSPEKLASLGEKKLAAQLCKLAPRLGKRLAADIAQAPAEQTVVVPGTNAAAVVLPRLALQLITLRKQRDEVALEVEQRVLAHPLYPVLTSMPGVGVRTAARLLTEVACRAFASAAHLAAYAGLAPVTRRSGSSIRGEHPSRRGNKALKRALFLSAFAALRDPLSRAYYTRKMSQGKRHNQALIALARRRCDVLFAMMRDGTFYTPQGS

SEQ ID NO: 161113 - protein, 338 aa, unidentified
MSLYAAIDLHSSNSVLAVMDGEGKTLLQCRRPNDLPRILADLAPYQADLAGVAVESTYNWYWLVDGLMDHGYAVRLVNTTAIPQYDGLKHGDDHTDALHLAQLMRLGLLPEGYIYPREQRATRDLLRRRFSLVRQAVRLMLSIQSSFSRSTGKQLSANKLRQLAPSQLVDLFPELSTRYGVLIQFRLWLTLQEQITALERWIRKDLARPDLLRRLQSVPGIGPILGMTILLESGEIERFDSVGDYASYCRMVESVRLSNGKRKGTGNRKCGNRYLCWAFMEAANYAVRFDPKIRRWYERKRARKHRVVAIKAVAHKLARACYHMLHEGTTFDLTRAFG

SEQ ID NO: 161114 - protein, 440 aa, unidentified
MRRRTRMGNCRVQESAAHRISMSTKKRKVCGIDVHKAFLVATVLDREGKSETRRIQQNTEALLEFRDWIQSENCESVAFESTADYWRSLYLVLEGRVPVTVANAHHIKHVPGRKTDITDSRWIAQLELSGLITPSRIFAGKMYDLRSLTRSRELLVQNRTELKNKIHHLLDSASIRLSSVLSDLFGKSGTIILKGLVQNKPFEEIIESLPKKMRGSADAISSALPASIPPVFLVLLQSYLKLVDDLDNEIKLLEGRIRESLINKSREIQILTSIPGIGFIGASTLIAEIGNVHDFEDADKLTKWAGLTPSVYQSANVTRTGSITKQGSRHIRWILVELGHVAIRSPGRIRTFFERLMPKKGYKKAIVAVARKMLRIVWHLLVHDEVYVDDFPRSKQVKFPKMPKKIQAIGINRIIELLSKASEIIIKDSNQEIFRLGLSD

SEQ ID NO: 161115 - protein, 455 aa, unidentified
MGTERKVAGLSLECIEPNAAGIDVGARSIYVAVGAERVAEPVRCFATFTEDLRAMAAWLKQCGITTIAMESTGVYWVPVYEVLEDAGFKVCLVNSHHVKNAPGRKSDVSDCQWLQYLHSVGLLQASFRPERDICALRALSRHRAGLVEVAAVHVQHMQKALTQMNLQIHHVLSDITGMSGLAVVDGILQGERDPQRLAGLVQSRIHADRETVIKSLVGNYRAEHLFTLRQSVAAYRHYQKMLADCDREMEQYMGRLPDKGQGGSGQPLSGKSGKGKRRKNQFHFDMGKELYRVLGTDLTLVPGLSALTVHTLVAEVGSDLSRFANAAAFTSWLALCPGIKKSGGKVLSSKTRKTNSRLSLALRLAAQTLHRSHSYLGAFYRRLRARLGAPQAITATAHKLARIIYHLVTTRTAYDESVFRNEEEKHALRSQHRLQRQAEALGFQLVPISHQEVVH

SEQ ID NO: 161116 - protein, 403 aa, unidentified
MYVLALDVSMGKSYVVIYHENTYLFEQEILHDKTHFNALLQEIYALPERPQIVFEATGVYSRVIETFCQKNHFAYCLLNPLEAKRQLNIDLRSVKTDKRDAHRLAQTHGQFLRKQKQSQTEVYKQTRDFARFYQQIERDIKRTRMNLHTALQLTFPELETLFTNRLSKLALNLVELFPHPDYLAHLSQTKVKNVLKKNTDKKISDQKALAKAQTLLSLAQNSYPAESGQSISVQKVVYYAQQLKQLLVTKEQLAKQLVDIAKQTIEFDFYQSIPGIGELSAGLIIGELGDIRRFSSHKQLNAFVGVDTRRYQSGKYIAKEHMNKHGNPKARKNLYFIMMNMIRQQAAGPNHLVDYYYKLKTQPSPKKHKVALVACINKLLKCLHSMVRHSSPYDYSYTASNDQ

SEQ ID NO: 161117 - protein, 457 aa, unidentified
MSRKGKRTEGLEEAHPFAGMSQINPHAAGVDIGAVEIVVCVPGDENTQVVKAFGNYTVDLQAIGRWLTEYRVKTVAMESTGVYWIPLFEELERQGFECLLISSRSLRRVAGRKSDITDAQWIQTLHSYGLLESSFRPQAELIALRTLLRHRNQLVEHRSPHILHMQKALLQMNVQLSQAVTDITGVTGQTILRAILAGERDPQELASLREPGCKKSAEEIGKALTGTWREEHLFVLKQSLEMFDFYTQQIQACDDEIERVYALTGPEWEEGELKPLSIGKRNSHSKNAPRNPESIRKHLKRISGVDLSMVDGFGVSLAQTVIMEVGTDMSKFPSEKHFCSWLGLAPKHEISGGKVLKNKTLKTKNRAGQAFRMAAQSVKQADCVFGVTYRRLKARLGPAQATVATAHVIARVVYRMLKYKVEYETISVEEYEKKYQVQQLKYMRKKAAKLGYQLVPA

SEQ ID NO: 161118 - protein, 337 aa, unidentified
MKYCGIDLHSNNSVIVVIDDEDRVVAQKRLPNELARIVEFVAPWRDELAGVVIESTYNWYWLVDGLQAAGFQVHLANTTAIKQYDGLKHSGDEADARHLAQLLRLGILPTGTILPKEERAVRDLARKRIQLVRGRTTHVLAIENIMARQLGGRMTSNQIKRLSADDIDQMPIAADVGLAMKANLAVIGTLSAQIEILEQRLRERVKPRPEYALLTSVPGIGQALSTTILLETGPIDRFASVGNYASYARCVDSVHTSNRKKKGEGNVKNGNKYLAWAFVEAANFARRYCPEARRFFERKKAKSNNILATKALAHKLARACYHILKEGRPFDVTRCFA

SEQ ID NO: 161119 - protein, 369 aa, unidentified
MKRLFECVVGDLAADVAEAAARCKGRINMFLFSYYVGLDVHRRWISFCVKRGDGTIVKEGKMVATRAAIAEWARMFDGPWCCGLEATICSHWIYEQLKRYATQVQMANPGKLKAISAAKRKNDALDARTLADLLRCNLFPACYVPPLEYESLRCYLRERALLVRARVMFKNKTAGLLIERGVFYETAKLHGQRYFAALLEENATLLADLKPLLDFNRTQIERLEQMDHSLVRQLVRDPLLQERIERLKSIDGVGDLTALTWAVEVGQPSRFPNERHAISYCGLCAAERESAGVQKRGPLSKQRNRFLQSTLIEAAHLATAHNPKLRAIYEAECQRGPKNRATLEVARRLVRWLLAIDRQYFASRNATAA

SEQ ID NO: 161120 - protein, 423 aa, unidentified
MRFIGLDVDRDFCEVAIAEGGELRLAGRVQTEPARLALFALSLGGDDEVALEATGNALEIARIIEPHVGRVVLANPKAVKGIRRAGPKTDKIDARTLAQLLAGGFLPAVWLPDEQTRILRRRISARAQLVRQRTRAKNQVQATLMRNLKGKPPVSDLFGARGRRWLAAQDLPADQQETVAACLRQIGFLDGEIGLVERTLAEQLLASAELRRLLTLPGVNFVTAAALLAAIGDIRRFPSARQLVSYLGLDPRVSQSGVEPARHGRISKQGRGETRQVLVEAAWQAARTAGPLRAFHQRVAARRGGNVATVAVARKLAVIAWQMLSRGQDYAFARPSLTREKIRKLELATGAERQKGKRIGVWVTKEQHRLDKELAAQAELAYRRLVQDWQPAIKGTGAAPGRASCGPSSGQAARQETAPPPAL

SEQ ID NO: 161121 - protein, 342 aa, unidentified
MTIIIGVDPHKASHTAVAIDNSECVVDELRVRACSKQTDQLRSWAAPFPDRVWAIESARGLGYLLAQQLVAAGETVVDVPAVLSTRTRLLGSGRAQKNDPNDARSVAIAALRTDGLARVGVDEHAQVLKLLAKRHRDLGRSRNKAACRIHALLMELQPGGMAQRMNLTRANALLDQVNIDTEMAAHRVGVAREFVADLAHYEAQMKTSKARLRHAVAATSTSLTDIRGVGVVTAAMIIGHVGDVSRFKSAAHFASYNGTAPIEASSGERRRHRLNPRGNRQLNYAIHVVAITQLRYPCEGREYYDRKRAEGKNAKEAIRSLKRQISNVIYRTMVADARRLEQ

SEQ ID NO: 161122 - protein, 324 aa, unidentified
MTRIICGVDVASKSLEARIGQQGAAASFPNTPQGIAALGAFCQAHQVELVAMEATGGYEQQAFALLSQQGLPAAILNPRAVRQFAESMGSLEKTDRIDAGMIAWYAEVKKSPPACLAPQSQQHLRALVTRLRQLTDIRTAQLNQQRLVTDRSVQASFTKLLAVVNRQIRDLEQRIAKLIEQDPLWGELNQAFRTIKGVADRTVARMMAEMPEVGTLSNKTISKLAGVAPLARDSGKYQGRRVVRGGRASVRDLLFIVASVVGRYEPDFMAFQQRLREAGKPPKVIRIALAHKLLVRLNAKARDVRQRLAAAVEPGPSSLLLEKI

SEQ ID NO: 161123 - protein, 370 aa, unidentified
MKKDTLFVGLDTDKKHIDVAVAEPLPRGEVRYWGRTANTPASVDRLVKRLGQGGSELVVCYEAGPCGYGLYRQLTGKRGVRCLVVAPSMTPQRPGDRVKTNRRDALKLARLLRAEELTEVWVPDAAHEAMRDLVRARASVVSALTRCRQHISSFLLRQGIAYAGKPWTNKHRAWLGTLKLEHAAHRLLLTELLLALDQAQARRDRLTDHIRELVPSWSLAWLVGALQALRGYDLINAAVMVAELGDPRRFAKPRQLMGFVGLNVSEASSGETVRRGRLTKTGNKRARKALIEAAWTYSRPAATTSKPAAARLPAAVQQIADKARHRLSRRYRHLLRRGKLKQVAIAAVARESLGFIWAIAHAAAPLPAQS

SEQ ID NO: 161124 - protein, 407 aa, unidentified
MEVIYPRCAGLDVHKQTVVACVRIAGDGAPLQQVRTFATTTSELLALADWLDSFGVEQVAMEATGVYWKPVWHILESHFQLVLANAAHVKNVPGRKTDVNDAMWLADLLAHGLIRASFVPPVAVQELRVLTRTRKQFVRERSAHVQRIEKVLEDANLKLGVVLSDIMGQSGRAVLQALIDGQDDPHHLAALVSMRVKASRAEVLEALRGQVHAHHRFMLKLHLDHIKALDQAVTTIEQEVGSALKPFRVAAKLLSTIPGLSAVSAHVVVAEIGVDMSRFATAGHLLSWACLCPRNDESAGKRRSTRLRRGGNWLKTTLVQAAWAAIKVKGSYLQAQFQRLRARRGAKKAIIAVAASMLTAAWHMLRDGTEWNELGAAHFDHADARKTANRLIRRLQQLGYVVDAKPA

SEQ ID NO: 161125 - protein, 342 aa, unidentified
MQITTIGLDIAKNVFQVHGIDGNETVVVRKQLRRGKLIAFFESLAPCLVGIEACATAHHWARELTRLGHQVRLMPAKDVKAYVKRNKNDAADAAAICEAVRRPTMRFVRIKSTDQQCQLMQHRTRDLMMRQRTQLINALRAHLAELGIVAAMGDKGVTELLMIVADEDDGRLPVEARASLALLAAQLNALQMLIGSLEKQIKMQHRANPASQRLETIPGIGIIGATAIAATVADPTGFRSGRDFAAWIGLVPRQESSGGKHKLGSISKRGDRYLRRILVVGAHSVLRRAMEKPGKYPWLTQLMARRPFKVVAVALANKMARMAWALLTYGGTYRAPRLSIVP

SEQ ID NO: 161126 - protein, 350 aa, unidentified
MMIIGCDLHTRYQQIAMVDTETGELVERRLEHESGEARAFYAGLKGAVRVGIEATGHTAWFEALLAELGYELWMGDAAKIRAAVVRKQKTDARDAAHLLDMLCTNRFPTIWRPSLPERDLRQLLWHRQKLVWMWGAVKNQMHALAMGEGVCRKKKLFTAKGRTELEGLSLGPWASYRRQELLRMFDELQSSVKKLDQAVELAARSEPRAARLMTHPGVGPITSLAFVLIIGPVERFERSKQVVSYLGLNPQERSSGGRQRLGSISKQGNPMMRSLLVEAGHTAARLDPQLQRTYQRLKFRRGAAVAKVAIARKLAVRMYWMLRSTADYAQLVRMRGSSWATLVEDSPSLG

SEQ ID NO: 161127 - protein, 457 aa, unidentified
MRIVYQRCCGMDVHKDSVTTCVLLIDEYGEWRSEKRKFRTMTRDLREMATWLASLRVEAIAMEATGIYWKPAWNILEAEKKFHLLLVNAHHIKQVPGRKTDQKDSEWIADLLQHGLLKASFVPPQTIRRLRDLTRMRVKIRQMLATFANRIRKVLEDANIKLGSVASDVLGVSGRHMLHALVEGQQDPEQLAALAQGRLREKRAELQLALEGHITDHHRFQLKFLLEFVQFGEKQLSKLEAEIRCLLAQVDPASVPPEDTVTAELAAPGAKPEAPATAQKSPLQTVVELWDTIPGVDELTATTLVAEMGANMDQFPSAGHAAKWAGMCPGNKESAGKRLSGKTPKGSVWLRRALCQAAWAASRTKNTYLAAQYHHLIVRKGKKRTIVAVAHTMLVMAYYMAKRQCTYQELGGDYFDRRNADTMQHRLVKKLKNLGYEVTLTPINAPPTAQEPSAQCC

SEQ ID NO: 161128 - protein, 452 aa, unidentified
MRLLNGKQGLRRSQFAKELRGADLEKVLIVSIDVSKVLQKSMILNYFGEVIQTPFSFMVSQGGFRYLFDKIETAQKFCQAEKVFVGIEATGHYYEDIVRILTDAGYSVHIINPASTHEERKQHLTYTKTDDIDLYLIAEALIGNKATNAKLPTGHYKQLQHLTRARRNEVNKRSRIKVEIRAIHDHIWREYQGYSVLVDGKVKTKNIFSDFWGKASLHLLVNFPHASQLLELGELGLRKLSKEYNLKLRNTTIEKLLFAASESVSKPIEELSSELFILKQKLKDYQWHTENIKAYEQEIERIFIDTDGLLLLTVPGIGLVTAAEVYCEMGDLSHYTSASQLIKKAGTNPTIKQSGPEKGYYGQISKQGNANLRRAVFNAGKTLSTHNEALRPFYKRLKENGKKTRQAYIAMGNKFLKIAFAMLKNQQPFQWNNPTYNYKEEVIKKLTLPIAA

SEQ ID NO: 161129 - protein, 352 aa, unidentified
MMIIGCDFHPRFQQISFLLEETGECGQRRLMHTAEAEQYYRSLRGTRVRIGIEATGSYGWFRRLLTELGHELVVGDATQIRASNPRRQKTDKRDAEHILGLLVADRFPAIWQPPAENEQLRQLLLHRSRLVRLRTRVTNQLDGMAKNEGWVIPGGWSGKRRKAIEALPLPGWYGERRKDLLGLLDRVEERIAPLDKAVSQAAANNAEACLLMTHPGVGPVVSLAYVLTIGNWQRFPRGKQVGSYLGLIPSEESSGDKRRLGHISKQGNTLLRWLLVEAASTAQRYDASWHRQYVRLSMTKHHGVAKVAIAHKLAVRLYWMLRSGEDYSQVRERGSHARQSECPVGRTTRPIE

SEQ ID NO: 161130 - protein, 420 aa, unidentified
MVYLERGYNLKELPWSKTVSNSFLFKEACMILVGVDVAKDKHDCYIMTSEGEVLFKSFTIANNMEGFNQLYEKILSVIDNFDNVKIGLEATGHYSYNILGYLLDKGLTPYVINPLHSNLYRKSLSLRKTKTDKVDSRIIASMLMSDVSLKPYSNTLYHNEELKSLTRYRFTKVQERAKLKISISRLVTILFPELEKLVPTLQMNSIYALLYEFPSAHAISKAHLTRLTNLLNTTSKGHYTKDKAVLIREAAKNSIGSNMPAKSLELKHTIKLIKELTSEINEIEEEIKIIMNKINSPILTIPGIGLSTGAQILAEIGDFKNFSSPDKLLAFAGLSPSTYQSGNMYSSNAKMEKRGSKYLRFALFNAAIYVSYWEPTFSQYLKKKRVEGKHYYVAISHVVKKLVRLIFHLEKTNERYSTVI

SEQ ID NO: 161131 - protein, 458 aa, unidentified
MGACELESGDVALAAIPIRKMTIGVAQTLLLIIDWRIAMAKRTTGHRPELKPVNVGAAAIDIGSKMHMAAVNPASTDMPVRSFGTFTQDLHDLADWFGACGVTSVAMESTGIYWIPVYEILEQRGFEVILVNARYAKNVPGRKTDVSDAAWLRELHSYGLLRGSFRPDAEIATLRAYLRQRERLVEYAAAHIQHMQKALMEMNLQLHHVVTDITGATGMRIIRAIVAGERNPDVLATYRDVRCHSSIETIRAALVGNDRHEHVFALTQSLELYDVYQAKMLDCDRKLEVLIAALNNKGAKPVGKLSKPRIKTKQVNTPTFDVRSALFGLLGVDLTEIHGLGPSLALKLVGECGTDLKAWASAKHFTSWLCLAPGNKIFGGQGVVLAHTKILQSRSRTVAVGSNNRRAEWYGTRIILSPTVLTCGQVKGGDSDRPQDRSSILQHPSARHELQGSGRRPL

SEQ ID NO: 161132 - protein, 388 aa, unidentified
MQVIGDRPEAASAIRTNLGAIFVSLELSQSTWLITSLSPGSGEKMSKHVVHGGDIAGLLERFARLQEKARARTGRNFPIIVIHEAGLDGFWIDRALKNEGIESHVVDPASVATSRRRRRAKTDKIDGEALVRTLLAYKRGEPRVCAMVKAPTPEEEDRRRLCRERKVLITERVKHVNRLKGLLFSQGVCGYEPLRRNRRRRLDELRTGDGRPLPKNLKAQISRELDRLELLLEQIKVVETERDALLAAQQIAAPTSAAMLLAIKGIGPDFAAILWSEGLFRHFDNRRQIASYAGLAPTPWKSGSIDREQGVSKAGNPRLRTTLIQLAWLWLRHQPQSALALWFKERVVRNGGRLKKVTIVALARKLLVALWKYVTAGVVIEGAVMKVA

SEQ ID NO: 161133 - protein, 371 aa, unidentified
MEYTRFVGMDIHKEKISIAVAESGRGGAVEYLGEIANDPGAIRKLCERLGRPGKPLAFCYEAGPCGYGAHRELTSLGHRCEVVAPSLIPKKSGDRVKTNRRDATMLARLHRAGELTPVWVPDADHEAMRDLIRLRSAVRQIVTRARQHLQGFLLRHGRKHGLGTARRMAYRRWLSTLAFEHPAQQIAFQDYVDAVTDGERRLQRVEEQISSLLPEWNRRPVVDALQSMRGISLINAVVLVGEVGDFTRFSNPRQLMAYFGLVPGEQSSGETARRGGITKTGNSHVRRALIEGAWAYRMRARIGRHKVDRIEALPKAVRDIGWKAQVRLCARYRRLTARGKTANVVNVAIAREMVGFIWSIACTIQSASKAA

SEQ ID NO: 161134 - protein, 356 aa, unidentified
MSEITRVGVDLAKSVIQVHAVDAAGKLVTNRQLSRDKFLPWCAQLPVGCVVAMEGCGGAHHWARKLIALRLNAKIIAAHLVAPYRLQGKGGKNDANDAAAVCEAACRPNMSFVPVKTTVQQGLLCVHRLREGLKEERTACVNRIRGMLTEFGLVVSRSPEKLREKLTDMLEDASNDLSGVARLVIEEAYGHWKEIEERIKWCDQRISAHVKDDAQAKAAKELMGVGPVTASAVVATVGDLKQFRNGAQFGAWLGLTPRQNSSGGKNSLGGITKRGDMYLRMLLIQGAKSAVMTAHKRDDPISKWLHQLREKSGWQKAAVAMANKNARILWAMMTKGCRFDARHVSVKPARLAPAMA

SEQ ID NO: 161135 - protein, 409 aa, unidentified
MELLIPRCAGMDVHQATVVITVRLPGDDGGRRSLTETFGTMTPDLLALRDWLQAHGVTHVAMESTGVYWKPVYYVLEEAFTLLLINMHDLKRVPGRKTDVKDSEWLAQLLECGLLKASFVPPPPIRELRDLTRYRVQQVRDQAQETNRLHKVLEDAGVKLSTVVSDVMGVSGRAMLAALVEGQTDAVALADLARGRLRTKLPALQRALQGRFRAHHAFLLRQILSKIDFLEETIAQLTEEIDARIRPFEATLTALDTIPGVDRIAAMSIVAETGGDMQRFPSAGHLCSWGAMCPGQNESAGKRRSGKTRKGNVYLRRTLIQAALAATRKRDCALQTRYHRVKRQRGHKKAVVAVGHQILEIAYYIMRDGVTYHELGADYFTRRDRERTMRRSIKQLEALGYRVSIEDAA

SEQ ID NO: 161136 - protein, 449 aa, unidentified
MSIVEGSAAAVAVGIDAAVVANHHVVVRRPEAGRPGTVVDDFVVPPTLAGMERLTKRLAAWPGAVAVAEPTSMTWLPLSIALGDAGVELSLVGNRHSARLRSALAGKNKSDPIDAAVLSRAGEFFELSPARIPAATELALRRAAQRRGKTITDANRCLRRLISQARWAFPDLWNAFAGSRPTALGVLGRWPQLDALARARVSSITEVVAAHTRGVAGVEQRAQQIRATARAWAEFWDGHLDLDALGWETAELLADLAAAEERVERATDQTRHHWEQLWGDDPVLLSVPGMGPILAPTVRAFLADGSHLDDAKAAQSFVGLNPSNWSSGQMESPSRAITKEGPPVLRLAFYQAANVARAHDPQLAEFYRRLMIERGHCHTKANCAVARKLVARTWATITSGTPYQLRDLDGTPITRRQATKLAAALDVPDDVRRRTRAHSAATHRARLTR

SEQ ID NO: 161137 - protein, 403 aa, unidentified
MEHGTTHFGSVDWASEGHAACIVDAEGTALDEFEVAHSHAGLIELCHRFRRAGVQRVAIERPDGPVVDALMAADLEVVVVSTRAVKALRTRYGLAGNKADRSDAFVLADCLRTDGHRWPSLQPDQSQTVALRAAVRTRKDLVATRISTANQLRAHLQLVFPGSVGLFAAIDSPICLAFLERFPTAAQAAWLSEKRLAGWLAANAYSGHTAAGELLRRLQSAPAGLHGDAAPRQAAVTLALVRVLRSVLAEIATLEAQIREQLKLHPDGFIFRSLPRSGCVRAAALLAEIGDCRARFPSPESLAALAGAVPSTRRSGKHTAVTFRWACDKKLRDAVIDFAQDSPRGNEWAARLYHQHRARGHSHPHASRVLARAWIHVIWRCWQDRVAYDPVQHRALQALRKAA

SEQ ID NO: 161138 - protein, 365 aa, unidentified
MDIVNIGIDLHKQQFTCYFLCKNEGKYFKYTTKKEGYDLFKKDLELIKENGIKIRVAIESTGNTRYFKNEIEKLGIEVKIVNTLHFKVVNQTVNKTDKKDAKIIAEFLAKDIIPEVKLSSEKSEKLKRLLSSRDILVRTKVKLKNQIHGFLLSFGIDTRNGQLNSIKGRKAVIEQVNEAENKRIIELIIGNIEILEKQIKEINNELERMCENDRAVEILKTIPGTGNITAVTVRAYIDDIKRFKEYAKLSGYCGLVPYVSASDEKVYYGSITKRGPVELRTAIIQMVLGMIRCKEEKDNRFMIMYRNIKSRKGSGKALVAVARKFTKLIWTLLSKDTEFNNEKLKNNFEKKQLTADQFDSVEKVA

SEQ ID NO: 161139 - protein, 345 aa, unidentified
MQSGYTYVGLDVHKKTITWCAKKIDGTRVGHGTIAANRAGLSQWLEQLPRPWIGVMEATLFTGWIYDYLKPHAEELKVAHPLMMRAIAASKKKNDKIDAQKLADALRADLVPECYMAPEQVREMRRMLRFRNLLVRQSTRMKNKCGGLLMELGVEYNKKRLHQKQYFSELVGGFDPEIVPTSVISLLGMSRNHVELFRVGQKHLIKQLNNDPRLKERVARLQTIPGVGEITALTWALEIADPARFPSIARAVSYCGLTSAQIESAGKMQRAPLSKQRNKHLQTMLIEAAKLAPRHSEQLRALHERELKRGNRNRATLTVARKMVAHLLAVDKSGKDFEEKTMKEA

SEQ ID NO: 161140 - protein, 402 aa, unidentified
MNAVGIDVSKGKSMVAIMRPFGEIVSAPFEIKHTASDIHSLVELINSVEGESRIVMEHTGRYYEVLAHQLSEANLFVSAINPKLIKDFDNDSLRKVKSDKADSVKIARYALDKWQNLKQYNVMDELRNQLKTMNRQFGFYMKHKTAMKNNLIGILDQTYPGVNTYFDSPARSDGSQKWVDFASTYWHVDCVRKMSLNAFIDHYQNWCKRKKYNFSQSKAEEIYGKAKELVPVLPKDAITKLIIKQAVDQLNSASTTVESLRTLMNETASKLPEYPVVMAMKGVGTSLGPQLMAEIGDVSRFTHKSAITAFAGVDPGVNESGSYEQKSVPTSKRGSSDLRKTLFQVMDVLIKTHPQDDPVYQFLDKKRAQGKPYYVYMTAGANKFLRIYYGRVKEYLSSLPES

SEQ ID NO: 161141 - protein, 419 aa, unidentified
MNKIKTGKRKIVNPKALIVTVDIGKVTNMGYCRCPNGSEVKPFEFSNDRTGFQKLWDRICWTKMAHHLEEVVVGFESTGAYGEPLVHYLREKPVKLVQINPMHTKRIKDLEGNSPGKTDRKDPKVIADVIVLGHALSVVIPEGAAAELRRLTHARERSIQRRTALYNQLQDLVFILFPEFLGVMKDVKTRTAQYLLHHYPMPQELLKLGLDALGAVLRRISRGKLGKDRAQALYEAAKQTVGIEEGRIGILLEIQEILSQIAASECFIEKVEQEMSYYLQQIPYSHSMLSLKGIGEVTAAGLIGEVGDFRQFHTLSEITKLAGLDLFEISSGKHKGNHHISKRGRPLLRKLLYFAAINTIRKGGVMHACYQRYLERGMLKIKALIAIARKLLRILFALVRDHSQYSKQYSQGEVLKLAA

SEQ ID NO: 161142 - protein, 317 aa, unidentified
MKKITNFFVGVDVSKNWLDIYIHPKNEFFRISNCFIGITKLLQTLSIYKIERIVCESSGGYENLLLDLCREAQYKIWQVDPKRIRAFIISEGIKAKTDKIDAKMIALFASQKEPKYDKHKTSLIHYKLRALVQRRTDLTNMAAMEKKRLNGPTGLYCKENIQNILKIFSDNINILDIEIQKIIDEDDDMNNRKQILESIPGVGKTTAANLIAHMPELGTVENKQAAALLGVAPYTKQSGIYKGQEIISGGRFAPRCALYMAALAACRYNPVMKNFYSRLRNTGKKPKVAVVAVMNKLIVTINAMCKKNMKWVHLPIS

SEQ ID NO: 161143 - protein, 457 aa, unidentified
MRTIGIDLAVAAAHRAIVAGPDGQFLTPVLTFHTRREEIEGLVARARAGGAPDEPLRAVMEPTGMAWFPTSVALSQLGVTPYLVNPRRVHDLRKFYKRHSSSDRISARVLAKLPLVDEESLYPLEIPSAVQLACQRGCKELDRLQTEIIAIKNRLRDTDRFAWPGLEGVFKDIYSPAARLFRRAWYDPFQVVAAGLDEVQRAFSALPDQQDDLDWVSNLVQLASAVCQLYGPTAIDYALLQQEVTREQDLLAYLEARAEHVWQETIRPLYHQLHPSRDLESLYGVGELGAAVFSSFIGRAERFPDGHHFRGWHGLVPDSRQSGESEGKGLHVSQAGPDPVKKFAFLGGDVARRCDPQIAAIYHDQMVNKGKHHNQAVCACATHLLDRVYVVLKEGRPYELRDTDGTPVTPAQARAIIAERYTVPEEVRRRNNRQARKERAERRMERQHKQRESRRSK

SEQ ID NO: 161144 - protein, 397 aa, unidentified
MYIVGIDIAKRKHEAAVIDGEGTVIIKPFSFTNNCSGYNRLLAMLTKAKLPLDEVSFAMEATGHYWLALFTRLQKEGFRVQVINPVQTNSIRSFYIRQAKTDPRDALLIAEVIRFGHFSESTLHPENIYELRELCRGRHAIVSMQADVKRKVVALLDQVFPEYETAFTNLFGDTSMAILQTCPTPKELSEMPFEELCHLIEVSSHKRFRMAKAQELQALARNSFGFAMAGDVFSTMIRLYAKHLDFLKQQVREMDCKIAEIMETLDTPITTITGIGPTLGAYILSEIGDISRFPSAAKLAAYAGIDPTMRQSGEYNGVRNRMSKRGSPYLRHAIWLAASSAVLHDPALKLYFQKKRDEGKPYMASVGHACRKMVSIIYAVMRDNKAYTPYIPNEISA

SEQ ID NO: 161145 - protein, 349 aa, unidentified
MWFVGIDVHQRSFAVCILDEHGKTVKQMTVKGTLAKLMNTLREIKEPFGVCYEASCGYGHLHDLFGRQAKRVAVAHPGHLRLIFRTKKKNDRVDAKKLATLLFLDQVPTIHVPSMDVRSWRSLIEFRHRLVAKRTRVKNALRAVLRGHGVAQPAGKKLWTRGGVAWLATVEFPTRQTALQRDIGVEELEHLETQIKRVEKELDVIADGHAGVFLLRTIPGVGARTAEAAVAYIDRANRFARNKQVGSYFGLVPSQDQTGDRNRLGHITREGPATVRKLLTEAAWQGIRRSPHIRAYFERVQGGDDQRKKIALIATAHYLIRVMHAMLRSGECWRFDGEHAAHRADAQAA

SEQ ID NO: 161146 - protein, 450 aa, unidentified
MMEPQEIEDGEYEQILERVAAVDVAKASGMVCTRVPREDQPGKRRTRVWQVDAATSAILELADHLVGEGIEKVTLESTSDYWRIWFYLLESAGLSVQLVRAQDVKQAPGRPKSDKLDAVWLAKLTERGMLRPSFVPPVEIRQLRDYTRLRTDLTRERTRHYCRLEKLLEDALIKVSAVASKLDTLSVRDMLEALIGGERDPQVLAGLARGRMRAKHDRLVQALTGKFDDHHAELARMLLDQVDALSAQIGKLTTRIEELIAAIPAAQGVDADGTTGPTAGLGARAPVLPAVDRLDEVTGIGREAAQAIVAEVGLHMSVFPTPAHLVSWAKISPRTVQSGARSRAGRTGKGNPYLKGILGEAAAAAGKTDTFLGERYRRLARRRGKLKALVAVARSILVIVWHLLADRTTRYHDLGAGYYTSRIDKNRKMRNHIRQLEALGYTVTLAQAAA

SEQ ID NO: 161147 - protein, 359 aa, unidentified
MHSQRNKLDFTGQNVYIGFDVHKKSWKVSILLEKLFHKTFSQDPKPELLYHYLKKNFPGANYYSAYEAGFCGFWIHYALTSLGVNSIVVNPADIPTTFKEIIQKEDSRDSLKIAKALRNGQLRAIFVPKNTTCDDRALIRARTTLTRDLAKNKNRVKGFLNFQGIEIPQEHKYRSQIWSKTFIKWLESLKLGSSSGNEALSIFIEECKSLRSAKLKVTRKIRALSITESYKQNTELLQTVPGVGLITAMEILTELETINRFKNIDHFASYIGLIPSTHSSGENDVVGNITSRGQQTLRSAIVESSWVAVRTDAALSQKYIELLARMLPQKAIIRIAKKLLSRIYFVLKNKQPYQCLIVQ

SEQ ID NO: 161148 - protein, 340 aa, unidentified
MELTPIYKRVIGLDVHQAQISGCAIVEQADGTVTVERREFGGFKRDRKALAEWAHSISPDVVVMESTGIYWKSPYAALESVGIVAWVVNARHVKAVPGRKTDVADAQWLASLARAGLLRASFVAKADLRSLRHIARQRQKLGGTLASEKNRLHKLLTDAGIRLGVVVSDLHGQSARAMVKALIAGKSVPDVLSLASNRLRASREDIFEALQAEEITPAHRFVLTEIMAHIEELEARMARFDVELLRSLRDAGYGMPLQLLQTLPGIDLMGAAMLLVEIGADMSVFGSAQRLASWVGICPGNNESAGKRKSGRIRKGNAWVRRLLCEFAQAAGRSRCALKD

SEQ ID NO: 161149 - protein, 332 aa, unidentified
MNLVSTLGIDSAKNTFSVHGVSNTGEVVLRRTVPRAKLVELVAQLSPRLIGMEACSGAHEWARRFSRFDYSVKLMAPKFVAPYRKSGKNDGNNAEAICEAVTRPNMRFVPVKSVEQQADLGLHRVRQGFVEERTGTLNRIRGLLAEFGYVLPNGPEHIRRAVPAIIEELPARIARCVRDLLEHAERLGAKMLEYEQEIRLAVRDNELARRAQIRQGIGPITASALVATVGNGHDFKNGRQFAAWLGLVPRQYSTGGKTRLGHITKRGDPYLRTLFVMGARSVLQRAQRETAPLSRWAAAVQARRGYHRACVAVAAKNARVAWALLAKQTMAA

SEQ ID NO: 161150 - protein, 414 aa, unidentified
MKLWQEITHYAGFDWAHDHHDVVIVDRHGEIVADFSIGHTAQGWQRWREHAAELGPGLAVCVETSQGLLIEQLLESGVSLYPIAPVSSKAYRERKAPSGTKTDRLDAWSLADALRLDGHNWKALAKEDPLVAELRVLCRDEVALIEERTALVNQLQSALQEYYPVALEAFEDWTLPAAWAFVEVFPTPGALAAAGKRKWEKFLHTHKLARPQPYTKRLEIFARANEFVSGEVLTRTKSRLALTRTRMLRVLESQIEAYRAEIEKLFAQHPDHHLFGSLPGAGSKIAPRLLGEIGSDRTRFDNLSALQALAGTAPVSYQSGQIHKVFLRRHCNKALRATIHLWANLSRRGSPWAALYYQALRARGKSHAGALRCLGQRWLKILWKIWQTHRPYDPDLHTRNQLKHGSWVLTLHSA

SEQ ID NO: 161151 - protein, 325 aa, unidentified
MDAPAAPAAETFVGIDVSKASLDVAIDDGPAFAVANTPEGHAELVARLAPLRPRRVVMEATGRLEAPAAAALLAAGLPVDVVNPKQSAAFARAVGRPAKTDAIDARCLAAFGRVLKEDPRPLPDAEARELEALLARRRQLVQMASMEKARLAAAPSRRVARDIEAHLRWLESHLDRVDREVDEKIRSTPAWREKDDLLRGVPGIGPVLSRTLLAGLPELGRLRPGPLAALVGVAPMAAESGAWKGRRRIQGGRAAVRSALYMAALSARRFNPPLKAFADRLEAAGKPAKVALIAVARKLLTIANAILREGKPWDPTRHAPAPDPA

SEQ ID NO: 161152 - protein, 351 aa, unidentified
MLYIGLDVHKEFCQACVIDEHGRVLSNEKFSSTRDELDRFLAGFKDAKFVLESTGIWEFIYEGIEKRGFEAQLAHPLRVRAIAEAKVKTDKVDAETLAQLLRADLIPRSWIPSKDMRDLRQLVRQRAYLVQQSTSFKNRIHAELLRRGVRRPLNFVMPFSKKSIDWMRSLEIPTVISCLNCLESVQTQIEEMNIKLLDEFKRRPDAQLIATVPGIGFYGALLIHAEIDDIKRFSHPEKLCAYAGLVPTVRQSASSVHYGAISKDGSSYLRWMLTEAVHTHVHCEPGSRLSRFHAKVARRRGKQKATIASARKLLLIIYWMLVRHEPYHSQGLDPGFPPARNECDIGIGAGP

SEQ ID NO: 161153 - protein, 349 aa, unidentified
MKIIGCDFHPGYQQIMMLDTETGEIIEKALSHEGKEEVRGFYASLEGPVRVGIEASGQSQWFERMLAELGQELWIGDAAKIRASCDRKQKTDRRDAEHLLQLLAENRFPRIWIPTAEERDARQLLLHRSKLVRMRTQVKNQLQALALNQGLQRKWKLWSTKGRIQLESLPLLPWASRRRAELLRLLDELEASIRELDREVAEQAYARLEARRLMTHPGVGAVTSLAFVLTIGPVLRFARGKKIGSYLGLIPSEYSSGGRGQRLGHISKQGSPFLRGLLVEAATTAVRYEPEMRRAYQRLAQRKGRGLAKVAMARKLAVRLYWMLRLEVDYAQLLQGSHAGQPESFCGRS

SEQ ID NO: 161154 - protein, 344 aa, unidentified
MGEVSTIGLDIAKSVFQVHGVDDAGAVVIRKRIGRSKMLEFFTDLPPCLVGIEACPSGHHWGRELFGLGHTVKLMPPSYVKAYLKRSKNDANDAAAICEAVTRPSMRFVPIKTKQQQAALMLHRTRQLLVRQRTMLSNALRGHLAELGIVSAKGRHGTAELLKIITDVEDDRIPPAARGILDVLARQYGAIGAEIGSIDKSILALHRSCEVSRRLAEIPGIGPIVATALVAEIGDWKAFRSGRNLAAWIGLVPKQHTTGGKDRLGSITKQGNRYLRWLLVIGATAVIRYAQKHGTKNRPWLGRLMERRPAKVAAVALANKIARMAWAIMVHGDRYKEPKLLMAA

SEQ ID NO: 161155 - protein, 340 aa, unidentified
MYGGIDLHANNSVIVLIDEQEQVVSETRMPNDLSNILFHLRPFQARIHGLVVESTYNWYWLVDGLMEAGYSVHLANTAAIRQYDGLKHTNDHSDARWLAQLLRLGILPTGYIYPKEDRAIRDLLRKRSQLVRQKTSNLLSIQNLVTRNTGTSLTGNHIKTLTAEAIRDVLPTPDLALAATSTLAVMRCAAEQITAIEHAIKARVSLRPTFRQLLTVAGIGQTLALTIMLEAGEMHRFPTVGQWASYCRCVNSTKLSNGKRKGQGNTKNGNKYLAWAFIEAANFAVRYYPDIQRFYQRKKSKTQGVVAIKAVAHKLARACYYVLRDQVPFDIKKAFTSQPA

SEQ ID NO: 161156 - protein, 351 aa, unidentified
MIIIGVDYHPSDQYIAFVDTETGEYGERQLDHSEGEAEKFYRELATRGVRVRVGMEATGYSRWFERLLAELGMELWIGDAAEIKTKRVRKQKTDREDARLLLRLLRENNFPRIWVPSPENRDLRQLLWHRHRLVQMRTRIMNQLQALAMNEGQRRKKKLWSAQGRAQLEKLALGTWASRRRKDLLELLDRMNPTIEELTRAVEQEARKRPEVQRLVTHPGVGPLTALAFVLIIGTPKRFPCGKQIGSYVGLIPEEDSSAGHQRLGHITKQGSSLLRFLLVEAAQAAARCDADWRRRYMHLALRRQRNIAKVGMARRLGVRLYWMWRNGWEYAQWVKFSSHAGQLGTGHGAK

SEQ ID NO: 161157 - protein, 342 aa, unidentified
MQITTIGLDIAKNVFQVHGIDASEKVVVRKQLRRSQMLAFFEALPPCLVGMEACASSHCWARELTKLGHQVRLMPAKDVKAYVKRNKNDAADAEAICEAVRRPTMRFVQIKSVEQQARLMLHRARDLLMRQRTQLINALRAHMAELGIVAAQGREGVKELLKIIASEEDARMPVDAHTSLVVLAAGLQALQTMIRSIERRIIAQHRSDEASKRLRSIPGIGIVGATAIAATVPDPKVFRSGRDFAAWIGIVPRQDSTGGKQKLGPISKQGDQYLRRILVVGAHAVLKRARHQPEKYPWVTRLLARKPFRVVAVALANKMARVAWALLAKGGTYRAPALAAAA

SEQ ID NO: 161158 - protein, 361 aa, unidentified
MVGTMTVVGLDVHARSTQAAAIDLLSGELRRQKFGPGTEPVVEWLSALDGPVRAAYEAGPTGFGLARVAAAAGLEVMVVAPSKTPRAPGDRVKSDRKDAELLARLLLAGQPKAVTVPPDWLEAIRHLARAREQVRRDLGRARQRVSKLLLVEGRVYPGVTTWNQEHRRWLSRQQFRFEATELAFIDLLAAVDGLAARREVLDERLARLAQDERLWPTVSRLRAFRGVDTLTALLLHLELGGDWQRFRSPRQLGSWLGLTPSLEQSGESLTQGAITKTGSGIARRLLVEAAWHYLREPRIGVTLQNRQSGQPDHILQIAWRAQHRLHRTHKRMRSRGKPANVTTVAVARELAGFLWAAATAP

SEQ ID NO: 161159 - protein, 456 aa, unidentified
MQEKELSMKIVHPNAAGIDIGSKSHWVAVDQIPAHVLEFGVYTRDHQRLIDHLKFHRITTIAMESTGSYWQTLFYALQKAGFEVILVQGGQTKNVRGKKTDVLDCLWIQKLHALGLLSSSFLLSDYLQTLRTYYAHRDHLVAQTAMYISKMQKALRLMNIRLDIAIRDIAGKTGRAILEAILQGRRDPDYLASLAHFRVKKTQPEIAAALQGNWRDDLLFELRSCLAFYDIYKKEIDACDQKIQALLQQYIPHPEPLVLKNEPPLKTIHKKLNKNSPAFNVRQLAFAHLKTDLFQIPGVSHSTILCFLCNMGNDIRRFASAKQFASWLRLVPNNKLSGGRIISSRTPKGKNRLSIALRQAANSIGNQVAHPLAPFFKRIAYRKGRNAAITATARKLAIIFWNMITKHQPYLQYDALTLSEQRKNAQVKNIKKRLFRLNLTEAEMISLFKKVSFPVT

SEQ ID NO: 161160 - protein, 418 aa, unidentified
MSDSKRWYAGVDWGSQSHCVFLADDQGRKIGQKFFKHSGEGLAEMAAWLLKTSGADGPGQVFVAIEVPHGPVVESLIERGFVVHAINPKQMDRFRDRFSMAGAKDDSRDAEVMASALRTDLRCFRKLSSADPVLVELREWSRIAEELGVERNRLANRLREQLWRYFPALLELEEDCSAEWLLEFIVLAPTPAKAARLREAKIAELLKQRRIRRFDAATILKAVRAPPPKLAPGAVEAASAHVATTIPRLRLVNRQIREAEGKIGALIDSLTAARDSQETEPGQEKQHDAAILASLPGVGRTVLATLLAEAWEPLQRRDYAALRSLAGVAPVTKRSGKSCIVVRRQACHDRLANALYHWARVAVQHDPRSRAKYAELRKRGCTHGRALRSVADRNLSVACAMLKSGTTFNSSLATQKTA

SEQ ID NO: 161161 - protein, 403 aa, unidentified
MILEHESVDVFLGLDVGKTGHHAVALNRAGKKLYDKALPQDETKMRDIIIKLTEQGKVLVIVDQPASIGALPVAVARDAGATVGYLPGLAMRRIADLHPGQAKTDARDAAIIAEAARSMPHTLRSVELDDETLAELGVLCGFDDDLTGQITATSNRIRGLLTQIHPALERALGPHLDHPAVADLLTRYPTPQALRTAGRGHVRARLKKHAPRAAERLTEAIFDALGQQTVVVVGTSAAGIVLPKLAEQLLALRRQRDEITAQVEALVEAHPLYEVLTSMPGIGVRTCARILTEVTGKHFASAAHLASYAGIAPVTRRSGTSIRGEHPSRRGNKKLKRALFLSAFAALHHPASRAYYDRKRAEGKRHNQAIIALARRRSDVLFAMLRDGTLFEDPVPKNLPSAA

SEQ ID NO: 161162 - protein, 368 aa, unidentified
MGKSSKLFVGMDVHKDSIDVATGEESGGEVRHYGTIGGDLGVVARLARKLESTGRPLVFVYEAGPCGFGIYRLLRGRGHECRVVSPGMTPRSNADRVKTDRRDALKLARLARAGELTPIHVPDAQDEAMRDLVRAREDAVIVQRQARQRLAALLLRNDIRYNGKTAWTPAHRRWIAELKLPHGAQHIAFEEYVQAVEEAGARIERLEAAIRAELSQWRWRPVVEALQAFRGIRAIHAVRLVAELGDLTRFASARHLMGYLGLVPSENSTGERRRQGAITKTGNSSARRALVEAARAYRHGARVSVGIARRHAGLAKSVTDLAWKAQLRLCARYRRLSARGLHRNKIIVAVARELSGFVWALGQQVKPA

SEQ ID NO: 161163 - protein, 406 aa, unidentified
MPGLPREILDGGLIVAIDPGKVTHRVWVTDRDGLMDRPVSLPNSRVGLQRLEALVGPVPATFAIEATGALHRAWAGELERRRPGALRIFAPSQTAAARAQLGTRRFKTDDRDCAALVWLARQGVGRPARSSEVEAMLAAVSHRRQLVLALKPLRQRLHDQLNALAPGLSAPARHGRVLLLETPTGRGVLACAAAFAGRAPSVRSLQARAGGRLSEATAGFWVARWKQCLAPPADAELRAARLARDLDRFDALRADIAFVDAQLEQLLAASAGQVLTTLPGVATVRAAAFAAYTLPVERFATPERLYSATGLAPASYESATIHRRGAIARTGLPEHRDALMAIAWGLGQHAPAFRERHRELAAHGKTGIAARVALARHACRLCWRLLLTQRPYDDRRYDRARRDRGR

SEQ ID NO: 161164 - protein, 443 aa, unidentified
MPKAKKGARRNSRKRKDVTEGLPPLNLNAAGIDVGNAEHYVAVPPGRVCQPVQKFGSFTADVHRLAQWLKACGVDTVVMQATGVYWVGLYEILEQQGLEVKVVNARYTKTLPGRKSDVQECQWLQKLHTFGLLNNSFLPPPEIRRLRTYLRQRENLVAAAATCIQHLQKALTEMNVQLANVLSDLSGVTGMAILRAIVKGERDPQRRAMWKNERVKASREEIARSLEGNWREELLFVLTQTLDLYDIYLGKIADCDQEIKAQLKTMKGKVDVEAQPIPEPRQVKRPRRQKHQPCYDLRGELYRVTGVDLTQIDSLDVQTVQVVISEVGVDMSAWKTEKHFASWLGLCPDNRTSGGKILHRGTRKVVNRASTALRLAASNLLRSDSALGANFRRLRARLGAPKAITALAHKLACLIYRMLKFGKAYLDRGAAYYEAQYQRRRLN

SEQ ID NO: 161165 - protein, 374 aa, unidentified
MPLARDVCLRGLAERRAPILSTEWKDNDMNLFIGLDVSLASTAICVLNSHGKVVKEETVASEPEALVAFLRSLCSDIAVIGLEAGPLSQWLHRHLTEAQFEAVLMETRQVKGALKAMPIKTDRRDALGIARLLQMGWFRPVHCKSVSAQEMRAVLTARKSIQQACINLELSVRGVLRNFGLKIGKVSRGNFDFRVRELTDGNSMLMAAADPILKARTALRNELAALEKLTRDHAKSDPVCRLMMTMPGVGAVVALTVKSAIDDPGRFRSSKDVGPWVGLTPRRDQSGERDITGQITRAGDQILRTALYQAATIMLHRGRPSWLTAWALRVAQRRGKKRATVGLARRIGVVLHRMWRDGTEFRFTKQPIDTAGMA

SEQ ID NO: 161166 - protein, 325 aa, unidentified
MKNKSFVGIDISKNVIDVSIFREDTNIKMFPHEVFNNTRKGFGDMCSWLKKSRVVLSQALFGMEFTGCYSLDLEKFLTSKNYSFCMLSTRIVKHHPMGTIDKRDKNDSAKIADFLYRYDGTECAKPYKLPSKAMQQLKQLVNERKFLVEQRTNFMNRMQMFETKEDSAMYESYIKKLNHDIEKIDQEECELMSKEEDVFDTFQNLLTIPGIGFVNATNIIAITRNFTAFDTARQYARYVGVAPCSHTSGTSVKWRARPSAHCNGQVKADLSMAALRAVEYDVEMQMFYNRKLGGRKDSDTKRKALNAVKFKLIRRMFAIGKQKRK

SEQ ID NO: 161167 - protein, 338 aa, unidentified
MIHVGVDLHQRFCYMTALETRGKLLQSGAVNNERLALKRYFRQFRGQAVEVAVEACGFWPAFREVVEPEVKRLVLVHPQRVKAIASAKLKNDRVDSATLAHLLRCDLLPESWKADRDTQARRQQVRLRATLVRQRTRLKNQVHAVLHQQGQRSPVTDGFGKRGRQWLGQVKLPEKARQTLAVCLRMIDYYTQEIEEQNRQLSVEALKDARARWLMTIPGIGVYSAMLLLAEIGNIEHFADKAGLCSYAGLVPRVRESAGKAARGGITRQGSPYLRWIMVEAAQVATRCSPAAKAYFERLRKKKHAHVARVALARKLLSAVHALLRDGVGFEESEFAAV

SEQ ID NO: 161168 - protein, 350 aa, unidentified
MIIIGVDFHPGLQQIASVDTDTGEFEEKRLAHREEAEKFYRDLASRGAQIRVGMEASGYARWFERLLAELQIELWVGDASEIERKRARKQKTDRQDAQHILQLMLKDDFPKIWVASWENRDLRQLLWHRHRLVQVRTRIMKQLQAVALNEGLQCKKRLWRGSGRQQLESFRLGPWASRRRRDLLELLDRLSPTIEELSQAIEQEAERCPEAQRLMTHPGVGPLTALAFVLIIGQAERFQCGKQVASYLGLVPLEKSSGKRRRLGHITKQGSSIVRFLLVEAAQAAVRGNPQWRSQYLRLLMRRGRKTAKVAMARRLAIRLYWMWREKQDYRQSRSFGSHAGQPGNRDGVH

SEQ ID NO: 161169 - protein, 349 aa, unidentified
MEEPIVSNDTLIAVDLAKAVFDVIVSLVPGKTEKARRLKRNEFLLFLAQQPPATVVMEACGSAHYWAREIEKLGHKVVLLPAQHVRPYVLRNKTDRTDTKGMLEAYRNDDIRPVPIKSVAQQTLASLHRLRSGWMTDRTATINRIRGILREFGLLVPVGAEKVVPCVREYLGDAESGVPDLLRGPLAELCEEIRTLERRVHDLELQLAALARQTPVVRRLMTVPGIGLIIATAMVAFIGDIHRFPSARHFASYLGLTPREFSSGAKRRLGRISKRGDIYLRLLLIQGARSVLIQAHKTKEPDRFRSWGLQLERKAGSNKAAVALANKIARIAWAVWKHDRDFESKTLAA

SEQ ID NO: 161170 - protein, 318 aa, unidentified
MRNAAGLDISKDTIDAAVVIGDSVQTKKYSNDETGIQQLETWLQTFEDMPVCMEATGNYYEAVADYLAERHTVYVVNPLKISKYAESRFARTKTDKQDAKLIAEYCQTAKEKDLIHRSKPTDAQYKLARLTAAYAQISQECTAMKNRHEAAKDSEVRAIFKNIIRHLQMQLKTLKTQIQKQTQTPQYQPQIKRLETIPAIGRLTAAVLLQYLTTADFPTPNKFAAFAGLSPQQKQSGTSVKGKEKITRYGNRKLRTALFMPAMVAYRMKAFPAFIARLEAKNKPKKVIIAALMRKLAVIAYHVHKKGEDYDPTRYAAA

SEQ ID NO: 161171 - protein, 346 aa, unidentified
MTVYIGVDFHPHQQTVCYCDTTNGIIQWKTMQHDKRAELREFYRQFEGEVIIGLDAGGPSQWFEELIEELSYKLLYGDSSEIRRRARSRHKNDKRDAELLLDLLVRQEFPSLWRRSAENEQVLCQIRFRDRLVRQRTRVCNQLQALGHRAGLPRQRMQTSIARKRLCEVEMYEPQSIQRKNWFEILDDLTGRIAEVERWLSRKVVECPQARLLITQPGVGVLTALSIAHTLGDVSRFSGSRKVVAYVGLDPLEDSSGDRKRFGRISKAGSRMLRFLLGQAGQASLKRDSEMKEFYQQLSQRRGKSSAKVAVARKVLVRSFIMMRDRIDYQEFLRRRRRSQFVRGAQ

SEQ ID NO: 161172 - protein, 347 aa, unidentified
MERPQNYVGIDVASATFTSAVGRIGEQWQIVVRPAQFANAYDSFAQYLHWLQEHEIQPDNSVICMEATGVYNEVLAHFLVANRYRVAIEPPLKVKRAFKPAGHKSDPVDSCQISEYAYRYWDELSIWAPRQEQLEQIKTLLTTREQFVTQKVGHHNALLALKRKAVRTPLAERAHEKAISELKAHIQRLEDEIVRLIDQDPDFHNMVDLLTSIPGVGLLLAAHMLLTLHSTPQPLSPKRLAAFIGICPYEESSGSSLHAPATSRHYGPPGLRRLLFLAAMSVRNHNVQFKTYFLRKQQEGKPKKLILNNIANKLLKIMVAVVRSNTPFIPNYRSVNPGLLKKALTLS

SEQ ID NO: 161173 - protein, 308 aa, unidentified
MTFAGIDVSKTHLDLALVSNSPKPTRLRFPNSPEGRQALLAALAHHNPAWVALEPTSAYHLPLLKLLAENRLQVALVNPYHLAAFRKAKGERQKTDRQDALLLARYAQVYHEDLRAYTLPPETLRELKALVGYREDLAGRERAILNQMEAAEWAGSKEVLALLQKELACVKGLLGEVEARIQALLATLPEAEVLMALPGVGPQVAAAVLALLPPELWGRAKRAASYAGLIPEREESGKSVERSQLSRKGPPLLRRKLYMGALVAVRHDPEMRAFYHRLLSRGKRKKQALLAVAHKLRSCKDLCVRVRV

SEQ ID NO: 161174 - protein, 406 aa, unidentified
MRRTDHRAAYPRSAVHAHDTALFVALELSRSTWLIGSSTPGSDRISKHQVPAADTTALLALLKRLKARAERSCGTTVRVISIHEAGLDGFWVHRFLEANGIESHVVDAASIAVNRRSRRAKTDRIDVEKLLDTLIEWARGGRRACSMVRPPSPAEEDERRLTREREALVIERTRHVNRIKGLLATQGVFGFEPMRKSHRRQLEHLHAWDGQTLPPRLKAELARELNRLELVISQVAAVEGERDRALKAQQHPAPSISAPEATASASAQPTATEHAGRLLLRLRSIGPEFASVLSSEAFYRNFSNRREVAGYAGLVPSPWKSGGIDVEQGISKAGNARLRKTMIQMAWLWLRHQPGSTLSRWFHERIGDQRGKIRRITIVAVARKLLIALWRYVTLGLVPEGAELKA

SEQ ID NO: 161175 - protein, 347 aa, unidentified
MSNYVGLDVSLETTSICILDEKGKRVLEGEAESTPEAIDNFLKKSQLEIEKIGLESGNLTHYLKKGLLKMKYQVVVMESRKMAAILATIINKTDKNDARGIAEALRVGHFSECVHRSDEAIQLRSLLHMRETVVEQRTHEVNSIRGHLKVYGIKLAKKAGKTFRRKVESAMQNLQPQVQRAMTSLLNILDVIDQELKILNKEITQMTSQDEDVKLLQTVDGVGPITALAFKAEIDDCKRFENSKDVAAYIGLTPSQYSSGEVKRQGGISKKGSKRTRYLLVEAANALLNKCKTWSKLKAWGVKLKKKKGNRKATVAVARKMAVIMHKMLMTKKPFERGSEKKEKVAA

SEQ ID NO: 161176 - protein, 343 aa, unidentified
MQTVTTVGLDIAKSVFQVHGIDAKGDVIIRRQLKRRHVLAFFQKLPSCLVGIEACASSHHWSRELTALGHTVRLMPPAYVKPYVKRQKNDATDAEAICEAVTRANMRFVPTKTPEQQSGLVLHRTRHLFIRQQTSVINAIRAHLAEFGIVAPVGRHGVEELLNVVADPNDKRVPEIARACISALGAQLRRIKEQILEFDRLITAWHRSNEMSMRLDEAPGVGPVLATAVVATVADPKVFRSGRNFSAWIGLVPMQHSSGGKNRLGNISKQGDRYLRGLFVAGALAVIRYAKIHGTKHRPWLTALLARRPTKVAAIALANKIARMVWAMMVKGERYKEPAALAA

SEQ ID NO: 161177 - protein, 414 aa, unidentified
MDVFHERCAGLDVHKEAISVCVLIGRGSGFQKLTFRYGTFHHQLVEMRQKLVELGVTHVLMESTGVYWMPVYDALEGFVEIVVGNAQHIMNVPGRKTDESDAEWLAKLLRFGLVKPSFVPAREFRELRQLTRYRRAVVQTRASEQNRVEKHLQIAGVKLSSVASHVFGVSGTDMLNRIAEGTTDPGELAGLARGRLRKKMPQLRDAFAGSISEHTQHLIALQMEQMNRLESTIAQAELKIDEKVKPYEEILYEEILARIDAMPGLNLRSSIDVLAEIGTDMSPWATHRQIAAMAGLCPGNYISAGKRLKNRSRQGNPYLKSILVQAACSAINVDGSYYQAKFKALKKRRGHKRALVAIAHAMLVAIYHMIKKGEPYREIGAKVVSDHEHGRKKEYLIKQFQNLGYSVSLTPLTE

SEQ ID NO: 161178 - protein, 394 aa, unidentified
MFYLGIDIGKNTHVASMVGEDGKPVFRAFSFSNTTEGGESLLARISNIAPAELEIGLEATGHYWLALYSYLHDRSYKLHVINPIQTDGWRKGVEIRRRKTDTIDSVLIAELIRYGDFIEARLPEEAVLSLKNLTRFRSYLVDSTGDLKRKVICVLDQVFPEYQSVFSNVFGKTSKEVLLQFSNPADLEDVSADTLAELLASLSRKKLGVAAAEKLSAAAAKSFGVTFCRDSFTFQLRMLIEQIKYIESQVKDTEDEIESIMATIASPITTIPGIGKTLGAVILGEIGNIERFDHPSKLVAFAGIDATVLQSGEFEGSHNRMSKRGSPYLRRALYQAALVAATGRNPDPVLRAFYLKKISEGKHHNTSIGAVSRKLCYIIYAVLKENRPFEIRTP

SEQ ID NO: 161179 - protein, 412 aa, unidentified
MQVIVERCCGLDVHQETVVACLLIGLAGARPSKEVRTFGTMTCDLEALCDWLKAAGVTHVGMESTGVYWRPVYAVLEGHFDLIVGNARHIRNVPGRKTDVKDAEWIADLVRHGLITKSFVPPAPLRDLRELLRYRRKLMESQAAERNRLLKLLETANIKLASVASDVFGVSGRAMLKALIEGNASAEEMAALAKGQLRRKRAELVLALDGKMKEHHRFLLAMQLRRLEAAEQDVAALDLRIAERLEPYRAQHALLMQIPGVDWLVAAVLIAEIGIDMSVFLSAYHLASWAGVCPGNHESAGKQKSGRARKGNVHLRTLLVGAAISAGHAKGSYLKDKYYRLKARRGALRAALAIAHKILVAAYHMLAKGLAYRDLGAAYLDQIGQRRTVANLQRRLERLGYHVTLQRTAEVV

SEQ ID NO: 161180 - protein, 362 aa, unidentified
MNKDLQRTEHNAPTPGNQKTIGIDLGDRWSRYCILGGDGQIVEEDRIPTSTGALERAFKKMPATRVVVEAGTHSPWVSRLLEKLGHEVVVANARKVRLIYESDSKNDRLDARMLARLGRVDVNLLAPIRHRGAETQADLAVIRGRDCLVAARTQLINAVRGMVKSVGGRLPKSTTAAFAGKVSSLIPSELKVALEPLLSSIAAVTEQIAKADEQIAQLAEAKYPETKLLRQVKGVGPLIALTYVLTVGDPHRFAKSRTVGSYLGLRPRQRESGSSAPQLGISKAGNNHLRWLLIQAAHYILGPLAPDSGLRRWGLGLAGKGGKSGKRKAVVAVARKLAVLLHRLWVTAEVYEPLYGIESEAA

SEQ ID NO: 161181 - protein, 411 aa, unidentified
MQTLVERGCGLDVHQATVVACLLIVLKNGQVQKQIRTFGTTTRELLALREWLLSQGCTHVAMESTGVYWKPVYAVLEGGALEIVVANAQHVKKVPGRKTDVKDAEWIADLLCHGLLRSSFVPPKPIRELRDLTRYRRKLVESQAAERNRLLKLLETANIKLSSVTTDVFGVSGRLMLEALVEGKSTPQEMAELAKGRLRQKIDELGPALEGKLEEHHRFLLRLQLDRLEAAEKDLAVLEQRLQEKLKPYAEQLTLLDEIPGVDWTLAAVIIAELGVDMSVFGSVSQLASWAGVCPGNNESAGKRKSSRIPKGNVYLKTALVEAANSAAKAKGTYLRDKFYRLKARRGYKRAAVAVAHKILVAIYHMFSDRVCYNELGDVYLDKLNKHHLTRNLVHRLERLGYAVTLEQKAA

SEQ ID NO: 161182 - protein, 402 aa, unidentified
MNAVGIDVSKGKSMVAIMRPFGEIVSAPFEIKHTASDIHSLVELINSVEGESRIVMEHTGRYYEVLAHQLLEANLFVSAINPKLIKDFDNDSLRKVKSDKADAVKIARYTLDKWQNLKQYNVMDELRNQLKTMNRQFGFYIKHKTAMKNNLIGILDQTYPGVNTYFDSPARSDGSQKWVDFASTYWHVDCVRKMSLNSFIDHYQNWCKRKKYNFSQSKAEEIYGKAKELVPVLPKDAITKLIIKQAVDQLNSASTTVESLRTLMNETASKLPEYPVVMAMKGVGTSLGPQLIAEIGDVSRFTHKSAITAFAGVDPGVNESGSYEQKSVPTSKRGSSDLRKTLFQVMDVLIKTHPQDDPVYQFLDKKRAQGKPYYVYMTAGANKFLRIYYGRVKEYLSSLPES

SEQ ID NO: 161183 - protein, 412 aa, unidentified
MDEVVEFCAGLDVHRDTVVATVRFPQGRHRGSETKTFGTDTAELVALGDWLISHRVTRVGLESTGVYWKPVFYLLEDRIEQLWLLNAQHLKNVPGRKTDVVDSAWIAQLVEHGLVRPSFVPSPPIRELRDFTRHRRVLSEERTRMVQRLEKVLQDAGIKLTSVASTVLSKSARAMLEAMLAGESDPVVLAELAKGRMRSKIPALTDALRGSFRVCHHGVLVRQILSHVDFLDAQLAEIDEQITTRVTTFEPIIERVQTIPGVARKCAIGMIAEIGVDMSVFATPAHLASWAGICPGNNASGGKARSGRTRHGPVALKTVLTEAAQAAARTKNTYLGARYHAIRGRRGTFKAVGAIRHDILIAYWHIVTADVGYQDLGVDWVARRHSREYQIARLAKQIEKLGAAVEITMPAA

SEQ ID NO: 161184 - protein, 397 aa, unidentified
MVNIGVDLHKTQYTVCVRKNGKEKFSEYAANSSGYKTFLKEAAKWQESGQEVRVAVESTGNTRYFKSRMEDAGINVTVINTLKMKVINESVKKTDKHDAATIAEFLEKDMLPESQLCSRTSEQLRRLLKARTTLVRAVVVIKNQIHALLTAEGMEDKKSSLQSKRGRKRVLNALEQWEHGLVAQPLVETIEQLEENIKRIEKELRGLIVGDRMVELLLSIPGCGEISAWTIRAYTDDIARFSSAKKYASFAGLVPWVQNSNETIHHGKITKRGPEELRTAIVQVVMGMRRIKKRSKSWRIMERYEAMKKSKGSGRTIIATARKVATIIWHMLNENKEFDIGQMVDRKLAKKSDDMSDSARLVEEAVFEKQNQPVSKKILGKSKKKTGVARKMIKKVG

SEQ ID NO: 161185 - protein, 408 aa, unidentified
MEPEKPVPKRFIGLDIHKHYLVAYGVDAELNRLLGPRRVEYADLDAWMRQALTPEDAVVIEMTTNTWQIYDSLLPHVQSVTVVHPPHVALIVRSQVMNDKIAARILATLLAKGLLCGIWVPPEPVRQQRALIAQRAKMTRLCTQAKNRLHAVLHSRCLLPPTEDPFSPEQRAWWLGLKLSPLEKAVVRSDLDTLLFAQQQIQSLEETLNQLGGQDERLPLLVQLPGIRLISGLTILAAIGDISRFPSPKKLVGYAGLGSRVHDSGQTTRTGKITKAGRRDLRFTLVEAAQIAANTHPHWQAELKRLEPRLGRNKAIVAIARKLLIEVWYVLTNQVADRFSEPERIAHKLLQHAYLLGQANRAPELSTGGYVRLQLDRLHIGQTLKAIPWTPKKKPIPLPPSTLPTRQT

SEQ ID NO: 161186 - protein, 273 aa, unidentified
MADYSAFVGLDVHKDTIAVSVADAGRAGEVRFWGEIANTPDAVANMLRKLGGRHPRIHFVYEAGPCGYGLYRQIMATDHHCEVVSPAQTPRKPGDRIKTDRRDAIILARLSRAGELTPVWVPDETHEAMRDLIRLRQAMVKDLRAARQRVKSFLLRHGRVFKGTSWKRSHRIWLGNQSFEHPAQQIAFQSYLNAVDQAQARRDEVDVLIRQFAADWSMAPVVDALQALRGVAFITAVTVVCEVGDIRRFAKPRQLMAFLGLVPGEYSSGETRR

SEQ ID NO: 161187 - protein, 370 aa, unidentified
MRIIGCDLHARQQTLAMLDTETGEVVNLTLMHEGNNVREFYSKLPRPVLVGIEATGSIQWFLNLMEELGIECRVGHPAQIRAAEPRKQKHDRRDADLILKLLAQNRFPAIWLPSKELLDLRALLLHRHQWVRMRVRMQNALQAIALANGLRRGPALWSYDGQAKIAFLPLLPHAAYRRSALQAMYKNMQSEIENLTRRVAEQAGNRCGARLLMTHPGVGPVTALATEVFLGDPQRFTDSKRLASYVGIIPREYSSGEHQRLGGVTKQGSPLLRFLWGEAGAHAARRDPELKRFYRRKLVQKGLGKARVAVARKLGIRLWIMLRDEIDYQEFCRRGQIQQKTVRPVVGMPETGNGAKSHRPVDEATRLPES

SEQ ID NO: 161188 - protein, 465 aa, unidentified
MTPRQGKKFRTSDQVEDLTVTQKHAAGIDVHAAVHFVAVAPADLPAGFVNPDAQLPAGVRKFGANTGDLEALAAWLKACGVTTVAMESTGVYWIPLYELLASLGFDVILVDPRQTKHAPGRPKSDVLDCQWIRRLHSYGLLTASFRPADEIVVWRGYQRQREMLVRYAAQHVQHLQKALEEMNVKLTEVVSDIVGQTGLKIIKDIVGGERDPLELAKHRHEKCKATAAEIAAALYGNWRKEHLFALKQALQMYEFYQRQLRACDNEIKACLRGLADKSGGAALPPSSRRLQPRGNEARFGARALLFRMAGVDLTVIEGISEATALVVLSEIGLDLSRFPTEKNFVSWLGLCPQHRGSAGKIFSRRVRRGANRAARALRMAAQGCHHAKNALGAFYRRIQARCGGAKAVVATARKIAERVYRLLKYGHEYVRQAEQAYEEAYRLRTVKGLARKAESLGYKLVPATQ

SEQ ID NO: 161189 - protein, 320 aa, unidentified
MSGSSVVVGVDVAKAHLDVVVLGAKLGAERFDNDAEGHTALVAALQLLGVALVVMEATGGYEAALACALQAAGLAVAVVNPKHARDFAKSMGRLAKTDRIDARTLAELAGVLARRDDLARFIRPLADVQQQQLAALVTRRRQLLTMLGSERQRLQLAVPRVRPSIEAMIQAIRAQLDDLEAQMIAHVREHFADLDALLQSTRGIGPIASATLIAQLPELGRLNRREIAALVGVAPIANESGTSRGRRRVQGGRFEIRRVLYMATLTAARRNPVIKAFYQRLIATGKLPKVALVACMRKLLTTLNAMVRNNKPWDNSIHGA

SEQ ID NO: 161190 - protein, 411 aa, unidentified
MTREPQEIEDEEHEQVVERVAAVDVAKALGMVCTRVPHPSRPGRRLSRVWLQAGGLSVQLVNARDVKNVPGRPKTDRLDAVWLAKLTERGMLRPSFVPPAEIRQLRDYTRLRVDLTHERARYWQRLEKLLEDALIKVSSVASTLDTASTRDMVEALIQGQRDPRVLAGLARGKMKAKHAALVEALTGRFDDHHAELARMLLDQIDALGAQITKLTARIQQLLGAIPAAQGVDADGTTGPGAGSGTDAAVLPAAARLDEITGIGPGAAQVVIAELGLDMGVFPTPGHLVSWAKLCPRTIQSGAKTRAGATGKGNPYLKGVLGEAAAAAAKTDTFLGERYRRLVKRRGKLKALVAVARSILVIVWHLLADPAARYHDLGAGYWADRIDKGKKARNHIRQLEALGFTVTLAPAA

SEQ ID NO: 161191 - protein, 453 aa, unidentified
MSRRKMNVSIKSGKARAALTITHPNAAGIDIGSASHFVAVPPDRDETPVREFPSFTVDLNALADWLEACKVDTVAMESTGVYWIPLFELLESRGFTVLLVNARHVKNVSGRKSDVLDCQWLQQLMSYGLLSGAFRPTEQVCVLRSLWRQRAMLLRDQGRAVQHMQKALTQMNVQLANVISDVVGETGQKILRAIVAGERDGQVLGAMKNARIHASIDEIAKSLQGNWRAEHLFALKQALGAFDFTGTQLVECDCEIEQQLQCLKAHEGEPAKGKQRGRSRNAPKFDLRAQLFKMCGVDLTRIDGIDVTTAMAVISETGTDMSRFPTVGHFASWLGLCPGTKITGGKVMSGKTKRCANHAAQALRLAAAALRPSQSALGAYFRRMCSRMDKPKAITAAAHKLARLIYTMLTKGEEYTDKGQEYYEERYRQRVMHHLAKRAEKLGMHLVPMPHAA

SEQ ID NO: 161192 - protein, 340 aa, unidentified
MVLIGVDPHKMTHTAVAIDGDETPIARVQVDADGRQIARLLAWAEPLGNERVWAIESAAGLGQLLSQQLVAAGEVVVDVPAALSARARLLGSTKAAKNDPNDALSAAIVALRNRDLRVVGADGHNAVLRLLADRLHDLTASRTQTACRLHVVLRELIEGGAPLRLRADRAAKLLRSTRPTTAVDVERRRLGLELVADLRRCDLAITEQKTRIITAVAVTGTALLEIHGVGPTVAAIILGQVGDPARFPSRDRFAAYNGTAPIEASTAMVKRHRVNQRGNRRLNHALHLIAVTQVAHDTPGRAYYQRKLDEGKSKKEALRALKRRISDAVWRQLQVDLDRR

SEQ ID NO: 161193 - protein, 385 aa, unidentified
MAPIRMPEAVIGLDVGKSSHWACVATRDGEVLLSTPVANREDDLDSLFGRFPDALVVVDQSRNIGALALARARAAGMSAAYLPGLAAHGAARLFAGDAKTDERDAMVIAKTALGIPDALLPVGDPGPTIAAARALAAQRNFLTCENTRNKNRLRSILLESCPAFETLVDLSDGPQLRLMASLGGAWSVADAGPRRAAALTRGAARGKIEALVRSTTSSTRPDASVVSAEDRAVKLLARRISENSAEIEAITAEISALLEGDDTYRCLLTVPGIGPKTASELAISIDIEDFPSHDRLASYCGLAPRNRQSGTSISSVTASRQGNKRLKNLLIFSCNCLTRTEGRWGDYYTRCRERGMSHGKALKALARKRLKVIYAVMRDRVPYAA

SEQ ID NO: 161194 - protein, 353 aa, unidentified
MKYVGLDWAYRKAQWCALAPGGEVAGEGRIAADRDGLARLVLELGDEVKACLEMMSGALWVRDQLVTCGWQVEVADARKVKTVAPLAAKTDKVDARLLAELSRRELVPALWLPSLDERALRERLRRRMHLVRLRTSAKARIAGLQTQWGVRVSLQRLRQPDGVTLLERAGVPEVWRRSVGECLSVIDFLDERIAPLDAELRPFAHADPRAVLLDTIPGVAELLALTIAAEIGEVSRFSSPARLVSYGRLAPRVHQSGRGRPRSGPLSKSGSRLLGWAAVEAAQQAWRETNPWHDLYADVARRSGNSNSAKAAVARKILIAAWHMLSRNQPFKPAPRRTSGTSVPASSRLALAA

SEQ ID NO: 161195 - protein, 421 aa, unidentified
MLGVGIDFAEEFHLVALGRPGDGVIEVTRVDHTPAALAALVARIAALEPDPGEVRVVLETSHGLLVERLLEAGYVVVPVNPDLVARRRGPARKKDDAEDARIACLIALDRHTTLRPLIPHGDLAAELRAIARDDERAARDERRLLNRLRTDLLETFPAALELAADDLGAPTLLRLLERWPTAADLGTATRDELIAFARSAHHGWPERFADRVTAALAGEQFAARPALVRAKADTIRLAARQLLLLGAARRAWERRMGELLLGAPRKGRAHEPHAERGEQFPGGEIYLSFPGLGDRLAARVAGEIGDHPEMFASPNGLQCYAGKAPVTRRSGKSELVVSTRLACNGHLRDAVQQWAFCSLPYSGWAREFYDGQVAKGKNHHAALRALGNRWLEILWHCLMRRVSYDEAIHVANRNRALQRAA

SEQ ID NO: 161196 - protein, 339 aa, unidentified
MKYIPVGVDIAKHLIQVHFINEHTGEVVDKQLRSKDFLTFFSNREPCLIGMETCGGSQYWARELEKLGHKVRLMQGRFVKAFDMGNKNDVMDARAIWMAVQQPGKEIAVKTEEQQSVLVLHRSRRQLVKFRTTQINALHGTLLEFGETLHKGRAALNRELPAALERMKTRLPPYLITVLEDQYNRLSELDSLIDGIEKQLISVARQNETCKRLMEIPGVGPLIATTAAATMGEASAFKSGREFAAYVGLVPKQTGSGGKVRLPGISKRGDTCLRTLFIHGARAAALLAKESGPWITELKKRRPTSVAIVAMANKLARTVWAITAHDRKYDTEYVSIRPN

SEQ ID NO: 161197 - protein, 343 aa, unidentified
MTYFAGLDVSVKETSVCIVDDAGKIVREVRVASEPEALLPVLTNTLYRLKRVGLEAGPLSQWLYSSLAEAGLPVICVETRHMRAMLKAQINKTDRNDARGIAQMMRVGLYRPVHVKTLRSQKLRMLLTHRKLLQSKAIAIENDLRATLRNFGLKVGMVGTVKFEARIKELVENLPDLAELVEPLLIVRQVVREQLGILHRRLLAIVRDDDVCRRLMTIPGVGPVVALTYRVTVDVPARFRSSKAVGAVFGLTPSKYQSGQNERTGGISRCGDEMMRMMLYEAAQSMLVRSAKWSWLKAWAMKIARHRGMKKAIVALARRLAVIMHRMWVDGTEFRWTREVAVA

SEQ ID NO: 161198 - protein, 332 aa, unidentified
MNMHPQGGVANLSHRPNAGVDVSKQHLDACWADQSQRVLNDENGWGELTAKLKSANVDLVVIEATGAYERGLVCALQCAGISVARVNPRQARDFAKSMGVLAKTDQVDARTLRDFADVLARHKDRLKYITPPTDPLRLELAALMSRRRQLVDMRVAEGNRLEQANKRAVRSIKAVLKTLDKQIEEIDADADDHLKRHFKNQCSLLDSVKGVGPVTILTVTSALPELGQLGRRQIAKLVGVAPLANDSGSRTGKRRIWGGRSEVRAVVYMATLAAIRHNPVIGVFHSRLKAAGKPPKVIIVACMRKLLTILNAMLRDNAVWDSTKHAQVSKTT

SEQ ID NO: 161199 - protein, 424 aa, unidentified
MNLTQNDRLRQVTSDTLIVGVDVGSQTHFCRAFDWRGFELSRRVFKFSNTGMGFLTFLRWTEELMNKAEMKKVIVGCEPTGCYWLTFQKFLQDHDIQFVTVNPFTVNRSMELDDNSPEKSDLKDPKTIALLVKDGRFSTSYLPSGVYAEIREASVCRDQIMKQHVRLSNQIQGWLQKFFPEYFECYADWDSTSGLMLLKKAPLPQDILRIGAGGINQIWRDAKVRAAGIKRAQTLVEAAQNSVGLEAGEAARLEIWVLVNDYILKAEQLKRLDEYLEEKVKEVPNVEKMLAIKGVGMSTVIGFIAEVGDIGRFTDPKQIQKLAGLEIVKKSSGKKKGQPRISKRGRRKLRRTMYESVRALMTWSPAFQDVFLYYRNRTKNPLGGMQAKIAVACKAIRVFYVVLQTGCDFDEEKFRKDIIRPEAA

SEQ ID NO: 161200 - protein, 421 aa, unidentified
MTPPSHDTFAAFIGIDWADARHDGCLQAAGTAKRECFQLEHTPEAIDAWVTTLRIRFNGQPIAVCLELNKGPLVSALRKYDFLVLFPINPLTLARYREAFTPSRAKDDPTDAELQLELLLTHRDKLQPLQPQSPPMRVLAQLVEHRRRVVGDKVRITNRLPSALKNYFPQVLHWFQEKDTRIFCDFLSRWPTLKAAQLARRSILERFFRDHHVRTADVLATRLHAIKTATPLTTDEGVIAPNVLLVQTLVSQLRVTLDAIEAFDQAIAQRAQHHPDFPLFQALPGAGPVFASRLLVAFGEQRERYASAAALQKYAGIAPVTERSGKKAWVHWRLQCPKFLRQTFVEWSAESMRHSFWAQVYYQQQRDKGNTHQAAVRALAFKWIRILYRCWQEHTPYDESTYLQALMRRNSSLIQNRAKVS

SEQ ID NO: 161201 - protein, 396 aa, unidentified
MGYETLIRRAHVMTRKNTLKSLPTDTEFRVVGLDLAKSDVSVAAIPVDDNTPSLVDRMTYADLLDWAGKISPTLFAMEPCNGYSLLCLQLENLGHEIKVISGWTVSMWINTHLSGQKTDLNDAIALARLTVSDAELTPIRHKSITEIRIQTVQAVRQQLMSQRSKSIVSFKALAQQWGIPCAAGHRNLKKLRESIEAKVDLITRPVANAMLFLLDAVKSLDRQIGQLNQTLQELVMSDERGRLLQSVLGVGTQISARVITVVGNIERFNSPRSLVAYVGVAPRNFITGHKNLTKKKHGNCPDLSHKGQGKISRRGDKLLRSLFIQGAACLYMQFCKDQLPECQLKRWILKQLASQKPYGKLIVSLAAKLIRIVWAVLTYGEKFNIQKAGMTRSMWS

SEQ ID NO: 161202 - protein, 439 aa, unidentified
MTKSKPYAAVPVNGIVLEHLTRGRDGRDVVVGFDIGKYELLAVPRWANHDFGRPWRIANPLQLPELLRLLLALAQGRRLQVALEPSGTYGDALRQACHDAGLTVLRVSPKAAHDYAEIFDGTPSQHDGKDAAVVAELAALGKASVWAYQLPAAWEQELAYWVDWLEAQRQLLVVWAGRLEALLARYWPEATTVLQVTRATLLRALVHYGGPAALAADGQAATRLAHWGGCRLEAAKVQRLLQAAQTSSGIRQSAVDVRRLQTYANEVLQARRQMRRAQRELAKLVRGQPVLQAQARVVGSATASVLWASVGDPRAYGCAAAYRKAMGLNLTEYSSGTKQGELHISKRGQPQTRRWLYLAALRLAKQAGVRGWYEAKKARDAQQAKGAVVAVMRKLALALYHVGAKGATFAVGRLFPGQVVAGGAAGKSQAGVAKAEARQ

SEQ ID NO: 161203 - protein, 421 aa, unidentified
MSKTQDGFAAFIGLDWADRKHDVCLQAPELERPEFLVLEHRPDAIDAWARALEKRFAGRPIAVGLELSRGPIVSALLEYDFFVLFPINPSMLAQYRRAFTPSHAKDDPTDAQIALELLLRHPEKLKRLRPESAAMRSLQRLVEARRTFVQDRVRITNRLTHALKAYFPQVLAWFRDKETAVFADFLERWPTLVAVQRAREETVTKFFHAHNVRSKATVERRLEAIRSERCLTSDASVIETSTLLVQGLLPQLRAVSAAIERFDREIARLCDELPDHHLFRALPGAGPVFSSRLLAAFGEQRERFPDAAAVQRCVGVAPVTERSGNKSWVHWRFRASKFLRQTFVEWTGETIPKSFWARAFYEMKRQAGASHAAAIRALAFKWIRILYRCWVDRTPYDEARYLTALKNRHSPLLNFAVTDAP

SEQ ID NO: 161204 - protein, 356 aa, unidentified
MNSLYYLGLDVHKKTISYCLKLVDGSIVAEGTVSTQRKSLEAWLRQLPKPWCGAMEATLFTGWIYDFLLPHAKSLQVAHPAMLKAISASKKKNDKVDARMLADLLRCNLLPVCYMAPPELRELRRLLRYRSLMVRQAVRMKNKTAGLLMEVGAEYNKEKLHQAGYFRDLLETVEEVPDSVKDLLKISRGAAELFDEAQRRLVQGLLRNPLLKQRVERLRSIRGVGEILALTWAVEVGEPSRFPTVGHALSYCGLTSAQISSAGKEQRAPISKQRNKHLQTILIEASKVAPLWNPQLKLVHEREKNRGNPNRATLAVARKLVAYLLAVDRSGQEFQPRAIAEKETGCLEEQVAMPAQ

SEQ ID NO: 161205 - protein, 371 aa, unidentified
MSRLHYIGLDVHAGSIAVAVADDEGVRVLGKIEHDIPKLKKLLARVGPPASLRLVYEAGPTGFGLCRGLRGDGYVCEVIAPSLVPHRPGDRVKTDRRDACGLAELSRGGLLQAVVVPEPEREALRDLVRARESAKAWEKKARQQLDKFLLRHDRRPRDKMTKWTHKHMAWVRAQTFTDPTQQLVLNEYLIELEHQEQRVQRFDTSLEEAAARLPEVTQKVIHALTALKGIRFLSAVSLVAELGDLMRFGHPTQLMSFAGVVPREHSTGDSVRRGSITKCGNTHVRRIVGEAAWAYSRERAAASKVVRSRREGLSAQVVQIAERADQRLHKRYWWLLKRGKATNKAVTAVARELLGFVWAVGVQTQMEQAAA

SEQ ID NO: 161206 - protein, 350 aa, unidentified
MTYGAIDLHTRYSQIRIIDGDGRVVREQKVRTTAEQLIAAWAGYGPLRILVESSTESEWVAQALEAAGHTVIVADPNYAPMYGEVRRKVKTDRRDAAALAEANRRGWYRAVHRVSTPQRARRQVLRSRRHLVQLRSGTISLIRTLLRQDGYRLPRCSAPAVADRLAALAVPSALRATLAPLTRVLRQVSEEIATLDRTLAVVATTDPIVRRLMTAPGIGPIVALTFRAFVDEVSRFRSAGQVSAALGLVPREDSSSGPHHEGGAAGAPQLAGPGGLGVLAPRESERHLTRVDRTPGRATRSTDRRGRLGASAQPHFVCALARRNGVQRRDAGGLGRRVVPATRRGASAFR

SEQ ID NO: 161207 - protein, 359 aa, unidentified
MSSTAQQAIVRRVVIGIDTHKHIHVAVALDELGGRLDELTVATDRGGAEQLERWALSQGRILAFGIEGTASYGAGITSHLRRQGHRIIEVNRPDRRDRRMNGKSDALDAENAARAVLSGRATATPKFADGEVEMIRQIKIAKDTAVKARSQAMVTLKTLMVTAPPQLREELEGLPKLALIGRCAGLRPGPMTSPLAATKHALRGLARRWQQLQVEIKEHERHLTDLTTAVAPAMVAAFGIGPDTAAEMLIVAGDNPERIRSEPAWAKLCGVSPVPASSGMTSRHRLNRGGHRQANSALYRTVIVRMRFHQPTIDYLARRTAEGKTKAEIIRCLKRYVAREVWGYLHPERREAPTPGSAT

SEQ ID NO: 161208 - protein, 410 aa, unidentified
MPQNIAGIDVHKKLLVVVVIDPAKPDVVLQSRRFGTGWGELQHLSAWLCQYGVAQAVMESTAQYWKPVWMELEPHMQLHLAQAYSNKAPKGRKSDRADAKRLVRRFAAGELMLSFIPEPEQRAWRIVTRGRLQLIRERVQLQNQIESLLEEGRVKFSSVVSDLLGASGRRILRAMAKGETRPETLAALGDKSLKCGLSALVDALTGAMGDIHRQLLAQHLDRIELIDRQIEEVNKLAAAQMQKYQEAITRLVEVPGIGAEAAQEILAEIGPEAAAFPSAEQLASWIGVCPGSNESAGENHSGRSAKGNRFLRRLLCQAAQAAVRTNGSHLQSIFKRLVVRLGYVKAVWAVAHRICKIVWNILRKGARFTEFSEARNPKAVQRAINRHLKALRRLGYPIPSDPQPAVAVRG

SEQ ID NO: 161209 - protein, 345 aa, unidentified
MKTVSLDVHSESSQLVAITEGGEVVLELQVATDASELRRIIGGIPGPKRVVFEEGPMSGMIHDALAGIADEIISCDPTRNALIALSEHKTDEGDARRLAELARLGSIREVYVPPEPYRTLRSLLVHDYHLMQRITGVKNRIKAMCRRHVIRYRGGSVYRSANRGGVMERLPSAELRWQMGSLYRELDLFRRERVGTHRIIRRICKGIPDVALLMSIPGVGPITAQTIVAWLVDPRRFKSRNALGSYAGLGLSQGWTNWQPIGRAKASKRGQRMLKRVLFLAAYAAALRSGSALARRYQARRDSGWEHKKAIRDVARKILNVAARICREGCAYDDTRVSVPDATSK

SEQ ID NO: 161210 - protein, 407 aa, unidentified
MQLTCGVDWAEAHHDVALVDVDGAVVARSRIDTGAGGFNDLLAVIAEHGGSAEHTAIALETDKNLLVVALAEAGFTVYPINPRAVARYRERYGQAGGKSDPGDAAVLAHILRTDRHLHRPMPAVSDQARAIKALARQHQEAVWALQHTVNRLRSVLLEFYPQALQAFPNLKHRAATTVLAAVPTPAAGQKLTRSRLVTLLRRAGRGNHPALVEQILADLRSPALRQSARIEDAYGNTVGGLIGIVVAQQQAVDQLQTALGHEFDNHPQAAILRSVPGLGAILAARVLGEIGDDPTRFTDPNGLRAFSGTAPVTIASGRSRYVKARKVRNKRLADACHWWAFAMLTKSPGGREHYDKRRAAGDHHNAALRNLANKLLGRLWWCLTHNQLWDDNAAWPHRTEHPNPIAA

SEQ ID NO: 161211 - protein, 347 aa, unidentified
MRFYTRQHRFYCGVDLHARSMYVCVLDQEGNVLVSKDIPTAPEVFLKLIAPYREDCAVAAECMFTWYWLADLCAREELVFVLGHALYMRAIHGGKAKNDRIDAHKIAALLRGGMLPQAYVYPQAMRATRDLMRRRNYLMRQRAELLSHIANTNHQYNLSALGVRPARPAERCGVAEHFAETSVRKSIEADLSLIDHYDLELPRLERYIESSAQGHDPLALAIVRTVHGMGKVLGLSILYEIQDIGRFARVQEFLSYCRLVKPTKESGGKILGHSGKKIGNAHLKWAFSEVAVGFLRANKPAQALRQRLMTKHGKGKSLAIIAAKLARAVYFMLKRGQAFDAERFFAH

SEQ ID NO: 161212 - protein, 400 aa, unidentified
MELSQCHTQKGDLMIYVGIDIAKLNHFASAISSEGEILLQPFKFTNDYDGFHLLIQKLDSLDSNNIIIGLESTAHYGNNLVEFLVKHNYKVCVINPIQTSTMRKNNIRKTKTDKVDTYIIAKTLMMNPHHFFSQHDLSIMHLKDLGRFRMKLIKKRTQGKIQLTSYVDQAFPELQYFFKSGIHQKSVYAVLKEAPSTTDIASMHLTHLSHLLEVSSHGHFKKDTATELRILAQKSVGCNDSSISTQITRIIQLIELLDSQVHDVESEMELIVNSLDSVIMTIPGIGFINGGMILGEIGDITRFSNPSKVLAFSGLDPTVYQSGNFNASHTKMSKRGSRPLRYALINAAHNVVRNNKTFKDYYDQKISEGKSHYNALGHCAGKLVRIIYKMLTDNVPFNLD

SEQ ID NO: 161213 - protein, 350 aa, unidentified
MDKELYIGVDVSKQTLDLAYYDGESIDWKKAHIKVSNNNAGFKKIGSWVAKVSKGFDIVLFCMEYTGLYIQNFRLWLEEKHYIYRMVEPRKMHRFEPDLDDGLRSLDRIKTDELDSFRIAIYCEQNHRKILRNPSKLPSPVYFKLKRLLAERKQTVKQSVLYKQQLHDICAYDTDLSVERKNGQLKTLNDALKGIDNEIDMYIKEDADISKNFSLLTSIPGIGRVVALETIVLTENFMAIDNPRKYACYIGVAPFKKESGTSVRKGSSVSKKGFKQAKADLSIACLVCMQHIPNIRDYWERKRKEKCSGIVFNAIKFKMILRMFAVIKRGTPYVETDNYRNGKNKQPGVN

SEQ ID NO: 161214 - protein, 350 aa, unidentified
MIAGIDVHKHNHAVALIDDRGGEIATLIIPNTPKGYRGLIDWLVDHGAAAAVIGVESPGSFGRCLVAALAGAGFEVLQVPAWRTHRERHRRGPGKTDPGDAISIAHVVRTKRADLGPAEEPELVMALGMLELQRRRFVRDRTQAIQRLRADWTQHDPVAEAGVIRCDRQRELSKLRRLQLGPSLAARTAARCIRELARDITDLNARITELDREIAQLLSEHDNPLADLHGAGSNLAATIIAQAGDVRRFRSAGAFARFCGAAPIPCGSGQTANRHRLHRGGNRQLNAALYRIAVVQQRHHPPAQHYLARKIAEGKTPREARRALKRHLANVLYRRLYAWANTAPSMNLLT

SEQ ID NO: 161215 - protein, 351 aa, unidentified
MNSIDYIGFDIHKKTISFCAKAQDGRILDEGTIPARRTDLNAWAERRSRPWWGAMEATLFTGWVYDHLKPLAQELKVAHPAMLKAITASKKKNDKVDARKIADLLRCDLLPECYMAPCAMRDLRRVLRYRNLVVRQATRMKNRIAGLLMETGTLYNKERLHGKAYFCELLGSLRETPASVIDLLKLSRAQLEFFVTIQQRLVKGLRTDAGLRERVERLQSIRSVGEILALTWALEIGEVNRFTSIADAVSYCGLTSAQHNSAGKEQRGPISKQRNKHLQTILIEAAKLAPRFNPQLAAVHERELQRGNRNRATLAVARKLVAYLMAVDKSGKPFQVRASAGEANQDEQPVG

SEQ ID NO: 161216 - protein, 411 aa, unidentified
MRLFVGDDWAEDHHDIEVMDEAGKVLAKRRLPEGAAGMTQLHALIGRFLPEDADDAEVVTGIETDRGPWVAALIAAGYTVFPVNPLQASRYRERHGVSGAKSDGGDAHMLADMVRTDSHQLRPAAGDTPEAGAIKVVARAHKTMIWDRTRAVQRLRHQLREYFPAALEAFEDLDAPDVLELLGKAPDPARAAKLTRAQVAAALKRARRRDIAGKADAILAALRGEHLGQPPALTAAYAATARSLIAVITTLNAQVKILEEQVRDHFGRHPDAEIYQSQPGLAAILGARVLGEFGDDPCRYVTAKARKNYGGTSPITRASGKRKVVAARFIHNDRLVDALMSWAFSSLKASPGARAFYDQQRAKGLQHNDALRRLANRLVGILHGCLKTRTPYDEATAWSHRENLPQSSVAA

SEQ ID NO: 161217 - protein, 404 aa, unidentified
MWYVGLDWADTHHDVEVQDEAGKRVGVRRFAHSHEGLHELQAFLLSIATSPENLACIVETNHGLLITFLLEAGIPVYPVNPKSANQLRKAAGAKTDRIDAHLLAKLGRFDLAELRRLEPDSLSVAELKTLTRDQDALIQTQTRLVNQLTACLKEYYPAALQLFAKVQQRSTLLFLQAYPTPQAALAASVEEITATLRTGKHTNPTKAAPKIVAELHRPQLLASEVIVRAKSRLMLALVKQLLVVIEEIASYDKALRPLFLSHPDQELWSSLPRAGKRLAPRLLAEWGDDRSRYADGTSVQTLAGTAPVPYESGNYAKAHKRFACSKPLRNALQQFAWQSTLSEPWALAYYQRKRAQGKTHSMALRALANVWVRIIYRMWVNKTSYQTATFEAAQRTHAPRQRIA

SEQ ID NO: 161218 - protein, 411 aa, unidentified
MIKENYIYVGIDLHKETHTAVMIDCYNQKLGEITFPNRPADFPKLVAKVKKCNTDGKTIVFGLENAYGYGRALAVWLIDKGYLVKDVNTAISHRQAKHRGAMYRKSDSDDAEAIALATLNMLDKLPDAYPNDAYWSLGQLVHRRDNIMKQRTRLVNQLHEQLCIAYPSYKQFFNNISRPTALYFWEHYPSRKYLKGKSVEDLRAELVPVSHNKCSTRTCEKILDAIAGDKVKNNAYQDARDMVTLSIVSDLQHYDKQLAEVDKMLEQMYKMLGCTLTTIPGVNVITAVKILAEIGDIKRFANANKLAQFAGIAPLHLSSSGKGKDLATKQGNRRLQATIYFLAIQMVQISSKGTPRNPVVRAYYEKRKAEGKTSQQALICISRRLISIIYGMLKSGTEYRMPVMENTGETV

SEQ ID NO: 161219 - protein, 319 aa, unidentified
MEQQAANPVFAGIDVSKDRLDAHLRPSGEAFAVAHDGAGLEEPAVRLRPLAPALVVPEATGGLEIPVVAALAAAGLPVAVVNPRWVRHFAKAVGRLAKTDRLDAEIIALFAERTRPRARPLPGEEARRLGELAARRRQLVEMITAEDNRRRQVRAPRLGPQLGRRIEAHLEWLRDELARADEDLDQAVRASPAWLEREELLTSVPGVGSVTARTVLALLPELGEIGRREVAALVGLAPVPHDSGRRRGKRAIAGGRGPLRAALCMAALVASRRNPALAATYRRLRAAGEPPKLALTAVMRKLLTILNAMLRDRKKWQPA

SEQ ID NO: 161220 - protein, 360 aa, unidentified
MTSTMTFAGLDVHARSTHAAAIDVRTGELRRARFGAASEELIEWMIGLPQPLRGCYEAGPTGFALYRAARAKGIDLCVVAPSKTPRASGDRIKNDRKDAELLARLLLAGQLKPVSVPTRALEAARHLCRAREQVRSDLMRCRQRVSKLLLLHGRVYPEPTTWNQRHRRWLGGQRFDEAVAELAYLDTLAAVDGLVARKAALDECLSRLALEGEWAETVARLRCFRGIDTLSAFALALEIGDFCRFQRPAQLASWLGLVPALDQSGESRRQGAITKTGSSYARRLLVEAAWQYLREPRIGVTLRNRQEGQPAQVLQIAWRAQHRLYRLQKRLRARGKPGNVVTVAVARELACFLWAAAVTE

SEQ ID NO: 161221 - protein, 367 aa, unidentified
MKKVSTAAMKQSRNISRQTLTIGLDLGDRNSWYCVLDETGQIQLEQRVRTTAKALQEVFGAMPRSRIALEIGTHSPWISRLLSELGHEVIVANARKVRLIGESRKKDDRLDAQTLARLARIDPELLYPVKHRSVRAQADLMTIRARAGLVRARTALVNTARGLAKSYGERLRGCNVRDMDPEKAENLSPELQRALEPLLATIEELSERIVEYNDRIEALAQTSYPQVELLKQIKGVGTLIALTFLLTLEDPHRFRKSRDVGGYLGLQPGRRKSGESEPQLHISKEGDPYLRTLLVQGAQHILGPFGIDCDLRRWGLKLAERGGRNGKKRAIVATARKLAVLLHHLWVSGEVYEPLHNSSRVTVAAAA

SEQ ID NO: 161222 - protein, 391 aa, unidentified
MSMYFIGIDISKYKHDCCIISAADQKVVSKVIIKNNKAGFNELLTIIHSLANPADIRIGFESTAHYALNLELFLENSLLTFMEVNPVLISEYKKSKTLRRTKTDSVDCESIARWLMTVEYKPHSKGFYHAYSLKSLTRLRDKLIRQRSFYLIKITNVLDHTFPEFKPFFNERLSKTALYLLENYGSAEKMARMNSASYEKLRSLSRGRFSPQQFLRLKELAVNTVGVNNSIFDVELNSLLSLYKSLVKEINTIEKEINKLIEEVHPHYMSVPGIGPLSAAVIYSEYGDISNFTNPGQMLAFAGIEPGINESGTESHGGKMVKRGSSQLRYTLINCCLPLIRFDMTFATYYAKKRGEGKPHRVAITHVAKKLIRVIYALERQDIDFNAQKLR

SEQ ID NO: 161223 - protein, 399 aa, unidentified
MLAVGIDISKSKSVAAILNQDGSMHTGPFEFHHTQPELDAFIKYILNSNQSATILMENTGHYHYPVLKAFQEAGLPVCMVNAYQIKKFGDMDLRKAKTDKKDAVRIARYALEKSYSLIPYTSMEQKYEDLKFLARQYNQRMLTLKTNKVFLLNLLDETMPGITNILPLTTRTPETSLSVLFINRFKSYDRIKKMGKSRFLDAFEKIARKSRNRQTKTYGLAIYETALLNITTRGENEYTLGAQDQCLELVCESQKAADSIILKMQALAETLPEYAVLRSMAGVGDRLGPLILAEIGDIRRFHSGKALNAYAGNDAPPYQSGTFESHNRHISKRGNAALRKYCFEVMQALKLIRPQDDPVYLFLLKKEQEGKPYNVAKMAGVNKFLRIYYARAMETLKQQ

SEQ ID NO: 161224 - protein, 315 aa, unidentified
MTSDMYVGIDVAKDTMFVAILPTGETWEERITEDGLKRLVAKLRPITPQLVVMEATGGYEAPIFEVLWKHNIPVAVVNPRLVRSFAKALGRLAKTDKIDATVIARFGEAVKPKPKVRNDQQEKILGDLVARRRQILRMIVAEGNRKKRAVGEVQKLIEKHIKWLNKALEEIEKKLEAYISKTVEWRERNEILQSVPGIGKIVAYSLMAELPELGKLNRKQIAALVGVAPLNRDSGNMKGKRSCWGGRASIRTALYMATVVAMRFNKTIKAFYERLCQNGKHKKVAITACIRKLLCVLNAMMKNHIRWGEFKPAKT

SEQ ID NO: 161225 - protein, 383 aa, unidentified
MLAWSSREGSAGGTSWSRKVSTTVLIWRPAGVFAVRNTNGRWGSTPVYNQVLGPDPSNMAEVGMDGKRVIGIDIGKCWLDVAPEGAARVERHANERSVILALVATFDPARDVVVFERCGGYERELEGALAGAGVPWAVVHSARVKAFRQVQGIKAKTDAIDARLLREFGRDRLKAGQLRLGRAEDVVLNALMARFRQLKAALHAEQCRRETAAIEPVRASIARTIVQLEAELAIIMAELAGHEANDAQLALKEKVMCERKGVAQATARALAAELPELGRLDRREIASLGGLASRVEQSGRSERRRGLVRGRSAVKVILFNPARTAMRWDPEIKAFRDRLRARGKPGKVIMVAVMRKLLVRLNAAVRDALNQEEVSNQATLGAF

SEQ ID NO: 161226 - protein, 346 aa, unidentified
MPIVGGLDIHRKQITFDYVDTDTGELQRGQVAPADRSHLAGWLARRFAGRHDVEFALEGCTGWRYVAEELAAAGAVAHVGEPAETAALRGRKRHAKTDKTDSRHLRQLLADGRLPECWIPPSHVLECRALLELYRDLRVEHTAWTQRIHAVLFHQGARQLGKGGLRTEQGLAELRAVAAEQLSPVGQCQVATALEVLATLDEHLDAVHRQLLHAARHLTGARVLAARLYGVGPITALALTCWLAGAGRFSSTRKAVRFTGLDVTVHSSDGKRSPGHLSRQGPAVLRWCVYEAGKTHARASAPDHGYYAQVKQRIDGKRAAISEARKIVRQASHILAELGDDALTTT

SEQ ID NO: 161227 - protein, 387 aa, unidentified
MPQPNDLSRSLVALDHNSTIVAVVELSQSSWLVGGVLPGIERQPRKKLEPSPERLLAVLHRWRDEAVRAGHTITRIAVAFEAGRDGFWLARWLEAHGVEAHVIHPSSVAVSREHRRAKTDRLDTELLKRGFSGWLRGERGHCSMVRVPTIAEEDAKRPNRERECLVGERTRINNRIKATLARLGIRNFKPTLRQAAERLATIHTPEGMPLPPNVLAELQRDLARLGLVIGQIREIENARQKRLEQQPETTPHAMVRLLARVVGIGIETGDLLVHEVLSRPMRERRAVARYAGLTGAPDESGARRREQGLARAGNARVRRGMIQLAWRFLRFQKQSALTLWYRARTADSRIGTRKTMIVALARKLVIALWRFVTTGEPLDGVVLRPAA

SEQ ID NO: 161228 - protein, 454 aa, unidentified
MTVPKPQRLRIDHLPTVFPNAAGLDIGSAEIVAALPPDRAATPVRTFTTFTTDLKQLVTWLLDHHIDTVAMESTGVYWIPIYEMLEAAAIHVYLVNARHFKIVPGRKSDYNDAQWLQKLHALGLLTGSFRPDDEMCVLRSLLRHRAQLIEHRSPHVLHMQKALKLMNIQLPEVLSDVTGVTGMAILRAIVAGERRGDVLAKFRRPGCRRTEEDIVQALTGTWRDEHLFVLAQSLDLYDFYSRKVTDCDHRLDQQFSSMKPRFDVEGEPPAPPASRTKKNSNSKNQPTYNVRAHLVRVIGIDLVDVIGISESVAQTVISEIGTDLSRFPTSKHFCSWLGLAPHNDISGGKVLRSRVMKVHNRAGQALRHAAQACSRSRSLFGAFYRARSARSSSQEAVVATAHKIARVIYHMLTSHEAFKPESIQAFDQKRQERDLKHLQKRAKALGFILQPLAP

SEQ ID NO: 161229 - protein, 322 aa, unidentified
MGYIGIDVSKATFVVAYSADKGGKIRTFDNTTAGIKQFIGTLPKDGSIHCVMEATGNYSALLLYMLNVAGITVSMENPLKIKNFAKAMLSTVKTDKSDARLIALYGEKMNPQPFKMQGEAILRLRQKRTVIRQLTKQITAMSNLRGSLVCLPVPDKGATHTVDETIKFLEKRRDRLQSELTDLVEVEFSRQLALLTTIKGIGITLATALIITTGGFTYFQNAKQVSRYLGICPTYEQSGTSVNIKGHINRNGDAYTRGLLYIAAWPASRFNAQCKETYTRLRQNGKSGKLAMIAVANKLIRQAFAVVAHDKEYVDGFVSNRP

SEQ ID NO: 161230 - protein, 423 aa, unidentified
MEVMHERCAGLDVHKAMIVACVRIMAGGKVGRECRTFETTTAGLLALLAWLRESGCRHVAMEATGVYWKPVWNILSDGAFELMVANAAHIKNVPGRKTDVNDAMWIADLVACGLIKASFVPEEPIQELRSLLRARKQLTREQTSHIQRIQKTLEEANIKLDSVISDILGLSGRRMIEAMIAGVRNPFKLAELADRRIKASPKALYDALHGRLTDHHRFLLRLYLGQYDTLDAAIVALDQQVDASVTRMDKEAKAGQATFRSLIILLCTIPGIGALAATTILAEIGRDMSRFPTAGHLVAWAGLCPGQNESAGKRKASRLRKGAPWLKTMLVQCAWAASRKKNSYYKAQFNRLRSKRGPKKAICAVAASLLTAIYHMLKDGTEHHDLGADHFDHRSTAVKANRLVAQLVKLGFQVELHPLAEAA

SEQ ID NO: 161231 - protein, 339 aa, unidentified
MKYTPVGVDIAKHLIQVHFINEHTGEVVDKQLRSRDFLTFFSNREPCLIGMEACGGSQHWARELTKLGHKVRLLQARFVKAFVMGNKNDVMDARAIWMAVQQPGKEIAVKTEEQQSVLVLHRTRRQLVKFRTAQINSLHGTLLEFGESIHKGRAAMGREFPEALERMKERLPQYLITVLENQYNRLSELDSLIDDIEKQLTSVARQNETCKRLLGIPGIGPLIATAAVATMGEASAFKSGREFAAYVGLVPKQTGSGGKIRLLGISKRGDTYLRTLFIHGARAAALLTREPSPWITELKKRRPASVAIVAMANKLARTVWAIAAYGRKYDKNHVSIRPY

SEQ ID NO: 161232 - protein, 428 aa, unidentified
MSENSTTHPEPEFVAFVGIDWADQKHAWCSQRAGATQREHGEVEHTPEMVEVWVSQLAQRFGPGPIAVAVEQRKGALVYMLSKYECLHQFPVPSTMSASMRKSLYPSGSKDDPRDAELLLDLLLQHRNKLRRLMPDDEVTRRIQNLVEERRTLVDEKTTQLNRLTGYLKVYFPQMLEWFEKLDTKLVCDLLERWPSLEELQKVPPAELRKFFGQHRGRHQELTERRLEGIGQALPAIRDRAVLEAKRAMVQVSAQLLRILLEGIANLDSKIEEAASAHPDFFIFESLPGAGSALAPRLLAAFGSQRDRYGSAEEVQTHSGIAPVMEKSGKKKWVHFRWACPKFLRQSFHEWAGHSISQSTWARAYYQQQRGRGKDHQAAVRALAFKWIRILFRCWQDRVAYDENKYLAALARRGSPLSTVLTVTAATL

SEQ ID NO: 161233 - protein, 339 aa, unidentified
MAILYVGIDLAKNVFAIHGVDEHGKAVLMRPSVPRARLHQLVAALPPCTIGMEACSGAHHWARLFAQHGHTVRLMAPKFVAPYRMSGRRGKNDAADAQAICEAVQRPNMRFVPIKSEDEQARLCVHRVRQGWVEQRTATINRIRGLLSEFGIVLPQKAATVRREAAAHLEDLPGWANTAVGDSLSELHRLDERIAEYDHHVVLMAREDDRSRALMQLSGIGSTTASALVSTIGNARDFKNGRQLAAWLGLVPGQYSSGGKTRLGSITKAGDGYLRTLLVLGAKAVLAAARNKDDRLSRWAMALEVRRGYWKAVIAIAAKNARMAWAVLAKGESFKPLEA

SEQ ID NO: 161234 - protein, 356 aa, unidentified
MQIMNEGARRIIGGVDAHADTHHAAVLDEHGRLLGTRSFAASGSGYRQLLGWLRAFGEIDRVGVESTGSYAAALTHHLVANEVRVCEVNQPHPHTRRRRGKTDAIDAELAARHVLSGASTVTPKATTGIVEAIRQLRVARESAMKSRSTAMVQVGDLILTAPSELREELAALKTLNAKTARCQRLRPDSTGLDDPFDAAKFALRSLARRIALLDAEIAELDAHLTALVATAAPRTTELLGVSTGHAGQLLVTAGQNIDRLRGEGAFAALCGASPIPVASGKRGRHRLNPGGDRQANRALHMIAVCRLRYCPKTRAYADRRTTEGKTKKEIMRCLKRYIAREVYATLREDLRSLSVR

SEQ ID NO: 161235 - protein, 430 aa, unidentified
MEIVYPRACGVDVHKSFIVAVICISESIKPRYIKKRFSTFNNQLIQFRDWLIENNCHNVCMESTGKYYIPVYNALEGHIPNVVVANPKWVKAIKGEKDDNKDAKWIADLFKFGIVRSSYIPEKDIRILREFTRYQYKLVNIRSSEKNRFQNALTVGNCKLDLVFTDVFGKSASSIVDTILSDEPYTSEDILSKVHGRCKASSDDILSAVEGTNLNQYQKARIKIVQKHMEYVDSLLDEVQHHIDMMVESYENYIQLLMTIPGVNRKSAIIIISELGIDVSQWSSARKLAAWAGLAPGHNESAGKKKSVKISKAGIYLKPCLVQVAHAAVKDKTCSYYAEKFGRISKRRGKKRAIIAIARKILVAIYHILKTGEVFNPSDMADVETTKEQRIAYITNNFRNAFNQLSRTGLSEEEILSIIIKKSNNSPQTE

SEQ ID NO: 161236 - protein, 377 aa, unidentified
MATTRTVLRDQLTAKPGDLYMSLELGDKHWHISIGGERRSVSHYIVEAGHTEEVADCIAKAAARLHTARVHSCYEAGRDGWWLHRWLTELGVDNIVVDPASIEVNRRARRAKTDRLDADKLLAMLVRHHSGERVWSVLREPSPSDEDARRAHRELQRLTHERIAHTNRISSLLVLHNLRPRIVIGGRDWPVWWNAHREQVPPTLRAELEREAVRLKVVKEQVRAIEAARARELAEGKQPLVAQLVRLRAIGAKGAWVLVKEVFGWRHFANRRELAGSLGLVPTPYASGDSEIEQGISKAGNRRVRALLVELAWSWSRLQPGSALTQWFNRRFAGAGKRMRRVGIVALARRLAIALWRYLQTGEIPIGARLKPAGSGI

SEQ ID NO: 161237 - protein, 340 aa, unidentified
MQVTTIGVDLAKNVFQVHGITGTEEVVFNKPLRRAQFLTFFAKLEPCLIGMESCSSAHHWARELTELGHEVRLIPPMYVKPYVKRGKSDAIDAEAICEAVTRPTMRFVAIKTVEQQSLLSLHRARDLLVRQRTQLVNNLRGLVAEFGIFIPRGLARVIGFAENITLGEVLDLPDIANEVIHNLCEQLMALHKRVRWYEDRVKQVAKEDVRVRLLRTIPGVGAVTASAIIASIGDGHQFRNGREFAAWLGLTPANKSSGGKEKLGRITKMGDQYLRSLLVVGMTSLVRQTRSHPERANKWLTSLLERKAARVATVAMANKTARIVWAVLTRNEPYSPRAAV

SEQ ID NO: 161238 - protein, 344 aa, unidentified
MTIINYIGFDIHKKVISFCEKMIDGEIVEQGMISATRDSLSELVRSRKVPWVGAMEATLFTGWIYDYLLPFAQELKVAHPQMLKAITASKKKNDASDAEKIADLLRCNLLPECYMAPSEYRDLRRILRYRNLLVREAIKMKNKTAGLLMEVGATYSKKRLYGKKYFNELLGTLDYIPDSVVDLLKITRSNLEIFTRLQKSLIAGLIADPQLKKRVELLMTIPGIGEITALTWALEVGEVQRFGRISQAVSYCGLCSAQNESAGKNKRGPISKKRNKHLQTVLIEAAKLAPRWNPELAIIHERELSKGNRNRATLVLARKLVAYLLAVDKNQKKFIPKEVLREAA

SEQ ID NO: 161239 - protein, 346 aa, unidentified
MEHYAGIDVSLELSSVCVVDAQGKIVKEAKVASEPEAVVAFFEALGFAVKRIGLEAGPLSHWLHAGLKEAGFETVLLETRHVKAALSAMTVKTDRKDARGLAQLLRMGWFQPVHAKSMASQEVRALLVGRKQLLGRLIDVELSIRGILRGFGLKVGSVTRKGFEARIRELVTGQATLERIAEAMLSARAALKAEYEKLHKAVLAIVREDPVCRRLMTVPSVGPLVAITYKSAMDDPSRIAKSKAAGALFGLTPKKYQSGEKDVTGGITRTGDEMVRTALYEAANVLLSRITRFSKLKRWGMDVAKRRGSKRAKVALARKIAVILHRIWIDGTTYRWAEAKPIAAQA

SEQ ID NO: 161240 - protein, 363 aa, unidentified
MYDSTTVTVGLDVHVRSIRFAAIRGDELLDERTLPYDQEAVERALRRWPQVRCCYEAGPTGFGLYRHLSESGIACQVVAPGLVPTRPGDRVKTDPRDARKLARLLAGGLLEPIWVPSPQLEAARDLVRAREDARLDRMRDRHRLSKFCLRHGRRLPWASWGVARRKWLSEQRFDFPAQQHTFDTYLHTVDLVDRRIEELERSIREAAEQEPWGELVARLRCLRGIDTLSALGIAVEIGDFSRFRSAEEFMAFVGLVPSEHSSGERRSRGSITKVSNAHVRRLLVEAAWHARRRPTLGYQRARRQRGQDAVVVERAWRCQQRLHPRWLRMAAYGKPSQKIVVACARELAGFVWAIATEQPLRSA

SEQ ID NO: 161241 - protein, 358 aa, unidentified
MQRNKKTLKGQNIYIGIDVHKKNWQVAVITESGYTERLSTAADAKALFKFLKSHYPDGNYRAVYESGFSGFATYYALSELGVSCVVAHAADIPSSQYELTMKSDRIDAEKLARALRAGLVRGIYVRPKDNLDDRGVLRIRKTIQIQVGGYKTRIKHLLHSNGVELPERFSRSGTHWSRAFIAWLREDVRLLSDTRRSLDLLLLQVETLRANLLEATRGVRALSMTDRYREDCALLMGIPGIGLTVAMTILTEVCDIGRFGNERQFASYLGLVPTSHSSGERVSHGEMTFRGNKHIGPLLVEASWVLIVRDRELGRMYTEYRWRMAGQKAIIKIARKLSNIIFAVLKTRKAYEPYRRDA

SEQ ID NO: 161242 - protein, 365 aa, unidentified
MDSVTAAAEKIYLGMDTSIATIVVGVLRPGSEVPVVEAIPNDAESVRRLAGKFPDRRLLAACYEAGPGGYELHRLLVSMGVACDVVAPSLIPRGWRAGEDRRDAVHLALLHRAGLLTPVRVPSPEEEAIRDLVRTRADLADDRKRIMQRINALLTRHGRVWKTARWTADHRTWLERQSFAEPPLQAALRTYLAALDAREAELAVLERQLRDCWAGVEWLAPAVRRLGCYRGIAELTALTLAAEVTDFRRFGSARAFMGFTGLTPSEYSSGARTRRAGITKADPQLIRSARVGLGLPAPARDRGHAAAPPAGRLPADPRQILEGAAAAACHLHQTDPARQDSHGRGDRGRPRARRVRLGRDDQLNP

SEQ ID NO: 161243 - protein, 410 aa, unidentified
MRTLVERACGLDVHQAVIVACLLVGKAGGTVRKEVRRFASTTAGLLALRDWLTDAQCTHVGMESTGVYWRPVHAILEDDFVVVVGNAQRIKNVPGRKTDVKDAEWIADLVRHGLIPPSFVPPRPLRILRDLMRFRRSLVEARSNCRNRILKVLESANIKLASVASDVFGVSGTAMLEALVEGTKTPAEIADLARGRLRKKLVQLELALHGSLGDDHRFMLDQLLRSLEQEDQRITVAEDRIAAKLEPYQQEHRLLMTIPGIDWAVAATMIAEHGVDMAAFGTSTRLSAWSGVAPGNNESAGKHRRTGARKGNRHLKTALYTAAVSAGRTKDTYLCDKYHRIRARGGPGRAAGAVAHKIVIAAFHILNTGKPYQDLGGDYLDKRTQRRTKHRLVCRLERMGYHVTLEPVAA

SEQ ID NO: 161244 - protein, 387 aa, unidentified
MPAATSVSERPAVIRVDLGAIFVSMELSRSKWLITSLSPGGGEKMSKHVIAGGDLAGLLDLFAALQAKAQARTGHSYRTIVIQEAGLDGFWIHRALEKEGIESHVVDPASITTSRRKKRAKTDRIDGEALVRALLAYKRGEPRVCSMVRPPSPEEEDRRRLVRERKALITERVRHSNRIKGLLFAQGISKYEPLRRDRRARLAALRTGDGRELPVHLKAQISRELDRFELLLEQLKAVEAERDALLAQEQVDAKAPAGLLLKLKGIGPEFAAILWSEGLFRHYDNRRQVAAYAGLAPTPWQSGQIDREQGVSKAGNPRLRVALIQLSWLWLRHQSQSALARWFEARVARNGGRLRKSTIVALARKLLVALWKYVNAGVAIEGAVFAS

SEQ ID NO: 161245 - protein, 321 aa, unidentified
MDSDGRVVLRKKVRRDKLLTVFGTLPGCLVGMEACATSHHWARELERLGHQVKLMPPAYVKAYVKRNKNDAADAEAICEAVTRPNMRFVAIKSANAQSILMLHRARQLLVRQRTAQVSALRAHLAEYGIIAPKGRTHVRDLIKVLGQQDAPLPELARQTLLLIAEMIDGLSQQIRRIEMELLAWHRTHPVCQRLETIPGIGFITATALVATINDATVFRSGRQFAAWLGLVPKQNSSGGKERMGGISKMGDRYLRHLLVVGATAVVRYTRRKATTVSRWANQLLERKPARLVTVAVANKVARIVWAVMTRDETYRLEPVGA

SEQ ID NO: 161246 - protein, 431 aa, unidentified
MDTQQFEVIRPKCAGLDVHKKSVVAAVCTSDPVTLTASYKTKVFNTTNSDISALRDWLLAQDCRDVCMESTGKYWIPIFNILEPHMHVILTHPKYVKAIKGKKTDKRDAKWIANLFRFDIVKASFIPPADIRALRELSRYRLKLSYMRTAEKNRYQNSMTISRIRIDCALTDPFGLSATRIMDYLLSGEPFDEEKCRSLIDRRVKASKDEVMDTIHGYHILEEQKFKMTHAKAHMDFINKSIDEIEAELFLRSRQYDVQVKRIATVTGITELSALFILSEIGADMSIFESDRHLCSWAGLTPANNESANKKKSTRCSKAGQYLKPLLIQCALAAVKSKKEPYFAIKYQRLSKRRGKKKAIIAIARMMLTSIYHMLSDNEDFHPDDYEATINPPKQKPVVLTLDNTLQFLREQGADPETLKLIQQQCVAQVG

SEQ ID NO: 161247 - protein, 415 aa, unidentified
MFKIIRSKCCGLDVHKTWIYACIGIADQSSRVEYKQARFSSFAKGLKQLSEWLAKYECTEVCMESSGKYWIPVFNILETTCDVTLAHPKYTKPQKGNKTDRKDAMWICDLFMCGMIKRSFIPPADIRELRELVRYRTKLTNMITGEKNRALNCLTVSNLKLDDVFSDVFGKSSSSIIQYMLDNPGVYFDVTPFIDPRCKTPVEEIQAAVDGAMSPAHAVKLRECMSHIDQLESHKDMVEQDILRLAAPYERELELIHTVPGFGKNTFTAITILSEIGADMSVFPSAKHLVSWAGCCPRNDQSAQKIKSTRISRAGTCIKPLLVQVANALIKSKHHPEFSERYRRLKARRGHKKAIIAICRMLLTAIWNVLSKAEPYSPVGYLSDHQVTEVRRLTQKQALNLLKSRGYVITDEESA

SEQ ID NO: 161248 - protein, 380 aa, unidentified
MNTTTVGIDLAKSIFAVCEGDSRGHGSRSSILKSGEFLKWLRTLPTGTVVAMEACSSAHSWGRTMQALGLEPRLIAAEFVRPYRKNQRIKNDTRDAEAVLTALHAPGMRFVTIKTEDQQQRLAWHRLREGWKAERTALFNRIRGLLTEFGIVVELGAAKIRRKLAELESDTAYPQSIQLMAQSVRAQIGILDQRLAECERQIARQSKSDPAVARLRSRPGIGPLTADAIVATVGNARQFKNGRQFAASLGITPRQHGSGGKTHLGAITRRGDSYLRCLLVQGARCVLQAALRLHKNKPNTLNRLQLWMITLNERVGYHKAAVAIANKHARQVWAMITRGEAYNADAYKDWEAAHATVRPGDIQEASDYDLSTAALAAASV

SEQ ID NO: 161249 - protein, 476 aa, unidentified
MTNIWIGIDISKGHMDVTALDDAGRTVFSGKYFDTALGHEALSRIIDDSLTSISPIPAVHIGMESSGGYERNWARWAKGVEARLAFLTQVKVYVLNPLAVKRYLARELHRTTTDAHSAHGIAEYLAHGMRLADTPYMAELEGAISYYRAIRSMIARSASMATELAAILVRTHPELVQYCRSGIPPWVLTLLARYPTSAQLARARAATLAQIPSLTQARATAIVAAAKKSVASLSDPYTQLCIETMVADLQQARERIAAEKRRVIELFGEDPVVRLLSSIPGIGTWSAICLRLELGTIERFHSSAALISYTGLDPVVAQSGDITTHRGISKRGKSRIRAILYMCANAAVQSNPVVQALYARLEERGKKPMVRVVACMRKLVELVYACWISGTPFDPTHWERHCERVREMRERAEKRVEAVPVHVSPQELKETLSAPLSRREANKRKATAVPQRSLERLVRGPGAASRVGDEQGGIEI

SEQ ID NO: 161250 - protein, 342 aa, unidentified
MFYAALDVSLRSVAVCIIDDDGKVRLERSVPSDVPDLVRCLNEFGQPIHQVGLEAGTLTQHLTYGLREAGFEVVCMEARQVAAALSAMRNKTDKHDARGIAQILRSGWYSRVHVKSVESHHLRALLTSRKVMQRKCIDLENEIRGLLKVFGVKLPMRLSRGAFDVAVRDTIESDPALSHALLPMLHARQMLFATFMELDRRVRKAAQEDAVCARFMGVPGVGEITALSFKAAVDDPGRFKSSRTVGAHFGLTPRRFQSGEKDNPGRISHAGDSDVRATLYAAANAMLMRSIKWSTLKAWGMQLMKTKGRRRAIVAVARKIAVVLHRMWVDGTEFRLGSEAAA

SEQ ID NO: 161251 - protein, 351 aa, unidentified
MMIIGVDYHPSFQTIAFLMEETGECGDQELNHSDGQAEKFYRDLKERGISVPVGMEATGYSRWFERLLAELGVEVWMGDPAEIKAKRVKKQKFDREDARLLRRLMLENNFPQIWVPGPENRDLRQLLWHRHRLVQMRTRIMNQLQALAMNEGYRWKKKLFSEQGRAQLEKLALAPWASRRRQELLELLDRMNPTIEELTAAVEREARKRPEAMRLMTHPGVSPLTALAYVLIIGTPTRFQRGKQIGTYVGMIPCEDSSARKQRLGHISKQGNSLLRFLLVEAAQAAARIHPDWRRRYIHLAMRRHKSIAKVAMGRRLAVRLYWMWRNGCEYSPSLEFGSYAGQLGTGHGVK

SEQ ID NO: 161252 - protein, 411 aa, unidentified
MNNTLFVGIDISKRSNVATFMNCEGKVVGRLAFSNNGSGADRLVAKILSYYEKEDFEEIRIGMENTSVYSKNLVWFLYEHEALNEHKLSIIPLNAIMVANYKKSFLDMDKDDITDSFAIADFIRIRPGLLPFKLDDRQEALKIMTRSRYNYVQALSRMKSQFLTRLFLSFSEMEAGKPFYSIFSKTSLSLLEEEFTLDELAEKPIPELVEFLQEKGGGKFQNPEEIAKVLKKAASSSYRVPAMVRESLNRTMASDMEIMRILENEIHNCDKNIEKLMKSVPAILVSIPGIGPVLAAGIMSEIGDISRFQKQESLGKMAGFKWKRNQSGKKESENKAAVLSGNKKLRYYLVEAANRVRIHDPVFEAYYRKKYAESKTHAHKRALILTARKLVRVIFYLLKENKLYKPDVGIS

SEQ ID NO: 161253 - protein, 339 aa, unidentified
MHVTTVGLDLAKHVFQVHGIDQDGQVLIRRQLRRGELIGFFRRLPPCLIGMEACSTAHFWARELAALGHEVRLMPAAYVKPYIKRGKSDALDAAGICEAVTRPTMRYVAIKSPEQQAVLMLHRTRELLVRQRTMLVNALRGHLAEYGIIAPQGLPSVPKLREVAEKARGAAVPELAWRCIRLIIAQLEEAHVRIHGVEQEILIWHRTNEVSQRLETIPGVGIITASALAATITDPNSFRSGRHLAAWIGLVPRQSGTGGKVRLGHISKQGDRYLRRLLVLGATTLLRHARGKASVSAGWINALLARRPAGIVKIAIANKLARVAWAVLQGNQGYRAPTA

SEQ ID NO: 161254 - protein, 427 aa, unidentified
MNYNQNHKIAQITESTLIVGIDIAKDKHVARAQDYRGIEFGKRLIFENRIHGYQKLLDWVARLQEKNQKTHVMFGVEPTGHFWKSLAYYLNAKGYDFVLVNPMHVKKSKELDDNSPTKNDTKDARVIAQMVKDGRYSVPNLLDGVYAELREGIKLRDQLTKQLMIVEGRIQNAIQRYFPEFDDVFNDWNGKTAICTLREFPFPSDIQDMTPEDVLSTWKTVVKSGVGIKRANQLVQAAQKSIGVQIGLRFARQELQTLLDQYELYNQQLVSLDKEIETLITDLPGAKEMMAIKGIGPTTVATFFAEVGDLSNYSHPQQIVSMAGLSLKEHSSGKFKGQTRIDKRGRKRLRRAIYLAVRPLVAHNSTFKTLHHYYTTRPDRPLKKQQSLIALCGKLIRVLFAIGTKQCEFDGSKLLQGLPELQTSQVA

SEQ ID NO: 161255 - protein, 375 aa, unidentified
MSEITRALIARVGVDLAKQVIQVHAVDASGRRVVARAFKRDQFLAWCAQLPAGCLVAMEACSSAHHWVRKLRALGLDARLIAAHFVSPYRMEGKNGKNDATDAAAICEAASRPCMRFVPVKTCEQQGVMSLHRVREGLKEERTACINRVRGVLTEFGLVFGKSPKVLRAVLSDVIEDAGNELSTTARLVLRRAFDHWRELDEHLRWCDRQVGQHVRASPQAKRAVKVFGIGELGASALTAGVGDFKQFTSGHQFGAWLGLVPRQDSSGSKTRLGRITKRGDDYLRTLLIQGAKAAVMTAERRDDPTSRWLAQLTARVGWQKACVAMANKNARILWAVMTREEGFDPKHISFKPPAKQSAAQRAAAAPHSLATCAA

SEQ ID NO: 161256 - protein, 343 aa, unidentified
MSEITVVGLDLAKRVFQVHGADREERPVLRKRLQRGQVLDFFANLSPCLIGLEACAGSHYWGRELKALGHDVRLIPPQYVKPYVKTNKNDATDAEAICEALTRPTMRFTALKSVEQQSVLLLHRTRELLVRQRTMLINALRGHCGEFGIIAAQGLSRAGELIKLVDDPADNRLPDLARQVLQCLTSQIRSIQGEIASIEKKLLAWHTSCAASRRLAEIPGVGLITATAVVASVGNANQFRSARQFAAWLGLVPQQRSSGGKERLGRISKRGDGYIRRLLVHGARAHLSWSRRKKQIRSAWLTGLLVRRPTNVVLLAMANKTARIAWAMLSRGERYQERVAAAA

SEQ ID NO: 161257 - protein, 337 aa, unidentified
MRYIGVDLHTTQITVCYLMETDKASTKTYSLEKISEFIEELTETDSVAVEATTNTNWFVSQIENQVAKVVIVEPRSFEVIRRSVKKTDERDALALARFLRAGLLPGARRRSLEQETVQSLANTREKLVGLKTKLINQIHALLVRSGRKEKRERLTSQKGFRQVIEKYSWTEVERIELEVIGEQLTALAEGIKKLDEAIQKAGERLEGFENLSSIKGIGAKSAAVLLSVIGRVEDFASEGRLASYFGIVPRVRNSNETVHHGRITKQGSRMGRATLVQCALVAIRYSPYLKKFYEAIKQRRGAGKAIIAVARKFLGIIYHTLKNKWVFEDFPNFVLAE

SEQ ID NO: 161258 - protein, 406 aa, unidentified
MEVVYERCCGLDIHKASITACVNVNGKKEILTFGTMTDDLLRLTALLKEHCVQMTAMESTGSFWKPIFNILEVEGIEAILVNAAHIKAVPGRKTDVKDAEWIADLLRHGLLKASFVKPRDQRELCELIRYRGSLIEERAREYNRLGKVLEGANIKLTSVASSISTVSGMNMVRAMSEGVIDPELLASMAKGTMRSKQDDLKRALNGLIQPHQQMILKAMLSHIDHLGESISTLDSEIEARMSQDVELVETLDEITGVGKVSAQVILSEIGTDMSRFPSADHLSSWACMSPGNNESAGKKKSGHTQKSNSMLKKTLVQCGRAAANSKGTYLNSQYHRIAARRGGKRAVVAVGHSILVICYHLIKNRTRYNDLGADFFQNRNKEAIVRQSVKRLEALGFTVSLEEEVA

SEQ ID NO: 161259 - protein, 371 aa, unidentified
MSELPAETRPARLRVEASPRPLGARKPETELGAVSTTAVPHPDSRSGPSPHLQGRVMDEQRAVFVGIDVSKDRLDVHLRPSGEAFCVPREGKGMDDLVIRLQGLSVALVVLEATGGFEATVAAALAGVGLPLCVVNPRQIRDFARAMGRLAKTDTLDAEVIALFAERVRPQARPLREPERVHLAELVGRRRQIIEMIGMETNRGRQAIDKPLARRLARHVAYLQKELDAIDHDIGDAIKHSPAWREAEALLKSVPCIGDVTARTLLAELPELGTVSRHQVAALVGVAPINRDSGLMRGRRAIAGGRTSVRAVLYMAALTAIRRRSPFRAFYDQLTAHGRPKKVALVAVMRKLLTILNAILRDHTPWRPLNA

SEQ ID NO: 161260 - protein, 346 aa, unidentified
MQNDTLVAVDIAKEVFELGGSERPGRVAWRRRLDRCRFLEFFAQLPPATVVMEACGSAHYWARRIEELGHVVVLLPPQYVRPYVVKNKTDRTDVDGLLEAFRNQQIRPVPIKTVTQQVIGTLHRLRSGWLADRTRAINSLRGLLRELGFFIPEGRKHVLPDAWEIIQDSTRGLPEALKPSLSSLCQEIVSLSTRIEEIEAQLEALAKQIPAVARLRTVPGIGLLTATALYAFVGDISRFPSGRHMASFIGLTPREYSSGLRRRLGRISKRGDVYLRMLLIHGARSVLWHAKRMKNRDRLRAWALRLEHKLGHNKAAVALANKLARITWAVWKNDRSFEPVPELQAA

SEQ ID NO: 161261 - protein, 402 aa, unidentified
MNCVGIDVSKGKSMIAVMRPFGEVVVSPFEVRHTANELSELAGLLKSLDGETRVVMESTGNYHAPVAWLLHDAGLYVSVVNAMLVHDYGNNSLRRAKTDKKDAVKLANYGLDHWLTLPRYIPEEDTRLMLKICYRQYQQYSKVQTMLKNNLISLLDTTFPDANRLFTSPPRADGSEKWVDFVATFWHCECVCGRSEKAFTTQYQKWCRKHGYNFSEDKALDIYASACRHFGVIPKTDTAKLLVEQAISQLQTTSSALAALKQEMQSLAASLPEYPVVMGMFGVGPTLGPQLLAEIGDVRRFHSKKALVAFAGIDAPPYQSGQIDVRSRSISKRGSASLRRTLFLVMSVILQHAPMNEPVYQFMNKKRSEGKPYRVYMMASANKFLRIYYASVKAYLESLEHD

SEQ ID NO: 161262 - protein, 347 aa, unidentified
MKRIAVDLAKSVYQVAESVRSGQVVQRKRLNREAFRRYIQEQAEPVEWVMEACGTAHYWGRLAQSLGHQVKLLHPRYVRPYRRRNKTDRNDCDAMLEAARCTDIHPVPVKSHEQQQLQQLHGLRETWNKSRTQRINLLRGLLREAGIDAPASSTAFIRAASELVEQPELEPLSRLLHIVLAEINLYEQCMAECEQQLKCWHADDEIVRKLDEVSGIGLLTASALTTAVGKPERFASGRQLSAWLGMTPREFSSGNSRKLGHISRQGNVYVRTLLIHGSRAALLAAQRCQARTPEKLTQLQRWAVESAARIGHNKAAVALANKLVRICWAVWCHERRFSGNWQSVKPA

SEQ ID NO: 161263 - protein, 343 aa, unidentified
MKLQVLGIDLGKTVFHLVGLDSTGRAVIRKRCSRTQLLAFTANLQVQLIGMEACSGAHFLGRALRKQGHEVRLMPAQYVKPYVQTNKSDYLDAEAIAEAVQRPRMRFVPIKTEDQLDLQALHRVRERWVMRRTAVVNQIRSLLLERGLTLPKGRSHLDEQLPRILEDAELNLSDSFRVLLAQLKLELEQLAARIEEMDQVIQKTAKENEACQRLTEIPGVGPVTATALIAAVGNGSTFKKGRNLSAWMGIVPGEYSTGGKQKLLGISKRGNKYLRRLFVQGARSVLQQRHKQTPGLSSWLAQLLGRTHQNVVVVALANKLVRMAWAVLCKNERYRAPVFAVTT

SEQ ID NO: 161264 - protein, 332 aa, unidentified
MKSAGIDVSAKTLAVVLSDGPTSGKAQEYANSASGHQALVKTLIGAEVERICLEATGAYHLDLALALEAAGLSLMVVNPKASKRFAEALATRNKTDAVDAGVLAQFAQRMPFEPWQRPDAVALELRAVARRLAALGEMRTMAKNQLHAANQSATTPAVVLDDLRLTITQCTTQIDTLRAWASQRIKDHEILAAIEALLVSIKGVASASAIQLMGELLVLPADMRAKQWVAQAGLDPRQNTSGTSVNKKPRLSKAGNRYLRLALYMPALCASRFEPPIKAYYQHLIEDRGLKKLQALCAVMRKLLHAIHGMLSTGTPFDGTRFYTLPEGATAT

SEQ ID NO: 161265 - protein, 297 aa, unidentified
MGVAIGVDTHRQTLAVCAVDEAGRSLAERVFANSSSGHRDMLRFVQALPAPRCTGIEGSGGLGAALCALLLAAGEGVREVPPALTYRERRHTRLPGKSDPADALAIARVVLREADLPQVRGPYDHRDLKLLVDYRDQLLAEQTRVRNRLHSDLQVLVPGYQGHVGELIRGGGIARARELLAGRQGIAVELTELRLARLEALAGEIAASKLRIEGLMADDHPALTSICGVGALTAARLLGETGDPGRFRSAAAFAMACGAAPIPASSGKTQRVRLNRRGNRQLNRALFTIALHAAAPA

SEQ ID NO: 161266 - protein, 373 aa, unidentified
MNNNTVYVGMDVHKDSFFLCCYTNEKEKAEFPQKADAHYSKVINYIEAMRFHYGDDALFICGYEAGCLGFTLYHQLTDHKVKCVILAPNTMLQQKGRKKIKTDKRDAALIARCLAHHDYSPVHIPTDQDEQTKEYIRMRNDHKTALKKIKQQILSFCLRHNYRFDGTKKHWTQALLKWLRSLKPEGLYEEILKEYLLTYDNLTDKLERLDKRIEELSADEAYHENIKKLSCFIGVKTVTALSILTEVGDFRRFSSARHFASYIGLTPGEDSSGDDKKRLGITKAGNRHVRTLLVEAAQHYGRGEIGYKSRVLKARQEGNAPEVIAYADKANERLRRRYYRMVLKNNKKSNVAKAAVARELACFIWGMLTSNEG

SEQ ID NO: 161267 - protein, 339 aa, unidentified
MKKVYAGIDLHSNNNVVVVTDEADKVAYRKRLRNELDAVLAALGPFADRLEGVVVESTYNWYWLVDGLMERGYRVHLANTGAIQQYSGLKYANDQSDARWLATLLRLDILPEGYIYPAAERPVRDLLRKRAHLVRQRTANVLSIENLFARNTGRCLSSAGVKRLTDAEVDEMLPNADLALAVKSSLAVARCLAGQIALLEKTVLSRMGLREAFKILLSVDGIGPVLGLTIMLEVGDISRFPTVGDFASYVRCVGSAHISNGKKKGKGNTKNGNKYLGWAFVEAAAFAVRYNDAIGRYYQRKRAKTHLMAAKKAVAHKLARACYHMLRDQAVFDAGKAFG

SEQ ID NO: 161268 - protein, 260 aa, unidentified
MHFKNVIGIDVSKATFDLALIKGEGFSTMKSADFENSRKGIIHLEEFIKMNGLKKNETLICMEHTGIYCRLLSQYLTEQQYHVWLEMPVQIICSLGLQRGKNDKVDARRIAEYAYQKRDQAALWEPPREVLQKIHDLLALRDRLCQARTMLNVPIQEYKQCGFDETADMVKQKCKSTLASLDKEIVKVEQEIEKMINNDDNLNKKYSLVKSVPGIGKITAMFLLYYTNEFKQYHNAKQLACYCGVAPFTHTSGRATRIKN

SEQ ID NO: 161269 - protein, 425 aa, unidentified
MTAREEVTPAATWVAIDIAKRAHAVLVEMPDGKQKRFRMNSTHGDYAGLVDLLRCCPAPVRVALEATGDYHRTLAYRLLREGFDVCLVSSIAGARYREAMFNSWDKNDPKDAGVILALLKQGITQRFVDPLIAGHHGLQELSKTHYQISLARTRLQHSLLTHYLPLYFPEIERYFHTTQAAWLAQFLLRFPTAASVRALPFEAFQREAWNIVGRKVNKRAWIRELYDAACTSVGLPIADDDVALETFRLQLRRYQQLIEQRDALVETARHLLQGRPDYESLCSLPGIGPVLALTILAEAGDLRRFAHHRQFLKYCGLDLAKCQSGQFRGQEKLSKRGNARLRFAFWFAATVAVRMRENSFREKYERYIQADPLNADRKRKALTAVAAKMARVAYSLVKHQASYRCYFETSLPRGSTPLCAAVGTS

SEQ ID NO: 161270 - protein, 402 aa, unidentified
MIFINCLGIDIGKSESVVAHYKDEVLVKEMVIQNNQNGYRYLKNYIKHLDSLFILFESTGIYSRGMKRFCEIHKIDYLEMNPLEAKFKTSSLRSWKTDKSDAHKLALLAFRMKDSKVQRQSEEIYFELRERARFHLEMEINQNRLKVELVETLHQTFPGLEKLFTNRYSKIALNIAKAFPHPDFVSTLTHDELVEKVLHSTDKGISVNKAHKYVQKLIEIQINSFPNVDKSSFLLQKVQYLCDKLLIGIEEMKEFDQEMIDLAKNTTEFENIISIPGIGELTAALLIGELGNIREFKTNKQLNAFVGIDIKRYQSGTSKSRDTINKRGNKKARRLLYLIIMNIIRGRNHYQSHIVDYYYKLREQPHGKTHKTAVIASINRLLKTIHYLIVNNKLYDYQKAPH

SEQ ID NO: 161271 - protein, 356 aa, unidentified
MLYLGIDQHARQLTVSLRGENGDVLLARQVSTEPDRVQAFFTQLTRDRLRDGESFVAVLEVCGFNDWLIRMLTDHRCHKVILIQPEDRKNRKTDRRDAAALSELLWANRERLLHGKPVRGLRQVEITDPADQENRRLTTLRKEAGVARARLINKVRWVLRRHNLPWGLPTKTFPTATAVAWLKGLVLPEVDRLEMDHLLADLEQADRRLKDLEQAIARRSAARPDVAVLSSMPGVGRGFTALSLACRVGRVERFPRAHRLANYWGLTPGCRNSGENDQRLGRITKAGSATARWLLAQLVHKVLRRDARLRDWFRRVKRRRGPTVARVAVMRKLATVIWHMLSKRKTYAECREPAAT

SEQ ID NO: 161272 - protein, 361 aa, unidentified
MSSMPQPAPSDPNEVVLGVDTHKDLHVAAVLTALGVLLGTRSFPTTAKGYRQLLTWARGFGPLHRAGVECTGSYGAALSRHLRSEVVTVIEVNRADRGNRRRRGKTDTIDAEAAARAVLSGRATAIAKSGDGQVEMLRMFKLAKSSAIKSRGQAINQLKAVLVRAEPALRESMTGLSNPALFRRCAELDHPAPCDPGGAATFTLRLLARRILELTGEIEELNTQITAAIDVRAPQLLQRYGVGPDTAAALLLAAGDNPDRLNSEASFAALCGVSPIEASSGKTHRRRLNRGGDRQANSALYTVTIARLRWDKRTQHYVQRRVAEGKTRREAIRCLKRYIAREIYQTITRTINSPPAARPAA

SEQ ID NO: 161273 - protein, 341 aa, unidentified
MDEYIGLDVSMKETAVSIRRAGERIWRGKCASDPSIVAELIRKRAPSVKRVVFETGPLSVWFYHSLRTEGLPAICIDARHAKAALDMATNKTDANDADGLAQLAEVGFFREVRVKGFDSMLTRTLVAARTRLVRITTELSNQIRGVMKTFGLLVPAGKGSTFEKNVRNLLADRDRLASIVLPMLEAWRGIRIRAAELGRQLVRDARQSRACRILMTIPGIGAITATSFTTAIEEPDNFRKSRSVGAWIGLTTRRYQSGEVDYDGHISRRGDRPLRGLLYEAAAVILTRCSTHSTLRTWGLQLRERIGFKRAAVAVARKLAVIMHTMLKTGQLFNPNAGAAA

SEQ ID NO: 161274 - protein, 387 aa, unidentified
MIYYVGIDISKYKHDFCIISNTGEVIVENSSFENNQKGFQSFLDQLKPYNKQDVRIAFEATGHYSMNLESFLTNQDYSFMKVNPLVVHQFLKARSLRRTKTDKADSFTMASYLMSIPYKPNSLLLYHTYSLKSLCRTREQLIKERSKFAVLLTNELDKSFPELKPFFNNKISVTLLFILNKYKNADHIALMKDYDSIRCVSKGRFTYSKFAQLREIAKNSVGYHDDNTDLLISTYISIYNDFNNKIDPIDKQISTIIKELNPSILSIPGIGDITAASIIAEYGDIYLFSSPAKMLAFAGLEPSIIQSGTLESNGKMVKPGSGHLRYVLMNASLTLLKHNPTFYDFYLKKRSEGKSHRVALSHVCKKFVRLIYTLETKHVDFNPSLLK

SEQ ID NO: 161275 - protein, 375 aa, unidentified
MKEKLRFLGMDVHAETIAAAIAEPGGEVRSLGTIPNRMESVRKLLKKLGPVEKLRVCYEAGPTGYVLYWQLAELGVQCEVIAPSLVPVKAGDRVKTDRRDAEKLARSYRSGDLTAVWVPDEGSEALRDLVRAREAAKQDELRARHRLGKFLLRSGQRPPSGVRAWTHLHLIWVSQLRFAQAAHESTRLDYLHEVEHMRERVLRLEQAIAVAVKLASPALQEVIADLQALRGIAHISAVTIAAELGQVSRFAGARELMGYCGAVPSENSSGKRTRRGGITKTGNAHLRRIVVEAAWSYHRPPAIWAGLRKRQQSASEEAKDIAWKAQHRLHKRYARLAATGKDKRKIVTAVGRELLGFIWAIGTQAEATVRQRIAA

SEQ ID NO: 161276 - protein, 427 aa, unidentified
MQYALPQVLPDVPAGGVCAGIDWATADHAVCVVDLAGRVTDRFPAAHDKAGIAAIITRLRRGKVTEVAIERGDGPLVDALLGAGMTVVVITSRQVKNLRSRFGAAGAKDDRFDAFVLADTLRTDRARLRPLVPGMPATISLRMAVRARRDLVAHRVAAGNQLRAHLAVAFPAGTRLFHDLDSPISLAFLARSGSQDAAAGLDEQAIGAWLATIAVRGRPAPASELHARLQAAPPGATGTDGAARAGVTAALTAALTALSAQIKSLETQIAGQLAAHPDGPIFTSLPRPGTVRAARLLAEIGDCRSRFPDPESLAGLAGVAPVTRRSGTRIAHGFRWAVNRQLRDAVCDFAAGSRHASPRAAAIYDDARARGKDHPLAVRITARAWIYVIWRCWHDGVAYDPAKHNALRAILAGQAAQAAGPAPQEDQ

SEQ ID NO: 161277 - protein, 416 aa, unidentified
MSDQKSVELRVSVDVGYWRHSVAIGLPDGEVLEEFEIAHRPEGFEQFFSRIEKHQKVRDCEVAVAMEGFNGCARPLDAMVRRRGYRLYNINNLKLARFKEIFPGAAKSDRIDARKGLELFQLSDHLPLAKEVLQEVKGTPRENEVLKRLTRRRRRLVDERVRVISNLQTDLQAVCPGLLEITKNAGNQWFLNFLVSAATLPQLARLRPATLLKISAVGRKYAVLIEDWQKRAHFSEEVEWVSEMIQEDAQRCLELDENIKALRAKIKEVAKDSKMAKILLSIPGFGTICTAELAGEIGTIERFSKEGSLALYLGMSTLDNSSGKHQGSKQPKHVNTRAKAAMMVALDRHRKYVPESQRYYEKKRSEGKKHNQAIRALGRHLSRIIYKMLTEEREYEMRPERGNTKSKVSPRSLIKT

SEQ ID NO: 161278 - protein, 314 aa, unidentified
MADPCSVGIDVSKGTLDVAWSTNPTARWQTTNDDVGWTALVAHVRALQPTIIVLEATGGYEIGAASALSTADLPVAIVNPRQVRDFAKAFGLLEKTDAIDAAVLAAFGARIRPTPRPLPDDLQADLQALVTRRRQLVDMLTAERNRVPLARGAVRRNVLAHIAWLEKQLAKTDRDLRTQIEASPIWRARDHLLQSVPGIGPATSARLLASLPELGTLSHRQISKLVGLAPMPDDSGRRRGYRRIQGGRGDVRSALYMATVTAITHNPTIRAAYRRWRAAGKLPKVALVAAMHKLLIHLNAMLRYQTHWHPPATA

SEQ ID NO: 161279 - protein, 439 aa, unidentified
MRGHDRGRFTDTPCTTHGEAVHVTEPASYTVYVGIDWATTSHEVCVLSPERAVVATRRVAHTAAGLDELVALLTTFGSATAVAIGIEMPRGALIEALLAHGYPVYAINPKQSDRFRDRHTVAGAKDDRLDAFVIADALRTDRPCFRRVQPDEATVLQIREYSRIDAELRDEQSRLTNRLREQLYRYFPQALTLCPAVDEPWVWALLAMASTPAAAARLRRPRLAACLKAHRIRRLTADEVHAALATRAMVESAGTIAAASAHVALLLPRLALVHAQQRTCAAALTHLLETLSAAHDTDPSAPTPSDVQILRSLPGVGLKTVAALFAEAADAIATRDLAALRAHAGIAPVTKRSGTRCVVVMRHACSGRLRTALYHASRVSAQCDAGAKQMYAALRARGHSHGRACRSVADRMLRILMAMLRTGTTYVTPTPAAPVMQPA

SEQ ID NO: 161280 - protein, 372 aa, unidentified
MDQHSRLFIGLDVSKLKISVAVADGERGGEVRFLGDIPSDPASVSSLVHKLAKRGAKLHFCYEAGPTGYELYRQLTEMGHDCVVAAPALIPKRPGDRVKTNRRDAVSLARLHRAGELTAVWVPDRGHEAMRDLVRAREAAQEAQKRARQQLQSFLLRHGRVYSGRSSWSLAHRRWLSTLRFEHPAHFIVLQEYCQAIEDAEARLKRLTDLIAETVKSWTMAPVVEAYQALRGVSLMAAVVLVAEIGDIRRFDNPRQLMAFLGLVPSESSTGEHVKRGGITKAGNSRARRMLVEGAWAYRFPARVSRTKQAQLEGLPRSVREIAWKGQLRLCSRYRTMILSGKHKAIAITAIAREMSAFLWAIGQEVQPAHHA

SEQ ID NO: 161281 - protein, 344 aa, unidentified
MECYVGLDVSLKQTSICVVNEKGLVVREGVVDSVPEAIAGFVRSRAPGAVRVGLETGPTATWLWTELARLDLPVICIDARHAKAVLKMQVNKNDRNDAAGIARIMQTGWFKEVHVKDLDSHAVKALLASRALLVKIKRDLENQVRGLLKNLGLVVGRGTFNVFAVRAKELIADRPELTSAVSPLLTARTAIEQQIGELDRQVLKLSRQDAQARRFMTVPGIGPITALCFKATIDDPARFRRSRSVGAYIGLTTRRHASGELDWSGRISKRGDAMLRMYLFEAAGVLLTRVPKWSALKAWGTRLTKRNGLRKAKVAVARKLAVILHRMWVDGTEFNWSNNKEVAA

SEQ ID NO: 161282 - protein, 376 aa, unidentified
MSKVLFVGLDVHAETIAVAVAETGGEVRSIGVVPNRLESIRKLVHKLGPVQHLRACYEAGPTGYVLYWQLTQLGVACEVIAPSLVPTKAGDRVKTDRRDAEKLARCYRAGELTAVWVPDASHEALRDLVRAREAAKKDQLKARHRLGKFLLRHGRRPEGLKAWTKQYVEWIKSHVHFDQPALEATLADYLEEVDHVAARIVKLEKAIDEAVRQSPPEIRAVIEALQALRGVAQTTAATIVSELGSLARFPNPRQLMGYSGLVASEHSSGNRVQRGGITKTGNGHLRRVLVEAAWAYQHRPNVTGFLLRRQKNLDLSEEVKKIAWKAQQRLHKRYQALAARDKNKNQIVTAVGRELLGFIWAIAIEAEKQHKLAKAA

SEQ ID NO: 161283 - protein, 369 aa, unidentified
MPHVTSIGLDVHARSVAAAAFNPFTGEVVHRDFGTDAAEIAEWALGFEEPRACYESGPTGFHMARELRALGLDCAVAAVSKMQRPAADARRKNDRRDAEFIARMLATHNIVEVPLPDAAVEAARDLDRALDDATVEYRRARQRLNMFLIRLGHVWDERNADGTRKGSWTRAHWRWISGIRLEGPQRDVLEYYVTAARCAESDRRQLEKKVLALARTDRWRPAVEALSCIKGIDTLTAFRLAAEAGSFTRFRTAPAFASWCGLVPSERSSGETERRGGITKTGNRLARTALVESAWHYLTCTPRPKAPAPGADVPAAIRARADDCTARLCRRREALAAAGKSSCKANAAVARELACWVWEIGRRAEGTLG

SEQ ID NO: 161284 - protein, 449 aa, unidentified
MGNKPKTVFQEIRRNVAGIDLAWRADHYVCGPRLDNGENEIVSFGTTTPELYRMLKWLQERKIESVAIESTSVYWIPTADLLESNGIEVVLVDARVVRMVPGRKSDIQDCQWLQQLHSYGLLRGAFRPPEAVAAIRSILREKDTMTAMRVQSIQQMQKSLDQMNIRVHHAVSDIDGKTGTAIIKAIVEGERDPIKLARLRDKRCKQSEKEIADHLTGTWREEHLFNLSQAFKTMQFLDERIVEYDLMAVNMFKTLVGSVDDSDNPPPSPIAPPKQSSKDQTNVAVLKKMMGFDLTLIPGIGLATASIIASELGTRFDCFPTEHHFASYLGLVPSLGKSAGKNVRQKRCKNTSRAGTALRMAAAALYRSKTELGAYFRNVAKRSDRKTAVKATARRMAHMIYRGVRYGKEFIDRGAEAYEARLKEKVEKTVKKLIKTYNINVSELLVSYV

SEQ ID NO: 161285 - protein, 312 aa, unidentified
MPTNHPAYVAIDIAKDSLQIQTDHATWSVPHTAAGHRQLLERLQPLGPVHVVCEASGGYEQPLLLFLHQQGVPVSLVNPARVRAFARSEGQHAKTDPLDAALLLRFAHEKRPLPTPPPAPQQAALAAWLDRRAQLSEQLAREKNRLQKSPALLHPGIRAMIAFIEDQLAEVDAQLHRVVQADATLRERAAVLQSVTGIGAVTTWSLLAYLSEIAATDWHRNQLVALAGLAPWNRDSGKWKGKRSISGGRAKVRRCLYMAAQSAAQHNPVIREYVQRLIARGKPYKCAIVAAMRKLLIHLQSLLKHHQNALAS

SEQ ID NO: 161286 - protein, 385 aa, unidentified
MTNTQYHSTIVPRDYDIFIGLDVDKKRMAVTCVDHGTLQKSLSLPYSGKQLLNYTAKHFPGQRVAFVYEAGPTGFGLHDELSAAQHPCLVVTPAMVPSAPRKRVKTNRLDSKKLALGLRGGDLQGIHVPTQSYRELRQLVQLRDTQAAQVRATKCRVKSLLLFEGIPFPEPHEKWTVAALQGLATLPCNATVRFKLDQLMEALQFHYQMAAKVQKEVRRFCNQDSELRQSVELLRTIPGVGTITATHAIARLGDWRLIKNERQIAGFLGLVSSEHSTGEKEKRGEITRIGDQRLRNKLIQCAWTAIKKDPELRAFYRRIYARHPPKVAARKAIVAVARKLTTRLYAVLKKQRPYEIRADLATAPLTVEETVGLRERLDIAQNDEL

SEQ ID NO: 161287 - protein, 388 aa, unidentified
MYYCGIDVAKRKHSAMVLNEQAETVQQNFTFRNDRAGFEKLLSKLAPFSGQAVVALEATGHYWLSLYEYLSKADYPVVVLNPLQVHAYQRSGVRKRKNDRIDAFWIADYARISNRSATVQSAPQLMQLRELTRFRFRLRENTGDIKRKLLAILDRVFPEYESLFSNVFLATSKQLLAQAVTAQEFADFDLGELTELLARASRGRFGAEKAQEIVQKAQSSIGLSLFADSARVQIQCLLAQLALLEEQCQQIDLEIEKIMTSIDQYITSIPGVGAVTGAALLAEIGDIQRFEAPEKLVAYAGIDATVYQSGDFEASEAHMSKRGSPFLRVAIWQAASMAAMYDPQLKQYYERKKAEGKHHGTVIGAVARKLLIRIFIILKENRPYEIRY

SEQ ID NO: 161288 - protein, 426 aa, unidentified
MTNTHSIPDNAVLVAIDIAKARNDVLIEIPGHKRRRRLIIRNTRAEHDRFVDLLRSFDRPVVAGFEATGNYHRAVAWRLLDAGFETRLISSMALARTREAIHNGWDKNDPKDAQVILHMLRTGLSQYYQDPLAAGISDIQELSKTHEMVSKAKTETLHRILTHYLPLYFPEIERFRQNSRSDWFFAFLERFPTPSSIVALSKDAFISSAWDVVGRKVSKARLIADIYETACESIALPIHIDSQAVAMFRMVLAEIRSLIRQRDTIEAQAEALLGGQPDYEALKQIPGIGPINALTILAEAGDLRRFGHHRQFLKFCGLDLSTHQSGTFRGQTKLSKFGNARLRRTLWMAAQVAIRQQENSFREKYERYVAKDRNNADLKRKAFTAVTAKMARVVHAVIKSGNQYRPFFEGSAPSGRTPLCQGRGGA

SEQ ID NO: 161289 - protein, 340 aa, unidentified
MEKRYIGIDLHRNRFTCCIRLENERTYVTEWELEDLGKFVKKLRANDEIAVEITGNTRLFFDAVVPHVARVVVVNTNQFKVIRHSVKKTDPHDARALALYLSKNMLPEVRMKDKEHGQLASLTQTRDTLVKLRTALKNKINNILSARGLNLAKEALSSEKKLAEVLELPFDEIVRIELRVIVEQIRSLNKSIAELEKTIGEEGSKLEGHKGLSSIQGIGKITGAILLSVIGDVNDFADEGRLASYFGIVPRVSNSNETEHSGRIHKRGTKLGRTALVQSALIAANYSPYLKRFYEQVKARRGAGKAIIALARKFLGIIYRTLKNKWVFEDFPNFVLAEAS

SEQ ID NO: 161290 - protein, 340 aa, unidentified
MSIVMGLDQHRAQITADWLDTETGEVKRGRVAPADRAGVRRFLERFRGQELEVALEATTGWRFVVEELRRVGAVVHLAEPAETAGLRGPKKRAKGDRADARHLRELVMLGRVPESWIAPEHILDLRERVRLRHTLSEQRGEWQQRIRAVLYHHGCPQHRAGLMTAGGREWLAAQQLPEAAAEQVAVAILMVDALEVQIAPLDRDLRAYARRQAGCKALMTHYGIGELTAVTILAELGDCTRFSSSRQAVRYAGMDITVYQSDQRRAPGHISRQGPPALRWALYEAAQVARRGEKSPDRRYYLETKERIGGGRACIAVARKLLKRSYHTLRELGEEALQPA

SEQ ID NO: 161291 - protein, 333 aa, unidentified
MQEVVMCKGILYVGVDVGQEDLWVAIEGRKPCSFKHTITGVRGLYNLVHKIYTEATLHFCMEATGVYSLKLAASLSVYPDVQLSIVNPAQIASFAKAQLRRSKTDKIDAQVILAFAQSQHPQPWTAEPKSLQQLYELVVQADALLETQRRWVNRVHTQTYIPELPTVVSKTTSALKKHLERQIAKVENAILKLCETDPILRTQMELLCTIPGVAERSASRLLAYGKIALTGYSARALVAHAGLAPRHRQSGTSLLAKSHLAKEGNKRLRHALYMPALVGIVHNPLLKKYYKRLVAKGKPKMLALVACMKKLLITIRAILIQKIPFNPAIQSLT

SEQ ID NO: 161292 - protein, 427 aa, unidentified
MAGVVTARVNRGKKVMTEESFTWFAGVDWGSEKHHACIIDTRGTVVGERQFPHSGVGLAELGDWLLSIAGTTATVAVAIEVPHGPVVDSLIDRGFVVYAINPKQLDRLRDRFSVAGAKDDRRDAYVLGDGIRTDRRLFRRLHVADPRIVELRAWSRLTEELQEERVRLGNRVQQQLWRYYPQMQKITNDLAAPWFLALWAMAPTPGKARQLRRSTVEQILKKHRIRRIDADTVLRMLREPAIKVAEGVAEAASIHLRSLIARLHVVNRELRQAEQKLDQLCAGIGETEGAPGECLQRQDIMILKSVPGIGRINLAALVCEASGPLRSRDYPALRTLCGAAPVTKRSGKSQIVVMRYAAHARLRETVYHWARTATQHDAKSRCRYAALRQRGHSHGRALRGVADRLLGLTCVLLQRQTMFDPHFGQAG

SEQ ID NO: 161293 - protein, 355 aa, unidentified
MKRRYFIGIDVHCLFCEIAVVDHRGTVVLRQRCDTTIAALMQVLEQVPRPRSLVIEEGPLGGWLWRNLHPLLEEMVVSDPRRNRLIAKDGDKDDDIDAEKLAQLLRGGFIKPVHQCASEEQAVFKQQVSLYRHRVRQRVREAQRISALFRQHGVMIRERAFVAVDARQELVQQLPANEVLVEAIALLWQSYDDAVSHEEQWRTRLIKLAQQHEVVRRFEALPGFGWIRSATLFAYLDTPWRFRSKQALWKYLGIGLERHRSGNGPEHVGVPKLVHRLIKSTILGAAQSAAAQGDNPFADLHRRWTAQGLSSRLARRNVARSLASTLWGLWKNGSVYEPKWVGAAGAASAVNKQSR

SEQ ID NO: 161294 - protein, 349 aa, unidentified
MEVTTIGIDLAKNIFHIHGVSRSGKEVFKKRITRDKFLEFMANQPKCLVGIEACGGANHWARELIKLGHDVKLMAPQFVKPYVKTNKNDHKDAEAICEAVSRPSMRFVPVKSIEQQDVLSIHRVRERLVKNRTALANEIRGLLHEFGIIVPQGINKIVQHLSDAIEGTKLSEMSIETFRVLLDDFNENTKKIIALEIRLKQIAKNNENHKRLMDIPGIGLIGATALIASIGNAANFENGRQLSAWLGLVPKQYSTGGKERLLGISKRGDVYLRNLLIHGARAVFNSRTGVIKKSGKIEKDDSKFSQWMINLQTRRGYNTSVVAVANKLARVVYAVLKNDQPYNEVKVCC

SEQ ID NO: 161295 - protein, 421 aa, unidentified
MDDIGDELELVQRVCAIDIGKTALVACVRVPHETLPGRRAQEVREQATTTGSLLGLADWLRCQQVELVAMEATSDYWKPVYYLLEAQGLRCWLLNAKHVKNVPGRPKTDKLDAVWLAKVVERGMCRPSLVHPRPIRQVRDLTRYRRSLVRERSREKQRLEKTLEDAQIKLDTVVASLHSVSGRAMLEAMIAGERDPHVLAGMARGVMRRKIPQLEEALRGHFDDHHGFICATMLRRIDALAADIATLDAKITELVDPHLEAIQRLDEIPGVGARSAQELIAEIGLDMAAFATAAHLVSWAKFAPIDAQSAGRRKTSSTGKGNPWLAATLGEIVAALSRTDTFLGDRYRRLARRRGKKRAIVAVGNSVLTIVWHLLSDPTAHFHDLGSDYYESRINTQRRQRDLVRQLEHLTGQRVTLQPAA

SEQ ID NO: 161296 - protein, 422 aa, unidentified
MNEDIYYERCAGIDVHKKFLVVCLRIGRKTEVRKIGTLTHELRDMVAWLKTNGCQMSAMESSGSYWKPVYNIFEQEGLPVMVCNAYHIKNVPGRKTDVNDAQWIAKCLSQGMLNPSFVPDREQRELRDMTRFRKSQIEERSRNINRLQKFLEGANIKIGDFLSDVEGKSATQLLELVIGKPDFTVDDVAARMHKNMKSTADEMFRSLEGYMTPIQREFFAHIMAIIREQTAQIEKTDAMIKRSLNDNYKAAVAALDAIPGIGEISAEQIVAETGIDMSHFKSQHSLSKWAGVCPGSNESAGKRKSGKTPSGNKTLKSTLTQSAKSAKTNKNSFFSAQYSRLVSHRGKNRATMAVAHSILIAVYFVLSGHQFKDLGADYYTQFNREKKINSHLKQLSKLGITIPDDVIRDALLHPEEPRGRSA

SEQ ID NO: 161297 - protein, 400 aa, unidentified
MHLTANISVPQKNFIAIDLHSDNAVICVRRNALNKAGELVGKNIWCGRVSIRDGLDNFIKALLPYCQDFDHVAVVESTYNWYCLSDVFEERGWLLRIADPSTVSQANLKSSDDRTDAQYLAERLRVGSLKHYLPLSYSSRALWDLCRYRMAMVQDCASLKIKLINLYRNQLSKNLCVADLLDRCRNHMQSNYRFDPDILEEFKDPNIRLRVAFEVSRIAMLEEMIEECNAEIQKQCKDQELVKLCKTIPGCGPVLSAVICTEIATMQRFKSAGDFVSYCRLCSTSKLSNGKSKGLGNAKNGNAYLSWAFTEVAQYTSRNPVIREILQRLLRKYGGLRVKAIRTLAAKIARVTFYVLKNKQPFNAAKCFGIELTKSIKKKLTHKTLREDAAVVLPTVAGQA

SEQ ID NO: 161298 - protein, 346 aa, unidentified
MRIIGCDFHPSWQQIAWLDSETGETNEQKLVHGEGEAQKFYRELPRPALIGMEATGNSQWFIELVEDLGHEIWIGDAAQIRASYVRKQKTDKRDAAHILKLLVEGRFPRLWAPDREQRDLRQLVLHRHKLVGIRSRVKNELQHLSLNKGMQRKRKLWSEQGMQLLRELRLKPWASCRREDLLGLLAMLDEQVGKLDHAVAKAAEENSSARLLMTQPGVGPNTALAFVLTIGDVKRFARGKQVASYVGLIPREESSGGRQKLGAISKQGNRMLRSLLVEAAQVAVRFDPAFRREYLHRCHTKPKAVAKVAAARKLAVRLYWMLRTQKPYPEVVRIESSSRVPLVGAS

SEQ ID NO: 161299 - protein, 342 aa, unidentified
MDKIEACGIEVSAQELVVAMGGKTQEAVLRRFANTACGHRQLRHALTRGGKRVRACMEATGLYGLDVALCLSAHPGIELMVANPRAVRHFAKARMQRSKNDQLDAVVLREFALRMEFTAWTRPQKSTLELWAIARRLEALTKQCTAEKNRQHAAGISQAMPACVRASVARTLRSLQREIQKLRAIAKRGIAGDARLQQRYRLLCTIPGIGESSALRILAELALLPVDRDVRQWVAYAGLDPREHRSGSSVNKHARISKVGNRHLRCALYMPALVASHCEPHLRGFYEHLVAAGKKKKQALTAVARKMLHAIFGMFRWDRPYDGDCVYRLPLTGLAPQAAKIA

SEQ ID NO: 161300 - protein, 424 aa, unidentified
MNLTQNDRLKQVTSDTLIVGVDVGSQTHFCRAFDWRGFELSRRVFKFSNTGMGFLTFLRWTEEIMNKTEMKKVIVGCEPTGCYWLTFQKFLQDHDVQLVTVNPFTVNRSMELDDNSPEKSDLKDPKTIALLVKDGRFSTSYLPSGIYAEIREASVCRDQIMKQHVRLSNQIQGWLQKFFPEYFECYADWDSTSGLMLLKKAPFPQDILRIGAGGINQIWRDAKVRAAGIKRAQTLVEAAQNSVGLEAGEAARLEIWVLVNDYILKAEQLKRLDEYLEEKVKEVPNVEKLLAIKGVGMSTVIGFIAEVGDIGRFTDPKQIQKLAGLEIVKKSSGKKKGQPRISKRGRRKLRRIMYESAKALMLWNPAFQDVFLYYRNRSKNPLGGMQAKIAVACKAIRVFYVVLQTGCDFDEEKFRKDIIRPEAA

SEQ ID NO: 161301 - protein, 342 aa, unidentified
MERVVTVGLDIAKNIFHAHGVSQDGKVVFSRKLRRAKLEAFFLKLEPCLIGIEACSTSHHWARVFMGMGHTVKLMPPAYVKPYVKSQKNDAADAEAICEAVTRPTMRFAEVKSIAQQSVLGLHRVRAQLVSHRTRIGNAIRGHLAEFGIIAPVGREGLYRLIGIIDDGADPSITDLMRISLRHLADQYRLLQVQILELDRQIMKAHRANALSKRLATIPGIGPLAASALAASIGDASAFKSGRSLAAFIGLVPKQSSSGGKERLGRISKRGDGYLRWLLVAGAMAVVRYAKRHGTRRPWLVQLLARRPAKTAIVALANKMARMAWALMISGETYREPSPKAA

SEQ ID NO: 161302 - protein, 353 aa, unidentified
MKRYIGIDPHLQSCTLAVMGTSGRRLKEQVVETNGKALRAFLLSFAGEKHICLEEGELSEWLYELLLPLAKEVVVVQPEKRKGSKSDSLDAWDLAELLRTRRKATVVYKAPGAFSGLKEAVNAHRAMTRDVTRIKNRLRAVFRSRGISGMGQEIYNPESRQAWLKKLSPARRQRARLYSEQLDSQLAMAEQAEAWLREEAQACPIVKILTTAPGIGLVRGTQTVATVITPNRFRTKRQFWAYCGLAVVNRSSSDWSPKGDGRFRPRRKNLTRGLNRNRNPLLKEVFKGAAMTVIQAMPNDPLGQNYRRNVEEEGMDPAMARLTLARQLAAVVLAMWKNQEVYDPTRYRSSKTA

SEQ ID NO: 161303 - protein, 346 aa, unidentified
MEHYVGLDVSLKLTAICIVNERGKIVREGAVASNPEAIAGFVKSHAPHVARIGLETGATSTWLWTELSMLGLPVICIDARHAKAALKMQINKSDRNDAMGIARIMQCGWYKEVRVKDLDSHAIKGLLVSRALLVKIKRDLENQIRGLLKNLGLIIGRAKMNVFAVRAAAFVEDRPELVTAVEPLLKTREAVERQIADLDRKAMRLARNDAQVRRFMTAPGVGAITALCFLATIDDPTRFKRSRSVGAYLGLTTRRYASGEIDWTGRISKCGDKLLRSYLYEAANVVLTRVAKWSVLKAWGIRVAKRSGLRKAKVAVARKLAVILHRMWVDGTEFNWSAKEVAAQST

SEQ ID NO: 161304 - protein, 416 aa, unidentified
MNAVGIDVSSRKSTVAVLRPLGEVVCLPFDVTHDIAGLASLAEKLKAIDGETRVVMEHTGRYYEAVAKALHEAGFFVCAVNPLLIKEYGANSLRRVKTDKADAIKIARYALDNWADLRDFTPMDAIRYDLKTLNRQFQLASKQRTASANNLIALLEQSFPGIRKCFDSPVRSDGTQKWVDFAHSFWHVDCVRKQPFPAFCERYRKWCKRHAYFFKLSNAEEVYALAKRAVVLTPKSKVVKVLVQEAANQLSSISRSVEVYRAEMDRLAAMLPEYPVVMAMYGVGKSYGPQLMAEIGDVRRFERKQALVAFAGIDPMPNQSGDKNVRSNKSSKRGSPYLRKTLFNVIRTYLQCAPQDEPVFQFLNRKRAEGKPFYVYMLAAANKFLRRYYAKLRDYFASLDTLQPVAPIPTILKATL

SEQ ID NO: 161305 - protein, 341 aa, unidentified
MNVTTIGIDLAKTVFSIHGTNQHGKVVVRKRLNRPKLLAFFAQLPPCLVGMEACSGAHYWARELSKLGHDARIIAPRFVAPYRKSSKNDDNDAEAICEAVSRPNMRFVPIKTEDQQAVLSLHRIRRGLTKERTAQINQIRGLLAEFGLIIPQGRYHARHRIPEILEDAENGLPMLARRLLNNINQRILQLDEEILAYDREIEAMARRDEQAKRLMAIPGIGPQTATAILASAPDPRQFKSGRHFAAWLGLVPRQYSTGGKPRLGRITKRGDKYLRTLLIHGTRAVIAKLADKNDQLSEWAKGLVERRGYKRAAVALAAKNARIIWALLMNQTEFKAQPAEG

SEQ ID NO: 161306 - protein, 339 aa, unidentified
MRLYAGIDLHSNNSYVGVCDEADNRLYQKRLPNAPDVILAELEPYREKMAGVVVESTYNWYWLVDTLMDNGYRVHLANPAAIQQYKGLKYAGDRHDAFWLAHLLRLGILPEGYIYPKEQRPIRDLLRKRSHLVRLRTSLIISLQGIISRNCGCRLSSNNIKQFKGDHLAPLLAANEDLHLSGEVSKETIDHLTRQINKIEKMVLERVKLQKSFVGLQAIPGIGKILGLTIMLETGSPERFAKVGAFASYCRKVPTSRISNDKKKGSGNSKNGNKYLAWAFSEAAELARRYDDKAKAFYNRKATKTNFMVAHTALAHKLCRAAWHIMKEGVAYDPQKLFA

SEQ ID NO: 161307 - protein, 405 aa, unidentified
MGAEQVAHGWAGIDVGKGHHWVCLIDEAGSTLWSSKVVNDEAAILDAIAEVLARAQQVSWAVDITGTSSALLLALLSAHGQAATYVPGRTVNQMSTAYAGEAKTDARDAYVIAETVRLRGDLTPVDVPATLVAELRLLVTHRTDLVADRVRMINRLRDVLSGYFPSLEREFDYATSRGAVVLLTGYQAPAAIRARGRARLTTWLRARKVRSAEQIATAAVKAANAQHTTVPGQDVAASIVAEFATALLELDQRIRVLDARIGDTFHAHPQAQIIESMPGIGTILGAELIAAAGDLSRYVDAGHLASAAGLVPVPRDSGRRTGNLHRPMRYSRKLRRVFYLSAQTSMMREGPNRDFYLKKRGQGHGHVQALIALARRRVDVLWALLRDNRVFELTPPTREKLPQTV

SEQ ID NO: 161308 - protein, 370 aa, unidentified
MLDTTTFVGLDVHARSIKAVSLDVMTGEVRCATFGYDAGAVAEWVRSVDPRARCVYESGVTGFDLQKRLSGLGVDCVVGAVSKMIKPSADRRRKNDRNDAEFLARMLSVGNVVEVWVPDDECEAARDLTRALEDARDDLSRSKQRLSKFLLRHGLVFDERTPTGRRKGNWTRAHWSWIESIRFAEGADNDVLAYYVDAVRRAAEEKARLEGLVEAEARKPRWRRRVDSLRCLKGVDTASAADLVFEAGEFSRFRNARSFAAWVGLTPSEHSSGESDRRGAITKAGNKHLRKTLVEAAWHYLTCSGRPKGLAKGQAPDRGARRHAAKGVRRLVERREALLARGVHNNKANVATARELACWVWAVGLMAEEA

SEQ ID NO: 161309 - protein, 274 aa, unidentified
MLIGMDVHKHMVNITEMEDDGYVKENYEIENREEAWNTFVERYSSMKPEIALEQSTSGKYVAKFFRNKMFQVHQADPEKIALVFHSPKKNDREDSYKLVKLLRLAELPEVHIPSEYSDELKSLVRYSKSLGDEATAIKNKIHVILSLHGITVDATDIFGKKGMRVIEESFKKMNENEKIILDDMLKRIADLLNKEREIENRIALAVKDDKRINLLMTIPGINVYSAAVIISEIDDISRFPTKEKFASYAGLVPRQDQSGNRDIRGHITKRGPLC

SEQ ID NO: 161310 - protein, 348 aa, unidentified
MTSLAEQIRPVTVGVDTHRDFHVVGVIDARGVEIAAQSFPAEAAGYAALESWAQSLGPVACFGVEGTGSWGAGLARHLVGRGQAVVEVNRSDRSERRRVGKDDTIDAYAAARAAQSGRARAVPKTQDGPVEALRALKVARNGAVKAKTQAANQLKNLVATAPDALRAELRGLSALNLARRCAASRPRPGADPLNATRRALRSIARRWLDLDHEATELYAEIKALTDQTAPGLVAMTGIGPDIAAQLLLTAGDNPHRLHTEAGFARLCGVAPIPATSGQTIKVRLHRGGDRAANAALHRAVIVRLNHDPETKAYMQRRLAEGKPKLEIIRCLKRYLARRVYHQLLALDI

SEQ ID NO: 161311 - protein, 343 aa, unidentified
MEAITTVGLDIAKSVFQVHGIDAAGKVIIRRQLKRRHVLAFFQRLPACVVGIEACATSHHWSRELRALGHTVRLMPPAYVKPYVKRQKNDAADAEAICEAVTRANMRFVETKAPEQQACLMLHRTRHLFIRQQTSVINAIRAHMAEFGIVARVGRNGVEELLEVAADPTDRRLPEVARTCVTALGVQLRMLKAQILEFDRRIRAWHQSNQTSKRLDQIPGIGPALATALVASVPDPKAFRSGRNFSAWIGLVPKQHSSGGKDRLGSISKQGDRYLRGLFTAGALAVIRYAKIHGTGHRPWLTALLARRPTKVAAIALANKLARMAWAIMAKGEHYKEPAALAA

SEQ ID NO: 161312 - protein, 389 aa, unidentified
MESRTVNNLPPAGTHDDAVRCLLAIELSKKSWIVAVNTPLSDKISRHTLKPCDGKELLDLCDRIRTRVARETKKRVEIVSCYEAGYDGFWLHRLLEAHGIRNYVIDPASLQVDRRARRAKTDRVDADRLLRSLMAFLRGEPKVWSVVRVPSVAEEDDRRLHRERGRLINERIQHVNRIKGLLAIHGIYDYQPLRRDRMQQLERLRTADGRTLSPRLKAEILRELQRLELVIGMIKTIEAERDAIASAKTEAEHTSAKKIQDLVKIKCIGPEFATTLVGEVFYRSFDNRKQLASYVGMTPAHFQSGAMCRDQGITKAGNAKARTVMVELAWLWLRHQPDSPLSVWFRDRVGKLKGRIRRITIVAVARKLLIALWRYLETGLVPKGAALKV

SEQ ID NO: 161313 - protein, 403 aa, unidentified
MIFVGDDWAEQHHDVYLMDGAGKRLASRRLPEGLAGIRQLHELMATHAEEPDQVVIGIETDRGLWVGALTGAGYRVFAGNPLAVARYRDRHHVSGAKSDASDAKLLADLVRTDRHNQRLIAGDSPEAEAIKVLARAHQSLIWTRNRHTNALRNALREYYPAALEAFEDLAHGDALGVLHRAPTPTLGAHLDVAAIQSALKRGGRKRNIAARAREIRATLRTEQLSAPAPVADAFGATTRATVGILTELNRQIGELETSLAAHFETHPDADIYRSLPGLGVVLGARVLGEFGDDPNRYTDTKSRKNYAGTSPLTIASGKKRAVLARHIRNRRLYDAIDHWAFTALTKSPGARALYDQHRAAGDLHHQALRALGNRLVGILHGCLRHRTLYDEHTAWAHRMPAAA

SEQ ID NO: 161314 - protein, 404 aa, unidentified
MNNVTENTKVIYVGIDVHKDTNSFCAYDSREDKLFAEHKSSSKFENTLHYLKNLQKSVGQDAVFLIGYEAGPTGYGLCRKLQKEDFACVIIAPSTIAKAPGQKVKTDRMDARLLAKTLAFKTYSPVCLPSEKLEAIKEYTRVRTAKITMLKKAKQNLLSFLLRMGLPYPQSGHYWTQAHMAWLRTMNFADKWLQESFEEYHAEVITLMDKVQRIEAKILELCKDDEVREKIDALVCISGISYVSAISIVAEIGDFSRFSKAKSFVSFTGLCPGEDSSGNRVRHTAITKAGNSRVRSLLVECAGSLRMHSVVTAKSVRVKERQKNASAAIVSYADKCTLRLRKRMLYLSQKGLPYNLVTTAGARELACFVWGMMNFVDNRKTALNKIDEGELSDIQKTVEEFIAQ

SEQ ID NO: 161315 - protein, 344 aa, unidentified
MRIRKLAGQEPKSNTLAQETYDYTIGLDWSESTMAIAQMTASETVPKVWEGKTDIVRLQRFLKSLKGRIILTFEESTAAQWLFTQLLPFVDRLIVCDPTYNRLLCRGPKNDVIDATKLCLLLRQDSLKEVYHSTSRLYQVRLLVSAYDDNIQAGVAAQNRLKARLRGRLSEQPEGMIVIQQLQKSIELYRSTKHELEQEFHRWAKRTPLIRALAKLPGIGIRSSVKIVGTVIDGRRFPTRQHYDSYCGLAWHEKRSGGKFYGRRRPQYSRRLKSVYKTAALAAIKGKNEVAQYYHRLLQRGLAPHNARHAAARYLAHVSYGILKSGIPYDPNYRNRRTLQHNNS

SEQ ID NO: 161316 - protein, 432 aa, unidentified
MSYSIAGIDVHKKMLAVVVSDVEVDGEYHFEQRQFGSNPKELRLLATWLLEQEAEEVVMESTAQYWQPVWEALERYWKPIREKREGRRPEVRNARCTWHKRNPIAGDGDARGDFPDAERLVKRLVARELTLSFVPDAEQRLWRTVTRRKYQLTRDKVRLQNQLESLLEEAHIKLSSLVSDLLGASARRMLKALADGETDPVALAALADQNLRATPEQLCDALGACTDLKPMYRRLLKMVLEQLQFLEQQIGQLDQEMASLLSQHQDAVQRLAEVPGLGVGSAQQIIAEVGPTAATFPSEKCLSSWVGACPGDDESAGVNYSHRSPQGNRHMRRLLNQSANAAARTKGSIFEIVYRRSVPRLGHNQAIGAIAHRQCRLIWLILHQGVRYEERGPAVTKRSKQKRTARMIRQLRSLGYRVEPINSQLATPGLAR

SEQ ID NO: 161317 - protein, 423 aa, unidentified
MEVIHPRCGGLDVHKETVVACVRLALGDKVTREVRTFETTTSGLRLLLAWLTELGCTHVAMEATGVYWKPVWNILSDGDFELVLANAAHIKNVPGRKTDVSDAVWIADLLAHGLIRSSFVPEQEIQELRELLRTRKQLGRQQSSHIKRLQKTLESANVKLDSVITDIVGKSGRAMIQALIAGETDPVKLAALADRRIRASAQELREALRGRVTDHHRFLLHLHLQHIEFADAAIQDIDRNVTALITRMDQEVEAGQASFQSLISLLITIPGIDVLAAWIVLSEIGRDMSRFPTAGHLLSWAGLCPRNDESAGKRRSTRLRKGDRWLKTLLVQCAWAARRKKGSYFNAQFYRLTSRRGPKKAACAVAASLLTTIYHMLKDGTQFADLGADHFDRRSKEVRAKRLVVQLAKLGFDARLTPLAQAA

SEQ ID NO: 161318 - protein, 420 aa, unidentified
MEEITEEAEVVQRVAALDIGKAELVCCVRVPYEGRPGRRCQEVRTYATTTRLLLELRDWLICQGVSLCVMEATSAYWKPPFYLLEDAIECWVVNARDVKNVPGRPKTDRLDAVWLCKLAERGMLRPSFVPPPWQRELRDLCRYRRTLIQERTREKQRAEKLLEDTQIKLSSVISDIFGASGRDMLEALIAGQRDPHALARLARGSMRGKISVLQEALTGQFHDHHGYLLRMMLDRVDALTAQVEALTGRIDEAIAPFAHQVAQLDEIPGVGRTGAQEIIAEIGVDMTRFPTAGHLVSWAKFAPRARQSAGKSKPGSTGKGNPWIGGTLGEAGIGAARTKTFLGSRYHRIARRRGKQRALVAVGNSILVIAWHLLGDPAARFADLGPDWHDRLAPIRRKRQLIAELERLSGKKVLLQEAAV

SEQ ID NO: 161319 - protein, 347 aa, unidentified
MNATATLYGGLDLHRDNTFCSILDAEKRVVFEKKLANEIETICQALEPFRARIKKLAVESTYNWYWLVDRLKRENYDVRLANPAQMKENIGLKHANDKTDARFIARQLAHDCLPEGHVYPEETRGVRDLLRHRMRLVQDRSTVLQRLTGLCARQTGQELGGREILARNFDELFHHHAPSVRMAETGRRQAEFLDNEIKAMEKDILKDLPDPAAYARLMTIPGIGETLARCILLETGPVTRFPSAGDYASYCRAVPSEHTSNGKKKGEGNRKCGNAYLAWAFVEAANFAVRHDPAIKAWFQRKLARSKQPRVVAVKALANKLAKACYFVLRDDAPFEVARLVGGGGNT

SEQ ID NO: 161320 - protein, 343 aa, unidentified
MQTVATVGLDIAKSVFQVHCVDAVGQVVFRRQLKRRYVLAFFQKLPRCLIGIEACASSHYWSRELQALGHNVRLMPAAYVKPYVKRQKNDATDAEAICEAVTRANMRFVETKTPEQQSCLMLHRTRHLLIRQQTAVINAIRAHLAEFGIVAPLGRLGVEELLGVVADPKDERVPDVARACLAALGSQLRVLKKQILEFDRMINAWHRSNETSKRLDEIPGVGPALATALVASVANPRVFRSGRDFSAWIGLVPRQHSSGGKDKLGSISKQGDRYLRGLFTAGALAVIRYAKIHGTKHRPWLAALLARRPTKVAAIALANKIARMAWAMMAKGERYKEPVALAA

SEQ ID NO: 161321 - protein, 386 aa, unidentified
MAHSTNILPRSADYDQTLVLAIELSNKSWVLAAQVPGLSQTKAKRTIDPDKNDLLAAIDGYRTRAAAAGRSVKRVITSYEAGWCGFWLARWLMAHGIEVHVVQPSSVPVDRRMRRGKSDGIDAELLLRTLLAWLRGEPRVCSMVPIPDEADEDARRCVRERSELVSERVGLVNRIGAILATLGADDYNPLLQSRRRRLTELRTGLGDPIPPNALAKITRLLTRLELVLAQIAELELERDAVARTDAPDQTGKMIQQLISLRGIGVQSATVLVREAFVRRFANGKALGSYAGLTSTPYSSGGIDREQGIGKAGNRRLRTVMVELAWLWQRYQPGTAQVAWFRERVGSTGRRVRKVMVVALARKLLIALWRFVIDGVMPEGAVTKPSI

SEQ ID NO: 161322 - protein, 326 aa, unidentified
MQGKELSEQTTAAKSNVGIDACKSWLDTHVLPSAQTLRVPNTGEGIRKLKRWLDRFKVSLVVVEATGKWHRQVHRSLIAGGIAVAVTDPFRVRAFAKAKGILAKTDRIDARVLALFAALMSPDIRPPASQALEELAELVTARNSAVAEQTALKNQLAAACGAFLKRQLEHRCTRIAKDIEVIEREIARHIAADEGLARRYVILTSIPSFGPTVAATLIACLAELGACSRKQIALLAGVAPIADQSGKREGVRVVWGGRPAVRRALYLAALSAATHNPGMKVFYQRLIAKGKAAKQVLIAVARKLIVLANTLIAEDRTWQPSPPKLA

SEQ ID NO: 161323 - protein, 367 aa, unidentified
MTQDIVVGLDVHAQSITAAILTADSNQPEVITLPADLMKVRRLFRRLAADGPVRSCYEASGAGFVLQRVLSDDGFHCDVIAPSLIPRKPGDHRKTDRLDAVMLARLYRSGHLTAVHVPTQDHEALRRLLRLRYTYHTYCTATMHRISGILRNHGYVYTQGKSSWTKKHRQWLASLRSSLEGPLQTALAIELEHLEYLQSQHRALDFELDRIAQLPHLRQQVEALCCLRGVKTLTALTVLCEVDDIRRFASPRKLMAYFGLVPSEHSSGNKEYRGSITKAGNIHVRRLLVEAAWNNRHRSGADLILRRRRQGQPPDVVAIALKAQHRLYKKFWRLDQRKHRHVAITAVARELCGFVWAILLALPQTQH

SEQ ID NO: 161324 - protein, 331 aa, unidentified
MNYSHFVGLDVGKKTFDASLMSADEKELSHKSFDNTPTGIQSLLDWIAGYHLSLSKLLFCAENMGSYVTELSVSSVSMGFSLALVCPLTIKKSIGLQRGKNDRIDAKRIANYAVLHYRKLELYKLPDKDLVRLRGWIIIRDNLVKQKVSSIKLLETFSWMAKLADVTESISFLEEQLKSIKERILEVEEDMEQLIAASTSLYTNYLLLRSIKGIGIINAIVLLCVTDNFQRFDNPRKFACYCGVAPFEHTSGISIRGKTQTSSLANKEVKVYLTRAAITAISWDPQMKAYYKRKIAEGKHKASVINAVGAKIIARSFAVIRRQTPFVTLAV

SEQ ID NO: 161325 - protein, 316 aa, unidentified
MFQLGIDVSKKTLDVCLLREGVKGRVKNCKLKNDFNAVSTVVSWLRKQHCEPGDVHIIMEATGVYHELLAYGLHDAGAKVSLANPHRSREFARGMDILTKNDKVDAYMLACYGALKEPEPWEPPPENVRYLSALLRRRDALVTDSSREKNRLEKCRATDTPYAVAESIENVLRNLSAELQRLDTLIQGHLDQHPELKKDFDLLTSIKSVGFQLGLNMLVILRSHRFDTVEQAAAFLGVVPVEKSSGTSVRGQSRLSKIGPPEIRAKLYLASLCGLRFNPAMKAMYERLCQRGKAKMCAIGALMRKLVHWCYGVLHT

SEQ ID NO: 161326 - protein, 341 aa, unidentified
MTTVSTIGLDIAKHVFQAHGADASGQAVFRKKITRTKLIDFLASQPRCLVALEACGGAHYWGREISKLGHTVRLIPPSYVKPFVKRQRNDAADAEAICEASQRPSMRFVAIKDEEQQANGVVFRARDVLVRQRTQCINALRGHLTEYGWVVPKGTSHMATLIDQIEDPNCSLPKSACAVLAVLVTTLKSLEENIAILDAEISRRSREDAIARRLMTIPGVGPISATAIAALAPPVETFRTSRDFAAWLGLTPLQRSTGGKQRLGATSKMGERTIRRLLIIGASAVVSQARRRGAPAGSWLARMLVRKPRMLVMVALANKTARIIWALLAKGEVYRAPAAVA

SEQ ID NO: 161327 - protein, 356 aa, unidentified
MKKYIGCDMHKKYSVFVTMDEHGRLSEPRKVANDSLELDSYLKTLEEATPVAVEASGGWYWFVDRLEQAGLDVRLVNPLEAKKRMAGRHKTDPRDAAGLAMLLRNGTLPEVWIPPADLRDLRGLLRTRLALRRHTTILKNRVHGAVRRYGQWEPGGAKNLFAGKGRVQLAVYVGALPPETRIATRHEWQLIDEVEQHIQELEKRIRLGLGQLGYVRLLRSLPGVGEILSAAIYLEIGEVRRFGCAAQLASYAGLTPSVHASGGKTRMGPASAMANHYLKWAFVEAANCIVMQKHRFAGRHVVQLYERLRAAKNHGKAAVAVARHLAEASWWMLQKKQSYREPAPASRSSSENGSAR

SEQ ID NO: 161328 - protein, 342 aa, unidentified
MNIKVLGIDLAKNVFQLCAINQAGKEVFNRQVRRTKLTPTVANLEPTLIAMEACSSAHYWGRRFEGMGHRVVLIPAQHVKAFVRVNKSDAHDALAIAEASQRPNLKTVPVKSTEQQDLQMISRQRQRWIRHRTAVVNQIRAAAREYGVTLPLGYRALKKALPEVLEDGDNELTAIARELIAEWSDELRQLDAKIHTAQERQKALVKDNPAEQALREVPGFGPVISALLLSAIGDGRQFANGRQMAAWVGLVPRHTGTGGKTRMLGISKNGDRELRTMMIHGARAVIRWAHRRDDALARWVSQLEARRGRNRAVVALANKMTRIAWVIVAKGERFDMKKAFAG

SEQ ID NO: 161329 - protein, 339 aa, unidentified
MRLYAAIDLHSNNSVLVVLDAKDKVVYEKRHPNDLQTILAQLKPHKKNIQAIAVESTYNWYWLVDGLMAAGYEVKLVNTVAIKTYDGLKYSSDEHDARHLAHLLRLGILPTAYIYPKEERAVRDLLRKRSQLVRNRTMHILSIQNLVTRNSGKPITQGGIRKLDEKALDLYCEGNALRIMAIKSSLEILRCLDGQVALLERKVLEQARLKPEFKQITSIDGVGEIIGMTIMYEAGDLERFEKVGQFASYARCVESSRWSNGKKKGEGNRKNGNRYLSWAFIEAAHHAVHYNERIRKYYQRKKAKTNGVIACKAVAHKLARACYHVVRDQMAFDEARAFA

SEQ ID NO: 161330 - protein, 442 aa, unidentified
MPRRIGLDVHRDFAQVAIWEDGVVRQVGRIVATPEALRLFADSLAPSDEVALEATCNTHAIVRLIAPRVARVVVSNPQKTRAIAEAKVKTDKVDAEVLAQLLAADYLPAVWVADEATHALRRQVARRAHIVRQRTRLKNQVQAILHRNLVPRCPAADMFGLKGRAWLANQPLPGDEKLAVAALLRQLEFHGQELRIIDAELARVALERADVRRLMTIPGVDATIALSIIAAVGDVGRFPSAAQLVSYLGLNPRVRQSGGQPASHGRITKQGRAHARGMLVEAAWVAVKTPGPLRAFFERVRARRGMQIAVVATARKLACLCWTMLTRGEDYAFARPSLTAQKLRKLELRAGMPSHRGRKGKAAGYSLQEVRRRERELAEQAEHAYRQLVADWQAKAPARAREGVAATNGARLSRPSTGQAARQDSAPDPALRSGVDHAHSAA

SEQ ID NO: 161331 - protein, 475 aa, unidentified
MEETEFKVYDQWTKTLFFCGMDVHKHEIAVAICSAMPYSSKIIKTAIFSADTLGLERIWNFVKKFKPRGFAMEATGVYHHVPFEFLRAKQQNANWHYSIMVVNPSDAAGLPGREKNDRIDAQHLATYLSKGLLKNGKPIIRVLEDLKAIFRTANRIERDRTALKNRIKKILDMAGIRPRKFNIDTLWGCNFLYHLVNHEGNLGSFIGDALSEGHPLEKHQSVIRKNLELFVPYFEYSLNFAQKALIRHYLVEYDFKSSSKTLLSVEVDQLLVDYPSLRRSAHNLSTLPGISPFTAVWILAEIGNVKQFPNKRKFASYCGCYPRIVSSAGKVYSAHVNRHSNKYLRTIFYRAATVLTFFTKKRSALKDYAERILGRKRGKTKKYPLSVIAAKINAIAYAILRDDVPFYPEIIQEQMLRQDLEDNDDFSITDKRIIKNARNSLKRMMKIESSGKLGLLYEDAQKLAEEFDLVLQGKN

SEQ ID NO: 161332 - protein, 394 aa, unidentified
MRFAGIDIASETHALAIINAEAAVELKPVSFAEDAVGYQRLLSLLGDPAELLVAMEATGHYWKNLFAVLAAAGYSIALLNPLRTHRFAGEDLARTKTDALDALGIARFAAQKRPSPTLLPDAATEELRELVRLRERLLQDFGDRVRQLHRLVDLGFPEFTRHVRTLESELAGAILRDYPTAAAFRGASVRRLAGVRYDGRHQVGLELARSLIDAARCSVGQHHSAAYRIQVRYACDDLAVLRSRLREIDRDIESKLREHEVGRLLTTIDGIGPNTAARIIAAVGNPADFHSAAALAAYVGTIPRLRHSGKRQPARAPLTPIGNASLRAALWMPTLTAVRSNPWLRAHYERLRARGKLPKVALVACMHKLLFAVYSVAKHRQPFVPMLTAPSADV

SEQ ID NO: 161333 - protein, 425 aa, unidentified
MNYVGFDWASRAHDVTVLDEAGGVLDRWAFPHSETGWVTTLDRLARHGSAAEVPVIIERTSGLIVDRLLAAGHPVVPVHPTAFYAARPRWGASGAKSDPGDSYKLADYLRTDGHRLRRLTPTDPGLHELQALVRLRDDQVRARTAATNQLTAILDTYWPGPKQLFMSLASQIALAFLTDYPTPTSAAHLGEARMAAFCRRHAYRGGKSPAELLSRLRAAPVAPVGLPPATLAAMVTAQVTVLKTLQTVISDVERLIAVRVVAHPRSNLFENLPGVGMINLAQLLAEVGPILDRVDSAEQAATECGAAPVTRSSGQTRGVYFRWAANTRARKAITSFAHNARMQDDWAAALYADARARGKRHPHATRIVARAWLRVIWACWTTQQPYDPSRHRTSTSSYPPGSSAASQHCRRAGAVKMEHPTAERP

SEQ ID NO: 161334 - protein, 343 aa, unidentified
MELYVGLDVSLKETSICVVDNRGEIVSEGTVISEPAAIAGFIKTKAESAARIGLETGPTTTWLWHELRALGFPVICIDARHAKAALSMQINKSDRNDAVGLARIMQCGWYKEVQVKSVACHEIRAVLNSRAQLVKIKRDLENQIRGLLKNLGLLIGKAGGTRFHHRVEELLAGYRLLQVAVRPLLGVRETVRLEIASLTRRLLTMARDNDACRRLMTVPGIGAINALAFCAAIDDPARFERSRSVGAYFGLTPRRYASGEIGWSGRISKCGDGMVRTYLFEAAGVLLTRVPHWCKLKAWGHRLWKRIGFKKAKIAVARKLAVILHRMWRDGTDFIWSNKEAAA

SEQ ID NO: 161335 - protein, 348 aa, unidentified
MSTLTETTPRVTAGVDTHRDVHVVAVLDERGAQLGCEPFAADPAGYRKALAWVRSFGVIDRIGVEGTGSYGAGLTRYLHNQRVAVIEVSCPNRQQRRSHGKSDPVDAVAAARATQSGEASAQPKSRTGNVEAIRALRVVRHSAAHSRIDSINQMRALLVTGPEQLRESFRDSTIWTMVTAASKLRPGDPTTVTGATKFALRELARRIQGLEEELKRLDVILGPLVRTTAPALVAKYGVGPDTAGALLVSAGDNPERLHKESAFAHMCGSAPIDASSGLVTHKRLNRGGDRSANQALWRIVMVRMVSDPRTRAYVDRRTKEGKSKKDIIRCLKRYVARELYPHLVEKRS

SEQ ID NO: 161336 - protein, 338 aa, unidentified
MNKKSDKKFHVGVDVSKDTLDVAARTDSGVEQRPAPFANTSSGHRQLIKWLTKAGRSARVVLEATGVYSLDLALALNAAQRIEVMVVNPRAARKFAEACLQRSSTDATMAVALREYAVRMEFVPWTPPTPQVREVRAIARRIAALSVDKSRELNRQHAASATADTPAVVLNDVAVNVRHLQRRIDELERHALTLITADAQLKPIYQHLLSVCGIANTTAIQLLGELLVLPADMSAREWVAHSGLDVRHVTSGTSVHKVPRISKQGDANIRRILYMPALVASQHEPHVHAFYEQLLAAGKKPLQALVAIMRKLLHAIWGMLRTNTDWDGAKFRKLPEAA

SEQ ID NO: 161337 - protein, 342 aa, unidentified
MTFVGCDLHTRMQQVAVLDTGTGEVSERRLDHDGMAVEEFYAALPRPVTVGIESTGYAVWFHTLMQRLGHTLLVGDAAKMRAMVVRKTKTDRRDALHSLDLLRHDRFPTIWVPDPATRDLRALLTHRMRLVRIRTMVKNGLQAIALNSRLAWGSKLLRQAGLVQLQALPLPPHTARRRDQSLELLAGLNTQIRELDDAVTTAALAHPDAPRLITHPGVGALTALTTIVVLGPVSRFHDSKQVVSYVGLAPALNASADKYHLGHITKQGSPLLRFALGQAAAHAARMDPDLKRTYGALVHRRGRPKAKVAVTRKLLVRLFIMLRDQIDYDEFCRRGRSAPASA

SEQ ID NO: 161338 - protein, 414 aa, unidentified
MKYLGIDWATKHHVVALVDDDGQCETWSVAHTWAAVCELLDRLAQEGGPPAVRIAMEPGVPRLCDALCTAGYLVYEISPIAADRFRDRFSPAGAKDDRRDAQVLAHAVLTDERWLRRVTIASELNQELRQRCRDRQGLVDHRRRFVQQLRQSLSESHEAILAIGRRLTSPFVLAILEAYPDARSARGCRRPRLLRLMREHRVRAMDVDVLSATLRTQGFPLPDGVACACADHVRWLARVIAEVSRSIAEADAAIAALFEVHPAREVLESVPGIGAIHAPYLASEFASRLGDAPDARSLQTLAGTCPITKRSGKQTRGYVGMRRACHKGLQGAMHTVARCSLRSSAWARAYYDQQRARGSAHNAALRALSNKWLKIIARLLQTGELYDELRHQNALRGAGVPWAPKADAKTERAA

SEQ ID NO: 161339 - protein, 366 aa, unidentified
MFTERTSVGLDVHARSVVAAGIDDRTGELIQQKLVPDPGVVIEWLRSLPGPVAVAYEAGPTGFGLCRAVRDAGIRCEVVAPSKLARPAGDHVKTDARDALLLARLLRIDELVTVRVPTIEQEAARDLVRAREDARCDLTRARQRLSKLLLRYGHVYYGGKAWTTVHDNWLRSIRFEGPERGGTRAAFDADYETVQLTLTRRDRLDAAIAALAADSEFTPVVRRLGCLRGVSTLTALGLAVEIGDWDRFTGASIGAYLGLVPSEHSSGESRRQGPITKAGNTHARRLLIEAAWHHRPTYRVGPTMRERWELAPGTAAARGHAGNLRLHRRWRSLDARKKPTTVSNTAIARELAGWCWSLATLPEPSA

SEQ ID NO: 161340 - protein, 341 aa, unidentified
MNHAAIDLGSKESQICIRDSSGTIVEERKVPTRKLVELVATWQPSRVVMEASAEAFRIADAAIAAKHQVRVVPGKIVRLLGVGDRGVKNDQRDAQHLSQASWRADVPSIHIPSAASRELKSICGSRDILVETQTKLINNVRGWMRTQLWRVRSGQAATLADRLRGHAESVGTPLPEHIERQLQMLSSVIDQVKAADKQVRKIANENPVCVRLMTIPGVGPITAVRFVATIDDPARFSSAHRVQSYLGLTPGENSSSERERRTGITKAGPRALRKNLINAAWAATMMRTQHPMLDWMKQIADRRGRHVAIVALARKIAGIMFAIWRDGTTYESKRSSRALLT

SEQ ID NO: 161341 - protein, 282 aa, unidentified
MDKVTTVGIDLAKSVFSLHGVDGAGRVLLRRTVRRDQLIQTVAALSPCLIGMEACSGAHEWGRRFQALGHTVKLMAPKFVAPYRKSGKNDGNDAEAICEAVTRPSMRFVPVKSVEQQALLAIHRVRQGFVVERTATINRLRGLLCEFGVVLPLRSVTVRRQAATAAEKLPELARRAIGDLLEQLRVLDERIGGYDREIEAQARLCEPAQRLMKIRGIGPTTALAIVATVGNAREFKNGRQFAAWIGLTPSQYSTGGKPRLVTSASAATPTSGTCSCRVHALF

SEQ ID NO: 161342 - protein, 352 aa, unidentified
MNEKYVAMDVHKASVAIGVRDGAGKYIMESIVETKASTLLDFVKGLRGTIHLTFEEGTQSAWLYDLLKPHVAQCVVCNPRKNKLLEEGNKGDRIDVQKLSQLLQTGMLRPVYHGDHGTRALKELAHCYESVVRDRTRVKNRLKAIYRGRGISCEGDGVYNVTKREQWLVQLAERGVRQRARNLYSQLESLNALVAETQQQLLGESRKHQAASILRSVATLGPISVAMIIATCDTPHRFRTKRQFWTYCGFAVVTRSSADYYFENGELRKRRKPALTRGLNRNYNRRLKKVFKSAAISGSRQGPFKPFYDRLLARGLKPDLAKLTLARKIAAITLAMWKKGERFDPKKIEVNS

SEQ ID NO: 161343 - protein, 374 aa, unidentified
MDHHSGAFVGIDTSKLRNAVAVAEEGRNGDVRYFGEIDTTEATTRKLVTKLAAKYRQLTFCYEAGPTGYGLYRLIKKLGHDCIVAAPSLIPKKPGDRVKTNRRDAVGLVKLLRAGELTAVWVPDERHEAMRDLSRACEAARKDLKGKRQQISSFMLRLGRHYPGKKTWGPAHMNWLMLQKLEHREQRIALEELLGAVRQESERIERLEQAIRDAVPEWSLAEVVTALQAMRGIDLVAAVTVLAEIGDLSRFQTPRELMGYLGLVPTERSTGDTVNRGGITKAGNGRARRILVEAAWSYRHPPRVSREKQMKVAAAPRAVREIAWKAQMRLCGRFRSLTRRGKRPTVVATAIARELSAFIWAINREVVGSHATAS

SEQ ID NO: 161344 - protein, 347 aa, unidentified
MRFYNRQHRHYCGIDLHVKTMYVCMLDTTGQVLVHRNVPSTPEALLAVVAPYRDDLVVAAECMFTWYWLADVCAAEGIPFVLGHALAMKAIHGGKAKNDKLDSFKIASLLRGGLLPQAYVYPAAMRATRDLIRRRLHLVRKRGQLLAHIQNTRAQYNLPAFGRRLAYPANRDGVREHFADPSVRKSIDVDLTLVAQYDTLITDLELTIVREAKRHDADAFHRLRSVPGIGKVLALTILYEIHDITRFDRVQEFASYARLVKCQKQSAGKTLGTSGAKMGNVHLKWAFSEAAVLFLRHTKNGKKLLAVIEKRHGKGKALSILAHKIGRAVFYMLSRGTVFSKEKFRAA

SEQ ID NO: 161345 - protein, 317 aa, unidentified
MANLGIDVAKNKFDVALLKNEKYKTKSSFDNGPSGFIALLAWMKQRESGEIHICMEATGSYGDELAKFLFENGYTVSVVNPSRVKSFGEAELLRSKNDKIDAKLIARFCEKMKPTAWQPDPPEIEHLRMLGRRRDVLISMRTQEINRLGNRDKSVNDSINKVISFLDREIEQISQNIKDHINSNADLKKKRDLLDSIKGVGDVVIEAILSETNGFAKFEKIEQVVAYMGLSPKEKTSGTSVKGRPSLCKIGSARLRKALYMPALSAIRCNPFVRALHQRLTAKSKNGMVIACACMKKLVHIMFGVLKTGKPFDPSYC

SEQ ID NO: 161346 - protein, 435 aa, unidentified
MIPAVLTHCAGIDIGKRALAVCLMVGAADAEPKVEVREFSTFTADIEAMKAWLVEAGCTHVVMESTGSYWKPVFNILEGSLVVCLANSEDVKGRKGHKTDRRDAKWLAHLLRHDMIRASFVPPRAIRELRDLTRRRKQLLGDATSERNRVQKTLEDANVKLGSVLSDVFGVSGQRMLEALLEGRGSAQEIAEMARHKARQKIPQIIESLAGHRFSEHHRLMIRMSLEHLRMLEGQIIALDEEVVQRIQSLGLERTLNLLAAIPGLGHDSAVAILAEVGPDMKQFPTAKQLSSWAGVCPGNKKSAGKNFSGHTTRGNRWLRSTLTECAWAVSRAKKSALRHKFWRWAAGGKKKAVVAVAHGLLLQVYQVLQTQQPLAQAPSPPMDEQRRKRIVRHHLRCLGRLGVSTGPKRISADGVAAKPGRPSKAKTKKPEASG

SEQ ID NO: 161347 - protein, 355 aa, unidentified
MQKSKLDFSGYNIFAGIDVHKKSWSVHVVSDVIEHGAFTQAPDPQKLSGYLKKHFPGATYHSVYEAGFCGFWIHDALIQEGINNIVVNAADIPTTNKEKTQKRDKVDCKKLARSLRNNQLRPIYIPSRELLEERMLVRGRYKLIRNRTRCKNRIKASFNYYGINIPEELDTGRWSGKLKEWMKTTPMQYCCGRAALDLYLQELEGLEHVIKENTRQITLLSKTKKYEQNTELLCTIPGIGFIVAMTILTELGDINRFRSLDQLNSYIGMVPNVSASGDTERVGHLTHRGNDILKCQLIESAWVAIRRDPALMLQYQELTKRMKPNKAIIRIVRKLVNRIRYVLKNQQPYEIGVVA

SEQ ID NO: 161348 - protein, 344 aa, unidentified
MSPEIKILGIDLGKNWFHVIGIDAVGRPVLRKKCNRAQLQELAVTIPRSLVAMESCSGSQFWGRRFAAQGHEVRLIPAQFVKPYVKTNKNDFNDALAIAEAASRATIPSVPLKNTEQLELQAIHRVRQRLIGDRTAVINQMRALLLEQGFVVGVGPTRFARQLPELLGKAGEVLSPRMQALLVRLRSRWLALDADVAELTALLNRHAAQSELCRNVVTIPGIGPMIATATIAAVGNGRMFKTGRGMAAWLGLVPRQLSTGGRSILGPISKRGNNHLRHLFIQGAQVLYTHLRRDQSRLGAWLRGIEGRTHRNVAVVALANKLVRICWKVLSSGQQYRPYPMQAL

SEQ ID NO: 161349 - protein, 343 aa, unidentified
MELHAIGIDLGKTVFHLVGLDSSGNVMVRKRCSRTQLLKYTANLRVQRIGMEACSGSHFLARALCEQGHDARLIPAQYVKPYVKTNKSDYIDAEAIAEAVQRPTMRFVPIKTEEQLDLQTVHRVRERWVMRRTAVVNQIRGLLLERGLTLPKGRSHVDRILPEILTDPALRLAGSFRVLLGQLQLELEQLSARIEQMDAVIQQKAKENEACQRLTAIPGIGPVTATALVAAIGNGAGFRRGKDLAAWVGMVPREYSTGGKQKLLGISKRGNSYLRRLFVQGARVVMQYRTKQAPGLSCWLSQLMARTHQNVAVVALANKLLRMAWAVLCKNETYRIPALATAP

SEQ ID NO: 161350 - protein, 345 aa, unidentified
MKITTVGIDLAKNVFQVHAVDERGAVVLRRQLRRDQVTAFFANLAPCVIGMEACGSAHHWARTLKSLGHDARLMSPQFVKPYVKSNKNDVADAEAICEAVARPNMRFVPVKSVEQQAVLSLHRVRQGFVKARTAQANQIRSLLGEFGLIMPAGISHIAKRVPSLLEDEGNPLPGSFRQLIARLTEHLKDLDTLVGEFEAQIKAWHRSSELSMKLEKIPGIGPLGASALVASIADANSFANGRQLSAWLGLVPRQHSSGGKPALLGISKRGDVYLRTLLIHGARSAILAAQRKAVNTNVWLTGLLARRHPNIAAVALANKNVRTVWALLAHGREFRPDYVGPRLAA

SEQ ID NO: 161351 - protein, 421 aa, unidentified
MPNIEIGVDSMVKENFIYVGIDLHKETHTAVMIDCYNQKLGEITFPNRPAAFPKLVTKVKKCNTDGKEVVYGLENAYGYGRALAVWLIDKGYLVKDVNTAISHRQAKHQGAMYRKSDSDDAGAIALATLNMLDKLPDACPNDAYWSLGQLVHRRDNIMKQRTRLVNQLHEQLCIAYPSYKSFFNDISRPTALYFWEHYPSRKYLRGKSVEDLRKELVPVSHNRCSTKNCEKILDAVASDKVKNNAYQDARDMVTLSIVSDLQHYDSQLAEVDKMLEQMYKMLGCTLTTIPGVNVITAVKILAEIGDIKRFSNANKLAQFAGIAPLHLSSSGKGKDFATKQGNRRLQATIYFLAVQMIQVSSKGTPRHPAFRAYYEKRKAEGKTSQQALICISRRLISIIYGMLKNGTEYRMPIVENAGENR

SEQ ID NO: 161352 - protein, 411 aa, unidentified
MDTLCPRCAGIDVHKNNVVVCVRCSDRPGKVFEEVRTFSTMTAGLLALSDWLAEHGVTHVAMESTGVYWKPVFNILEGRVAVILVNAEHIKQVPGRKTDVKDCQWLAQLLQHGLLKASFVPPAPIRELRDLTRQRTQLIQERTAAANRIQKVLEDANIKLAGVATDVLGVSGRDMLEGLIAGETDPAKLADLARKRLREKIPALRLALQGRATEHHRFLLRMHLDHVTHLEELIARVGGRIEEALAPFAEAEERLQTIPGVSQRVAEIVVAEIGPKMEQFPSADHLASWAGMCPGNNESAGKRRSGRVTKGNRWLKRILVQAAWAASHTKGTYLQAQYRRLAKRRGVKRALVAVGHTLLVIIYHVLKRGTTYAELGADFLERLEPARLTRQLVKRLEALGHKVTLEPRPAA

SEQ ID NO: 161353 - protein, 358 aa, unidentified
MTHEAREITGGVDTHGLTHHAAVIDQIGRHLADREFPATIRGYRDLLDWMLSHGELTAVGVEGTGAYGAELARVLTAAGVTVIDVDRPDRKTRRMKGKSDPIDAYAAATAVLSGRATGVPKSRDGVVEAVRVLRTARRSAVKARTQAMNQIRGLLVSAPAMLREQVAGLDRAVLIRTLARLRPGDDLSRPLAATRASLRRLARRHLALDEEITELDREIGPLVKQAAPALLELFGVGPETAGQLLASAGDNPERMRSEAAFAHLAGVAPIPASSGRTHRHRLNRGGDRAANNALHTIVLVRMRFDERTRAYVERRTKEGLNKKDIIRCLKRFVAREVYRALTATPTERITQTDLAPAA

SEQ ID NO: 161354 - protein, 412 aa, unidentified
MRVLHERCCGLDIHKKFVVACLLETDPDGTIRKDIRTYSTMTNDLLALCAWLGAEHCTHVVMESTASFWRPIYNLPEGHVELLVVNAYHVKAVPGRKTDVKDAEWLADLLRHGLVRASFIPSPVQRHQRDLTRYRIHLIEERARLTNRLQVVLEDANIKLAAVVTDVRGVSARAILQALLGGETDSHILAELARGRLRAKRELLAQAVVGRFAPHHAFLVSEQLAQLDYLEEAIARVSAEIEQQLAAEGEAVALLDSIPGVSLRTAQVLIAELGSDLSRFPSAQHLASWAGMCPGNAQSGGRRLSGRTRTGNAWLRRTLVEIAHVAAKTKDTYLAAQYRRIAARRGKKRALIAVGHSVLVMIYHILTKRVPYHELGAQYFDERERDHVQQRLVHRLERLGYAVTLTTPQPTP

SEQ ID NO: 161355 - protein, 335 aa, unidentified
MAIVTIGIDLGKNVCSLAGLDEDGRVVLRKRMQRAKLISFLTTLPPATVAMEACCGAHHIGHNAAAAGHQVRLMSPEYVRPYVKAQKNDDRDAEAIAEAATRPTMRFVPPKSTAQLEMQTLHRTRTRLVAARTALINQLRAILLEHGIVVARRKAQLVRRLPEILAESGLSPRLRLLLEDLRGEWRGLDERIAQFDREILNSAREDDASRRLMQIPGIGPLTASALAAALGKAEHFQRGRDVAAWLGLVPKQKTTGGKPTLLGISKRGNIYLRYLLIHGARAVMQRLASQQTTLGCWLRRLLIRRHPNVVVVALAAKLARIAYAVLAQGRQFQAA

SEQ ID NO: 161356 - protein, 392 aa, unidentified
MDITPIHRRVVGLDVHQSKITACALIEQPDGSVAVEHREFGGFKRDRRALAEWVRGFDPEVVVMESTGIYWKSPYAALERVGVMAWVVNARHARNVPGRKTDLSDAQWLATLARAGLLRASFIPPAEIRHLRLIARQRQKLVGMLAAEKNRLHKVLTDAGIRLNVLVSDVHGASARAMIKALLADAPMHAILDLAGRLRASREELFEALQPEELSTRHRFVLNEVLAHIEYLEAMIARFEQELLAGLAPWEPQVCLLETVPGIDRIGAAMLLVEIGTDMASFGSAERLASWVGICPGNHESAGKRKSGRTRKGNAWVRRLLCEFAQAASAPAVRSRTSFRPCPSARDTSAPSWPWRTSSCASSTPCSIMRPPTRTAPSITRLSSCSATRRAG

SEQ ID NO: 161357 - protein, 355 aa, unidentified
MNLFENHSPSEREGPRERITVMGIDLAKNVFELCGRDASGGIVLKRQIRRKQLREFVAKLSPGLIGMEACPGSHYWAREFRNMGHEVRWMSPQFVKPYVKSNKSDTAAAEAISEAVTRPTMRFVGIKTVEQQDLLGLHRIRERLIRNRTALMNQIRGLVGEYGIVVAVGEPSLRRELPRFLEDAECGLTPKGREWMAQLYEELKEVAERIEQYEKQIGMEFSSSEICQRLSKVPGVGPITSTAIVATVGDAHVFRKGRELSAWLGLVPRQHSTGGKPRLLGISKRGDKYVRKLLVHGARAVLQRVGEKSDRQSQWLRKLQATRGTNKACVALANKNARILWALMASGQEYRTSAA

SEQ ID NO: 161358 - protein, 352 aa, unidentified
MIIIGVDFHPEFQQIASVDTESGEVQEKRLAHREEAEAFYRALAGQKVRVGMEASGHGRWFERLVAELQFELLIGDAAEIRTRRVRKQKTDRQDAQLILRLLLEDRFPKIWVPSWENRDLRQLLWHRHRMVQARTRIMNQLQAVALNEGLRCKKRLWRVHGREQLESFRLAPWASRRRCDLLELLDRLNPTIAELSQAIEQEVEKCPAARRLMTHPGVGPLTALAFVLIIGEADRFQCGKQVASYLGLVPLEDSSGNRRRLGHITKQGSSILRFLLVEAAQVTVRSLPEWRSKYLHLMMRRGRKIAKVAMARKLAVRLYWMMRQGWDYQQWVKFGSHAGQPGNRHGVQSNTE

SEQ ID NO: 161359 - protein, 284 aa, unidentified
MQAITTIGLDIAKSVFQVHGVDAAGNVALRRQLKRRYVLAFFQKLPPCLVGIEACASAHHWSRELQALGHKARLMPPAYVKPYVKRHKNDATDAEAICEAVTRPNMRFVETKTPAQQSCLTLHRTRHLFIRQQTAVINSIRAHLAEFGVVAPVGRNGVDQLLGVVADANDKRLPEAARACVAALGAQLQMLKAQILEFDRMIRAWHRSSEVSRRLDEVPGIGPALATALVASVADPKAFRSGRDFSAWIGLVPKQNSSGGKERLGNISKRGDRYLRSPDSPGAC

SEQ ID NO: 161360 - protein, 327 aa, unidentified
MNIAANPVLSHTQILGIDISKGWFDVFLHPAAVKERFDNTPVGIRKLIRWLRSASVEIAVMEATGGLEMPLFNALQLAGYPVARINPRWIRDFAKATGRSAKTDQQDARLIAMYGAVMQPVPSRANDHKAETFKSLCARRRQILHMKNQELNRQQQTQDRFLGQMIRQTIAFLDKQLTAVAAMIDTMIQQNADWLRRREIIVSIPGFAATTARTLIADLPELGTISNKQAAALVGVAPINRDSGKQQGYRAIGGGRAGVRRVLYMATMGAATRNNRRLNAIYKRLLAAGKKPKVAIVAIMRKIIVILNTMIRTNQTWRADQASSALT

SEQ ID NO: 161361 - protein, 259 aa, unidentified
MPNFRKKTISYCVKDASGQVQREGTIGATRRELDIWIQTLPQPRIMAMEATIFTGWIYDHLLPHAEHVKVAHPLMLRAIAAAKKKNDRIDAGKIADCLRCDFLPECHMASSEIRDRRRTLRYRHRLVRPMVQMKNRISGLLMETGVSHNKQRLHKVGYFRELLASNPEIHENIRPLLRLSRDTIVRCQKTEYALVNSLKRDPLLAERIKRLRTVPGVGPITALTWALEIGDVSRFRSIKQAISYCGLCGEEKSSADKAL

SEQ ID NO: 161362 - protein, 358 aa, unidentified
MNFYTQQHKHYCGIDLHARAMYVCILDQHGTKLVHKNLPTTPEAFLRIVTPYRDDLVVAVECMFTWYWLADLCAKEGIAFVLGHALYMKAIHGGKAKNDKIDAHKIAVLLRGGMLPQAYVYPAEMRATRDLLRRRCHLVQKRAELLAHIQNTNSQYNLPEIGKKLAYKANRAGVEEHFPDPSVRKTIEVDISLIDHYDQLLGEVELYITRTAKAHEVQTFSRLQSVPGIGKILALVMLYEIQDIARFPRVQDFVSYCRLVKCAKESGGKRLGTSGKKIGNVHLRWAFAEAAVLFLRQNQPGKEYFAKLEHKHGKAKALTVLAPKLARAVYYMLTREHAFDLNRFVTAQPLRGGTEPAV

SEQ ID NO: 161363 - protein, 339 aa, unidentified
MNNSVIGLDIAKNIFHLFTLLADGKTLKKKLKRHELLAFFANYPASIIGIEACGSSHHWARELTKLGHEVILLNARFVKNYVVGNKTDFNDAEAIYEAVLRPNKRVVAIKTIAQQDIQLVHNIRKDLVDQRTALVNQTRGLLSERGIIINQGITHVREQLPLILEDAENGLTDLSRELFAEQYEKIKTLDAEIKAQDQRINRLCNANDLSKRFLDVPGVGPLTATIVAADIGDGGKGYKSSRDYAASLGVVPKQHSSADKQHYLGISKRGNRYIRTLLIHGARAVLKNCTKKTDKLSLWLQALVARRGFNKAAVALANKNARILWAMASNGKDYEALVA

SEQ ID NO: 161364 - protein, 378 aa, unidentified
MKRILKIGMDVHTTNYTLCAMEPIIGEDDRVFATIKVTPDYKNILLFIENLKTKLGLNDEYDIQCGYEAGCLGYSLYKQLTAAGVKCVILAPTTMLTPQGVRIKTDMRDAYMIAQCLSYGGYHAVYIPTEDDDSVKEYLRMRNDHKLALKKIKQQINAFCIRHGFCYDGTKWTQAHLKWLKKLEITNQLYRETLDEYMASYEEQEAKIERYDKRIEEIAEQTRYHDKVKKLECFLGIKTHTALSLIVETGDFERFAKGNQYASYLGLAPGENSSSDSIHRLGITKAGNSHLRQLLIEASGGICKGAVGHKSKDLRARQNGNTAEVIAYADKANTRLRSRYYKFIRHGKKRNVAVAAIARELACFVWGMMTDNIEMKAV

SEQ ID NO: 161365 - protein, 333 aa, unidentified
MKFKVFIGVDISKLTLDIAVIGTDSSTNSFRINNNALAIEDFFLGLSKEIDLRGALICAEHTGHYGYPLREFCLSQGHSLWLEGGAEIKLRSGVTRYKNDCVDAIRIADYARRFHDRAKIERVDDQRLESLKALASERDLYIKERAKYRAQLNDLANFMETEMYRAKSTRLKGQVERLNAVISEVEEGINQIIASSQRLSRQKEILKSLDGVGEQVAVQTIIATNGFSKFGSGRKFACHVGVAPFSYESGSSQRSRRKVSHKANRTLKSLFHMAALSAIKMEGEFKRYFERKVAEGKNKMTVINAVRAKIINRIFALIRDDRKYQKNYNPIIV

SEQ ID NO: 161366 - protein, 431 aa, unidentified
MPNEVPIEQEIVAYVGLDWADQQHVICWQAADSAAVQSAVVQQRPEELQAWVAELRQRFPQGLVAIALEQSRGAVIAALMHFDFLRLYPINPKSLARYREAFASSGAKDDPDDAALLLELLVKHRDRLTPWVPDDALSRELALRVEHRRQLVNLQTKLIQQLRSHLKVYFPQALDWVGELDSLQACDFLQRWPTLAAVQKARPSQLEKFYHQHHCRRPQLIQQRLEQIRQAQPLTQDSAIVPAYSQMVLALVAQLRALIPTLQQWQQQISQLFAQQPDAALFASFPTAGPVFAPRLQAAFGSRRDRFGSAAEVLQFSGVAPVTKRSGKSRQVQRRWARPKFLHQSFVEFTGLSIPHCCWARALYQQLRARGHRHWAAIRVVAYKWIRILFRCWQDRVPYDEQKYLKSLERRNPTLWAAIQQLPAQPSRKEV

SEQ ID NO: 161367 - protein, 338 aa, unidentified
MKLYGAIDLHSNNNVTVLIDEQDQVVYQKRLSNDMALIAEQLSGYRDSLQGIVVESTYNWYWLVDGLMEQGHRVHLANTAAIQQYQGLKYTDDTSDARWLAHILRLGVLPQGYIYPKQERPVRDLLRKRGQLVRQRTANLLSIQNLITRNTGSSLNGNRIKTLDVETVDALLPDRDLALAVKANLAVMTCIDEQIDRLERTITDRIKLRAQFSLLRTVPGIGLTLGLTIMLETGDIRRFPSVGNYASYCRCVGSQKISNGKKKGKGNTKNGNKYLSWAFIESANFAIRFSPRIKSYYQRKKAKSHGVIALKAVAHKLCRACYYIMKDQVPFDITKAFA

SEQ ID NO: 161368 - protein, 378 aa, unidentified
MIVIGADTHKRTHALAAVDAGTGRQRGHRQIKAEEQGHLAAVQWARGLDDERVWAIEDCRHVSRRLEQALIAAGERVVRVAPHRMGASRRGEREPGKSDQIDALAIARAVVKDGVERFPAAHLDERAMEIRLLSDHRKDLVAERTRVQNRLRWHLLELSPELEQSLRRGSLADPRRLERIDRRLRRLPACARVRVAREQVAQLRVLSRQADALERELLALVEAHRPQLLAETGCGALTAALLIGRTAGAERFRSEASFARQTGTAPIPCSSGQRDRHRLDRGGDRQLNHALHIIAITRARHDPATRAYLARKEAEGKTKKGALRCLKRHLARRFHHLLSLPPQSAQHDHSSVRQVPARPQQHATTITATAPTPMPCLT

SEQ ID NO: 161369 - protein, 410 aa, unidentified
MIKENYIYVGIDLHKETHTAVMIDCYNQKLGEITFPNRPADFPKLVAKVKKCNTDGKTIVFGLENAYGYGRPLAVWLIDKGYFVKDVNTAISHRQAKHRGAMYRKSDSDDAEAIALATLNMLDKLPDACPNDAYWSLGQLVHRRDNIMKQRTRLVNQLHEQLCIAYPSYKSFFNDISRPTALYFWEHYPSKKYLKGKSVEDLRAELVPVSHNKCSTKTCEKILDAVASDKVKNNAYQDARDMVTLSIVSDLQHYDSQQAEVDKMLEQMYKMLGCTLTTIPGVNVITAVKILAEIGDIKRFSNANKLAQFAGIAPLHLSSSGKGKDVATKQGNRRLQATIYFLAIQMVQVSSKGTPRNPIVQAYYEKRKAEGKTSQQALICISRRLISVIYGMLKNGTEYRMPVVESAGEK

SEQ ID NO: 161370 - protein, 337 aa, unidentified
MDITTVGLDLAKNVFHLVGVNAGGQERMKKRLSRSQVLKVFGNLPRCLIGMEACGSAHYFARELSRLGHEVKLIPAQYVKAYLRGQKNDYNDARAIAEAVRAPQMRFVGVKSVEQQDIQSLVRVREGTLAARTALVNRLRGLLGEYGIVVPKSVSALRRALPEVVEDGGNGLSEGFRRLLSQGQSQLRELDAHIESLTAELTAQAQRDERVKRLQTAPGTGPIVASVFAGVVGDGRQYRRGRDAAAAIGLVPRQHSSGGKNVLLGISKRGDRYLRSLLIHGARAVVIAAKNKEDRLSRWINRLRETRGVNKATVALANKLARIGWAILRNGTCYQPA

SEQ ID NO: 161371 - protein, 431 aa, unidentified
MNRSVEFLSVGIDVGADFSLMAFALPSQELLGKTYKIIHSSQRSLNGAVEKIKTLSQKHQLPARVFMESTGIYHYPLYHKMKDAGFDVFVLNPLVTHAGRDLNVRNIHNDKYDSQKIALLGLRPGLKTSLIPSDQVISMKVILREYYAVKKEISMYICRLKNQLRQAFPQFLPLFSKVNGVTAMAILCEYPNPESLLNAGEHAVADFMKSVSHNGPLKVQKKAAALIQAAQDARSFGHWNHGISILIRHYIEMIRLLDIRAKTLLAQAKALLAEQDSKTLAHQTELLQTIPGIGFLSALTLICELGDFSAFKRPKQLFSYFGLDPIVRQSGNYNGTNLKLSKRGSPFARRCIFVIALQSISLNIHKEPKNPVLRTFYEEKCMCKAKMTAIGAVMHKICNLIFAVLRNDAPFVLQTPEQHNAAYLSKTHSVA

SEQ ID NO: 161372 - protein, 337 aa, unidentified
MKYSGIDLHSNNCVICVADEEDKVVAEKRVPNDLNTILQFMQPWQQELAAVAVESTYNWYWLVDGLQRAGYNVKLANTVAMKKYDGLKHSNDETDAQYLAHMLRLNILPTGTILAPEQRAIRDLARKRLQLVRSRTSHILSIENIAARQQAMKINSNQVKRLQTEDVDKLGFPEDVALAVKSNLAVVHTLNEQIILLEKRLQEEMDQRPEYDLLLSIPGIGRILAVIILLETGPIERFAAVGNFASYARCVDSKHTSNGKKKGEGNTKNGNQYLSWAFVEAANFALRFNTAAKRFYERKKAKTNTSVAIKALAHKLARACYYILKEKKSFDETRCFA

SEQ ID NO: 161373 - protein, 434 aa, unidentified
MRPNAGGIDVGATEIFVAVPADRDTDSVRSFPTFTQDLHELADWLQQCRVDTVAMESTGVYWIPLFQILEARGIEVHLVNAQHVHHVPGRKSDVLDCQWLQYLHSVGLLRASFRPEHAVCEIRSLMRHRQNLVEMACVHVQHMHKSLDQMNLQIHHVISDITGVTGLAIVDAIVAGITNPKELAKLRDYRIKASEETVTKSLVGDYRREHIFTLKQSLTAYRYYQQLIADCDQEIQQRIESFHPKPDDSAGAAAAGLSDSTPTSSTFDLHSHLERIFGVDLTRIPGFECLRIQTIFSELGVDLLSKFETDERFCSWLNLCPKDGTSAGRRIRAPKIKTKNRVTQELRLAAQSLHHNRSYLGDYYRSQRARHGAVRAIKNTAHKLARILFHVVTTRQPYDETVFAKLEARNQKRRLHKLQSMAKQMGYSLVQAHA

SEQ ID NO: 161374 - protein, 409 aa, unidentified
MITYIGIDWSSKKHDICFVNAAGAAIARQVIAHTPAGFAEFERQRERLGVEPAECVIGIETAHNLLLDYLWGHHYTQVYVIPPNQVNRESQARWPSGARSDPSAAQLLAEMLRQERRRFPVWCPDSLLTRQMRSRVSLLMHLTRHITALSNRLWAVLCRYYPAAITVFSDLTAQIELAFILAYPTPQAAAQLTWTVFQVFAAEHRYTQPRKLPAAFARLQQAQPEADADTVTTFQAEAVQLAQLLLPLVQAKQAQLHALTRLFQQHPDAALFDSLPGAGEFLAPGLLVKFGDDRNRFPDAASVQALAGTCPVTESSGKHHVVRFRKACDHEFRTLTQQWAQATLTVSPWAQAYWQEMRPHCHSNSAAYRRLANRWLAIVWKLWQTHQTYDEDYHLQQRAAHSQPPSMKP

SEQ ID NO: 161375 - protein, 418 aa, unidentified
MSRTLAKKLAQVKPGTLFVGVDLGLDRNVAVIINGSAQRLGKFWFPHDQDGYAYFHRRLEKLQKCHQAAVMLVGMEPTNYFWKLLAAELEPRQRPYRLVNPFTVKKRREGDQLDPSKDDVRDAFTIADLLRTGKFTETQLLHGLYAELREYATICERLQCEIVRHKNRLNSAVGQLFPELRWVFKDLTGLTAVAMLRNHAAAALIQGLSEEAFIAGVRRDFEGQRLCVSKLRRVHALAAVSVGLQDGVQALQLRVRQQLQAIALLERQWEEAREAMIDVFLALPESRSLLSVHGLGLVSAATILAEIGDPGHYHNGQQWVKLAGTQPAPNTSGRKTRSRTPMSRKGRPRLRTTLFFAVMRLVQVDDAFGRQYLRFQQREKNPLTKMQALGALMNRLLRILWALVRNQTLYDPAFERPA

SEQ ID NO: 161376 - protein, 376 aa, unidentified
MLAVVVADVEIEGEYQFERRRFGSNPEHLRLLAEWLVEQQVREVFTAQYWQPVWAALERYWKPISEKQKGPGPKSGTLHLAQAQSNRGPRGRKRDFPDAERLVKRLVANELTLSFVPDAEQRLWRTVMRRKYQLTRNRVQLHNRLEALLEEAHIKLSSLVSDLLGVSARRMLKALGDGENNPAVLAAMADKKLRATPAQLCDALGACTELNGVYRRLLKMTLEELQLLEQQISQLEQEMASLLRQHQDSVQRLAEIPGLGVGSAQQIIAEVGATAATFPSAKELSSWVGACPGDEESGGVSKTHRSPKGNRRMRGILNQCANSAIKVKGSIFEIVYRRLAPRLGHKSTIGAIAHRLCHLIWIILRRGVRYEERGPQ

SEQ ID NO: 161377 - protein, 341 aa, unidentified
MGEVTTIGLDIAKSVFQAHGADAAGSVVFRKKLGRGRLLAFFAAQPPCVVAMEACAGAHHWGRELTGLGHSVRLIPPAYVKPFVKRQKNDEADAEAICEAAQRPTMRFVPVKSEDQQASGVVFRARDLLVRQRTQLMNGLRGHLAEYGYVAPKGVMHVERLIAVVEDPAGELPTAARTSLQAMIRMLDQLQVEIAKLDTEIASRAKQDPTARRLMTIPGIGPVTAAAMTALAPSPEAFRSGRDFAAWLGLTPVQRSTGGKQKLGQITRMGERTLRRLLILGAAAVIKQALLKGAPAGSWLAQMLARKPRMLVIVALANKTARIVWALLARGGIYRAPALAA

SEQ ID NO: 161378 - protein, 339 aa, unidentified
MQVTTVGLDLAKNVFHVHGVTHDGQVAFNRPLRRAQVLSFFQRFEPCLVGIEACASSHHWARALSKLGHTVRLMPPMYVKPYVKRGKSDAVDAEAICEAVTRPTMRFVEIKSQEQQALLSLHRARDFMVRQRSQLINMLRSLVAEFGITIARSVARAIDFVKGVIEGPSDDLPELSWDVLRILSRQLVELHNRLRWYEITMRIQARLSRQAQLLQTIPGVGPVTASAVAATIGSGHQFRSGREFAAWLGLTPRNHSSDGKERLGKITKMGDRYLRQLIVVGMTSRVRQVTNHPERADPWLADLLKRKPARLATVAMANKTARIMWAVLARNEPYRPHAA

SEQ ID NO: 161379 - protein, 342 aa, unidentified
MSIYTGLDLSRKRLDWHACAGDGALVDAGAVPPDSDGLARLVHRLGGTDVLAVVEVMNGARFIHDQLELAGWDVRLADPQRARALAPLACKTDRIDAWVLAELARRDLVPEVWLPHPEVRAERERVRFRMHLVKHRTMLKNRIHQTLIAHGHARPTANLFTAKGRALLAGLELPEPWQGTVAASLALIEELDEQIDALERELRRLGADHHYVPLLCTIPGISWVLAYTIASEIGDITRFPSPRKLIGYTGLCPRVYQSGETDRRGALAKNGPDYLRWALVEAAHNAARQPAYRELAAHHRHRHGRPRGSNIAAITIARKLAEAIWWMLTRNQPYPPAGAKTV

SEQ ID NO: 161380 - protein, 419 aa, unidentified
MSFKILKFNCCGLDVHKTWIYACIGITDSNNRTEYKQARFSSFTKGLNELCDWLAKYNCKDVCMESTGKYWIPVFNILEQHEIWVTLSHPKYTKPMKGNKTDRKDAKWICDLYMCGMVKPSFIPPADIRALRDLVRYRFKLTCMITSEKNRAQNCLTVSNLKLDDVFSDVFGKSSRSITEQILQHPGEKFDVSPFVDGRCKTPIEEIQATVDGAISKEQAVKLRQCLDHIDELQKHISEVEREILRLSDKYEAALNLIRTVPGFDKNPMTAIQVLSEIGGNMSVFPTAKHLVSWAGCCPRNDKSDRKIKSTRISRAGSYFKPVLVQVANALIKSKKHPEFTTRYKRIKTRRGHKKAIIAICRMILTAIWHILTDLKPYTPEGFLDSRPVNKEKVLTISQALNLLKQRGYLIKNDPSPVS

SEQ ID NO: 161381 - protein, 370 aa, unidentified
MAGEINKSCGLDIHKRFLIATILCRSGEKQQQRFDRDEDGILSLRNWVTSEKCDVVACESTSDFWVPIHDSLIKHLPFIVGNARDMKAFTHKKTDKIDSEVIAKLALNSMVQPSRVFPINHREYRSYIRLRRKLVQKRTDIKNEAHAVLAPEMFNLKDVLTDIFGKNGREILSGICSGKNVNQILQNLSPNVRKKSAQIRELLDKEISQSAAIRLNICLKLIKDFDDSIEHLEKEIFNYAYGNHKQEMEILMSVPGIGELGAATLIAEIGNFKDFASGDKLASWLGLVPNVYQSADKYHNGRITKRGPKGARWILTQIAQAAARTRNSKLKEFFNRKKKSIGHAKAIIALARKIATIIWHLITVRQEVMS

SEQ ID NO: 161382 - protein, 340 aa, unidentified
MNATTYGLDIAKRVFQLYWVEYESGEIHMVKFGKQELLEFFAQREAGLIAIEACGSAYWWRRKLKALGHEVRLIHARFARPFVQGNKTDAADAKAIWTAVRQPGMRTVAGKTEDQQAMLALHRMRLSLIKFRTMQVNQLRGLLYEFGVTLKGGRQAGLGEIHQRMAELEGILPGMLFEAVKEQLKRLDGIETDVQDIERRIKDWQKQQAACRKIAEIPGVGMLTATALVATMGEANYFKSGREFAAFVGLVPRQSGTGGKIKLLGISKRGDTYLRTLLIHGARAVMFNAKDKGAWSESLLQRRPANVAIVAMANKMARTAWAILAHDREYQKGYVSRVPT

SEQ ID NO: 161383 - protein, 431 aa, unidentified
MHNKNYISVGIDVGSAFSFMTILAPDETVILKPFKITHNNKDSLERAVSEIKKAEELYSLESRIFLESTGIYHYPLFCYLRDKGFNCSVINPIITKNSTNINIRKVHNDRFDSKKAALVGLKPDLKVSLMPSDLALNCRNLCREYYDLMDNRSAYVNKLQGELRMVFPQYLGIFSKVTINTSLTLLETYTSPSAFLKADKQEIIDIIKSTARFGLTYAQNKYNAIIQAATDANQFGYIIDSNIKRIRLYISFIRKYDEEINNILESLHELVDANEDADFVKQIHLIETFKGAGFLSAVSIMGEIGDFSAFSKPKQLFAYFGLDPAVKQSGKFEGTKVQMSKRGSAIARRVIHTLTLQSISISRNGEAKNPVLREYYLKKCDSKPKLVAMGAVSHKVCNMIFAILRDNKPFKIIAPQEHIKQYNAAKCDIAA

SEQ ID NO: 161384 - protein, 346 aa, unidentified
MLYAGLDLSRKRLDYHLLDEAGETIEHGAAPPDTDGLRGLSERVARHRQPLRAAIESMTGARFVHDQLELHGWQVEIADALKVKGLAPLACKTDRIDAWVLAELARRELVPAIWLPDPTVRAERERARFRLHLVRHRSSLKQRVHATLLTHGRPCPVSDLFGVSGRALLKRLALPEPWAGCVEASLCLIDELERQIACCERDLRRLGAQHRYVPLLMTVPGIGFVLAYTIAAEIGEIERFASPAKLAGYSGLCPRVYQSGASDRRGPLSKHGPRYLRWALVEAATTACRHPIYRERYERTKRRLGKQRGPKVAQVDLARRLSEAIWQMLSHNRPFAPAGAPAPMTA

SEQ ID NO: 161385 - protein, 408 aa, unidentified
MESQIIFGIDVSSKSSTVCVVNDRIKQGESFKISNDSFGYQKLYEQLNQYLITPLVVFEATGVYSLSLQAFLEDYHIKYLKLNPLKAKKLMDNNLRHNKTDKVDAYRLALIQFNAPQKLRDPQPREYHELQNASRYYEELTRNIVTTKNQLHRNLQSTFPQIEEILSHPSGRIYWALVSLFPHAGYVLEKNETQVTQMLNSISGIGQQRARYLTTRLYAFAREAYPYDSKDSIIVRAIQRNISNLFSLQQERDYVINYMEKLAKTVNARALSIYLSIPGVARITAVRLVAELGDLRRFSTSAQIDAFVGIDPGRYQSGEKDSSLGITKHGNHIARKILYRVITQMETVKATQPCHITDYYDKKKRSSNSQGYKKIAIASVHKLIRTMFALIKHDQLYDYNVATENKRL

SEQ ID NO: 161386 - protein, 353 aa, unidentified
MTSLTDLRQAVDVVIGVDTHVNTHTAAVVDTHTGGVLAELTVPTTPTGYARLVELADEHSALRAWAIEGTGGHGAGLARVLADRDEVVVELDRPQRAARRNGAKSDPLDAARAAREALTRTRLGTPRTGGDRQALSVLLAARRSAVEASGDAQRQVFSLVIAAPEKIRDKFRGQKIPQMLTTAAALRVHSTWDVETRTTVTVLRSLARRARALTAESDEHTTTILALVRAWRADLLDLPGVGPITAAVVLCAWSHPGRVHSEAAFAMLAGTAPIPANSGQVTSRYRLNRYGDRQLNRALHTIALSRTRYHQPTRDYVARRTSEGKTPREIKRCLKRYIARDLYRRLENSPTTT

SEQ ID NO: 161387 - protein, 356 aa, unidentified
MTSTIKYVGMDVHKESISIAVRNAAGKIVMECVIETKAGTILQFFDGLRGEVQVTFEEGTWAAWLYDLLKPHVTKVVVCDPRRNALLLEGNQTDRVDGRKLAELLQNNQLRSVYHGDHGLRTLKELVRSYLTLTRDLGRVMTRVKAIYRSWAIPCSGKQVYAARHRAEWLGKIKEPGVRQRAEFYYQQLDALRSLRQGVRCELLAESKKHKAWKRLCQIPSIGPIRAAVLLGILQTPHRFRTKRQLWTYSGLGIEIHSSADHEVANGQLRRKKKPVDIRGLNENCNHDLKNLFKGAAVVASIKSGPFAKFYAALVGKGMRPEMARLTLARKIATIVLIVWKKGVCFDAQHLKPQTA

SEQ ID NO: 161388 - protein, 365 aa, unidentified
MPLYGGIDLHSNSNQSAILNENRKRIMKRKLANDPALILSFWEPYKADLVGIVVESTYNWYWLVDLLQENGYRVHLANPAAIQKYNGLKHADDNHDAFWLAELLLLGILPEGYIYPKEIRAVRDLLRKRQQLRQLRTSLILSLQNIVTRNGGPKLSAQDLKTLKEDRAQAYLQEFPEVLLAGSANKACIDALTQQMARIEAGVEQKLKRQEPYTKLQTLPGVARILAGTILLETGPIHRFATVGDYASYCRKVDSQWTRNEKVKGHGNKKNGNRYLAWAFSEAAEKARIHHRASREFYQRKLRQKKSVSLAHNALAHKLARAAFYILRDHVPFQQEKMFGSPPARWNQELGADGEPILKLGKPGD

SEQ ID NO: 161389 - protein, 400 aa, unidentified
MRVVFGIDVSKVSSEVAILVNGEKVHNYTMSNDAIGFSRLLGDLKTVHKPEIIFEATGVYSRRLQTFLEDNGYAYTRLNPLEAKKQLDSLRVRKTDQIDAEKLAQSQFVLNRKPTYVQEEVYQNLRDLSRFYQNLTEDIVRAKNRLHKVLQVTFPELETILSTPTGEQYWNLVIAFPCKDFVLELSKDELSKSIRLSTSKRISDKRVAYLAEKLTALANQSYCAVKKTSPVLEEVRYYAKELLRLFEQRQTVLDKMVTLAKPLPEYDILLSIPGIAETTATSIIGELGDIRRFQSANQINAFIGIDLRHYESGNFLAKEHITKRGNPYARKILFKCIHNIASASHTNPCHIADFYEKRKRQSQTTSTKPHTIASIHRLIRTMYYLITHNKLYDYTSTQNR

SEQ ID NO: 161390 - protein, 343 aa, unidentified
MDVGVLGIDLGKNSCSVVGLDPTGRVVLRRRMRRESIVALAAKLSGCVVAMEACCGAHHLGRLLAAQGHEVRLMSPEYVRPYVKAQKNDDRDAEAIAEAATRPTMRFVALKTEAQLDVQVLHRVRDRLVGQRTALTNQVRSILLERGIVVPQGRRRLLDALQVISDQPDGSGVGPRVRLLLDDMLDQWRGLDRRIAALDDEFAAMARNDPAARRLATIPGVGVLNATALVAAIGDGRTFSRGRDLSAWLGLVPRQASTGGKPKLLGITKRGNKYLRKLIIQGARAALPSLSRTATPLGSWLRGLLGRAHGNTAVVALASKLVRIAWALLRNETAFAAGGLAAA

SEQ ID NO: 161391 - protein, 413 aa, unidentified
MTDSTHINPDSIFVAIDIAKQNHDALILWPSGHKKVIRIPNTLEGYQQLLKATHALPAEITIGFEPTADYHRNVAFWFKHQGAQCMLASSLSVARAREMLFKTWDKHDRKDARLILYLMQQGMVRPFYDPLVESTMDIQELSNTYHQISLSRTRIQHSLVNHYLTLYFPEMERYLHSTRAEWFCRLLLKFPTPNSILRYKKATFVKRAWDIVGRKVCKQRFLEEVYEIAAHSIGLPVALKGLGITTFKLQLQRYLELSIQRNELEKMAESMLSQRTDYQRLRTLPGVGPIISLMIIAESGDLCRFAHYRQYLNFCGFNLSASQSGQQKRQYHLSKRGNARLRYAYWLAAVSAIRQRENSFRYKYERYIRNNPTCDDTKRKARVAVATKLARVAHALVKTNTDYRGYYEFGHET

SEQ ID NO: 161392 - protein, 479 aa, unidentified
MAAKKKDARTDKDTGAAAVPGVDGAEVAEDRVQVIERAAAIDVAKGSGMVCTRVPGSRPDRRRQTVWRVEATYAQVIALMDHLRCEGIQRLVLESTSDYWRIFYYLAEAAGLEVWLVSARDARHLPGRGKSDRLDCVWQCKLNERGMLRRSFVPPQAVRDLRALTRTRARLAQDQARHQARVEKILEDALLKVSVVISDLFGASGRRFLDALVAGQRSPAALAALGDPRLKATRKELQDALTGRFRDIHALEISTHLRLIDAINAEITRLDEKIGQQLALVPRTAPCCVACGLAGGGHAPGCAEEDTTPLSLAARLDEITGIGECNAAVVIAELGTDPSVFPTPGHAAAWARLTSRTMQSGQTARPGRTGKGNRYIRGALGQAAMTAARTDTRLGAMYRRIARKRGKQKAIVAVSRIICEIAWILICDPGARYQELGPDYYTPRSPARQTRDKIREIERLNPGKKVILAPAGPAGPAAA

SEQ ID NO: 161393 - protein, 317 aa, unidentified
MTYYVALDVGVRTLALCIIDEDGEVQLERSLPSDVEPIVKCLGEFGGEIEAIGLEAGTLTQYLVYGLRDAGFRTVVMEACHVKSALGAMRNKTDRNDARGIAQLLRTGWYQEVYVKSLESHYIRTILSSRKVLLRKCVDLENEVRGLLKVFGIRLPAGLQHGAFDKVVRDPVEQNQALAHALLPLLDARSELYKAFLELDRRVRAIADKDEICQLLRTIPGVGYITSLTFKAAIDDPSRFKRSKTVAAHFGLTPRRYQSGERDIQGRISKSGDGEVRSALYAAANSMMTRAAAWSSLKAWGTKLIRAKGRRAWILVI

SEQ ID NO: 161394 - protein, 405 aa, unidentified
MNLVVAGLDWASEKHDVLICDADGRRLAERVVEHTEAGLTGLCELLLEHEVCWVAIERPDGLLIDRLTDAGIAVMAIHPNQVKAARPRFTAAGGKSDRFDAMVLCELARTDAHRFRLIRPDSDATRALRARTRGRQDLVEQRVAIANQLQAQLDCFWPAGSRVFGDLASPISLAFLAAHPTPADCRGLGPKRMAAFLARHSYSGRRAPELLLERLHAGGPAGRTGQHELAARRAIVLALVAALQVLVAQIALLTRQISAALQEHAAGPVFRSFFTDPKTALCPASLLAEIGDDTGRYPDRDTLCADAGMSPIAIESGKHQHAAFRRACDKRLRAQICVLADASRRTNPWAADVYQRARARGQNHPRAIRTLGRAWTRILWACWQNDTPYDITTHRAATRHTHTEG

SEQ ID NO: 161395 - protein, 331 aa, unidentified
MQGRAVKEEKVMEKAKLYAGIDVAKASLDIAVHPSEQRWSFTNDDRGISEAVYCLQRVSPALIVLEATGDIEMPLTAALVVAGLPVAVVNPRQIRDFARAMGKLSKTDTLDAQVMAHFAANVQPKPRPIPDAQTRELSDIMTRRRQIVEMIVAERNRLLTARDVVSEGIQSHIAWLEQELANINRDLRGKIRKSPLWREKDNILRSVPGIGPVVSATLLAELPELGTLNRRQIAALVGVAPLNRDSGTFRGKRSIWGGRAKVRALLYMSTLVASRHNPIIRAFYQRLCAAGKEKKVALTACMRKLLTILNTMLRHRTSWCYPNTQIIGPCS

SEQ ID NO: 161396 - protein, 380 aa, unidentified
MEILYTNCAGLDVHKKTVKVCVMTHASNGQLQKEFRTYFTTTEELLKLCDWLKEQGCTHIAFEATGVYWKPVFNLLEGCFEVLVVNAQHIKAVPGRKTDVKDAEWIADLLAHGLLKASFIPSGPQRELRDLTRYRVRLTEEKAREINRVQKTLEDTNLKLGDVVSDIMGKASRMILQAIADGETDPGQLAALAVGRVQASQEQLEAALKGKVTDHHRFLLQEHLTQIRHLEQAIERVTAEITRRFTPPSPPEETPSAQKEEGATQELSSDSVPQQQASSSSQAALSWAVAVVLLCSIPGIGERTAIGILAEIGINMQQFPSAAHLASWAGVCPGNHESAGKRLGGENAQRQSLVTMPPRAGCSFGLSPEAELSRLRNIVA

SEQ ID NO: 161397 - protein, 426 aa, unidentified
MNCTQNYKIDQVTEQTLVVGIDIAKRTHYACFVDDRGRVLRKSFPIFQSKEGFQQLYEAIQGAMQAFGKSEVIVAVEPTGHYWLNLAYFLEEHGIPLVMVNPAHVCRSKELDDNLPTKHDAKDALVIARLAKDGRFLVPRLLHEIEADLRVGSTLKEKLRKEQTAVKNAIVRWTDRYFPEFWTVFRDLGKTALSVLEWTPLPADMAGRSAEELIEVYRQSEGLKCPQKAKIQALINAAKDSIGVTEGTTMARFEIAALVRRYRQLEAEIAALDAELKALVQTTMEYQWLKTVDGLGDATIIDLLAEIGSFAHYRDPRQLVKLAGLTLKENSSGQRKGQKHISKRGRKRLRSVLFRAMIPLIRHNEAFRELHEYYTTRPVNPLTGKQSIVALCRKLLNVLFAICTKKQAFDAERMKQDVLSQVQRAA

SEQ ID NO: 161398 - protein, 314 aa, unidentified
MPALTIPTRRVIGCDVGKTSIVVFDSATGRLAALANEPKALQAFAKTLDPDSLVICEATGGYEAELLDALAQAGRAVHRADARKVKAFIRSLGTLGKTDAIDARALARYGQERHDRLPLWKPREEARQRLHTLVTTRRDLVAQRVAFRNRRQAPGAAPVARRLERILRALDEEIAGIDADIDALIRNHASLMRGMQALQTIVGVGAATAATLLALMPELGALPRRQAAALAGLAPHPRQSGARDAYRKTRGGRPDVKRALFMAALAACKHNKQLKSFYDRLLAAGKKPLVALTALMRKILVIANARLRDALKTI

SEQ ID NO: 161399 - protein, 357 aa, unidentified
MLIIGCDLHTRFQVIAMVDTTTGEMVTRRLEHENGETWKFYAGLGEKARVGIEATGCTQWFERLLAELGQELWVGDPAEIRARAVRRQKTDTRDAEHLLNLLLSNRFPRLWVPSVEERDVRQMLRHRHKLVQMRTSVKNQLHYLAMSQGLCRKRKLWSERGRQELEGLTLGRWASRRRQELLERLERLEPRIEELDKAVKEEAERRPAAVRLMQQKGVGPVTALAFVLTLGPVERFASSRKVVSYLGLNPSEDSTGGRQRLGHISKQGNQMLRWLLVEAGQSASQHDPELRRRYQRLKFRRGANVAKVAMARRLAVRMYWILRPDPDKAPPIRMSGSPTQSMVDHRPDSVGTTPSTL

SEQ ID NO: 161400 - protein, 339 aa, unidentified
MAEYYAGIDLGARSSWLCVVDAKGEKQLSRKVPNDPARILDWLDPFRPSLQVVIESTFNWYWIVDLLEDHQIEVKLAHPLYLKAIAYAKVKTDQVDAHTLAQLLRLDYIPEAFIYPRDLRPTRDLLRRRHRLVSWRSDLVRVLHFQLISHNVTTFGRNAIRQLDDRQLRGLLTHPHDRQVGRSILHLIAGLDLEIAELEKQVSASVFRKKPVVLLKTIPGIGKILAATIYFEVGQIHRFASDKAFASYCRLAPTVAQSGGVTRQGRNRKQGNRLLKWAFSEAAQLAIQGYPTIREQFEQLLRRKKKRILVKSILAHKLAVAAFHVLHDETPCQPGFLTN

SEQ ID NO: 161401 - protein, 431 aa, unidentified
MKKDMINNRLEEITTATLVMGVDIAKEIHWARFVDCRGVEIGKAISFRNDRKGFEKIVAEIEKNRNLKVLKQPFDNVVIGMEPTGHYWKAFANYLMKAGYKVVCVNPYHTKKAKELDDNSQTASDKKDAMTIGRLVKDGRFFEPYMPEDIYAELRGLTNARVSEMKRNNAVKTTITAILDEYFPELWTVFKKPLNGKASRQVLRVCPFPAFILQMGEDSLLEEIKKAVKKSVGIKTVRRLIKTAEESIGVSYGLNAAKLRLSIFLDELELIEKHIDEIESAMARALTATGYSEKILSIKGIGIVTAAEFLGEVGDPLRFQNARQIANYAGYNLVEDSSGKSRSGTRISKRGRSQLRGLLYQMAFTMVRCNPEMKALHQYFTSRSKNPLKKKQSLVVISKKVITVIYTLLKKSKFYDPTKALGSVRREMMEA

SEQ ID NO: 161402 - protein, 438 aa, unidentified
MKVMYERVAGIDVHKDMIKVAVRSPGDKPWTRKTEILTFRTFYGVLRAMARELRRRGVTHVVMEASGVYTEPVYYALCEEDFTEVAVVNPAHAKALKGHKTDAKDCARLAELFECGLLQGSYIPAAGLKEMRDLSRYRMKTVQARTSEIQRLAKALESAGIKLGSVASEITGKGPVAMIEALISGERRGAVMADLAKGRARTAGKLADLSMALEGRFTDHHALMCRLHLDRITALDAAVADLEARIAATAADWQREIDLLKTIPGFGDIVAWAWIAEIGPAPHQWFASHHKLASWVSLAPGNNVSAGKRKYGRAGDAGTYIKPMLIQAAWAATQVRGRLQARYNRLVRRMGGPKNPAAKKKAIVAIAHTLLKIAYTVLKTGTGYQEPGADFYTRRESPGHRQAWLERQIQKLHPGCTVTITISPSPDPAPEAALPPGA

SEQ ID NO: 161403 - protein, 421 aa, unidentified
MMKWLDAKRQIYDEELHAMNNVAGVDVSKGKSMVSVLRPFGEVVAKPFAVGHTGSELKELADYLKSLDGETRVVMEHTGRYYEPVARFLHEEGIFVSAVNPKLIKDYGNNTLRKVKTDKADARKIARYGLDNWAELRQHTLMDTIRTQLKTLNRQQGLYTKTKTMMKNNLIALLDQTYPGVNDLFDSPVREDGSQKWVDFATAFWHVDCVRNMSFAAFTERYRKWCKRNGYNFSQSRAIKIHTEAQDLIAMLPKDALTKTMVRQAADALNAVSKSLERLKAEMRSLASQLPEYPVVMAMRGVGDSLGPQLMAEIGDVTRFAHRGSITAFAGVDPGSDQSGTHEAKSPRTSKSGPPELRKALFLVMDCLLKTMPADDPVYRFMDKKRSEGKPYLVYMTAGANKFLRIYYGRVKEYLASLEEN

SEQ ID NO: 161404 - protein, 358 aa, unidentified
MQTITIEQKVSQKRAPVEAGVTVKFGLDVHAAQITVCRQIDGQVPQPAQKLGWAECVEWIDRHVQAGAVIHSCYEAGPCGYGLHRQLTKLGVTNHVVVPQRWDEQNKRVKTDARDARELCDRLDRYVRGNTTAFSVVRVPTPEQEQRRALGRQRDTLVRERQRCVVRGHGLMLAQGVRAPEDWWQPKVWESFRQDLPEWLRTQILVWQEAALGLEAEVNRWTHQVVAQATDQPIPKGVGALTHALLAGEVLDWQRFKNRRQVASYTGLCPSEHSSGERPRQGGITKHGNPRVRHHLVEAVWRLLQWQPDYPSLKKLRAATGKRTRKRLAVATARRLAIDLWRINTGQCTAEKLGLKLA

SEQ ID NO: 161405 - protein, 475 aa, unidentified
MNIKGTKKKNQVVTANIFEQQELLKKSEVIKENLTASTWRELETNGKFDKNKKLSFISDDMLILGCDVGSETHYVRAIDTRGRELSKSAYSFNNDYEGFQSAKEWAVKIAAEHDKSQIVLGLEPTGHYWFCLATWMIANGISVVQVNPYAVKQTKEVEDNSQLKDDRKDPKLIANLVKDGNFGMPYLPEKIYAELRRLSMFRDQLNEDRIRTINRMHREMKIYFPEYKEALGKVDGAFSLELLKEAPFPDELTALGEEGIRQIWHAAKLRGRGYSRAREILQYAKASVGIKDGSIASKAAVKWFVQKIMELDVELAVIENQINQKCQEIPHTGNVLEISGIGENTLSGILAEMGDISRFDDVKEIQKLSGLGLVACSSGKHKGETKISHRGRKRLRYWLFQAAKSAVAHAEEFKELHMYYTTRADNPLKKMQSLIVIACKLLRIIYTILNTGTFYDPKKMLMDIRRLEKKEAIVA

SEQ ID NO: 161406 - protein, 408 aa, unidentified
MNAVGIDVSKGKSMVAALRPMGEVALLPQEFLHTEVGLEQMAYAIIALGENTRVIMEATGRYHEPVAAALHEYGIYVCVLNPLFIKQSGGGSIRKVKTDKADAMKIAKYGLDNWVDLREYTPMDTVRQQLKLCSRQYNLYMKTVVSLQNNLISLTDKTFPSVNELFSSPERADGHQKWVDFVMTFYHCDCICRVSEKAFTERYQKWCKRKGYHFSAEKALDVYAGSCGHITTLPKNDNTKLLIATAAQQLLSGKMTLAALRAEMTRLAKQLPEYDTVRAMYGVGETTATQLMAEIGDVRRFPRRSSIVGFAGVDPAVDQSGKHSAKSVPTTKRGSPHLRKTLYQIICTYLRKAPADEPVYQFLDKKRAEGKPYFVYMTAAQNKFLRIYYARVKECLEAFDAQQDTSQR

SEQ ID NO: 161407 - protein, 442 aa, unidentified
MEILYRCVGGVDVHKKQVTVTARTPGPLGGARRETTRTFRTFYGELLAMARWLVAERGVTHVAMESTGPYWWPVWSALREVGGPGLVIEVVNAAHVKAVPGRKTDVKDSQWLAQLMEVGLLRGSFLPPEQVRQLRDLTRYQTKLTEERSREKQRLLKVLEAAGIKLDNVASDTFGVSGRSMLEALVAGERDPAVLAGLARGVLRGKLEDLRLALAGRFTAHHGQLVALHLARIDHLDQMLAQVKQTIGRAGQDPPCGLAAPFATQIGLLVTIPGIGERAATAVISEIGVDMARFPTAKHLAAWAGLAPGNHESAGRRRSGRRRKGNAHVCSILVEAAFAASRTRSRIGARYHRLHRRFGGRANPGAARKAAFAVAHTLIKIIWSVLAGGEPYTDLGDDYYTRRVDPQTRTRSLIAQLEALSGKKVVFCEHGDDPGGGQPRAA

SEQ ID NO: 161408 - protein, 394 aa, unidentified
MRRQSRIRQEPVMSDCITHVGLDAHKKDHKVAMYLPGSDVPLEAVVPNTLRDVERWVRQAQKKAPGEIVVAYEAGVCGFALQRQIERAGVRCIVIAPSLIPIKPGQRVQTDRRDAAALGRLLRSGMLTEVHPPNVQQEAARDLCRCREAAMRDLGRVRHQVLKFLLRRGMSFNEGVHWTHKHMAWLGSLALEDPMDRDVFAEYLGELEHRQERLARLDRSLERLAQSTDYKEKVGWLRCFQGIDTVTALSVLVELYAFARFASPRELMSYLGLTPSESSSGATVRKGGITKAGNSRVRRLLIESAWQAPRRATASKALQVRRRDQPAWVIEIAKRSQQRLYQRYWRLVQCGKMPVKAATAVAREMVGFLWSVLREPRPGAAEGSGAPRPRPPDA

SEQ ID NO: 161409 - protein, 342 aa, unidentified
MQTITTIGLDIAKSVFQVHGVDAAGQVVRRQLKRRYVLAFFQKLPPCLIGIEACASSHHWSRELQALGHTVRLMPPAYVKPYVKRQKNDATDAEAICEAVTRANMRFVPTKTPEQQSCLMLHRTRHLFIRQQTAVINAIRAHLAEFGIVAPVGRKGVTELLHVVADPSDGRVPEVARACLAALGTQLLGLKEQIVEFDRLIMAWYRSNETSKRLHCIPGVGPLLATALAASVADPQTFRSGRNFSAWIGLVPKQHSSGGKDRLGSISKQGDRYLRSLFVAGALSVIRYAKIHGTKHRPWLTALLARRPTKVAAIALANKLARMAWAMMARGERYRQPVALAA

SEQ ID NO: 161410 - protein, 343 aa, unidentified
MAKTPIAVLGIDLGKNSCSLAGLDAAGAVIMRRRMTREGTIKFVATLPACVVAMEACCGAHFLGRTFACQGHTVRLMSPEYVAPYVKAQKTDNRDAEAIAEAATRPTMRLVTLKSEAQLDLQVLHRARERLVAGRTRLINQLRAMLLERGVILPKRRAPLIKRLDELIAGELPISQRARQLLLDLRDEWMDQDRRIKAYDDELMALTREDGAARRLATIPGIGVINATALLAAVGDASAFAKGRDLAAWLGLTPRQHSTGGKTKLLGISKRGNKYLRTQLIHGARAAIVHFAKKATPVGTWVRQLLTRAHPNVVVVALAAKLARIAWAVLRHGSNYDHRAATV

SEQ ID NO: 161411 - protein, 347 aa, unidentified
MYSGIDLHSNNSVIAIIDDGDRVVAQKRLPNDVTMIVGFLVRWQEQLAGVVVESTYNWYWLVDGLQDAGFHVHLANTAAIKQYEGLKHSGDETDAQHLAHLLRLGILPTGTILPREHRVVRDLARKRMQLVQSCTTHVLAVENIMARQLGGRMTSNQIKRLTDDTINSLPLEGDVGLAIKANVAVIATLQSQIEVLEKRLQERVKPRPQYGLLTSVPRPQYGLLTSVPGIGQTLATVIFLETGPIDRFAQVGNFASYARCVDSVHTSNRKKKGEGNVKNGNKYLAWAFVEAANFARRFCPEAKRFHERKKAKTNNIVATKALAHKLARACYHILKEGKPFDVTRCFA

SEQ ID NO: 161412 - protein, 384 aa, unidentified
MDRIVGLDLGEKISYCEIKGEEVVERATVAGIAGLVRLLGPNTLPAKVAFEACREAWAVHDQLRAWGHTPLMLDTTRVRQLGIGQHKRKNDRIDAEVIARALGLGRIPLAHVLSPHRRELRLQLSVRRALVETRAQYATTIRGLVRAGGKRLPPCNPENLPLKLAEEPLNPTTRRMTEPLVKLLQELTPQIKLVEAKLEQLCEGEPVIAQLQTVPGVALIVAAAFVSVIDDAKRFTDAHQVEAYLGLVPSEHTSGKRKLGAITKQGNSYMRALLIQSAHCILRLRADDPLKRWGETVEQRRGLKIAVVAVARRLVGILWAIWRDGTRYDVTKLGHASARGLSSHAEELKAEAAQMRADVSPTGNRRSAPRAAKRATHSREVSMT

SEQ ID NO: 161413 - protein, 394 aa, unidentified
MKLFVGIDVSSKDLVTSIISEEKHEVVFRGNFVNDLKGATELKKQIINTANSNQIDQVIIGMEATSIYSFHPAMFFQEDIDLKAFNTQSVVVDPKKTKRFHDVFAEDKNDQIDAYYIADYLRVGHYSIGIVRQENYIALQRLTRSRYEIVQSLVRVKQHFIENLYYKLNKLVISDELNTSIFGSTMMQLLTEDLTTDDLLNISINDLTDYLAEYGRGRFADPEALAKTIQKAVRSSYRLDKVVANSVDAVLSVYAAEIKTFQKMIKDLDKSIEKVVKVTDDEQILRSIPGIGPVYAAGILAEYAGLSWREKQSGSYTSDNTPLKRTGNTYLRYYLVEAANLVRTHDPVFGEYYQRKYKEVKHTPSKRALVLTARKLIRVIYFLLKNHQIYQEKR

SEQ ID NO: 161414 - protein, 423 aa, unidentified
MNHYKHGPYTAYIGIDWADTKHDICLQAAGCEQREFSCLPHQVDDIEQWALSLRQRFSGPIAIALELAQGPIVYALQKYDFLVLFPINPSTLAKYREAFTPSRAKDDPTDAELALDLLLCHPDRFQPLKPQSVELRALATLVEQRRDLVNDRVRITNRLRSTLKQYYPQVLEWFDRINTPLFCDFITRWPTLEQIKRARKSTLERFFRQHSMHFAQVLENRYQAIKAATPLTQDVGVVTPHRLYTLVLAEQLRVTLQAIRHFDDEIAQLAPLHPDYALFSALPGAGPSLAPRLLVAFGEQRDRFTSAAEVQKYSGVAPVTERSGRKHWVHWRWQCSTFLRQTFVEWAAQTINKSFWAGAYYRQQKAKGCSHQAAVRALAFKWIRILYRCWQAHTPYDELTYLEALRRRGSPLLDQLGAVVESA

SEQ ID NO: 161415 - protein, 314 aa, unidentified
MTYVGIDVSKVTFVVAYSSVKTNKTRTFKNTVNGVHEFVQTISASEHNCVLEATGNYSALLVYLLSEAGITISLENPLKIKNFARVMLTVTKTDEIDARLIALYGEKMQPAPYKLRSDAILVLKQKRTVLRQLKKQLVATRNLKGSMEVLPFFDPKCKKTIEKTITFLEKQIKEMEQGEYKKQMDLLTSIKGIGVTLAAALIVATGRFSYFDNAKQLTRYLGLSPTYQQSGTSVNVKGHINRNGDSSLRSQLYVAAFSSLRCNTECKACFDRLRSNGKPGKVVVIAVANKLVRQAFAVVTQGKPYVDGFKSEKP

SEQ ID NO: 161416 - protein, 421 aa, unidentified
MGKERRWFVGVDWGSQEHVVSLYDDEGEKISQRRFAHGGTGLTDMIAWLLKASGGKPGDIHVAIETPHGPIVEAVLERGFNAYSINPKQLDRFRDRFTVSGAKDDSRDADVLADSLRTDMRAFRKLSIADPIVVELREWSRIDEELKVEHVRLTNRLKHQLWRYYPQMLELADDVGANWFLDLFEVVPTPEKAANVREKTIARILKNHRIRRFDATHVLSELRKPALSVAPGTIEAATARIRGLIERIRIINNQIKDAGRQLDRLCKNLSEPVADKDEETSPGQKTEQRDAAILDSLPGVARTVLATLLAEASDTLQRRDYHALRALCGSAPVTRRSGKSCIVVRRYACNQRLRNATYHWAQNAIQHDATSRAKYDALRAKGHGHARALRSVIDRLLNVACAMLNSGTLFNPEFASKQTTG

SEQ ID NO: 161417 - protein, 346 aa, unidentified
MEQYIGLDVSLKLTAICVVDRTGKIEREGVVHSDPEAIAAFIKSCAPHVARIGLETGATSTWLWTELNKLGLPVICIDARHAKAALKMQINKSDRNDAVGIARIMQCGWYKEVRVKDLDSHAVKALLVSRALLVKIKRDLENQVRGLLKNLGLVIGPAKMNAFALRAAELTEDRPELAVAVTPLLTARVAIEQQIADLDRKIMKRARNNAQVRQFMTAPGIGPITALCFLATIDDPGRFRRSRSVGAYVGLTTRRYASGEIDWTGRISKCGDKMLRSYLYEAANVLLTRVAKWSALKAWGIRLAKRSGLRKAKVAVARKLAVILHRMWIDGTEFKWSSKETANQTG

SEQ ID NO: 161418 - protein, 336 aa, unidentified
MKKYIGLDAHSSTCSFCVMDARGEVIDTATMGTNGRLLIGYLRGISGEKILTFEECELSSWLNEILRKEVDELVVCNPVENRVYKKAKTDKLDARNLANLLRGDYLTPVYHDGSDREKFRDLMSGYQDLVDDAVRIKNRYKSLFRKEGKKVRGKALYSDESFLKGLERKDFQFIGAHMYRMLEEMEKGRLTYIREIKKYSLKFKEIKYLKTLPGIGDIHAAKIVAQVIDPARFKNKYKFFSYCGLVRHRQISGDKSYGDKKIWGNRMLKCVYKMAAESALKGNTGMRRYYDYLRGKGTGHKNAKNAISRKIAAISLVLWKKGERYCDDMITSGLIK

SEQ ID NO: 161419 - protein, 342 aa, unidentified
MSTVTTIGLDIAKSVFQVHGISASGEVLIRRQIRRGQVLKCFSSLPPCLISIEACASAHHWSRELQSLGHQVKLMPPAYVKPYVKRQKNDMADAEAICEAVTRPTMRFVETKTCEQQSVLMLHRVRLMQVRQRTMLTNAIRAHLAEFGLVAKIGREGVDELLLLVRDGDERVPELARACILALAEQLVLVKRQILEMDRRITACHRANEVSRRLVEIPGVGPLLASALVAHVPNPRAFASRRNLAAWIGLVPKQNSSGGKERLGGVTKQGNRYLRSLLTGGALAVIRFAQRHGTKRPWIVQLLAHRATKVVAVALVNKMARMVWAIMAKGERYREPVVAQAA

SEQ ID NO: 161420 - protein, 343 aa, unidentified
MNSLYYIGLDVHKKTIAYCAKKQDGQVVDTGVVAADRDELLRWVDAIDQPWSAAMEATLFSGWIYDFLRPHCVELKVAHPKMLKAISGSKKKNDRVDAEKIADLLRCDFIPECYMAPENIRELRRVLRYRNLIVREGVRMHNKMAGLLMEVGAKYNKKRLKGSRYFNNLLETVDYVPRSVIDLLKLSRSAMEMFKAVQRKLLDALRRHPDLKKRVDLLMTIDGVGEVTALTWALEIGDPRRFKSRKHVISYCGLCSAQRESAGKSRRGPISKQRNKHLQTVLVQAAKLAPHWNDEIAVVHERELKRGNRNRATLAVARKLVGYMLAVDLRQTAFELRSDLVSV

SEQ ID NO: 161421 - protein, 324 aa, unidentified
MLYTGLDIHKKSIYGTMMDAEGNIVEQAEFVNCKKELESFLCGRLTKVVIEACGFWMDTYDKLREMGYDVVLAHPGKVEAIASAKMKTDKIDSEILAHLLRSNLIPEAWAPDKSTREKRDLVRFRSYLIRNRSRYKAKIKFVLLKLGLRYPQSMWKGKNRKEAESIDPKIAAYFRIIDKIDEEVASVDRQISAINRDDKEVALLKTIYGISDYAAITIMSEIGNIKRFPTVKKLKSYSGLVPSVYQSGEKCRTGHITRQGSRWLRWILVQCCHVAVRQKESKLGKYYSRLCKKKNKKVAMVATACKMLEIIYAMLRDEKPYAGL

SEQ ID NO: 161422 - protein, 388 aa, unidentified
MSSTSNPRELAEIAFRPDHATVYVPLELSRSKWLITSMSAWRDKMSKHPVDAGDGAALLDRLARLRMEAEQRLGAPARVVVIQEAGLDGFWIHRLLEAGGIESHVVEPASIAVPRRHRRAKTDVVDGEMLVRTLAAFKRGEPRVCSMVVAPSPGEEDRRRVSRERRTLIKERIEHANRIKGLLASQGISGCEPMRRSFRDRLESLRTGDGRPLGLRLKAEIGRELDRMDLVLRQVAAVEADRDALVRPDHADAEAPAARLMKLRGIGPEFAAVLWLEGLFRRFANRRQLAAYAGLAPSPWQSGRVDREQGIAKSGNPRLRTAMVELAWLWLRHQPDSALSRWFRERVGSERGRIRRIAIVALARKLLAALWRYTTSGELPVGATLKTA

SEQ ID NO: 161423 - protein, 359 aa, unidentified
MNSVGVDIHKTRCVACIKTPEGRILEEFTFQNNPEGLTQLITHLKAYPEVQVAIESTGNLWIPIYDRLEDEQIHTVLTNPKRTRIIAEAKIKTDRLDARILADLLRANLVSASYVPPPEIRMQRSIIRERARLVQLRTIIKNRIHTLLDKHAYKPPYTDLFGKHGLEWLRRLELPNGDRMLLEVNLEQLTSLNNSIDKLTQSIATSAIMTPEVKLLMGFTGIDYYSAMLLLNEIGPIARFDSPKKLVSYAGLAPSTHQSGNRTLHGPITKEGNSHIRWILIEAAQHASRHDPRLSQFYNRIAKRRGHNKALVAIARKMLVTIYHVLNHHSQYRGLRSELYANKIRRLQRITQPSLQKSR

SEQ ID NO: 161424 - protein, 319 aa, unidentified
MAQDDLVVVGIDVAKDKVDACIRRFKLRQTFPNTLQGRRKLTVWLRKYQVGKAVMEASGGYEREWRNVLHSAGIEVRIVDPRRVRNFALSAGRLAKNDPIDAEMIAWFAETFSQAPGQVPDAAREELAALAKARKALVDVKIRLQAQNEHAAPEPARKAHARILKSLAAEIDKLEAAISAKVKATPEFAERAEIIQSVPGLAQTTSAILIAGMPELGQVSDEVAAALIGLAPYDDDSGKRRGERHIKGGRRWVRNAIYMPCLGAATQNNPVLKAFYQRLIAKGKEPKVALVACMRKLIIVLNTMLARRQKWNPGCHAVA

SEQ ID NO: 161425 - protein, 345 aa, unidentified
MELRAIGIDLGKTLFHLVGMDAKGNVVVRKRCSRKQLLVYTANLRVGRIGMEACAGAHFLGRALREQGHDVRLMPAQYVKPYVKTNKSDYIDAEAIAEAVTRPRMRFVPIKSDDQLDLQSLHRVRERWVMRRTAVVNQIRGLLLERGITIRKGRCHVDAALPGILEDASTKLSGALRLLLAQLRLELDHLQTRIDEADAVIQQTAGENEACRRLVAIPGVGPVTATAIIAAIGNGAAFRKGREFSAWLGMVPGEYTTGGKQKLLGISKRGNTYLRRLFVQGARAVLQQSAKQSSGLSAWLTQLTARTHPNVAAVALANKLARMAWAVLAKNEPYRPPVLADAATD

SEQ ID NO: 161426 - protein, 387 aa, unidentified
MYYCGIDVAKRGHVVSVIDDTGKVLNHGVPISNDRIGFQQLADLLEPYRGGIRIGLEATGHYWLALYDYLCHLEYDLSVINPLQVKAFRKMDIRKRKTDRLDSVAISEFMRFANPGSTPADLPVIIQLKELTRFRFHLVQQIGDCKRKIISILDRVFPEYEQLFSNVFLVSSRQLLHHAVTADEFAAFDLNELAQILHTASRHRLGIDKARQIHLKASQSVGVSFLTDAIHTEIQCLLQLIELLEQQRSQVDAKVEQLMNSIPHHIVTIPGIGQVTGAMLLAEIGNINRFPALEQLVAYAGIDASVFKTGQFEGDETHMSKRGSHYLRYALWQASTASLLHNPELKQYYDKKRAEGKQHGVAMGAVCHKLLSRIFVIMKEQRPYVTH

SEQ ID NO: 161427 - protein, 344 aa, unidentified
MDHYAGIDVSLEYSSVCVVDASGKVVREAKVVSEPEALIGWFGSLGFELARIGLEAGPLSQWLYAAMKQAGLAVELLETRHVSDAFKAMPVKSDRNDARKIAQLMRLGWFRPVHCKSITAQEIRAMLTARKLVQSKLLDLENSLRGILRGFGLKVGKTTRTNFAGRIEELVKGHPNLQTIGQALLRARAVLLAEFNGFEKRVRAMSRLHDKARLLMSAPAVGPIVSLTFACAIDDPSRFTSSKQAGPHFGLTPKKYQSGETDYTGRISKHGDASVREALYEAAHIMLTKPIKGCSDLKSWAMRIARRAGTNKAKVALARKLAVIMLRMLKDNVPFNPAAKPATA

SEQ ID NO: 161428 - protein, 316 aa, unidentified
MVPSPLFVGIDVAKATLDIAVRPTAETWSVSNDATGIDALVLCLGALAPTLIVLEATGGYQGPLVAALVAAALPVVVVNPRHIRAFAQAVGILAKTDRIDARVIAHFAEAVKPAPRPLPDAETQELRALLVRRRQLVEMVSAERARLDTAPPSIQDAIQAHIAWLTTQIAGLDDALTRASQTHPVWQAKDDVLQSIPGVGPVLARTMLGQVPELGTRGPKPLAALIGVAPFNRDSGTLRGRRPVYGGRAEVRAVLYMGALVATRHNPVIKTFYERLLAAGKAKKVALTACMHKLLTIMNAMVRDLKPWQPQEVPSA

SEQ ID NO: 161429 - protein, 411 aa, unidentified
MDKLFVGLDVSKKDYKVCLMGMEGERVGKGFALKNNADDSQKLVDRIVEAATKTGAPKVFIGYESTSVYGWHLQYFLADAPKLAPFSPTIICFNPTVIENHKKSLGDLPKTDDIDAFAIADRLRGRLPKSVSADFRYLALQRLTRHRFHLVKSIVREKNYYLSNLFLKCSGLCQENVFSDNFGTAATGLVDEMDDFEQIADMPLEDLVVWLVEKSREQFDNPEATAQKLQAAVKSSYQVHASVDHSLNLVLRSCLENIKSLEKQKKAIEKSIKEQVAFFEREYLCLKSVKGIGEVIAAGLIAEIAGISRFVDDDALAKFAGIYWNKHQSGDFTADESELRRRGNKYLRYYFTQAADHMRIWLPEYSEFYSRKFKESKTHHHKRALILTSRKAVRLVFALLHDSMLYVPAQP

SEQ ID NO: 161430 - protein, 341 aa, unidentified
MNLTTIGIDLAKAVFQVHGADGKGRAVLKKQLKRAQMLPFFANLTPCRIGMEACGSAHYWARKLQALGHTVQLIPPQYVKPFVKRNKNDAADAEAICEAMMRPNMPTVPIKNAEQQAILSVHRARQGFVKARTAQANQIRGLLAEYGFIIPQGISHIPKRVPEIIEDGENDLPGSFRLLIGRLIDHLKELDRQVGELEAEIQRWHRDNAASQKLAKIPGIGPITASAMAASIGDARNFKNGRQLAAWLGIVPRQHSTGGKSTLLGISKRGDTYLRTLLIHGARAVIRVAERKADADSWIKRLLARRHKNVAAVALANKNARTIWALLAHDREYEAKYGIAA

SEQ ID NO: 161431 - protein, 450 aa, unidentified
MAKKEKRSHPLQFAVINPCCAAIDVGSMMMMVSYSDVEGKQHLMEVDAFTESLQQLADNLKQAGVTHVAMEATGVYWIAVYEILEQQGFKVTLVNAKHFKNVDAQKTDVKDCQWLHQLHANGLLRASHIAKEVYRELKSYLHERTVLQKQKSDTLNRIQKLLTQMNIKVQHLISDIEGVSGMELLRGIANGITDPEKLLSLIDVTKLKADREDLIKSLKGIYKEHFIKILQQTLKGYNFFKDQMKAYEMLIEDVLKSLLPKDEEGYKPTIKKKTSYVRKNQYSINLKEYLKHIIGVDVTRIDGIDEISGLEIISVTGTDMSKWPTAEHFSSWLNLSARPKKSGGKVIGHERRFTNNKATQAFRMAAQTMWQNKGTLGHLYRRLSAQKGSKKAIKAIARKLAVVFYNMVKNQTEYDKKKLQVDVERQRAKKINLLQKEALKYGYVLQNATC

SEQ ID NO: 161432 - protein, 333 aa, unidentified
MDNLFKQCVGIDISKLKFTACVCRYYISGNQQLSDVRDFDNNKTGFNQFVKWSRLHLSKEIPPFYLMEATGIYYEPLAYHLHRIRLPVSVILPNKAKYYALSLNIKTKNDAMDARMLATMGCLQKLLVWSPPSPVYQALRSLTRFSSSMIKQRTVLLNRLEALNSSENPLSSIVKVHEKWIKDIDKALKDNAKEMKKLIEKDNELSEKVKKLETIKGVGFTTIVIILAETQGFELITSRKQLAGYAGLDVVERQSGASIYGKTRISKKGNSHIRAALYFPAMVASRYNKPLREDYNRIIGKNPECKKIGITALQRKLLLLIYTLWKNNETYKE

SEQ ID NO: 161433 - protein, 351 aa, unidentified
MIIIGVDYHPSFQTIAFLDQETGECGERELNHSDGEAEKFYRELQQRGVSVRVGVEATGHSRWFERLLAELGIEVWIGDAAKIKTMRVRKQKTDREDARLMRKLLLENRFPRIWVASPENRDLRQLLWHRHRLVQMRTRIMNQLQAVAMNEGYRWKKKLFSAQGRALLEKLSLAPWASRRRKELLELLDQLDPKIAELTAAVEREANQRPEVVRLMTHPGVGPITGLVFVLVIGTPERFPCGKQIGSYTGLIPCEDSSAGKQRLGHISKQGNTLLRFLLVEAAQAAARCNPDWRRRYLHLMMRREKRIAKVAMARKLGVRLYWMWRNNWQYSQLLEFGSNAGKLGTGHGVK

SEQ ID NO: 161434 - protein, 353 aa, unidentified
MYIGVDTHKQTHVFVAIDADGRTSGSRTLANTPEGWATALRWAREQQQPIRWGVENSGSLGQGFAQFLLAQGETEVREVVPHRTAQYRRRGRTQDKTDTADALAMARLLRAEGELLPLVHADDVSTELRLLSDYRDNLVVDRTRLTNQLHAQMLQLDPRYAERSGPLTRVAGARYCLGLGLPEADGVAQTRLLVVRQLATRLLQLDADSSAVTQALAQQVAATATPLLQCRGVGAVVAARLLGELGSPPRVHSAAALAALAGIAPLTVASGGRQGHRVNPGGNRRLNRAIHIVALTQRRCEPLAQAYYAKKRAEGKTARAAMRCLKRRLVDVLYRLWQTQQKEPTLPLSAVAA

SEQ ID NO: 161435 - protein, 338 aa, unidentified
MKLYGGIDLHSNNCVVALLDEADRVVYEKRLPNDLGSILREVEPHRAELQGLVVESTFNWYWLVDGLQEAGYPVHLANTAGIQPYSGLKYTDDHSDARWLAQLLRLGVLPEGYIYPPAGRAVRDLLRKRSQLVRQKVTQLLSLENLYSRHTGSRPSANQLRLLTVAAVTEQFGDTMIAQAINSSLTVMHCLEKEIEQLEQVVKAQVKLQPAFKPVLTVAGVGPILGLTIMLETGAIQRFPKVGNFASYCRCVDSQHLSNGKRKGQGNTKNGNKYLAWAFVEAANFAIRYHPPVQRFYQRKCAKTSPVVARKAVAHKLARACYYVLRDQVPFDMERAFG

SEQ ID NO: 161436 - protein, 364 aa, unidentified
MYDSTMTVAVGLDVHARSIRLAAVRADELLEERTLPYDEEQVERLLRRWPSVRCCYEAGPTGFGLYRHLVDRGVDCTVVAPGLVPQRPGDRVKTDPRDARKLARLLAGGLLEPIHVPSPEHEAARDLVRAREDARLDRMRDRHRLSKFCLRHGRILPTSSWTVVRRKWLGEQRFEFVAEQLTFDTYVHALDLVDARIEQLERAIRETAEQEPWRQLVARLRCLRGIDTLTALALVAEIGDFNRFRSAAEFMAFVGLVPSEHSSGEKRRQGSITKVGNSHVPRLLVESAWHARRRPKVGYDLARRQRGQDAVVLERAWRCQQRLYQRWQRMAGRGKPQQKIVVACARELAGFVWAIATEQPLRTT

SEQ ID NO: 161437 - protein, 427 aa, unidentified
MKYKQDLRIMQITDNTLIIGVDIAKETHFARAFDWRGIEQDKTFSFKSNRDGFSKFNEWSKAIAEKKQKDKIVIGLEPTAHYWWTFANSIKKENAMIVQVNPYHVKSSKELDDNTPSKSDRKDPKTIAMLVKDGRYQIPYMPEGIYAELRKANNLREEWLKKMWAIKNRVIRWIDIHFPEFLDVFSSWEGKASIITLENMGLPRDIILRTADEVVAVWREEVKKSVGIKKAQKLIDAARNSVGVTEGSDMAGYEIKLLLKEYREVRAVMEELEDKLKDIVMTIPGAERMLRVKGIGIKTVAGFFAEVGDIKRFSHPNQIIKLAGLNLRENSSGRHKGETTITKRGRSRLRALLFRAILPMTAKNVEFNALHVYYTTRKENPLKKKQSLTALCCKLIRVIYTLITKDVEYEPTKLLGDIRRNVGSDAA

SEQ ID NO: 161438 - protein, 313 aa, unidentified
MDVIYPRCAGLDVHKQTVVACVRIASGGPALQEVRTFETTTSGLLALADWLESFGVEHVAMEATGVYWKPVWHVLEGHFQLVLANAAHVKNVPGRKTDVNDAMWLADLLAHGLIRASFVPPVAVQELRTLTRTRKQFVRERGSHAQRIEKILEDANIKLSVVISDILGKSGRAVLQALIDGQTEPEQLVRLIGRVKASRAELLEALRGRVSAHHRFMLKLHLAHVDVLDQAIATIEQEVGRGLEPFRQAAKLLSTMPGLSAVSANVVVAEIGIDMSRFATPGHLLSWACLCPRNDESAGKRRSTKLRRGGKWL

SEQ ID NO: 161439 - protein, 367 aa, unidentified
MDLTTYVGLDVHAESITAAILSAENEKPEVLQLSSDLMKVRRLFRRLADKGPVRACYEASGAGFVLQRVLARDGFHCDVIAPSLIPRKPGDRRKTDRLDALMLAQLYRSGHLTPVHVPTEDHESLRRLLRLRTTYHQYCTATMHRISGVLRNHGFVFKEGKSTWTKKHRQWLACLRQNLTGPLQTALAMELEHLEYLETQQRTLDAGLESFASSPQFRIPTEALCCLRGVKTLTALTLLCEIDDIRRFASPRALMAYFGLVPSERSSGDKEHRGPITKAGNIHVRRLLVEAAWNNRHRAAADLILNRRRQGQPPAIVAIALKAQHRLYKKFWHLDQRKHRHVAITAVARELCGFIWAILNQLQPTTY

SEQ ID NO: 161440 - protein, 341 aa, unidentified
MTKHNVIALDLAKLVIQIAKVSKHGELLFNKAQSPDKVREILANTAPSVVAFEGCGSAHYWGRLAQQYGHTACMMSPRKVKPYIGGQKNDANDAIGIAVAARQLHMTFSPIKTLEQQTIQSINTSRRFLDKTLTALNNHIRGILYEYGFTIPKGAKGLRVKITEWLGQENVALPDVIKTLIKSMWLQYTQTQMQLKEVNQQLEGLTQALEPCQRLQAIEGIGPKSACLLYAAIGNGQGFKNGRDAAVYAGVTPRQHSSGGKTVLLGITKQGDTTLRSTLFQGALSVIVRLKSDPVTEKQQWLLQLVKRVGTKRACIALVNKNIRTAWAMLKHNSEYQPVYL

SEQ ID NO: 161441 - protein, 376 aa, unidentified
MNKFSNIYVGLDVHKATIAVAVARQGRSDPQYHGEIRNNPGAVRKLLKQLSADGEVLSFCYEAGPCGYGLYRELKRLGHECEVVAPSLIPRKAGERIKTDRRDGLKLARLHRSGELTAVWVPDEEQEAVRDLTRAREDMKALELKARQRLGAFLLRHNRVYEGKSRWTQAHFRWLETVKFDLSVQQIVLQEYIDTVKELQRRVADLEEQMRDTLHGWSLGPVAEALMALRGVSLITAMTTLAELGDITRFNSPRELMGYLGLVPSEHSSGGSRRQGRITRTGNGHVRRILVESAWNYRYPARKTKVIERRAEKTSKRVQAMAWQAQKRLCGRYRTLLWAGKEKKQVTTAVARELVGFIWAIACEAMGKQHGSKVFV

SEQ ID NO: 161442 - protein, 464 aa, unidentified
MSVVKRRRRRRGRRHAGELPAGLEQVNLNAAGIDVGAEVHYVAVPTDRDAPAVRQFSSFSADLQVLADWLVACEITTVAMEATGVYWVPLYEVLEARGLEVVLVNAKHFRNVPGRKSDVLDCQWLQQLHTFGLLRGSFRPEADIVTLRTYLRHRETLVQTSAEHIQHMQKALTLMNLQLHHVLTDITGETGMRIIRAIVAGEHNPTVLAQFRDRRCHASEEKIAAALTGTYRPDYLFVLQQALELYDVYHCKIRACDEQIEQALNKLTPKVDTKQNPPPAPRSLQAPRGHQMRIALREQLFAVTGTDLTQINGIASHIAVGVVSEIGTDMTRWPTEKHFTSWMCVAPGTKITGGKLLSGRTRTAANRVATLLRTAASSLLRSDTALGAFGRRLAAKIGTAKALTALTRKLAIQVYYALRYGRLYQDPGVAAYDLHNRNRVIRSLKTRARNLGYDLIKLEPTSVS

SEQ ID NO: 161443 - protein, 449 aa, unidentified
MSSRSSRRKRKSAAMERINSDAAGIDVGAASHFVAVPEDRDEQPVREFPAYTADLYRLADWLQACGVKTVAMESTGVYWIPLFQVLEERGFEVRLVDARRVRNVSGRKTDVSDCQWLQQLHTYGLLSSAFRPDDETCVLRSYMRQRDALVIQAGQHIQHMQKALELMNVKLTEVLSDVTGVTGMAIIDDILAGKRDPKELAKHRHTRCKHDQATIARALTGHYRTEHVFALRQAVVLYRQCQALIGECDAEVERFLEQHGPSDDGTVPPPERSSPRSKNALGFDAHAHLFRLAGVDLTVIPGLSTASVLTLLAETGLDMSRWRSEKAFSSWLGVCPNNRISGGKLLSSRSRACVNRAARVFRMAAYGLHHAKSALGAYYRRMRAKLGAPKAITATAHKLARLFYSMLKTKKSFADIGQEAYERMYTKRRIKGLARAAKELGFQLVPCQE

SEQ ID NO: 161444 - protein, 323 aa, unidentified
MAKHITICAGIDTGKRKLDVAIEGRREQLQVENNPEGHAMLLAWLRQHHVKRIGIEASGGYEQPVVTELRRKRFVVVVFQPAQVRAYAKFHLQRAKNDKIDAALIAVCTAAVRKIHAAPDPRLLPFAEQLTMIDQIGEDIARLKNRIESCRNVEINKLWHEDIVRLESREKAALKALVAAIRKHPDLARRLALINSVDGIGLPTAVAILVRLPEIGRITREQAVALAGLAPYDDDSGDQVGVRHIEGGRKRLRRALYTASLAASFRWNQQLIQLYQRLAAAGKEHKRALVACARKMLIFANTVVARGTPWQDCPPEKAALITG

SEQ ID NO: 161445 - protein, 363 aa, unidentified
MQRDLGMVVGVDTHKDSHSAALVDAMGALVAATDVGANRKGYRRLLEWARCRGPQRTWVVEGTGSYGAGLASFLAAAEEVVFEGDRPQRRKPGAAGKSDQLDAVKVAREALAREHHAVPRQRGNREAIRVLLSTREGAVSAHRQALNQLYALVVSAPDPIRERLIRLRGEHLVTACLRLRSAAGDIETRVTNRVLRQVARRIRTLQAEAADHLALLEQLVAETAPSLLAQPGVGAITAAQLLVSWSHAGRIRNENAFAAMAGVAPVPASSGKVVRHRLNRQGDRRLNRALHVVAICRSSFHAPTKLYIARRTAEGKSTREIRRCLKRYLARRFFPINGEDGATVMTLPSSALTSCHPPSCTIR

SEQ ID NO: 161446 - protein, 335 aa, unidentified
MKKIYVGIDISKEKCNLCFRSGLEIVREEECSNDVKALKKAFKAALKVLGASVDEVLVCAEYTGRYIYPLTVACQELGIFLWMDDPTRIKNSMGLTRGKNDAIDAARIAEYAFRYSDKAIRYCIPDAALISMKNLLADREFLLIDRKRYQSQLTDQKKYMAPGDFKHKSSRWKKVIKSIDEQIAAIDTEIETLIAADPVLTRQKELLLSIDGIGERIAINMIAITGGFTRFQNARQFCSFAGLTPYKYDSGTSVRSKAKISKRANQTMKALLHLAAVGAATHMKEGEYKDYYERKTNEGKHVMCVLNVIRAKLVHRMFSVIKRDTEYTKEYKPAC

SEQ ID NO: 161447 - protein, 430 aa, unidentified
MKSNTQNAKIEAITEKTLVLGIDVGSETHYARAFDYRGIEYSKKPFKFSNTEAGFVTFKEWILDIKERHEKDKVVLGMEPTGHYWFNLGKFLQDNEMKPVLVNPHHVKKSKELDDNNPTKNDRKDPKVIAGLVREGRYMIPYLPDGVYADLRTASNIRFQLQAELTRIQNRISRWFNIYFPEYKTVYGKPDAKSGILILKTAPLPEDILTLGIDGVNQIWRDAKLRAVGKARAKTLIEAAEHSVGSKEGAVSARMEIRMLLEDYESRNTRLQEVMVLIEELVRKIPMAEKLLEIKGVGIRTVSGFLAEVGDISRFNNPKELQKLAGLALVENSSGKHKGETTISRRGRKRLRYLLFEVAMSLVAKNPEFRELHNYYTTRRLNPLKKMQSLMAIAAKLIRVFYVMLTKGVNYDPKKMVNDIKRPAVYLQTA

SEQ ID NO: 161448 - protein, 422 aa, unidentified
MLSVGVDWAEDFHLVALGTPNEGVVDVLRVEHQPEAVARLLSRIAALEPDPAEVRVVIETSHGLLVEAFVDAGFTVLPVNPDLIARRRGPARKKDDAEDARIACLLGLDRYAKLKQLIPHGELASELRAIARDDERATQDQRRFLNRLRMDLLSTFPAALRIAGDDLGARTVLRLLERWPTQQQLSGATREELVEFARAGHHGWPERFAGQVAAALAASHFQARPALIRAKADSIRLAARQLLLIAEQRKLWERRMGELLLGAPRRGRQRQPRSDELGEMVPGGEVYLSFPGLGDRLAARVAGEIGDHLEQFETPNSLQCYAGRAPVTRRSGKSELVVAHRLACNRHLANAVQQWAFCSLGESGWAREFYDAQRARGKGHHAALRALGNRWLEVLWHCLRRGVRYDEAVHVANRNRALGRAA

SEQ ID NO: 161449 - protein, 355 aa, unidentified
MDKFIMVGCDLHDRSMLLKVAQGREASVKRSWANDPSGRAGMIEELKGRAASAGASRIVFAYEASGLGFTLHDELAAAGIECHVLAPTRIERSVQHRRRKTDERDAERILGLLRAWLLAGNELPSVWVPDHQTRDDRELVRMRLEVADKRTRCKCQIRCLLKRNNVAGSPMKPWSGDYDVWLAYQAASVLPAGAALALSSLLRQLEHLESERAVLDEQVGRLAHSPRYSRSARALVCELAGVGVLTAMVFLTEIGDVGRFSSRQQVGSFLGLTPMSFETGESDDRKGHISRLGPGRIRRVLNQAAWSRIRTDRAAQAKYERIAAKNPKHKKKAVVALMRELGIAMWHKAREALAA

SEQ ID NO: 161450 - protein, 413 aa, unidentified
MLNIYYYNCCGIDVHKKMLVATIAKTDEHKVTTYQTKQFSTITKDIKHLKQWLIDNDCKDVCMESTGKYWIPIFNILEDTCNIIITHPKYVRAIPGKKTDKKDSIWIADIFKHGLVNPSFMPPLEIRQLRDLMRYRFKLLNCRTSEKNRFQNSLTMSNIMISNVVTDTFGRTAQSILQKMLSKNDNLTLEEISPLLRKNLKATPQEILESVQGNLTKEQNSKMKICLDHYDYINKCVDKLEESILPLVSNYQNEINLLLTIPGVQDVSAIYILSEIGSNMDVFVDDKHLCSWAGLTPQNNESAGKKKSVRISRAGVYIKPLLVQCANNAIKDKNCEYFKLRYEAIKKRRGHKRAIIAIARMLLTCAYHMLSKNEPFNIEMYKQLTESNFKSKLTKLNVNNAIKFLEQQGYKVS

SEQ ID NO: 161451 - protein, 370 aa, unidentified
MIVIGVDTHKRSHTVAAVEAVTGRSLGERTVSARGASFDLLLAWARGHGAERLWAIEDCRHVSGALERFLLVRGEAVVRIAPKLTAHARKAAREVGKSDGIDAVAIARTALREGLDTLPVAQLAGPELDVRLLVDHRERLVAQRTALSNDLRWHLHDLWPETEIPPRALTAVSWQTRISGRLTRAEQSARVRIARDELRRIRELTRTINELEHELAALVCALAPKLLAERGCGTLMAAKLLGEIAGVNRFATDAKLARTAGSAPIPASSGRTQRHRLDRGGNRQLNCALHRLAVIKGRLDPETAAYLARRQTEGKTRREAIRCLKRHLARRVWHLLQPDPETTIPASTPARPTRTITIHCNTPTGSFELT

SEQ ID NO: 161452 - protein, 355 aa, unidentified
MNDTKYIGLDVHQATISVAVLDSAGKLVMEAILETKAETILQFIHGLRGSLHVTLEEGTCAAWLHDLLKPHVAQVLVCDPRKNALIKAGNKSDRIDARKLADLLYLNKLNPVFHGETGNRALKELARSYLALTRDSTRVMNRLKALYRSWAIPCAGQRVYAPRYRSEWLAKISEAGVHRRAELYYQQLDALRSLREQVRRDLLAEGRKHSAMNLLRQIPSIGPIRAVLLIALLQTPHRFRTKRQLWAYCGLALKTSSSGEYRIVEGQLKRSKKLLAIQGLNANHNHDLKNIFKGAATRAAAVPGPFQEFHAALVARGMKPTMARLTLARKIAAITLIVWKKGVRFDAEHLKPQAA

SEQ ID NO: 161453 - protein, 339 aa, unidentified
MELYAGLDLHSRNTYIGIMDNAFNRVFKKRVPNHLEHILQTLDPFRGQLKGLVVESTYNWYWLVDGLMDAGYSSVHLANPSAIKQYEGLKHVDDKHDTFFLAQLLILGILPQGYIYPKKDRPVRDLARKRMFLVQHKTAHVLSLQSLIQRCCAMKIRTNDMRHLTVKELEAWLKEEYLVLSAQANLDSINFFKQRIQGLEKAIRKKVRLKKAFHYLKTVPGIGDILALTIMLEVGDINRFPKVGNFTSYCRCAPSRRLSNGKSKGHGNRKNGNRYLSWAFTEAVHLGRRYNERFKRYYNRKVAQANTSLATKALGNKLARICYYIMRDQVPFQEKLFCH

SEQ ID NO: 161454 - protein, 346 aa, unidentified
MNHYAGIDVSLECSSVCVVDTSGKIVREGKVASEQEALIAWFGALGLELERIGLEAGPLSQWLYAGLKGAGLAVELLETRHVRDAFKSMPVKSDRNDARGIAQLMRLGWFRPVHCKSIEAQEVRAVLTARKLVQTKLLDVENSLRGILRGFGLKVGRTTARSFAGRIQELVAGHPSLEGIGEALLSVRAVLLREFNAFEKRVRLMARTDVKARLLMSTPSVGPIVALTYASAIDDPARFKSSKQAGPHFGLTPRKYQSGEIDRSGRISKIGDGAVREALYQAAHVMLTKPIKGCTELKSWAMRIAKRAGMSKAKVALARKLAVVLHRMLADNAPFNPIAKAAALAI

SEQ ID NO: 161455 - protein, 340 aa, unidentified
MSYYAGIDVSLEASHVCVIDGSGKILREARVASEPEALIAWLGSVALELTRIGLEAGPLSQWLYAAMRDAGLAVELLETRHVRNAFKIMPVKTDRKDAQGIAELMRLGWFRPVHCKSMEAQETRAMLTARKLVQKALHEVEMSLRGVLRGFGLKIGKVAPTQFEARIRELVEGHPSLEVIGTAMLSVRATLRREFNGFEKRLRVMARSDGRARLLMSVPGVGTIVALTYAAAIDDPARFTSSKTVGAHFGLTPTRYQSGETDRMGRISKIGDASVRAMLYESAHIIITRPVKGCTALKSWAMRIAKRAGTKKATVALARKLAVIMHRMLVDGTTFTTQPA

SEQ ID NO: 161456 - protein, 348 aa, unidentified
MTTMVEDTRVITGGVDTHADMHVAAALDPIGGLLGVQEFPATAAGYASLLSWLRSFGTLAVTGVEGTGSYGAGLARHLAAAGVRVVEVDRPDRQDRARQGKSDPLDAVSAARAALSGRASGAPRGRDGAVEAIRALMVAKRSARSERTQAVNQARALIMTGPEELRARFAGHSTAALAAAIAALRPRPGDVPGYATRVALREPVRRVRFLDAQLGRLNELIGPLVSARAPGLLALHGVGPDTAAMLLVAAGDHPERLRSESSWAHLCGVAPVPASSGKTAGRYRLNRGGGRQASSALWRIVIVRMNSHPATRAYAGRRSEEGLSKKEIIRCLKRYVAREVYRQLRDGA

SEQ ID NO: 161457 - protein, 351 aa, unidentified
MKSMTKQIQGEALFVGIDLHKRRWHVTIRTADVEIFSSSIAGRWEELKKVLNRFKGCRIHAVYEAGCFGFWLFDHLTKYGVDCIVTPPSLIPQEHGNRVKTDRLDSRKLARLLAKGLLKSIWIPSAKERFHRQVIRRRRQLVGDRVRTQNRIKSELYFYGINLPAPRSKWSQVYFSNLQRIKFKNHWMQKSFNQLLEHYEFLSAQIDKQTQLLKQLSQLPLYRDRVKILCSIPGIGLLTAMEILLELQDISRFRRAEQLAAYVGLTPSQYSSADKIRMGRITGAGKNTVRSALVESCWILIRKDKAMRKKYETIKARAGGKRAIVAVSRKLILCIRRLLIDNRPYVYESVS

SEQ ID NO: 161458 - protein, 382 aa, unidentified
MKEATRFLGLDVHADTIAAAFADDGRDGELRSLGVIANEPGAIRRLVHKLGAKRLRACYEAGPTGYTLYWQLAELGIPCDVVAPTLIPVKAGERVKTDRRDALKLARCLRAGELTAVWVPDPAHEALRDLVRAREAAKADQQRARQRLGKFLLRAGRRPPKQHASWGTAYVEWIRAQQFEHVAQQATLVDYLSEVDHASERIKRLEAAIDNAVRGAAPTVKAVIEGLQALRGVAKLTAMTIAVEIGCFSRFASAKQLMAYCGVVPSEHSTGNSRRKGALTKTGNAHVRRVLFEAAWCCRHRPSLGVALKKRQRVVSAGTRELAWKAQHRLHRRYVALASRGKPNQKVVGALGRELLGFIWAVAVQIEREQQHENAMTPAIAA

SEQ ID NO: 161459 - protein, 343 aa, unidentified
MDYFAGLDVSVKDTSVCIVDSTGKIVREVKVASEPDALLAVLRNPAYDFKRIGLEAGPLSQWLFSALAEAELPVICVETRHMRAVLKAQINKTDRNDARGIAQMMRVGLYRPVHVKTLRSQKLRMLLTHRKLLQAKAIAVENDLRATLRNFGLKVGVVGRVKFEARIKELIESFPDLVALVEPLLVVRRVLREQIAILHRRVLAAVRDDEVCRRLMTVPGVGPVVALTYRATVDVPARFRKSKSVGAVFGLTPARDQSGERDRPGAISRCGDEMMRTTLYEAAQVMLLRSAKWSWLKAWAMKIAKHRGMKKAIVALARRLAVIMHRIWTDGSEFRWTRGAAAV

SEQ ID NO: 161460 - protein, 392 aa, unidentified
MNPCALGWDNHRKFSKVSLMEQTPDGEIRVVERARLEHHDKQAMRTWLTHLDPEIPVALEATFGWPWVADLLEELGHPVHLAHPPVIRALAKHEAKTDRCDSDRLGKFQLRGILPESYLAPPEVRQRRERTRYRMALSALRTAVKNRTQAILHRHGILHDFSDLFGKAGRRFLEELALPEGSRQALQGCLQLLDSLTLLIGEVEQWMVENLEEDAIVRLLMTIPGIGLILAHVIRAEIGEIERFPTFRHLASYGGLAPMSDDTAGREGPRHCSSACNHVLRWAFIEAVHGVQRTKGPHGFRLWQLYARLCGQARPKGRKSSAVVAVAHELSKLVYVVWTKGVPYSDTPPPRPGSRQGQPEPKEPPTAKTALRSDQPRHPMVRRRATAGQTRL

SEQ ID NO: 161461 - protein, 338 aa, unidentified
MTTGLAAGTYALFVGIDIAATTAEVSTQRPGAKARRSFTIAQTPEGYTSLLHQLQATGYVPGEVLVVMEATGSYWISLATRLVHEGFAVSVINPSQAHHFAKALLKRAKTDAIDAQTLAQLAMVLQPEPWMPPPQIYYALQQRLAQRDDLLNLRQQVRNQLHALDQHPKVIASVRTRMENLLVLFQSQMDEVEGAIAAALNQDSAWAAAAERLQSLKGVGWVTAAWTLVTTLNFTTCDTVDALTAYAGLAPMPRQSGSSVWHRPSIGHSGNGRLRTAFYMATLTAARFNPAIKAFYNRLLEAGKPEKVARCAAARKLLHIAWAVVKKDQPFDPNYAQG

SEQ ID NO: 161462 - protein, 339 aa, unidentified
MNYCAVDLHGNNGYYGIVDEEGKRVFKKRIPNDLPKVLETLKPFKEQIKETGIVVESTFNWYWLVDGLMDNGYEVRLANPAAVDQYDGLKSADDETDAFFLAELARLKILPEAYIYPKDERPLRDLLRRRLLLRRQSTQHKLSLGSLYSRETGGSISKNEICKLRKGDEAELLDGEHNRMMAGINIDMIRFLEKQIRSIEKVVLEEAKLKPEYEILLTAPGIGRVLALTIMFETGPVERFSKVGNYTSYCRCVKSKRTSNGKKKGENNSKNGNRYLCWAYIEAANFMMRYCPEAKAWHQKKMSRTNNIVATKALASKICKACYFMMKNQKEFNVKLLFG

SEQ ID NO: 161463 - protein, 395 aa, unidentified
MSKDQCNFLFIILTYGIMNLKYSVGLDVSSKKINACMSCIDEKQKVIVKSSTVISNNKKGFKILQDWVLKHVKENVPVVVCMEATGIYHENCAYYLFEKGFSVSIILPNKAKKYLEAIGLKSKNDSIDAKGLSQMGAEQCLDTWQPMGTFFYELRLYTRQHQNVTELKTVLKNQFDALSFAMHQVDPVTNQLKETIILFDKQLKELEKVINNHIKSDAKIAERVANILEIKGIGILTLATILAETNGFELFNNYKQLVSYAGYDVVEAQSGTRVGKTKISKKGNSRIRRAMHMPSLVVIKCEVKPFKELFERTYNKHGIKMKSYVAVQKKLLTMIYYIWKKKERFEPNYIKSIQEKEQKSFSLFAFEKGIKNSPNKIEAAQGKHPANDHSKFPLC

SEQ ID NO: 161464 - protein, 630 aa, unidentified
MPARKTRPRKPPPPDAPPRLPPDLRDRAEACARLAAAPAPNRHAAGIDVGDATHWVCVGETPDGTDPVREFPAHTPGLRQLVAWLKHCGVTTVALEAGGVYGHVLFLTLLEAGLDVVMTPPQFAKQIQGRPKTDRRDCQWIWRLHHHGMLPSVFQPDEATQTLRDYVRQRANLVRLGAQHVQRMQKALGLMNLKLTAVLGDTTGVTGLKIIRAIVAGERDPHALARLRDRRCKHSAAEIATALDGRYRPEHLTELRLCLKMWDAYQEAVADLDPIIAAHLRAMRRQTTLPPLPPQTRVRGRKPHDPKFDVRVALYLATGVDLTAVEGLDAVHALTLVSELGSDFTKWPTVKHFTSWLGLCPNWKKTGGRVQSSKTRRGKNRAASALRLAAWGLVRSKSYLGAYLRRQRSRLGAPKAVTATAHKLARVVYHLVRYGAAYVKQTEAAYAEQVRARVRSSRSPSSSGGPVKVTCSSCTAPSASGRRTTSSAAVGLCELWVAETNHAPPSAAAPGSACLCSAAATASASSPSYCSDSSGCPAASRRRASASTGPSAVRCRRNNASPASGRSAIGTDHHSLSRSSRPVCHSGSSIHGPYRSAADMQAPPRPNHQFRRSADRGGPDCISPPASRRR

SEQ ID NO: 161465 - protein, 342 aa, unidentified
MDHFAGLDVSVKETSVCIVDDTGKIVREVKVASEPEALLAVLNNPAYHFKRIGLEAGPLSQWLFGALAEAELPVVCVETRHMQAVLKAQINKTDRNDARGIAQMIRVGLYRPVHVKTLRSQKLRMLLTHRKLLQSKAIAVDNDLRGTLRNFGLKVGMVGTVKFEARIKELVENLPDLAVLVEPLLIVRRVLREQFVVLHRRLLAIVRDDEVCRRLMTTPGVGPVVALTYRATVDVPARFRKSKAVGAVLGLTPAKYQSGEIDWSGRISRCGDEMMRVMLYEAAQSMLYSKKWSWLKAWAMQIARRRGMKKAIVALARRLAVIMHRIWVDGTEFRWTREAITA

SEQ ID NO: 161466 - protein, 357 aa, unidentified
MKSQEIKYVGIDCGKKTLEVIRIGDNSLHQRQQFSTTEIGISKLINWLNPNDVVGLEAGSQSFRIAKSILNKGIQVIVLNPGDLATIYQSLKKTDKEDSLKIARLIQRFPIEELPVVPIPNDEEEDNRRLCTEQENWTRQLTQSKNRLHSLFTQAGLTHITKKHLRTKANREISVALLPSRYQREAERILKVLDLVEQNLKLIEEEIKEALKKNKAYAQTIMSMPGIGMITSLAIMSYMGNCKRFSSAKQAAYYVGLVPRVDISGDSAYYGRIINRGCHSIRRVIVQAAWSLVRCQHGGKVKEFYQRLYLKKGAKKSIIATSRKMIEVLYVMIRTGKLFDSMPENILNRKLAQYGLM

SEQ ID NO: 161467 - protein, 406 aa, unidentified
MAAVMIGVDPHKASHTAAAIGPAEEPLGGIQVRAVASQAAQLLLAWAAAWPERTWAVEGATGLGNLPAQQLVTAGEVVLDVQPKMAARVRLLASGNTNKNDPGDAGSVAVAALRSRAPRRVTAEDHTAVLKVWSKRYRDLGRARTQVACRLHAVLADLVPGGFSREITAGQGASMLKRIRPSGPAARARRELAAEFPGLRRLDGQIRDTRNKLAAAVQASGTTLTGIFGVGPVIAAAILGEAGDTTRFGDRDRFAACNGTAPIEVSSGGRKIHRLSLRGNRRPGHAIHMAAVTQIRYAHSPGRAYFDRKLAEGKTGKEALRCLKRQISDAIYARLVADAAPRSTPAQAEGPGGQPGNGSVSSAAGSHPGRRLFGKATPGPHPSLRPAATARRAVQATALKTSHRSP

SEQ ID NO: 161468 - protein, 346 aa, unidentified
MNQSTLIAVDLAKEVFQVALARAQGKAYAHHRLSRTRFEAFLAKADRSIVLFEACGSAHFWCRQARELGHEPIMLPAQFVRKYRLRNKTDQTDTEALLDAYRSGRVHPVPVRSVDQQQIQQLHRVREQWKSTRVARINGLRGCLRELGHAIPAGPNAAKRHAQAIIDQEGFPAGLRAVFSELLQEITDLEAKITLAEQQIHALTRDNDEVSLLQQVPGVGLLTSTALVACAGSPDHFKSGRHFASWLGITPLECSSGNKRWLGRITKRGDKYLRMLIIHGARSALCRAKTLAKASKPLNRLQRWALRLEQRVGFNKATVALANKMARICWAVWKQRAPFNPGPVLS

SEQ ID NO: 161469 - protein, 347 aa, unidentified
MVIVGIDAHKRSHTAVAVDEAGRKLGQHTSGTTSEDHLALLAWAEQFGTERLWAVEDCRHLSRRLERDLLGAGEPIVRVPTKLMARERNSARSYGKSDPIDALAVARAAVREPDLPKAQLDGPARTVRLLIDHREHLVAERTRVINRLRWHLHELDPGNEPPARTLWRPKHLTAVSAQLDQLDGVVARLARALVERCRQLTEQVHVLDDELEPLVKHLAPALLDLCGCSTLTAAKILGETADVRRFRSRHAFARHNGTAPLPVWSSNHARHRLSRTGNRQLNTAIHRIAITQARHHEPARQLLQRRRNGGKNKAESIRILKRRLSDVVYQALRADARPSAPSGLKAA

SEQ ID NO: 161470 - protein, 317 aa, unidentified
MSKSFIGIDVSKNNLDVHILPEALSFSYRYETKAIKALIKKLKSYTPELVVLEATGGYEISIGIALSDANLNVAIVNPRQVRNYARALGQLAKTDKIDAYVIARFAQDVKPEARAQMTFKELELKSLVVRRQQLMEMRCAEMNRLSRTSVTQVKNGIQKVIRVLDAQLEAIDHELKHEIKNNPTWSKKLELITSFKGVGNHTAHTLLFGLPELGNLNRQQIAALVGIAPFNRDSGMFRGKRTISGGRANIRKALHMPALSAATRWNQALKEFYCRLIAKGKKHKVALTACMRKMLITLNAMLKNNQTYNPKLGTNYC

SEQ ID NO: 161471 - protein, 315 aa, unidentified
MNTTNKKYIGIDISKERLDVCIPDCKASSYPNMPGDIQRLVKAIQAAGSALHVIMEPTGGYERELAHALWAVGIPLTLANPRQVRNFARSCGQLAKTDKIDAYILSEFGYVNQPQPSQAPSPEQEQLAHLVTRRNQLLVMQNQEENHVENETDKAVLKQSRQLLNLIKKQIDELKEMIANLIENNAPMKAKAARMKEIKYVGEVTVSTLLAFMPELGTLTDRQAGALTGVAPINRDSGGMRGHRFITAGRGKVRRVLYMVAMGLSKHNAFMKARYDRMKANGKPTKVAFVAIMRHLIILINRMIKNPDFVLQKTP

SEQ ID NO: 161472 - protein, 439 aa, unidentified
MTTPSLPVLDQTAAAIDVGSEQLYVSIAGGPPKIFGTTTSQLHQLRDWLKGQKVKSVAMEATGVDWLCPYEVLEKAGLEVVVVNGKYVKNLPGRKTDTKDCQWQATLHAHGLLKPGFVPPAHIRRLQDYIRVRTDHITLAASHEQHMQKALERMNLKIHDVISDLTGMSGLKMVQAMIQGERNPVALLAVCDAQVRKNKAERLRAALEGTWKEEHLFALRQAYELWQIYQQKIGECDQAIEKVLQEISGPEDPAKPAPPATKRGGVNAPHIGGLHALLYRLCGNQDLSVLPGVADYAWLQLIAETGTDLGRHWRTEKAFTAWLGVAPGSRQSGKRRGNQRRGRNRAGRLFCVVARSVGRSADTALGGFYRRLKGRRGGLVANLALARKLAELYWRMMVHGIAYVEQGLKKYQEKVAETEQRLLRKLAKKYNMVVMPQAA

SEQ ID NO: 161473 - protein, 381 aa, unidentified
MQRIDPHQIRTAAEGYDTTIYVALELSKASWLVAINAPGGDKVSKYTVAAGATTALSAILTRARAQAERWCGESVRIVAIHEAGMDGFWVHRWLEAQGIESHVVDPASIAVDRRKRRVKTDRIDVEKLLRTLMGWARGERRICSMVRPPHPEQEDERRLTREREILVGERTRHVNRIKGLLMTQGISYFQPLRRDRRARFEALRLWNGLTLPGRLKAELLRELDRLELVMNQIQVIEAERDRALQTRSRDNIGALLVRLRGIGPEIASVLCGEMFHRDFMNRREVASYAGLAPSPWKSGTIDIDQGISKAGNPRLRKTTIQLAWLWLRHQPGSSLSRWFHARVGDRRGRIRRITIVAVARKLLIALWRYVTLGLVPEGALV

SEQ ID NO: 161474 - protein, 345 aa, unidentified
MKIVSLDLHAEASQMFVRDDSGEILREMRIPTNREQLRRAVSEIPGEKYVVFEEGPLSSMVSEALQDLAEEVVSCDPARNALIARDEDSDDERDARHLEKLFRLEAVRPVYIPEEPYLSLRSVLKHRTALQRSATGVKNRIKALARRCDVGAGGKTLYESEKRSTALQQIDSEQMQWQMKSLWRQLDMLSAELQESEREARKLTHRIPAVRRLRTIPGVGFVTSATLVAWIADPRRFKNRSALSAYGGLGLSQKETNWEPTGPAQASRRGNRQLKRVLFLAATAAGRTDSALGFRYRARRRQGWNEIRSKRDVARKILHISWALWRKGTEYDDELVNGPQIGSRS

SEQ ID NO: 161475 - protein, 344 aa, unidentified
MDNHTQYSGFAGVDLAKKVMQIHFVTGDGEITDKQVKRAEFLDFFRNRTKCLIGMEACGASQDWARKLEAMGHEVHLMSPKAVKPFVSGQKNDYNDAIGIYKAIFNGVRRVPVKSTEIRDLQTLRRIRSQVTKDKVKEINHVRGLLAEYGIVMGKSITAFNKGISSALESLKERGDVSPLVAEELQTTVESIKTKIERQKRLDREIEQLARGCKNYENFLKTPGVGPFTAAMLCVLLCDPAIFANGRQFAAYIGLAPRSRGSGGKNFIIGIPSKFNCDSESRAVFVECAQALARYKNKSPWVDGILRRKPKKVAVIAIANKLARQVWAMANKGESFKQMTILTA

SEQ ID NO: 161476 - protein, 396 aa, unidentified
MYFIGIDIAKKTHQTAIICSDGKLIGKPFKFSNTVDGFNLFLEKLTAVNTDLSQFEIGMEATGHYWLNLYTWLSDKGFRLHVINPLQSDALRNLYIRKTKTDSVDAKIIADVIRIGQYSETQLADENIIALRDLNRQRFYLVDMAADLKRKIIAMMDRIFPEYQDFFSDMFGKTSVQIMKEYTSPEQILQISTERLTQLLKKASRGRFTETKAKELKALAANSFAALLSSEMTTLLIRQMLEQLDLLEKQIADIEHIIAAQFTQFNTKLTTIPGIGTTLGATILSEIGDINRFDKPKQLIAYAGMDPSVKQSGNFVGTQSHMSKRGSPYLRRALWLAAVVAVNHDDLFKYLFQQKMNAGKTYAQAMGYICHKLLNTVFAILKTGEEYKQVYPPQIG

SEQ ID NO: 161477 - protein, 337 aa, unidentified
MIHVGVDLHQRFCYVTAVDASGQKLAQRSLANEAVTLQKWFSQLPEPRQVVVEACSFWPAFRRSLGPLGAGLVMVHPARVKAIAAARLKNDRVDSETLAHLSRCDLLPEAWMADEATRQLRLQVRLRVKLGRQRTRLKNLLQSVLHQEGLRKPVSDVFGKAGRRWLAAAAMSPAARLNGDSYLELIDHLDSMLRQQERALGKLAQQDERARWLRTIPGIGAYSAMVILAELGEVSRFASKQALASYAGLVPRVRESAGKRHYGGITRAGSETLRWIMLQVAQVAVRKSPAARAYQQRLRQTKRPQVAKVALARKLLTCVWALLRHGVCFEEQVFAAR

SEQ ID NO: 161478 - protein, 489 aa, unidentified
MKSQAAKKGPKDKQESKKTSGKSTPGKWEEMNRKQRREIMRQMQSEDLNLEVVHPHAAGIDIGNASHYVAVPPSRDPQPVRCFGCTTAELKTMAEWLKQCGIRTVAMQSTGVYWIAVYEILEEAGLEVYLVNARETKNLPGRKTDVQESQWLMKLHTYGLLRNSFRPSQDIRTLRTYWRQRQDLVRSTGRHIQRMQKALTQMNIQLANVISDISGVTGQAILKAILDGQRDPRELAAYRDCRVEASEEEIAQALEGNWQEDQLFVLRQEQAGYEFCQKQITECDQQLAQYLARLEDRTQGATLPEETRKGRRKKKKGNPQFNLREELFRMTGTDLTQIDGIDVMTAMTVVSEVGWDMSKWKTENHFVSWLKLCPDNQISGGKVMGKGRMPTNNRATTVLRMAATTLRESDSYLGAQFRRFRTRLGPPVATKAMAAKLARLVYRMLRYGMKYVDQGAELYETKHRKQQVIHLKRKAAQLGLQIIEVAAAA

SEQ ID NO: 161479 - protein, 355 aa, unidentified
MSQEKYIGMDVHQATISVAVMDASGKLIMECLLETKAATIVEFIQGLHGTLSLTFEEGTSAAWLHDLLKPHVNRLEVCDPRKAALLKDGNKSDRVDARKLAEMLRTNQLKPVYHGEHGIRTLKELGRSYLTITKDVTRSMNRIKALYRSWAIPCAGTSVYAPRHRAAWLAKIVEPGVRIRAERLYQQLDGLQPVRLQARRELLRESHQHAAVQLLRQIPSIGPIRSALLVALLQTPHRFRTKRQLWAYSGFAVETHDSGEYRSVRGKLQRNRERISVRGLNDNHNKDLKNLFKGAAISASTRPGPLQDFYVALVGKGIRPTMARLTLARKIAAITLTMWKKGVSFDPKQLPRQAA

SEQ ID NO: 161480 - protein, 362 aa, unidentified
MDVHKNSIDIAIAQTGRKGQLLHYGKIDGTLSALDKVVRKLVSKGNRLHFVYEAGPCGYQIYRHLSGQGFDCEVVAPSRIPKPSGTQIKNDRRDALMLARLHRAGELTAVYVPLAESEAIRDLTRAREAAKGDEKKSKQRLLAFLLRSGFRYTGRASWSKAHMRWLADIKMPHRSQQIVLQEYIDALSQCKARVQRLTEQIRELLPEWQMFPVVQALQSMRGVSMIVAATTVAEIGDLKRFDNPAELMSYLGLVPSEHSSGQKTRRGSITKTGNSHVRRVLVEAAWAYRLPARVSRVLLKRQEGLPQSICDIAWKAQLRLCSRYRHLWAKGKTKQVVVTAIARELCGFMWAIVNEIEVPANV

SEQ ID NO: 161481 - protein, 329 aa, unidentified
MPHSNPIPVSSQGDVLYCGIDISKDTLDLAFNAEANVKSFANQDEGIKQLIEQLQQRPVALIVVEATGGYEARLVIELALARLPVVVINPRQVRDYARALGVLAKTDHLDARVLARFAAEVRPEIRPFPEENERKLGEWVMRRRQLIGMQTAESNRQAHARSSEVKQSHAAVLKFLQDELDRLNKQIDQLLETNLLWKVKNDLLQSVKGVGPVTSRTLIAELPELGQLSRRRIASLAGLAPFNRDSGKRRGKRAIAGGRRGVRTALYMAALSASRCNPVIRQYYQRLVQKGKCFKVAMAACMRKLLTILNAMLRDCQPPNFTPVAENFA

SEQ ID NO: 161482 - protein, 391 aa, unidentified
MTRPLDVPFRGLDHERNRATYKEERVMSIIHWIGIDDHADKWSIAHYRGGEERPAKEFELMPDEKGYRRLLNFLKELDGEVRVVYEAGPCGYELHRRLTKAGIKCQVAAPALTPRKPGERVKTNRRDAAKLARYLRASDLTMVVVPDENRESLRDLVRSRYAVQKDVGRLRKQIIHLLLRYGHRYREGLSWTLRFWSWLKKIKLTGEHSCFVLAEMIGELEHRIEQLKRYDEQIELAAQKPEYQPYLKALRTLRGINTLSAMTILCELGDLRRFPTAPQIMAAVGVVPSEYSTGDKTNRYSITKTGNAHVRRIVVEAAWQYQRKVCVGKTIRARRKDQPKPIVDIAEKCEKRLNARFHRLTSRNKKSTVAVVAVARELLGFIWAIGQEAHL

SEQ ID NO: 161483 - protein, 346 aa, unidentified
MEHYAGLDVSLKEISICVVDDDGKTIARGICPADPEGVAGWFRNRSLTPRRIVHESGMLSIWLQRGMMRLGLPATCIDARKAHKALSARLNKSDAADAEGLAQLARTGWFTPVHIRSEDADRLRSLVGARERMIRLRKDLEGHIRGVLKTFGIRMTGVGQGRQRQTFRDQLAAAGETDPILRTIADGFIAAHSTLCQAADDLDKAVKKKAKAHPVARRLMTIPGVGPVNALSFIALVDNPDRFSRVTDVGAFLGLTPKRHQSGEMDWSGRVSKYGDGTMRGLLFEAASCLIRQVKRFSPLKSWAVRLAGRRGFRKAAVATARKIAVLMLTIWKSGADYHWTKEATA

SEQ ID NO: 161484 - protein, 379 aa, unidentified
MYRILKIGMDVHTTNYTLCALEAKFGQSDTVLANITVSPELRNVTDFIEKIKRKMDPYGKDEIDVECGYEAGCLGYSLHHALTTCKVKCTILAPTTMSVEKGPRIKTDKRDAKNIADCLSSGKYSAVHIPTEKDNAVKEYIRMRDDHVVALKKIKQQLNALCIRFGFIYEGNKWIEKHLQWLRGLKLPELARETLNEYLVTYDDLTAKIERFDKRIEEIAGQAEYREKVQRLVCFLGIRTNTALSLIVETGDFARFAKGNIYAAYLGLAPGEHTSAESGGKLSITKAGNKHLRTMLIESASTICKGIIGYKSKALRARQDGNIPEVIAYADKANTRLRGKYYRMIRHGKKRNIAVTAVARELACFIWGMMTDNISKMAA

SEQ ID NO: 161485 - protein, 323 aa, unidentified
MQSPSAVLNIGADVAKDAIVVACSEGSFPVREVANQRPAVLAFLKSLPAGSRIGVESTGTYHEFFAEAAHQLGFLVFLLNPKDTHHYAKAVGLRGKTDRVDAELIARMVAHEHAKLHTWTPPTPQQREIDRLIKRRATLISLREAVEMSLHELDGFAADLKALRTRFNQLIARIDLRVKALIDANPDRKQNFARLCTISGVGPVVGTALVITLERVPVKSADAFVAFTGLDPRPDDSGQHHGKRRLSKRGPAELRRLLYLAALSAVKTKPWRSLYEHHRAKGLSSTATLVILARRIARTAWSIYTYKSDFDPTRLANPVLRTH

SEQ ID NO: 161486 - protein, 348 aa, unidentified
MTVYCGVDFHARKQTISYLTTEDGEVQQTELHHEQDNIRGFYAKLRSQGPVIVGFETSGYAAWFEEMLEDLGCEIWIGMPAAIRRQARRRQKNDRRDADLILELMLRGDFPRLHRYTPASREVLQQLRYRHRLVKLRTIVVNSLQYLALSRGVSLRTKLLTGRGQQRMKELKLPSHLAKQRDEMCELLQELTAKIETAESWLELKAKQDAQVERLMSHPGIGPLTGLCLVSTLEQVERFANPRKVTAYVGFDPVEDSSGERQRIGSISKQGSRLLRFLLVEAGQVAVRTDPDLKAAYWRVQLRRNHQKAKVAVARRLLVRAFIMLRDEIDYAEFQRRGVAARSTRRTA

SEQ ID NO: 161487 - protein, 313 aa, unidentified
MAFLHHPPACCLGIDVAKDSLTASNGRQAAATIDNSRSAIRAMLKKARPDLVVCEPTGGYELLLLEECLKAGIACHRADTLKLKSFIRSFGTLGKSDAIDAAQMAAYARERWAKLSLWQAQDADERQLQVLVRRRADLVAFRVAERNRSRAPGAKALAASFKAILAAIEQQIDKLEAAIAALVARSQSLRQRIAVCTAMNGIGLTCAATLIAQMPELGSLQRRQAAALAGTAPHPNESGTATGRRRQRGGRPQIRTALFMPALRAAAGRGEFASFYKRLVDNGKRPIVAIAAVMRKIIVTLNARLRDAQSAQS

SEQ ID NO: 161488 - protein, 411 aa, unidentified
MFVFGVLVTMIDSEAVELVGKGVRGGKRLAFSTASHPGSPQANCPQIHSRRVFRRISTIIPWDTKPAGEQVAVRRILTFNPNGCLGLGARIDARMGMSESKVEVFVGIDVCKSTLDVRIEPPGEVFQVDNDDAGIRALCTHLSELAPTLIVMEATGGLETRAAGELAARGLCVAVVNARQVREFAKATGQLAKTDRIDAGVVCSFARAIRPVARPMKEALTAELDDLVTRRRQLVEMRVQETLRLQGASKVQAKSLKAHIVWLNKRIKSIETDLGTRLRSSDAWRVKDDVLLSIPGVGEITSRSMLSRCPEIGQLNRREIAKLVGIAPLNNDSGKYRGQRHIWGGRADVRSVLYMAAVSAKRCNPVIKALAERLKRAGKAPKVVIVACMRKLLTIMNAMIRSNTPWNPKIA

SEQ ID NO: 161489 - protein, 368 aa, unidentified
MSNYVTAIGLDVHARSIKACALNPMTGEVERASFGYDPASVAEWALGFESPKAVYESGVTGFHLCRALRALGLDCAVGAVSKMQRPAADRGRKTDRRDAEFLARLLATRNVVEVWVPDERTEAARDLSRALADARGDLQRAKQRMSKFLLRHGHVFDEPTPTGGRRGNWTRAYWRWADAIEFVEPDDAAAYEHYRDCVRRCEEARDALARRVAESAGRPEWKPAVDALRCVKGVDVATAFLLACEMGDPARFPSAPSFASWCGLAPSEHSSGETSSRGGITRAGNAHVRRALVESAWHVPMSSRDPKPLAPGQEVAPAVRRHATKCNRRLIERREAMAAAGKRPCVANCATAREMACWVWAIARMAAS

SEQ ID NO: 161490 - protein, 483 aa, unidentified
MKPKQVESNKKASCRPTPNRWHKMNHKQRREMLRKIQSEDLSLEVVHPDAAGIDIGNESHYVAVPCARDRQPVRRFGCTTAELKAMADWLKQCKIQTIAMQSTGVYWVSVYDILEEAGFEVYLVNANETKNLPGRKSDVQESQWLMKLHTYGLLRNSFRPSQEIRTMRTYWRQRNDLVRAAGRHIQRMQKALTQMNIQLANVLSDVSGMTGQAIVNAILAGERDPYQLAALRNWRVKASEEEIARSLEGNWQEEHLFVLQQEQDGYQFCLKQMAECDQRLQQYLRQQEDRSQGASLPEEKRKERLRKKKKGNTPQFDLRTELFRMTGTDLTQIDGIDVTTTMTILSEAGWDMSKWKTEHHFVSWLRLCPDNRISGGKIIGKGRLPTNNRVTNALRMAASTLRLSNTYLGAQFRRLRTKLGAPVAIKAMAAKLARLVYRMLRYGMAFIDRGAEFYESQHRNLQINYLKRKAATLGFQIIEAPAA

SEQ ID NO: 161491 - protein, 337 aa, unidentified
MKHTVIAVDIAKRVFQVHAVDAQTGEIERVKLRREAVREFFARRTPSLVAMEACGSAHYWARELRGLGHEVRLLAPKSVRPFVRSNKTDAADAQAIWTAIQQPEARLVAIKSEAQQAILTLHRMRAQLLKFRVMQSNALRGFLCEFGQVLPEGHRAMAKAWPTALAALAEQLPAMLLDSLREQWRRVQLVDSEMAALERRLAGALRVNASCQQIAAIPGVGLLTATAAVAAMGDPATFKSGREFAAWVGLVPRQTGTGGRVRQLGLSKRGDTYLRTLLIHGARSILARGKPSPWLEALLRRRPYSVAVAALANKLARTIWAVLARGRPLDPAAFGVA

SEQ ID NO: 161492 - protein, 346 aa, unidentified
MNQIARIGLDIAKRWFQIHAVDENGREVLNRKLPRDKILGFLSALPACDVALEACSSSHYWGREIGRLGPRVSLISPSYVKPYLKRGKSDAHDARAICEAASRPDMRFVPVKSEEQQAALMQHTSRQLLIDQRAAVANSLRGQLAEFGVIVRKGIENVGELVQMLDKDDEELAQAPASALTVMKILADQLRAVDAHLSAIDEQIGAWQRENASAQALKTIPGVGALISAALAAHVPDPFMFRSGRDFAAWLGLVPRQNSSGGNERLGRITKQGNPYLRRLLVLGAPASLRWLHKRTDPLADWTQRLLRRRPARVVAVALANKLARIAWAIMTTGELFRSDAPTAAA

SEQ ID NO: 161493 - protein, 377 aa, unidentified
MSKLRFVGLDVHAETIAVAVAEEGGEVRKLGIIPNRLESVRKMIGKLGSVGTVKCCYEAGPTGYVLYWQLTQLGVACEVIAPTLVPTKAGDRVKTDRRDAEKLARCYRAGELTAVWVPDAAHEALRDLVRAREAAKKDQLRHRHRLGKFLLRHGMRPRDAGKAWSKKYLEWIRIHARFQQSALEATLAHYLHEVEHAAERIGMLEQAIDEAVAQAAPEIRAVIEALQALRGVAQTTAATVVCEVGSLARFEKPRQLMGYSGLVSREHSSGNRVQRGAITKTGNAHLRRVLVEAAWAYQRRPNVQGRLLRRQQSLALSEEAKRIAWKAQQRLHKRFTALAARGKNKNQIVTALARELLGFLWAIAVHTEAQFKLAKAA

SEQ ID NO: 161494 - protein, 352 aa, unidentified
MARELTSVIAVIGIDIGKNSFHVVGLDERGAIVLRQKWSRGQVETRFANMPPCLIGMEACVGAHHLSRQLRALGHDARLMPAKYVRPYSKGQKNDFRDAEAIAEAVQRPTMKFVATKTADQLDLQGLHRVRERLVGQRTGISNQIRAFLLDRGIAVRQGLRFLRAELPGILARRCDVLSPRMVCLIEDLAGDWRRLDERIEGLSGEIDALARQDSGCERLMSVPGIGPIISSAMVAAIGAGDAFEKGRDFAAWLGLVPKQISTGDRTILGKISKRGNRYLRVLFVQAAWVVLIKPKSWERYGLKAWIEAARKRLHHNVLAIALANKLARIAWSVLARGRGFEARSIATAQPV

SEQ ID NO: 161495 - protein, 340 aa, unidentified
MTIVTIGLDLAKSVFQAHGVDETGATALTKRLHRKQMAPFFSKVPRCLIAMEACGTAHYWARTLAAMGHEVRLIPPSYVKAYVKRGKSDALDAEAICEAVQRPAMRFVPVKTVEQQSILMAHRARSLLVRQRTMLANALRAHLAELGLVANPGIANLAKLARQALSDENSLPPYARTALEALVRQIMTLSEEITALDRKLLAWHAESEVSQRLTAIPGLGIITATAITATVTDPDQFRSGRQFAAWLGLTPQQHSTGGKTQLGGISKQGDRYLRRLLVVGATAVIRHTKDKPTPMANWIRKLLVKKPFRVVSVALANKLARIAWVVLTRKEAYRPNQLAA

SEQ ID NO: 161496 - protein, 407 aa, unidentified
MRLFVGDDWAEDHHDVELMNEQGRVLARKRLPEGVAGMARLHELTGEQLGEDADDAEVIIGTETDRGPWVAALVAAGYTVYGVNPLQASRYRERHGVSGAKSDAGDSHMLADMVRTDSHQLRAVAGDSPGAGAVKVVARTHKTLIWERTRQVQRLRHQLREYFPAALAAFEDLDAPDVLELLARAPDPARAAKLTRAQISAALKRARRRDIPGKATVIRAALRGAQLGQPPAITAAYAATVRSLIAVITTLNEQVKILQGQVEADFGQHPDAEIYLSQPGLGPVLGARVLGEFGDDPHRYASGKARKNYAGTSPITRASGKKKMVMARFIRNDRLIDALMAQALSALGSSPGARAFYDAQRAAGTEHNAALRKLASRLVGILHGCLKTRTLYDEATAWSHRENKLAA

SEQ ID NO: 161497 - protein, 343 aa, unidentified
MQTTEASALYAGADLHGNNVFLSLIDGSGQEVYRRRVKASLESVNEALEAYWSRIEAIGVESTFNWYWLVDGLQAQGRTVRLGNPAKMAAYDGIKRTNDHTDARWLAEQLRLGVFPASYIYPREIRCVRDALRRRQLFVRQRVQAMLSLGGLLARYGVEAPGSYALKKWTACEIEATGLEPFVQLQLRTLLGALQDSDQRVKEVETSVKAFVVPSENFQRIQQVPGIGIILGMTIVLESGDFARFSHAGHYASYCRTVQSRRESNGKKKGENNRRNGNPYLAWAFIEAATFAIRHEPKIQAWYERKKRQRNSIVARKALACKLAKAVWHVMKGKDFDRRMLFG

SEQ ID NO: 161498 - protein, 309 aa, unidentified
MLTAEADKRKTKVVVNTAAGVQALLAWCAKHGAQPAQLHAILEPTGLYHEQAATALPQVRVSLVNPAQARDFAKALALRSKNDALDSYVLARYGQTLSPALWHPAPLHARQLRALLTRREALSKDLLRELNRKEKSQFSPSAPVVDGSIDKAIAFLREQIKQIERAIDQHIDNHPDLKQDCELLNSIPAIGPQAGNAILAVMHNRHIDSAQSLAAYLGVVPVQRQSGSSLNSCAHLSKAGPSQVRATLYMAALVGTRHNPHIRALYQRLLKAGKSKKAALGAAMRKLVHLCFGVLKNRIPYQPNYAMNG

SEQ ID NO: 161499 - protein, 341 aa, unidentified
MDQYIGLDVSLKDTSVSVRQDGKRIWRGKCPSDPKLLAETIRKRAPQAKRVVFETGPLSVWFYHELTAEGLPAICIDARHAQKILNETLNKTDANDADGLAHLAEVGFYKEVRVKGYDSMHVRTLIAARSQILKMQIQISNQIRGLMKTFGLVIPKGAGRVFEGNVRSLLADNKALERIILPVLEAWRGMRVQAAELSKQLMAVARQSEQCQILTSVPGVGVVTACAFVAAIEDPDNFAKSRSVGAWVGLTTKRYQSGEVDYNGHISRRGDNHLRGLLYEAATVILTRTMADSALRAWGLKLREKIGFKRAAVAVARKLAVIMHSMLKTGELFNRSIETAA

SEQ ID NO: 161500 - protein, 483 aa, unidentified
MKSKPEEQNKRATNHPTQHHWHEMNRKQRREMTRQIQSEDLSLEVIHPDAAGIDIGNESHYAAVPPSRDSQPVREFGCTTAELKAMAAWLKKCGIRTIAMQSTGVYWVAVYDILEQAGLEVYLVNARDTKNLPGRKSDVQESQWLMKLHTYGLLRNSFRPSQEIRVMRTYWRQRNDLVQSAGRHILRIQKALTQMNLQLANVLTDISGATGQAIIKAILAGEHDAHKLAEFRDPRVKASEEQIAQSLEGNWQPDLLFLLKQEQDGYEFCHKQMAECDRQLAQYLQQREDRSHGAPLPEEKRKGRLKKKKGNAPQFDLREGLFRMTGTDLTRIDGIDVMTATTVISEAGYDMSKWQTENHFVSWLRLCPDNRISGNKVIGKGRLPTNNPISIALKMAATTLRESKTYLGAQFRRLRTRLGAPIAIKAMAAKLARLVYRMLRYGMKYVDQGAAFYELRHRESQIKRLKAKAEKLGYRVTPIPAAA

SEQ ID NO: 161501 - protein, 371 aa, unidentified
MESIIYVGMDVHKDSYSICCYKSNEDKYYYEKKIIAESKRVIRYLESVKKELGEEVLFLCGYEAGPTGFGLYRDLQKAGYSCVVMAPTSLKHSVNHKVKNDKVDARFLAKTLFTKDYSSVHVTTEHEEAINEYCRMRLSIKKELTKAKQVLQSFLLRHDKKFTEGETWTLKHRAWLKTVLFEEQYLNEAFNEYMISVNTLEQRIKTIENRLKEISQDSCVKEKVDRLVCFCGIETVSAVTIVSRVGDFNRFAKAYHFSNYLGLTCGEDSSGQKEKHLGTKKTGDKEIRRLLTECAKSIKKTNLKGKKSKRLLDRQKDKDPMVIAYADKCRYRLRSKIAHLELKGKSPNVAATAAARELACFIWGMMTNHIA

SEQ ID NO: 161502 - protein, 381 aa, unidentified
MKKNSIAKLQVTKSQLRRKAAKQRLTVGLDLGDRTSRYCILDEAGEKAGENQLPTTRAGMDAAFAKMAPSRIALEVGTHSPWVSRQLAGMGHEVMVANPRKVRLISQSVKKNDRMDAEQLARLARVDPKLLSPIRHRGAEVQADLAVIRARAGLVESRTGLINTARGLVKPMGERLKKCDADQVREALGEGLSEEAQNVIGPLLKSVEEITKQIQVYEQKIEEIEKRYPETKVLKQVSGVGRLVALTFVLTVEDAERFEHSRDIGPYLGLTRKQRDSGESQPELGISKAGDELLRWLLVQAAHCILRRGAPESDLREWGLRKVQAVGGKKGGKTRKKKAAVGVARKLAVLLHRLWVTGEVYDPQYNRKARETAKGKRKAAA

SEQ ID NO: 161503 - protein, 371 aa, unidentified
MHQDSAVFVGLDASKLKISVALAEDGRQGEVRFLGDIEHTPGAVRRLVTKLAGKYRRLLFCYEAGPTGYGLQRQISDLGHDCAVIAPSLIPKRPGERVKTNRRDALTLARLHRAGELTAIWVPDPGHEAVRDLVRAREAAMEDLREKRQHLQAFLLRHGRIYPGLRPWTQVHARWLSSLSFAHPAQYLVLREYRQAIEDAEARLERLTQQVSEVVSSWSMAPVVEAYQAMRGVAFVTAVTFVAEIGDVRRFETPRQLMAYVGLVPSERSTGEQVRRGSITKAGNPRARRVLIEGAWTYRYPARLSRPLQVRQESLPQVVRAIAWKAQLRLCARYRRLTAAGKRQTLVTTAIAREMAAFLWAIGHAVEPRSA

SEQ ID NO: 161504 - protein, 344 aa, unidentified
MTYFAALDVSLRSVSVCIIDDVGNYQFEAKVTSEVEGIVRCLEAFDGEIEMVGFEAGMLTQYLSYGLKASGFEAVCIEARHAQKTLSAMRNKTDKHDARGIAQLLRTGWYVPVHVKSVASHQLRAMLSSRRTVLKKCVDLENELRGLLKIFGDKLPSKVSHSSFDAVVRPLVEKDAALGRALVPLLDTRAVLYQTYLQLDAEVKAIVRKDAVCRRLMTVPGVGAITALTFKAAVDDPTRFKNSRLVAAHFGLTPRRQQSGEMDYAGHISRAGDVDVRSALYVAAHALITRNSEWSSLKAWGVKLMKTKGHRKATIAVARKLAVILHRMWIDGTDFRRQSADRVA

SEQ ID NO: 161505 - protein, 370 aa, unidentified
MNTTHAVAGIDPHKRTATVAIVDVLGVKVTSLSFPVTKFGIDALTALLTDSGLTIDRIGVEGSGGLGRPVMLALAAAGHDVREVQANRTAERRKRRRRAKTDIDDAEAIARETLADPDLPPAGKNHTPPPAADQLAAVRDWRESLVLQRVRLLTEAEAVLVSLPLHLREQLPASSRVAASLDRLAQLDDIGADLGAADRVKLDRLTQTRADIDTIGARIKELDAEVPALLKALGCTLTDIHGVGVVTAMTLMTEIGNAHRFTTQGRFARWCGVAPVALSSGEGDDPPRRHRLDLGGNRRVNSVLHIVHVTQARCHPPAQAYMTKRETENKSKRAARRAHKRQLANVIIRHMWNDADRLAQASSASSSTAA

SEQ ID NO: 161506 - protein, 409 aa, unidentified
MSHNIAGIDVHKKLLMVVIAEVARREQILAGRRFGTGHAALAELGHWLLEWKVTEAVMESTAQYWKPLWLELEPLLRLHLAQARSNRAPRGRKSDLADAKRLLRRFMAGELFLSFVPEPEQRGWRTVTRARLQLVRERVLLQNQIESLLEEARIKLSSVISDLLGASGRRILRALAMGEADPEKLAALGDDRLKCGRAVLADALTGSATAVQRTLLKQHLQRIDLIDEQVEELNRLAAAHLLAHQDVVMRLVEVPGIGAEAAQEILAEIGPTASAFPSAAQLASWVGVCPGSEESAAQNHSGRCAKGNRFLRRLLCQAAQAAVRTKGSHFESVFRRLIVRLGYTKAIWAVAHRLCRIVWKILHQGARFIEQGEAINPRAVRRCISHHLNALRRLGYVIPAASTAVVART

SEQ ID NO: 161507 - protein, 355 aa, unidentified
MTIISHLYAFVVGVDTHAKNHVYSVLTKSGEHVDTAAFPTTKAGIKRALTWAGRRTGGDLETLWVIEGIGTYGAILADHVAEAGYTVAEAASMDARDRYATGKDDRIDARRIAGTVLSMDESRLRFPRQADGPRQGLQILVKARESMTREKTRTVNALTALLRTHDLGMDARRKLSVVKIHAVAKWRIRNESVALTEARREAIRLAKRVVEVDADIKDYATRIEALVKDSPAAVLLAEPGFGPITAAVFYLAWSHPGRVRSEAAFAKLAGVSPIPASSGNVVRFRLNRSGDRRLNSALYMVAITRLSHQKRSQAYMAKRLGEGKTKKETIRCMKRHLARSVYRILEATNSIGQAA

SEQ ID NO: 161508 - protein, 352 aa, unidentified
MTVTIVETATQVCAITGGVDTHADVHVAAALDAIGGLAGVQEFPATPAGYARLLGWLGGFGTVSLVGIEGTGSYGAGLARHIAAAGVRVVEVDRADRQDRRRRGKSDPLDAVSAARAAQSGRAAGAPRGRDGLVEAIRALMVAKRTARSERIQTINQARALILTGPDDVRTRFTRHGPAELVAELAGLRPRPGSMVRYHTLLSLRELGRRAQFLDAQLERLDELITPLVTARAPGLLALYGVGADTAAALLIAAGDHPGRLRSEAARAHLCATAPIPASSGKVTRHRLNPGGDRQANHALYRIVITRMSSHPPSRAYVDRRTKEGLSKKEIIRCLKRYVAREVYPYLRTPGS

SEQ ID NO: 161509 - protein, 411 aa, unidentified
MHNRQNYLYVGVDLHKEHHTAVIINCWQEKLGEIQFENKPSAFSKFLLEVETYVRDGITVVFGLEDVGGYGRALAKYLVDHERVVKEVNPALSFLERKSQVMIQKNDSWDAECVARILVNKFNQLPDAKPNDLFWSIQQLVLRRNALVKAQAALKNQLHIQLNHHYPSYKKFFSEVDGKTALAFWKQYPSPSCLEGVNIKRLTAFLLDVSNNTCSVKKASDILKLVKEDGHTMKEYQDTRDFLVRSIVREIEFKKKEMKYIERELKQLVNLLDYQLETMPGIELVTASALIAEIGDVRRFPNANKLARFAGVAPVYFGSGGKGKTHKSKQGNRALHALFYNLAVQQVQVAKGSKLPRNPVFHAYYQKKLKEGKTKGQALVCIMRRLVNIVYGMMKYKTAYELPIVEEKEVV

SEQ ID NO: 161510 - protein, 350 aa, unidentified
MTTLARQITGGVDTHLDVHVAAALDERGALLGVESFDTNPRGYDKLLTWLQSFGTVELLGVEGTGSYGAGLTRHLHSEGIRVVEVDRPNRQRRRRHGKSDPEDAISAARAAQGGDANGEAKTRDGNVEAMRVLRVARASARKGRTQALNQMRSLISTGPDCIRAELRSLNVYRLLERASSYRPGTKQDLVSINKLTLRMLARRAIELEREVKEIDAILKVMVAETAPELSAISGVGTDIASALLVAAGDNPERLRNEATFAHLCGTSPLDASSGKQQRHRLNRGGDRQANSALWHIVITRMVSDPRTREYIARRIKEGKTKTEAIRCLKRYIAREVYNSLPMEHLALDSP

SEQ ID NO: 161511 - protein, 336 aa, unidentified
MEHLAIDLGGRESQICVRSSDGQIIDERRCRTAALPAYLATRPQSRVVVETCSEAFGIADAAMAAGHEVRVVPSTLARSLGVGARRLKSDRRDARALSEVSCRIDLPSVHIPSREARDHKTMCGMREALVRTRTKLVNTVRGWLRAEGRRPRSGELTTFAARVRELYAEMMLPAHVARQLRVLESLNEEIAGADRELATTAKADPIAARLMTVPGVGPSTSVRFVAALDDISRFGGAHAVESYLGLVPGEDSSAERKRRTTITKAGPSALRWCLVQAAWAARRTRRKDPMHRWVDEVEKRRGKRVAVLALARKLAGILFAIWRDGTVYDPHRSGAV

SEQ ID NO: 161512 - protein, 340 aa, unidentified
MDLHKKTSSFCVLDKEGKVLLEKTIRTDPEEVRKFIKSLGKQNKINLVMEPLSQWYFYADFIEAQGVEITLAHPLKVKAIAFAKVKTDKIDAHVLANLLRCNLIPKAYFAPKYVREWKELSRARMSLIEIQTQVKNKIHAILFRNGLNYSRTALFGKSGRAWLNKLDLDPVFRLNLESNLNTLDSLKKQIAILEKEIKKTVDNNKEMSLLRTIPGIDYITSITIMSEIGDIHRFPNEKKLHSYAGLVPVVRSSGGNTKRGHISKEGSKFLRYIMVQTAQHQRILKNKVGLKWYLDRLCLNNKNSKTAIVATARKLLTIVFKVLSEGRPFEERLPKTISII

SEQ ID NO: 161513 - protein, 345 aa, unidentified
MDEAYDGRQVVGMDLHRRRSVLVRMSMDGRKLETVRIGNSPGALRAVLARCGERPLVVLEATYGWYWAADVLAGAGAEVRLAHPLGVRAFSYRRVKNDERDAADLADLLRAGLLPEAWIAPPEVRALREVVRYRHKLVGQRTSCKDQVHAVLAKLGVPVTHSDVFGTGGGLWLDQLVLPEPYAAKVASLRALIGVLDGEIARLGQRAAGVLGADPGYAALRELPGIGPVLAAVIIAEIGDVTRFRRAGQLCSWAGLTPRHYESDTKVIRGHVSKQGSKMLRWALVEAIQHQPAGTRPRQARDAIIARRGKEARNIAKTAAARVLLTQVFYALRDGHVRRASHPAA

SEQ ID NO: 161514 - protein, 347 aa, unidentified
MLADELDYVVGVDPHRDTHALAIVQAATGAALFEVQVTASERGYAQALRLAERESPGRRAWAIEGTGSYGAGLARFLARRGERVLEVGRTRRERRSHAKTDALDALRAARSVLGKAQLASPRAAGEREALRALMVARAGALAAKKAGLCQLRALLVTCPEPLRSELRSLTRARLLRRLAAVRPDRHQDAELRGTLLALRALARRVQALTAEEHELKQEIQALVARLAPAVLDEPGVGPIAAAQVLLSWSHRGRFRSEAAFARLAGAAPIPASSGRVRRHRLDPGGDRQLNRALHTIIISRRKNHPPTSAYIERRRAEGKSVREAIRCLKRYLARHLFRLLEAAPMAA

SEQ ID NO: 161515 - protein, 327 aa, unidentified
MDERGHTVVRRTMKRDEILPYFANLEPCLIGMEACGSAHHWARKLMSLGHTVKLMAPQFVKPYVKSNKNDARDAEAICEAVARPNMRFVPVKNAEQQAVMSIHRAREGFVKARTAQGNQIRGLLSEFGIIIPKGIANVYKRIPEILEDGENDLPGNMRQLIQRLTDHLKELGNQVVALEKEIKQWHTANESSRELAEVGGIGPLTASALAATVGDAKNFNRGSQMAAWIGLVPKQHSTGGKTVLLGISKRGDTYLRTLLIHGARAVIRHAEHKPGHADSWLGKLIARRGKNVAAVALANKNARIAWALLSKKSKFRPDYAAVQPTAA

SEQ ID NO: 161516 - protein, 354 aa, unidentified
MIIIGADYHPGFQQIAFVDTETGELQERRLQHREEAEKFYRDLATQGMKVRVGMEASGHARWFERLLSELQFELWIGDAAEIRTKRVRKQKTDRQDAQLILQLLLEDRFPQIWVPSWENRDLRQLLWHRHRMVQARTRIMNQLQAVALNEGLRRKKGLWREAGRKQLESFALAPWANRRRRDLLELLDRLNPTIAELTQAIEQEVEKCPEAQRLRTHPGVGPLTALAFVLIIGRADRFQCGKQIASYLGLVPAEESSGERRRLGHISKQGNALLRFLLVEAAQVTVRSDQEWRSKYFHLAMRRGRKIAKVAMARRLAVRLYWMWRKRWDYEQLTKFGSHAGQPGTGDGVQLNTE

SEQ ID NO: 161517 - protein, 469 aa, unidentified
MSLTLGAVLGALHCRLEHESPVLDRPRWLPGQPCPLLPSKEDEVEQTEEPVELVARVCALDIGKATVMACVRVPHEDNPGRRRQEVREYATRVPALLELADWLRCQSVQLVAMEATSSYWKPAFYLLEAEGFTCWLLNAKHVKNVPGRPKTDRLDAVWLAKVVERGMCRPSLVHPKPIRQLRDLTRYRRSLIRERTREKQRLEQLLEDAQIKLSSVISDIFGVSGRQMLQALIAGQRNPKALAQLARASMRSKIAVLEEALTGHFDDHHGFLCQLMLERIDAATAKIDRVTAEIDRVIAPFDHQVAQLDAITGVGVVAAQELIAEIGVEMGRFPTAAHLVSWAKFAPIDHQSAGTKKRGATGRGNPWLAATLGEIVAALARTDTFLGERYRRLARRRGKHRAIVAVGNSVLTIVWHLLADPQARYQDLGPDFYASKINQRRRQRDLVRQLEHLTGKKVVLQPRPEQPAA

SEQ ID NO: 161518 - protein, 351 aa, unidentified
MTEHSKEPIVTLGIDLAKRSFHLFGVDAHGREVLSKKLSRARLSEFMANLPPCTVAMEACGSAHHWARLFRTFGHAVRLIAPQFVKPFVKSNKNDAADAEAICEAAQRPNMRFVSVKSVEQQDIQAIHRMRSLIVERRTAQVNQIRGLLLEYGIEIPKGRAAVNRRLPELLEDAQNGLSARLRAELSELAEELRHLDERVRHYDAQLQAIAQSDPRARDLMTIPGLGAQGATALLAAVGEDAHVFSNGRGLAAWLGLVPRQHCTGGRARPLGISKRGDVYLRNLLIHGARAVLRWVERKEDPLSRWATTLKGRRHTNIAIVAMANKIARIAYAVMTSGKPYDSTKGALANG

SEQ ID NO: 161519 - protein, 353 aa, unidentified
MDTIYIGVDFHARQQTICYLKTETGELVTCELKHQDKQKVRAFYAQFHGPVIVGLEASGYSPWFERMLEELGCEVWLGHATEIRRRARWRQKNDRRDAELILELMLHNEFPRLHRPAVQSREVLRMLRYRQKLIKIRTMSKNSLQAIALQSGLARGSRLFTKDGQQQLSTAEMSPVMQWQREHWLQLMEPLNQQLLETMVWFKAQSKDDACIRRLRTHPGIGLLTSLCLVHTLQPVSRFSNTRKVAAYAGLEPVERSSGERKCFLGISKAGSRLLRYLLVEAAQTAVRKDEDLKRFYQRLAERRGRPKAKVAAARKLLIRAYIMLRDEIDYAEFRHRAVAARLARRGHRPESA

SEQ ID NO: 161520 - protein, 317 aa, unidentified
MDNQHTQKEINVGVDTGKFQLDFYVRPLGIAFTVPNNEAGIKEAVATLKKHSPTRIIIEATGRLEHAFVCACAKANLPFVISNPIHIKGFGKAIGRLAKTDRLDASLIAHYGEAVQPRLSKLRPDVLQQLSDLLSRRRQLLAMQTMEKNRCQIMPKALASTIKPILTALANQIAKVDQKLQCLIESCDDYRAKNDIIQSMPGIGKVVALSLISNMPELGYISNKEAAALIGVAPMNKESGKYQGQRKIRGGRAQIRTVMYMAMMSAIQCNPVFKTTYNKLLAAGKTKKSAIIACVRKMIIILNSMVRDGALWDPKMG

SEQ ID NO: 161521 - protein, 347 aa, unidentified
MRFYTQQHSHYCGIDLHARTMYLCILNQAGAIVLHRNMKSDPDSLLNAIAPFRENIVVAVECMFTWYWLADLCAREKIAFVLGHALYMKAIHGGKAKNDKIDAHKIAVLLRGGMMPQAYVYPEGMRSTRDLLRRRMHLMRQRAELLAHVQNTNHQYNLPDIGKKIAYRSNRDGVAERFADPSARCNVAFDLKRIGFYDGLLNQIELEILRHAKQHDANTFHLLDSVPGVGKILALVLLYEIHDIRRFPSVQDFASYCRLVKSKKESAGKIYGTSGNKIGNAHLKWAFSEAAVGFLRLNPQGQAYLARLEKKHGQGKALSVLAHKLARAVYCMLHKKEAFDMQRFLNR

SEQ ID NO: 161522 - protein, 386 aa, unidentified
MATSTTSRIKQNTLPQPTLYLAFELGQTTWKLGFTIGVAQQPRERTIPAGALETLQQEIARAKQRFGLPEDTRVVSCYEAGRDGFWLHRYLVAHDVQNHVIDSASIEVNRRQRRAKTDRLDVRKLLTMLLRHMAGERKVWSVVRVPSVDEEDRRQLHREMQTAKQDRTRVINRIKGLLAGHGVQLALQGDVDAQLDQVQQWDGAPLPSALRTRLKRAWQQVGFLTAHIQTLEAERRACLRRREDPVIAQVRQLFTLRGIGVNSAWLYVMEFFAWRDFQTSKQVGALAGLTPTPYQSGQSRRELGIAKAGNRHIRAMAIEIAWAWRRFQPASALSQWYERRFGAGSARLRKLGIVALARKLLIALWRFVKTGVLPEGAVLKTAAPRR

SEQ ID NO: 161523 - protein, 393 aa, unidentified
MICVGIDVAKDKHDCFILSSEGEVLADVFTIQNNAEGFDTLLQTIRRCVCPGDKIKVGLEATGHYSYNILGFLLDKGLDTYVINPLHTNLYRKSLSLRKTKTDRVDARTIAAMLMSDVDLKSYTDTAYHNEELKSLTRYRFDKVRERAKLKQSVSRLVTILFPELEKLVPSLHMASVYALLSEFPGAKQVAGAHLTHLKAVLYDASKGRYGRDMATTLREAARCSVGSVMPTKSLELQHTIRLIRELDAEIEDIEAAIQSMMDEMQSPIMTIPGIGVRMGAMILAEIGDFSRFDSPDKILAYAGMSPSTYQSGQLSLSGAYSHMEKRGSRYLRYALYNATKYVCLWDPVFAAYLAKKRTEGKHYNVALSHAAKKLVRLIYAMEKSRQSYRKAA

SEQ ID NO: 161524 - protein, 337 aa, unidentified
MNKSDSNFVPCGIEVSAQTLLVALGEKAPRAFPNTAAGHQAVLRFLEQAGGRARVCMEATGRYGLDLALTLHGARVAVMVANPRAVRHFAIADMRRSKTDRVDAAVLVEFAARMRFRPWQPPSPPALKLLAVARRLEALTHMITAEKNRRHAASLSEALPGYVRLEIRGHLGILARHVARLRQAAEQFIADDLQLTERYQLLQSIPGFGATSALQVLAELALLGPDLDVRQWVAAAGLDPRQHSSGSSVHKKTRISKLGNAHLRRGLYMPALVALQHEPHLAAFYQELLARGKAKLQAVVAVMRKLLHAIFGMFKHHQTYRGSKVRALAPQPEALCA

SEQ ID NO: 161525 - protein, 340 aa, unidentified
MSEITTIGLDLAKNIFQVHGIDETGTAVVVKCLRRSQVIGFFAGLPRCLVGMEACATAHHWARELTGLGHEVRLMPPQYVKAYVKRNKNDAADAAAICEAVKRPSMRFVPVKTIEQQSALLMHRTRDLLIRQRTMLINALRGHMAEFGLIEAQGLHKVAGLIAIVMDDRDERIPEMARQVLKVMTGQLDELQTRIAALETQVLAWHKNNPVSQRLATIPGIGPIIATAIAATVADPSVFRSGREFAAWLGLVPRQSSTGGKARLGGISKRGDSYLRRLLVNSAHTVLLCSKAAKVDPWIVSLRARKPRLVVAVALANKTARVAWAIMSRQNTYRRAAVAA

SEQ ID NO: 161526 - protein, 345 aa, unidentified
MKKVMAGIDLHSNNLVVGIVDQDGKRVGQKKLPCDLKEVVKFLGPFKRRLEQVAVESTYNWYWLVDGLKALGYPVVLANPAAMEQYSGIKSAGDTHDAFFLAEQLRLKILPTGHLYDAELRPVRDLLRRRLLLVHQRTALMLSFKSLYTRTTGQEMTLSGLKELEIKEAQELYDHPANQMIAGMQIKHIDQLSESIEKIEKAVLASARELPFYSKLTSLPGVGRILGMTITMEVGDIKRFADAGNFASYSRTEAAQRTSNSKKKGENNSKCGNKYLAWAFVEAANFARRYDAQCRQWSDRKAAKTSKVIATKALACKLAKAAWHVMSQGSDYDAERMFGQPATAK

SEQ ID NO: 161527 - protein, 336 aa, unidentified
MNGSTGRWVGIDVAKSKLDVALLDERGKVKSHVFANDAKGHAALIAWLHQRGGSPELVRVCMEATGCYSEAVAIALVDAGWSVSVVNPARIKGFAQGELLRNKTDQADAALLARFGLALQPEPWVAPPLELRQLRALVERLQSLKEMHQQEANRLEAAMNQAGMRESIEGHMQWLQDSIRKLERQINDHIDGHPGLREDAKLITSIPGVGNTTAAKVMAYLGDVRRFRNAKALAAFIGVTPRLKLSGCSVRGRSMISRSGHAAIRHSLYMPALVALKHNPIIKTFGARLKANGLAPKAVVAASMHKLVHLIYGILKSGTPFNPNFMAARLDIQDGI

SEQ ID NO: 161528 - protein, 343 aa, unidentified
MQTITTIGLDIAKSVFQVHGVDAAGQVVVRRQLKRRYVLAFFQKLPPCLIGIEACASSHYWSRELRALGHTVRTMPPAYVKPYVKRQKNDATDAEAICEAVTRANMRFVPTKTPEQQSCLMLHRTRHLFIRQQTAVINAIRAHLAEFGIVAPVGRKGVTELLHVVADPSDGRVPEVARACLAALGTQLLGLKEQIVEFDRLIMAWYRSNETSKRLHYIPGVGPLLATALAASVADPQTFRSGRNFSAWIGLVPKQHSSGGKDRLGSISKQGDRYLRSLFVAGALSVIRYAKIHGTKHRPWLTALLARRPTKVAAIALANKLARMAWAMMARGERYRNPVALAA

SEQ ID NO: 161529 - protein, 416 aa, unidentified
MNAVGIDVSSRKSTVAVLRPLGEVVCLPFDVSHDADGLASLAEKLKALDGETRVVMEHTGRYYEAVAKALHEAGFFVCAVNPLLIKEYGANSLRRVKTDKADAVKIARYALDNWADLRDFTPMDAIRYDLKTLNRQFQLASKQRTASANNLIALLEQSFPGIRKCFDSPVRSDGTQKWVDFAHSFWHVDCVRKQPFAAFCERYRKWCKRHAYFFKLSNAEEVYALAKRAVVLTPKSKVVKVLVQEAANQLSSISRSVEVYRAEMDRLAAMLPEYPVVMAMYGVGKSYGPQLMAEIGDVRRFERKQALVAFAGIDPMPNQSGDKNVRSNKSSKRGSPYLRKTLFNVIRTYLQCAPQDEPVFQFLNRKRAEGKPFYVYMLAAANKFLRRYYAKLRDYFASLDTLQPVAPIPTILKAAL

SEQ ID NO: 161530 - protein, 469 aa, unidentified
MNSAKKKKCKNNGKQHTSLSQLEQINFDAAGIDIGAEEHYVAVPKGRDPEGEDVRYFNTFTVDLLSLADWLKKCKIDTVAMESTGVYWIPLFEILDSQGFDVKLVNPRSIKNAPGRKTDVLDCQWIQQLHTYGLLQGSFRPDDQICELRSYLRQRSMLISYASHHIQHMQKALEQMNIKLNHVITDITGATGMAIIRAIIAGERNPEKLAQMRDPRCKSSISTIAKSLQGNWRSEHIFALQQAVELYDFYKNQITACESRIQQHIETFDDRSNGKALPKPPFRSGGSRNKFHFDARTYLYQMTGVDLTRIEGIDTPTALTIISETGIDMNKWPTDKHFSSWLALCPGSKISGGKVLSSQSKPCANRAAHAFRLAAYSLHRSNSALGAFLRRKKSHLGSPKAITATAHKIARIFYNMLKKGTEYVDLGQDYYERCYQDRVITNLKRKAKQFGYNLINVKEHELLTTHLQI

SEQ ID NO: 161531 - protein, 339 aa, unidentified
MRLYAAFDLHSSNSYLGISDEKGKRIFKKKLPNDPARIKEALRPFKADIEGIVVESTYNWYFLVDLLKEEGYRVHLANVMKTQQYSGLKYSDDKNDAFWLVEMLRLGILPEGYIYPKEERPIRDLLRKRGHLVRLRTSLIVSLQNIIARNLGSRLKSNDVKILTTDRVTPLFQGNEDLALAGRVSKEAIDFMTRQIKTIEATIGERIQLSKPYDRLLSIPGVGKILAFTIQLETGSIDRFQKVGNYVSYCRKVPSGRFSNDKKKGTGNRKNGNKYLAWAFSEASDHARFFDSESRKYYQRKLQKTNAPIAHNALAHKLSRAAYYIMRDGVLFMPDKAFA

SEQ ID NO: 161532 - protein, 421 aa, unidentified
MNQLAEQPFTAYVGIDWADAKHDLCVQAAGSEDRAFERIVHKPERIEAWAQAMYQRFGGPIAVALELTKGPIVTALEKYDFFVIFPVDPQRLAKYREAFTPSGAKDDPTDAEFALDYLVRHPEKLTALTPQSVPMRKLMYLVHARDRFKGDQARWVNRLVQALKQYYPQALDWFSQRNTVVFCDFLNQWPTLEQAKRARKAKLETFFKAHNVRFARVIEARIEAIKAATPLTHDEAIITAHRLQVAVLVAQLRLTIQALKQFDHEIAATVEHLPDYALLFSPLPGAGAVLAPRLLVAFGEDRTRYPCAEEVQKHSGIAPVTQRSGQMEWVHWRWRCPKFLRQTFVEWAAQTINKSAWAGAYYRQQRAKGSSYQAAVRALAFKWIRILYRCWQDRTPYDESKYLEALRRKGSPLLKYLAEAT

SEQ ID NO: 161533 - protein, 345 aa, unidentified
MEITTIGLDLAKSVYQVHAINGAGEVVVRKTIRRAQVLRFFERLDPCLVGIEACGTSHYWAREISTFGHEVRLMPPAYVKPYVKRGKTDASDAEAICEAVSRPTMRYVAIKSCEQQAALTVHRTRDLLVKQRTQLVNMIRGLLAEFGIEIRRGITHALSLAERIAAGDMPSIPALAAKMITSLAGQILDLEARLREIERELLAWHRSSDIARRLATIPGVGTVCATAFAASVTDPHQFRSGRQFAAWLGLTPLQHSSGGKERLGRISKMGDKYLRRLLVVGMTSLVRRAKYKPDAVDRWLSDLLSRKPVRVVTVALANKAARVIWAIMTRGGIYRAPQPAGVGIA

SEQ ID NO: 161534 - protein, 412 aa, unidentified
MDVIVQRPAALDVHKEQVTACVRFPAADGSRAQEVREFKTTVGGLLVLHDWLKAHGVTRVAMEATGVYWKPVWAVLEDGFELLLVNARHVKNLPGRKTDIKDAEWLCQLLEAGLLRASFVPPKPIRQLRNFTRYRKAQINERQREANRLHKALEDTGIKLDCVATDILGKSGRAMLDALCQGTTDPEVLANLAKGKLRAKIPALREALEGRFEAHHALLISSILAHLDFLDEQIERLSEAIEEQLRPFQPAVDVLRSLTGIETRTAQNILAEIGTDMSVFSSAGHLASWAGQCSGNDQSAGKRRSGRSRKGSKWLNEALKDAAMAAIRTTNSYLQAQYRRLKPRIGHGRALGAVKPSIICAIWHMLTTGETYRDLGGDYFRKRDPERQTRRLVAQLERLGHKVTLEALPEAA

SEQ ID NO: 161535 - protein, 436 aa, unidentified
MKMKSLQTKRHFVDGKIIIGIDPSKKKFQAVVLDPKGIPAGNTFSFKNTYEGYHIELWQKLDSIIKKQPTEKVVFAIEASINFWQKLCFFLSKRGYSVLMISPMTTKHERRRISRNFSRTDPRDALLVANAARQGYYHFYRVFSPQTEALHRLSITYDKLKKQLVTAKQRLLAQNDLIFPEFMDVMDLDTDSARYLLSMAMTPDDFKNRIHFKEASKMATLSRQHFNHQTVLDLKKTAEKSIGLPLEGAAHVAERLTMNLWIQQILVMRTQMNLVLDEMVRLSKQTPWFEILTSIKGISDISASRFIAENRNLSELPHFKKIQAFAGMSLKIDDSGEYSGNRHITHIGNHRLRAVLYKMTEETKNHVPEVRIRFLKRQMKHKWYKENVVACSSNLLKLISALIKENHPYQEKLERIKELKKLEKKYEQHLLDKHAA

SEQ ID NO: 161536 - protein, 355 aa, unidentified
MNDAKYIGLDVHQATISAAVRDSSGNLVMEATLETKAETILEFVHGLRGSLRVSFEEGTWASWLHDLLKPHVSEVLVCDARKNALLRVGNKNDREDARKLSELLFLNKLHPVYHGETGIRTLRELARSYLTITRDLTRVMNRLKAIYRGWGIACAGQQVYAPRYRAEWLAKITEAGVRRRAEIYYQQFDVVAALRQEVRRELFAESQKHPAMRLLRQIPSIGPIRAALLIALMQTPHRFRTKRQLWAYCGLALRTYDSGEYRFVGGQLKRSKKAVTIRGLNKNHNHDLKNIFKGAATRAAATAGPFQKFYEARLASGMKPPMARLTLARKIAAITLLVWKKGVRFDAEQLKQQAA

SEQ ID NO: 161537 - protein, 401 aa, unidentified
MHAVIGIDVSKATSQVAVAVDGKVVQNFKITHDVFGFNQLNTVIMQFNTFPDIVFEATGVYSRRLKTFLEAHNYPYTCLNPLTAKKQLDQLRPNKNDLNDAKHLAETQFILKRAKSYVQNPIYIELQDMSRFYQQLNHDIVSAKNRLHRLLQLTFPEIETLFSTTDSQQYWEIVSLIPHATMAKHSRQTLSDTIQSSVSRQIGVARLTRLVDKLVALGILSAPAVAVASYNVTEVRYYAQRLIALSQSKANVLATMVDQAKDLPEYDIYQSIPGFSDKTVVSLIAELGDLHRFATSNKLNAFVGIDLRFNDSGDYKSSGFITKRGNTIARKVLFKAISNIASTATYGHQNHINDWYQKKKQSSMSKGTKKIAIGAMSRLLRTMHYLVLNNQLYDYDTASKR

SEQ ID NO: 161538 - protein, 425 aa, unidentified
MKKIDYLSTLFVGIDIASRFNVVSALDFHQDYFIKMKPVPNSQEGAELLETMIVDVLANNHQFKYVIISMESTGFFGVHIANYLSASDKLAPFSVHVYCLNPKEVKNYKKSFNDLGKNDGIDSFVIADYARVGRITIKPWRGSQYLALQRLTRHRLHITECIAREKTYMLNNIFLKFSEYALLNKDEHPFSNKYNATAKAILTEFTTNEDLVNSSVEELVAFVNSKSRGRIVDPDETAKLLQAAARNSYRLDKCLYEPLTISIASSFNCISSFEKELKAIDKAILQTVQGLNPDEYTVLNSIPGIGKVYSAGILAELGSIKAFQNSDALAKYCGIVWNDNQSGEFEAEDKKMSKAGNRYLRYYIIEATGSVIRNCPEYKSFYNKKYVETRNHQHKRALALTSRKFLRMLFGLLDKSQLYSPDKSR

SEQ ID NO: 161539 - protein, 400 aa, unidentified
MRAVFGIDVSKTSSEVAILVNCEKVHGYTILNDAIGFNRLLGDLKTVHNPEIIFEATGVYSRRLQAFLEEYSYAYTRLNPLEAKKQLDSLRVRKTDKIDAEKLAKSQLVHNRKPTYVQEEVYQHLRDLSRFYQNMTEDLVRTKNRLHKVLQVTFPELETLLSTPTGEQYWNLVMAFPCKEFVLSLSQSNLCEIIRQSTSKRISEKRIAYLTDKLIKLAKQSFCAVKKTSPMLEEVRYYAQELLRLSERRQVVLNDMVALAQPLPEYDILRSIPGIAETTATSIIGELGDIRRFQSTNQINAFIGIDLRHYESGNFLAKEHITKRGNPYARKILFKCIHNIASASHTNPCHIADFYEKRKRQSTIASTKPHTIASIHRLIRTMYYLITHNKLYDYSLTQNR

SEQ ID NO: 161540 - protein, 370 aa, unidentified
MNDSIFVGLDVHKATISVAIAEGMRGGEVRQLGIVPNRADQIAKLAEKLTRGGQRVSFCYEAGPCGYGLHRQLTELGHDCIVVAPSLIPMKAGDRVKTDRRDAAMLAKLHRAGELTAVWVPDAAHEAMRDLVRARATAMRVLGKARQHLQGFLLRHGRTYAGKKGWTLAYRRWLTTVRFNHPASQIVLQDYIHAVTDAEARVERLTRQIEELAPQWSMAPVVEAVQAMRGVAFIVAATVVAEVGDFARFDNPRQLMAYLGLVPSEHSSGATARRGGITKAGNALARRALIEGAWTYRMQARVSRKLHDRNERLPQDIRDIAWKAQVRLCARYRRLSAAGKPKVIVTTAIAREMVGFLWAIARQVQVGLAA

SEQ ID NO: 161541 - protein, 347 aa, unidentified
MEYFAGLDVSLETVNVCIVNAAGDILLEKKIAAEPAAIVNLLKSFGSPFKRIGLEAGPTSSWLYGELRAAGYGAICLECRHVKAGLSAMRNKTDRNDARGIAQLVRLGWFRQVHVKSEEAQRTRMLLVNRQQLLTKALDIENSVRGSLKVFGLRVGVVARRGFEARVLELVADDPILLAVTEPMLRVRQALLEEFERLDRLCQQLARRDPVCRRLMTVPGVGVVVALTYRTGVDAPERFSRSRDVGAHFGLTPKRYSSGQTDYDGRISRCGDEMVRTALYQAANVLLHHGRWSSLRSWAMRIAKRGSVKGAKVALARRLAVVMHRMWTDGTDFRWSDTRRMTVSTAA

SEQ ID NO: 161542 - protein, 324 aa, unidentified
MSASSVVVGLDVAKAHVDAAVLGATLDARRFDNEAEGHSALIAALEPLGVALVVMEATGGYETALVCALQGAGLAVAVVNPRQARDFAKSMGRLAKTDAVDARMLAELAAVLLRRDDLARFLRPLADEHQQWLAALVTRRRQLLTMLHSERQRLQITPRGLHPSIEAIVAAVKAQLDDIEAQMVAHVREHFGELDELLQSASGIGPVASATLIAELPELGRLNRREIAALVGVAPMANDSGSSKGRRRIQGGRFEIRRVLYMAALTASRRNPSIKLFYERLVAAGKLPKVALVACMRKLLSTLNAMVRTRTHWSADYKRAGSRA

SEQ ID NO: 161543 - protein, 418 aa, unidentified
MQVDNEDPEIIERVAALDVGKAEVVCCVRLPGPNGRRLQEVRTVSTMTGALLALGDWLAGLGVSRVVMEATSDYWRAPFYLLEDRFETWLVNAKDVRHLPGRPKTDRLDAVWLCKVAERQMLRPSFVPPPAIRQMRDLTRYRVDLIETRTAEKQRVEKLLEDALIKLTVVVSDPFGVSGRAIMAALVAGERDPAVLAGLARGTLRAKTGPLTEALTGRFSEHHAFLLTQMLNRIDTISADIGTVQARIDAQIAPFAQAVARLDEIPGVGVTAAQTILAEIGLDMSRFPTPAHLASWARFAPGVSESAGRKKGNAGTGRGNRYLARVLGEAAIGASRTQSFLGERYRRIARRRGKKRAIVAVGRSILMIVWALLSDEDARFIDLGPDHYDARTNAQRRLRNHVRELQALGYTVTLSPAA

SEQ ID NO: 161544 - protein, 315 aa, unidentified
MEKTTPAPEATYVGLDIAKDRLDYTVDGQRCDHVPNTASGHERLLAALAPLRGVRVICEATGGYERAVVAALLLAKLEVCVVNPGRVRAFAHAEGLLAKTDRLDAQLLRRFGEKVRPRLHAPMDQAAITLRELLDYRRQVSDQLVAARNRRELAGPVLRARLDGQVAFLEKELAAADRLIGDHIDHDDTLRRKAARLRELKGAGPVLAATLLAYLPELGEIESPQLSALVGVAPFARDSGRSRKARHVRGGRGVVRHVLYMAAVAATQHNPVLRAHYTRLVAAGKPKLVALVAVMRKMLHVLNRLLADPHFVLVR

SEQ ID NO: 161545 - protein, 388 aa, unidentified
MDVLYQSCAGIDVHQATVVVCILHGPLTSTRPKREMAQFDTTTKGLKACHDFLTQFHVEAVGMESTGVYWRPVWHELCDDFELILAQPAHMKAIPGQKTDKKDAHWIAQLTRIGLLPRSFVPDETIQELRELTRQRKHYVESRNRETNRIHKILQSGGIKLTTYIEDIMGASGRNLLQLLIDETPLTPRMIHQSVYTSLKRKVPQLLEALDGYFSAHHRFMLGQSLEIYDFYQKQIDCLEERINGYLNLYERPVEILDSIPGMDLITASVIIAEIGVDMSQFPTAGHLASWAGLCPGNNESAGKKRSTKIRHGNSYLKRCLCQTVFAAKKQKGSPLAERYYQIQSRRGPQKATIALAHQLLKIAYILLKENLTYQEFVLQKRLLETSQ

SEQ ID NO: 161546 - protein, 433 aa, unidentified
MKVLYERVAGIDVHKEMIKVAIRSPGEKPWTRTTEILEFRTFFGVLQEMARQLRRRGVTHVVMEASGVYTEPVYYALCEQDFTEVAVINPAHAKALKGHKTDAKDCARIAELFECGLLRGSYIPPAELKEVRDLTRYRIKTVQARTSEIQRLAKALESAGIKLGSVASDITGVSATAMIESLIDGERRGAVLADLAKGRMRTAGKLADLSMALTGRFTGHHALLCRLHRDRIAGFDAAVAGLDERIAGRAARWRPEADLLTTIPGFGDVVAQAWLGEIGPAPHLHFASHEKLASWVSLCPGNNISARKRKYGRTGDAGTYIKPMLIQAAWAAIRVKGRLQARYNRLVRRFGGDKNPGAKKKAITAIAHTLLKIAYQVLKSGTPYQELGADFYTRRESPEQKQAWLERQLQKLHPGCTITVTISPPEAALPPGA

SEQ ID NO: 161547 - protein, 343 aa, unidentified
MSEQKITGIDLAKTNFYLFSINAHGKPAGKIKLSRNQLLNWLAQQPKMTVAMEACGASHYWAREIRKLDHDVILFPAQHVKAYQRRQKNDYNDAQAIAEACQHGTIRPVPIKTLEQQDVQTFLKMRRLVSMERTQLINHVRGLLAEYGIVFSKGATELRQKLPALLEDAENELTDTMRTLLHRQYIRLITLDNELDWYDSEQKKYVRQDPVCKRLLAIPGFGPLVSQAIKSWMGDGKQFRRGRDASAALGLVPRQFSTGGKQVLLGITKCGDQYVRSMLIHGAREVLFRASEKTDSLSVWVNRIREKRGFNRAVVALANKLLRIAWVIIARNEMYLPATKQNQ

SEQ ID NO: 161548 - protein, 414 aa, unidentified
MFAVGVDVSNGRSMIAVLGARRKVVMKPFEVPHTADGFASLVEKLRGLNGEARIVMEHTGRYYESFAMSMYRAGFFVSAVNPLVIKDYREGVDVRKVKTDRADALKIAQFALDKWEILPQYTPMDTIRYSPKTLHRQFQLASKTRTALNNNLIALLEQSYPGANRYFDSPVRPDGSQKWVDFVDTFWHADCIAGVSRSAFVERYRKWCKRHGYNFSERKAVELHVDARQKFPLVPKSDTCKLLVKEAVSQLRTVSRTIETYRAEMNRLAAQLPEYETVMAMTGVGKSMGPQLIAEIGDLRRFAHQKSLVGFAGTDPIKDDSGDKVSDSKPSSKRGSPYLRKTLFVIMTILLQLQPQDDPVYQFLDKKRSEGKKYYVYMTAGMTKFLRIYYGRVRDCLKAKGLWEQPMLESGSSD

SEQ ID NO: 161549 - protein, 352 aa, unidentified
MEEISTVGIDIAKSVFQVHAIDHGGNVVVRRQLRRQQMLKFFAQVPPCIIGIEACGTAHYWARELSALGHDVRLMPPAYVKPYVKRQKNDAADAEAICEAVTRPTMRFVPVKSVEQQSAAMLHRSRALLIKQRTMLLHSIRAHLAELGFSIGVGIAQMARVVRELAQGERSDLPELARFVLEALAKLVCDLAQRLQAIEKKLISWHYKNDLSNRLETIPGVGFVTASALSSIVPDPQAFKSGRHFAAWLGLVPRQNSSGGKARLGHISKQGNPYIRQLLVLGATSVLRYIRRDGGSGTGWIGGLLRRRPPKVAAVALANKMARIAWSIMTRGGEYEEINDRICLTLCGDWPI

SEQ ID NO: 161550 - protein, 367 aa, unidentified
MIKKQSIKGVTDRSPRGSQETVGERGSSRLFLKYPEQLLGPLSPHSQGRGIKGDPMDQEKFVGIDVSKAQLDVHVFPTDVQTHFGNDEEGIAGLVSFLQATSPALIVLEASGGWEVAVVGAMGAQGLPVVVANPRQVRNFARATGMLAKTDPLDARILARFGAAIRPELRPLKAPVTQELSALVNRRRQILEMITAEKNRLRLASPRVRAHIQEHLKWLQKSLKQLNKDLERTVKQSPLWRESDDLLQSMRGVGPVLSTTLLADLPELGTLNRKEIAALVGVAPLNRDSGTLSQRRFIWGGRKNVRAVLYMSTLAGIRWNPVIRSFYQRLRAAGKVKKVAITACMRKLLTILNAMMKNRSRWNFSPA

SEQ ID NO: 161551 - protein, 332 aa, unidentified
MDNFYFIGVDVSKKKLDFCVLFEGKVLREEQVSNHQQAVARLIGELKNDLEMDNEQFLICAEHTGQYTFPLVCACKSVECKLWLENPSQIKYSSGMQRGKNDKVDAKRIAIYASRFGDKVKYYDRPTEEIERLKQLERERALYVTDLAKYKGQMYDQKDFMPAALYRKKTKRMKGLIQELQAAIDAITAEMEKIIGSTEVLARQMELLMSIDGVGKVVALNVIIETEAFSRFDNPRKFCCHAGVAPFSYTSGSSQHSKNKVSHRANKNIKKLLHMAGVSVTHRKEGELKAYYMRKVEEGKNKMSVINALRAKIVARMFAVIKRNEVYTPIYS

SEQ ID NO: 161552 - protein, 374 aa, unidentified
MRHDSEAFVAFDTSKWRNAVAVAEAGRAGEVRFVGEVENNAAATAKLVRKLAGKYARLTFCYEAGPTGYGLYRQIKGLGQDCLVVAPSLIPKRPGDRVKTNRRDAMSLVKLLRAGELTAVWVPDERHEAMRELTRAREAAVVDLRSKRQQVSAFLLRHELRHGGKRTWTKAHMSWLAGLKLAHLEQRIAFEEMLLAVRQAGERIERLEQAIRAAVEDWSLREVVPALMAMRGIDLISATAFLAEVGDLSRFRTPRQLMAYLGLVPSEDSTGDTIKRGPITKAGNRRARRVLVECAWSYQHPPRVGKDKQVKVAAAPPEVGAIAWKAQGRLCARYRSLIRRGKLKTVAVTAVARELAAFIWAINRELTTARAAVS

SEQ ID NO: 161553 - protein, 427 aa, unidentified
MKSASNARSSEPSTGTGCLPEFAANDVTAGIDWARDDHAACIVDGRGRQAAATLTPHTSAGLRDLIGFLGRHGVGEVAIERPDGPVVDALLGAGLTVVVISPNQVKNLRGRYGSAGNKDDRFDAYVLADTLRTDRARLRPLVPDTQATTALRRACRARKDLVKHRVAAANQLRAHLRNILPGAVGLFKDIDSEISLAFLTRFDTQDRIDWLTPKRLGDWLAKQGYSGKVDPAVLHQRLLDAPRGATGEYAASQAAITASYVALLQTLVEQIKTLSTQIGHQLDTHADAHIFTSLPRSGTVRAARLLAEIGDCRARFPTPESLACLAGAAPSTRQSGKSRVVGFRWSCDKQLRDAVIDFAADSRHANPWAADLYNRARTRGHDHAHAARILARAWLTIIWHCWQDHLAYNPQNHQALQRLLKTQTEAA

SEQ ID NO: 161554 - protein, 410 aa, unidentified
MSYETLIRRAHVMTRKNTLKSLPTDTEFRVVGLDLAKSDVSVAAIPVDDNTPSLVDRMTYADLLDWAGKISPTLFAMEPCNGYSLLCLQLENLGHEIKVISGWTVSMWINTHLSGQKTDLNDAIALARLAVSDAELTPIRHKSITEIRIQTVQAVRQQLMSQRSKSIVSFKALAQQWGIPCAAGHRNLKKLRESIEAKVDLITRPVANAMLFLLDAVKSLDRQIGQLNQTLQELVMSDERGRLLQSVLGVGTQISARVITVVGNVERFNSPRSLVAYVGVAPRNFITGHKNLTKKKHGNCPDLSHKGQGKISRRGDKLLRSLFIQGAACLYMQFCKDQLPECQLKRWILKQLAMQKPYGKLMVSLAAKLIRIVWAVLTYREKFNIQKAGMTRSMWSEMALETPLNKEVPA

SEQ ID NO: 161555 - protein, 361 aa, unidentified
MRVVFGIDVSKVSSEVAILVNGEKVHNYTMSNDAIGFARLLGDLRTVHKPEIIFEATGVYSRRLQAFLDEHGYAYTRLNPLEAKKQLDSLRVRKTDQIDAEKLAQSQFVLNRKPTYVQEEVYQNLRDLSRFYQNLTEDIVRAKNRLHKVLQVTFPELENILSTPSGEQYWNLVIAFPCKDCVLELSKDKLSESIRQSTSKRISDKRVAYLAEKLTVLANQSYCAVKKTSPILEEVHYYAKELLRLSEQRQAVLDQMVELAQPLPEYDILLSIPGIAETTATSIIGELGDIRRFQSANQINAFIGIDLRHYESGNFLAKEHITKRGNPYARKILFKCIHNIASASHTNPCHIIVTPYQKIST

SEQ ID NO: 161556 - protein, 409 aa, unidentified
MASIGADVNPSRRSHRCASRSSRRNRLNDLSRSLTPFDPNRTLIVVVEMGRESWLVAGIIPGVERQPLKKLEADENELLKLLERWRAEAEKAGHKIDRVTVAFEAGRDGFWLARWLRARGIEAHVIHAASVAVSREHRRAKTDRLDTDQLKRAFLGWLRGERVHCKMCAIPTFAEEDAKRPHRERETLVGEHTTIINRIKATLARLGIRSFNPKLKKAPERLEHLRTPEGEPIPPNTLAEVRRDMERKQLVAEQISQIEKARLEQLKRAPNTGPNLIVLLLVRVIGIGIETADMLVQEILSRNLRDRRAVARYAGLTGSPDESGSKRREKGLARSGNARVRRGMIQLAWRFLDYQKDSALAKWFQARTENARGSRKKMIVALARKLLIALWHFVRNGVVPEGVVLRPAH

SEQ ID NO: 161557 - protein, 348 aa, unidentified
MKNKSFVGIDISKNVIDVSIFREDTNIKMFPHEVFNNTRKGFGDMCSWLKKSRVVLSQALFGMEFTGCYSLDLEKFLTSKNYSFCMLSTRIVKHHPMGTIDKRDKNDSAKIADFLYRYDGTECAKPYKLPSKAMQQLKQLVNERKFLVEQRTNFMNRMQMFETKEDSAMYESYIKKLNHDIEKIDQKECELMSKEEDVFDTFQNLLTIPGIGFVNATNIIAITRNFTAFDTARQYARYVGVAPCSHTSGTSVKWRARPSAHCNGQVKADLSMAALRAVEHDVEMQMFYNRKLGGRKDSDTKRKALNAVKFKLICRMFAIGKQKRKWEVLNTSDDRKNLHIEKSKASEL

SEQ ID NO: 161558 - protein, 461 aa, unidentified
MLEETQETTEIIERVAALDVGKAELTCCVRVPGQGGSDRRLQEVRTYQTMTRWLLVMADRLAELGVTRVVMEATSDYWKGVYYLLEAAGFEVWLVNARDVKHLPGRPKTDTLDAVWLCKLAERQLLRPSFVPPPPIRQLREVTRYRADLVAARTAEKQRVEKLLEDAQIKLSVVASDIFGVSGRAMLAALIAGERDPKVLAQLARTRLRAKLGPLAEAFTGFFTDQHAFLLAKMLARVDALDADLADLDAKLAELIAPFADAVERLDEIPGIGQLAAQLLLAELGVDMTRFPTAGHLVSWAKFAPGVSESAGKRKGRGSTGHGNPYLARVLGEAAVAATKTDTFLGNATGGSPAAAVPSGPSSRSVGPSWSSSGTCCRTRPSGSTTWAPASTTPASTLSGPSATTSASWRPSATRSPSNPPPDHWHHRSTRLTLIGSGRRPDAAARLLTVDFRIRMRSRCT

SEQ ID NO: 161559 - protein, 347 aa, unidentified
MAIVGGFDIHRRQVTFDYVDTVTGQVRRGRIAPACRETLRHWLERFAGCEDVTFAVEGCTGWRFVAGELQRAGITALLAEPAETAERRGPKRRAKTDKTGSRHLRTLVAEGRVPCSWIPPEQVSELRALLQLYADLRAEHVAWAQRIHATLFRQGVPSLAGQLADPEIRARLAGADAEMGLSPAGAQAVQAALRMLGHLEAELAPVHAQIRAFARRQPGCKALARELYGVGPLVAAIIWAFLGDTRRFSSSAQAVRHTGLDVTVYSSDGKRAPGHLSHQGPPILRWALFEAGHQGSRQASPDHLYYADAAARIDASRAAISVARKLTRRAHHILRRLGDQACAPIAA

SEQ ID NO: 161560 - protein, 423 aa, unidentified
MNCTQNKKLMQITSETMVIGVDIGSEIHYARAFDFRGFEFSKKAFRFENNREGFNAFDNWATELMKKNNKTKAFVGMEPTGHYWYGFGCHLQNMRVEFGMVNPYHVKRSKELDDNTPSKHDRKDPKTIAMLVKDGRYLIPYMPEGVYREIRNLMELRRQNVVQLISIQNRVKRWLAIYFPEFNTVFKKWNGKAALLTLKYFPTPQAVIEMGEEKIVAIWKQTIKRAIGNKHARKLIKAAEESIGLKHGLESAVLEISTLLDEYEIYARKLQVIMQKVEEQVNKVPNANKLLGIKGIGIVAIAGFLGAVGDIGRFDAPEQIVKLMGLNLRENSSGKHKGKTTITRRGRSDGRYAIFQAVLPLVARNAEFRQLHLYYINRENRPLKKMQSIVALCGKLIRVFYAILKTGSNYNGEKMMKDIKRVA

SEQ ID NO: 161561 - protein, 345 aa, unidentified
MTTMNYIGLDVHKKTISYCVKDVSGRIQQEGKVGSTRRELDCWMKSLPQPWTVAMEATIFSGWIYDHLLPHAAQIKVAHPLMLRAIAAAKKKNDQIDASKLADCLRCDFLPECHMMPAEIRDRRRTLRYRHLLVRQMVQMKNRVSGLLMETGVEYNKQRLHKVSYFRELLSTNTEVHPSIRPLLKLSRETIERCQKTEYALVSSLQRDPVLAGRIKRLRTVPGVGPITALTWALEIGDVSRFRTIKNAISYCGLCGDERSSADKAMRMPLSKQRNKHIQRAFVEAAKRAPRQSHELAVIYDNERQKGNGNRATLAVARKMVAYLLAVDRQQRDFVPAEERRTPAA

SEQ ID NO: 161562 - protein, 325 aa, unidentified
MQGKEASEQETRKCTAGIDVSKNWLDAHVLPASQSLRVANTSAGIRQLKRWLLRLKVELVAVEATGKWHREVFRSLAASKVGVAVIDPYRVRMFAKAQGILAKTDRIDAKVLAMFAAMMSPACRPPAPQALEAMQELVTARASAVDEQVALKNQLAAAREVFLKRQLDRRITQLDGHIEAIEKECLKQIKSDEGLARRFAILTSIPSFGDVVAMTLVACLAELGSLSDKQIGALGGLAPVADDSGERQGDRVIWGGRGAVRRILYLAALSAKACNRDMKAFYQRLIGNGKKPKAALIAVARKLLVLANLLIAHDRLWQPIAPQNA

SEQ ID NO: 161563 - protein, 340 aa, unidentified
MTIAIGLDVHRAQITFDALDLESGEVETGQIAPATRLELRRGLRRWNGEQVAAAVEATTGWRFVVEELRRAGAEAHLAEPAETSARRGNKRRAKTDRRDARHLRELLVEGRLPEAYIPPAHLLDLRARVRWRKTLVDQRTEWLQRIHAVLFHHGLRIPTGRLSGRGAADALAQLDLPESAQCQITIALELIEHVNGQLAPLDAELRSFARRQPGCRALMGHYGIGARTSTAFLAELGDVRRFSSSRQAVRFAGLDVTVHESDRKRRAGHLSRQGPPVLRWAAFEAAETACRPRSPDHDYYLEVKARQGANRACLSVARKLLRRAYHTLRELGDAALEPVA

SEQ ID NO: 161564 - protein, 414 aa, unidentified
MKAWQELTHFAGFDWAKGHHDVVIVDKGGSIVAEFQFTHDAPGWEQFRKKVASFEALGIVIETSTGFAVEQLLNVANCTVFPVTPRSAKSYRERKAPSGAKSDHLDAWSLADALRTDGRDWKSLSLLDPIIQELRVLCRDEEALIEERTALVNQIQQAIYEYYPIALKAFDDWTMPSVWAFVIAFPTPEALKKAGKRKWENFLHSHRLWRSNTAPERLAWFAKATEFHASDAVTRAKSRLALTRAKQLQTLETQLELYRKAIEELFSKHPDHNLFDSLPGVGPKLGPRLLSEIGDDRALFGDAESLQCVAGTAPVTKKSGATRIVKIRWCCNKNLRHAVHLWANSSLNFCAWARVYYEALKKRGMTHAKALRNLGQRWLKILWKMWQTSTCYDPEFHAMNQLKHGSWVLSIDPK

SEQ ID NO: 161565 - protein, 344 aa, unidentified
MSKVIMIGLDLAKNMFQVHGVEASGTVVVRRQLRRGQVEKFFSELAPAIVGMEACGGAHHWARALERLGHEVRLMPASYVKPYVKRNKNDGRDAEGVCEAMGRPTMRFVAVKSVEQQAVLVIHSTRTILIRQRTMTANALRAGLNEFGIVAAQGLKGLRTLIEQLRNPSDEVIPEVGRATLLLLARQWEALDADIRALDRQIERVVRADEAACRLMEVPSVGPITASAAVAKVPNARVFKTARDFVAWVGLTPRGRATGGKHRSGGISKQGDRTLRSLLINGASSYLRQQIARGVKDPWLRDMLARRPYKVVMVALAAKNARIIWALLAKGERYRERAPVPAAA

SEQ ID NO: 161566 - protein, 428 aa, unidentified
MPYRIAGIDVHKKMLAVVVSNVEVVGEYEFQRRRFQTGPAQLRRLAEWLVEQEVEEVVMESTAQYWQPVWATLEEYWQPQRRNQPGAGSKTGELHLAQAQSNKGAPGRKNDFRDAERSVKRLVAGELTLSFVPDAEQRLWRTITHRRVQLMRDKSRIQSQLESLLEQAHIKLASVVSDWFGVSARRMLQAMADGETHPEVLAAMAESNLQATPEQWCDALSACRHWNPIYRELVEGIMKQLQFIEQEADLLERRAAEWMGKYQDAVERLAEIPGMGITSALQTIAEVGPEAKRFQSAGELCSWVGVIPGETVTAEQNASSHSPHGNRPMRRILCEAAHAAVKTEGSIFEVKLKKFVQHQKYHEAVWSVAHFMCELIWKILHQGVRYEERGPGVKAKAQQKRIQRQIRELKALGYEVFPRPVLAKPCPA

SEQ ID NO: 161567 - protein, 318 aa, unidentified
MTQDLFVGIDVAKASLDVAVMPGEHGWSLPNSEQGIQELIAKLQQLGSPKILLMEATGGLERRPLALLGAAGLPVTAINPRNARDFAKSIGLLAKTDKVDAKALALFAQKIQPPCRPLPDEDTRALQDLIVRRRQMLDMLTAEQSRLTTAERAKVRREITQHITWLKKRIHILDYDIDQTIKNSPAWQPKSDLLKSVPGIGQVTTSTLIGHLPELGTLTNKKIAALVGVAPFNRDSGTLHGRRCIWGGRAAIRSVLYMATLAAIRFNPTIKAFYVRLRAAGKLPKVALVAAMRKLLTILNAMVRDHTPWRQAQREIPS

SEQ ID NO: 161568 - protein, 313 aa, unidentified
MYYIAVDVSKKVLSVYDGKKDMTFLNSEGLSSLKKYLKKHYRDFSKLVFLLEATGSYSDYLIEMCAKYRIKAVIINPQASHHFAKSLGIRNKTDKIDARMIYQYQRLIDTQMITVPRINKEAKTLSAYLVSYQLAMKQRIALENHLEHVRNKDLFALLRKDLKRAYRLEEQILIRITAYILKHPRLKADYQRLLTIPGIGEKSAPALLYLFITYQGTNRNQITALCGLDPIQRQSGTSVKGKPKISKHGSKLIRKVLYMPMLSAIQVNPRIQAFYQRLLRNHKEKKLAVIAAMRKMILIAHAIYRDKTEYVPV

SEQ ID NO: 161569 - protein, 328 aa, unidentified
MTNAATRESAPLDFVGVDIAQEALEWALHGVRDTHSASNNETGFQALLEALKDRRIGLIVIEATGGLERALAGFLLRHGLPVAVVNPRAAREFARSMGHLAKTDAIDAVALAHLAQTLAAKADQAGVAFVAPSVEVEALQAMVARRVQLLNMRTAEKNRLGGAMRVLHKSIEAVIKTLDKEIAKLERDIDAHLERHFKAQAQCFEAIKSLGPITCATLLAFMPELGTISNARAAKLAGVAPLNRDSGKERGKRHIWGGRRVVRCALHMAVLSAVRFNPVIKAFYERLIAAGKPKKVALTACSHKLLRILNAMARTGQPWNEKFHAVTP

SEQ ID NO: 161570 - protein, 353 aa, unidentified
MPIVAEEYTFVIGVDTHAATHSLALVTAATGAIVDQAVFPNTPPGLDRALTWISHRIGSQPALIVIEGVGSYGAGLAQRVSDAGLLVVEPSAMPAAQRRGVGKTDALDAVRIARSVLAVDRSRLRWPRATGQRVILRVLVVAREQMVAERTRAINALTALLRTIDLGIDTRKALSHSQFKVVAAWRDRREDFVVRTCRQEAIRLAKRIAALDGELVDNRKALDAAVEEVAPELCELPGVGSVVAACVLTVWSHPGRVRSEGAFAALAGTCPIPASSGNTLRHRLNRSGDRRLNRALTTVVIVRMRSHAPTRAYVARRRAEGRTTKEIMRSLKRYITRQLYRTLAAAHPVPATP

SEQ ID NO: 161571 - protein, 346 aa, unidentified
MEQFVGLDVSQQMTHVCIIGSDGKTVWQGKCLSTPEAIAEVIKSKAPEVARIGLESGPLSTWHWHALKDMGFPVVCLDARHAKATMSGQVNKTDKNDAYGLAQIVKTGWYREVGVKSLGSHTIRSMLGARAQLVGMRVEVTNQIRGILKTFGIVLTRRTGVPFERLVGEACPDDTSMLDHTVHSLLSVYGCLKEQIRCFDRELMTCARKSAVCHQLMTIPGVGVLTSLAFVTAVDDPAKFAKSRSVGAYLGLTPRRYQSGEIDHNRGISKCGDSLVRTYLFEAAGTLLTRVEKWSALKAWGLRLAKRSGIKKAKIAVARKLAVLMHRMWVDGESFRWSTAEPAKAA

SEQ ID NO: 161572 - protein, 343 aa, unidentified
MKHYIGLDVSMKRTFICIMNEQGKITHEGSEMTDPHSIADYLSKFNFEEMVVGFESGSLTPYLLTGFKERSIEAICMDARKLAPILALKVNKTDKNDARGIAEALRCGMYIRVHCKPEESINRTILLTSRRALVEQQTDLKNTVRGLLKGYGIRLGAISAKKFAVAVIKQIQTCDEIVIMSIKCLLDAFDKVVEEIGKIDQKMLEIAYQDKEVQRLMTVPGIGPVTALTYKAEIFDPTRFKKSRSVGAYLGMTPKQYASGETQIQGKTSKCGSKELRFLLVEAGIVILTRSKKWSKLKAWGLKMMRKKGLKKAAVAVGRKLAIIMHRMMLEEKDFIYGEPKAA

SEQ ID NO: 161573 - protein, 344 aa, unidentified
MEHYAAIDVSLEWSSVCVVDATGEIVREAKVPSEPDALVAFFAATGFRFTRIGLEAGPLSQWLHAGLIAAGLPAILIETRHVKAALNAMTVKTDRNDARGIAQLMRMGWFRPVHVKTLQAQEIRALLTARKLLVAKLHDVESSIRGILRGFGLRVGVISKGKFEARIRELVAGQAMLERVAKPLLRARAALGAEYRTLHRQLLATVREDEVCRRLMTVPGVGAVVAVTFRSAIDQPARFTKSKAVGAHFGLTPKKYQSGEIDRTGRISKVGDAMVRTALFEAANAMLSRTVRFSALKAWALRVAGRHGMKKAKVALARKLAVVMHRMWVDGTNFRWGEARVSAA

SEQ ID NO: 161574 - protein, 338 aa, unidentified
MNSVTILGIDIGKNSFHLHGQNAQGHQVLRKKLNRRQLLPLLAQMPPCKVAMESCGGSQFLAREITKLGHQVQLIAPQHVKAYVTGNKNDFIDAEAICEAASRPRTRSVQVKSVDQQVLSTVHKLRKSLVSRRTGVINQVHGFLLEFGVIFPTGYAALERVPALMEEHNLPLLLQQAISRMLDDIRQLTSEIKALDTEIKQQVNGSDAGKRLQSIPGIGPLIASALVADVGDASIYKSSRDFSASLGLVPRQYSTGGQTTLLGISKRGDKYLRTLLMQGAQTLLYRIDKRNDALGVWARNLLARKPLNKVACALANKMARIVWALLTKGGTYNGHATA

SEQ ID NO: 161575 - protein, 408 aa, unidentified
MVVQAVPVCASTVVVAIDVGKTEFAFSVTDATRTPLLKPRTGCTLTGPSLARMVADIDRVLPGSAVVKVGIEAAGHYHRPLLNAAWPTSWEVLELNPGHVTEQRRVLGKRTIKTDVIDLQAMTELLLTGRGQPVRDRGLELGALTAWSAHRTSRVALRTATKNQLLGNLDRTFPGLTLALPDVLGTKVGRLIAAEFADPARLATLGSTRFIRFGATRGLLIRQPMADKLVQAARDALPTADAAVARAVLAADLALLVDLDAQVDQASDQLAQILPSTPFTPLLSVPGWAAIRAGNYGGALGDPARFDNHRQVYRSAGLNPIQYESAGKRRDSVISREGSVELRRALIDLGVGLWLNDPAAKNYAAQLRARGKKGLVIACAMAHRANKIAFALVRDQSTYDPTRWTRKD

SEQ ID NO: 161576 - protein, 400 aa, unidentified
MISVGIDVSKEKSTICILKPYGEIVSKPFEVCHTEKELSELTSMLLRLNDDVRVVMEATGIYHLPVLCYLQEKGLFVAVVNPFEMKEYRCQGLRRVKTDKQDAVTISNYGIDHWYRLKEYEPEESIYAELKLLGRQYRHYMRMRVESVLELTHLLDYTMPGIKTLLKGWNETNGKDKLGDFVEEYWHYDNITKKSEEQFIESYLKWAKEKGYHQSQDKTAKIYMLAKEGIPTVSSDTSSTKMLVQEAVRVLREIDNTLMTILTQMQALAKSLPEYPVVRAMGGVGNVLAPKLIAEIGDVRRFHSGKALIAHAGIDAPPYQSGQFTGTERKISKRGSSSLRKIGYEVMRCLKTHKEPEDAAVYRFILKKEKEGKSKRAAKIAGLNKFLRIYYARVMEVYQK

SEQ ID NO: 161577 - protein, 357 aa, unidentified
MLRNKSSKASFKGQTIHIGIDNHKKDNQLTFYLNGERLQTVRRPSSGTQILDYLHTNFPDAIYKSAYEAGFSGFSLHRYLQENGVDNIVVHPADIPKSDKDRDQKTDKRDANQIAKCLAVGLLQGIYVPSRDQQAIRDLVRQRKSLVKALTAIKCRIRMWFYFVGQPLSSAYANDGWSNRFVTYLDNLQISHPIGKAVLSMFLDQLKQYRQWLLQVNRTLRHLSKEPQYHTNYNLLLSVSGIGMVGAWTILSEIGDTTRFRKESQLISYAGLRNNSNDSGEKQSNGRITRRCNQRLRVQLIESAWIAVRTDPALALFFQKQKERKHKNKAIICVARKLLCRIRAVLKNQTRYERGLA

SEQ ID NO: 161578 - protein, 310 aa, unidentified
MDKLYCGIDIHKETFVGCIMDMNGTVLREHEFPANKNALKWFISGIPNSQMKIAIEACGIWRGAYKILSELGYDVKLANPKKTHDIACNKKTDKVDARTLADLLRTNYLPEVYIPDDDILELRDLARHKSNLTRLRVKVQVKIKGYLLRNDIKYPKDIWTEEALAKLAEKDQNIRNLINVYWSLKAEEKEVMRRIRKVARNMKLANLLMSMTGIAEYSALLILAEIGDIKRFKTPKELVSYAGLCPGIYRSGDTERNVRNQAVNKWLKWILYECSGRATMLDPRFQGYYYKIKQRKGFKTARLLQEKCSR

SEQ ID NO: 161579 - protein, 314 aa, unidentified
MSETSFAGIDVSKERLDVETTLGQRWSCANRETDFAELIERLQQEPIELVVLEASGGYEGAVVGSLTAAKVPVVVINPRQARDFAKALGLLAKTDRIDAGVLALFGQRIRPEQRALKDEQTRELGALLQRRKQILGMLVAERHRLEMARANVRTDIREHINFLVRRLKEVDRGLDELMRQTPLWRETEELFKPVKGIGPQMLRVICASLPELGKLSGRKIAALVGVAPYNCDSGKMRGKRQCWGGRAEVRCTLYMATLTATRFNPVIRAFYQRLLKAGKAKKVAITACMRKLLTILNAMMRDGTAWNENLHVTA

SEQ ID NO: 161580 - protein, 386 aa, unidentified
MRKSSALHVGLDVHANSIDVTAAETGAGREVRHVGSIGGDLASLDRVLRRLRSDGAKLHVVYEAGPCGFVIARHLREQAIDCEVVAPSMIPRRPGERIKTDRRDSVKLARLARAGELTPVHLPEQADEAMRDLSRAREDAIRAQRAARHQLKALLLRNGIRYAAKSAWTAGHRRWIARLKLPDPVQQIVFQDYVNAVEEATRRVASLSEALEAQVKHWPRAPLVRAYEALRGVQLVNAVCLAAELGDLRRFANARELMAFVGLVPSEHSSGERRRQGRITKTGNAHARRALIEAAWHYRLPARVTPIIARRWDGLPKSVTDIAWKAQLRLCARYPRLAARRLLAQKVVVAIARELVGFVWAIGQIVESRTETAQRSTSTITRSLTG

SEQ ID NO: 161581 - protein, 453 aa, unidentified
MQSKDLNSGVFELLRPNAAGIDIASQMHYVAVPSDRDEQSVRKFGSFTDDLHEMARWLKSCKIDTVVMESTGVYWIQPFLVLEEYGFDVFLVNARHIKNVSGRKSDVKDCQWIQQLHSYGLLNKSFQPEDLTRELRTYVRQRKNLTQGYSTQVQLMQKAFDQMNIKLHNVIADITGKSGLLMIEAILQGERDPHVLAALADSRIKASKEDIVKSLRGIWRQDNLFELKQAYEIYQVYRDKIADCDKQIETVLKEIADKADKVNTAENTPRDNNRRKANGKNKFNFNASSYLNDISGVDLTEIFGISELTVAEIVSEIGTDMSKWATEKHFTSWLNLAPNTRTSGGKRLKSKPMKKKNKAGQAFLIAASSLKASNNWLGEFYRRIKAKNGSPVAIKATARKLAIIFYKMLKDKVDFNPLPLEEYNQYFKERKLKYINRQAVNYGFKLVPVDFVS

SEQ ID NO: 161582 - protein, 343 aa, unidentified
MQMITTIGLDIAKSVFQLHGIDAAGSVALRRQLKRRYVLAFFERLPSCLIGIEACATSHHWSRELQALGHTVRLIPPAYVRPYVKRQKNDCADAEAICEAVARPNMRFVPTKTIEQQSGLVLHRTRSLLIRQQTSVINAIRGHLAEFGMVAPVGRNGLEKLLSMAVSEDGMRVPEIVRSSIEALALQLRALKAQILEFDRKIMQWHRSNELSKRLDEIPGVGPALATALVASIGDPKSFRSGRDFSAWIGLVPKQHSSGGKPKLGGITKQGDRYLRSLFTVGALAVIRYAKIHGTQRRPWLAALLARRPTKVAAIALANKIARMAWALMVKGEHYREPAALAA

SEQ ID NO: 161583 - protein, 417 aa, unidentified
MEDRSEARGLRYIALDIHKQYCVVAGVDREGRLLLQPVRVEHADLEEWLKKHLYSTDQVVIESTTNAWHVYDLLAPLAKRVVVANPIQVKQIACARVKTDIRDTLILARLLAANLVPDVWVPPVHVRQLRQLLSQRRQLVETHTQIVNRMHSVAHRHHLKHERGKRFNEKNTAWQKDKVLSSVEQFQLELEMENRAYLEKQIGRIGKEVAKMSHQKPWAQSMTYLMQLPGFGVITGMTVLAAIGEIQRFESAKHLASYSGLTPGLEQSGSKLVQKGITKEGRKELRWALVEAAQRAAKSDPVWKHRFEEMHKRMHRNRAIVAVARRLLELVWYVLTRRQPYRHFSHERIAYKYLTWAWQMDDEARDGLTRQQFTRYYLMQLGIGQDLTRIVLDPKHPRKIASEAELLALRPELKHTE

SEQ ID NO: 161584 - protein, 377 aa, unidentified
MTMASKRNYRGEYSLEVIEEVVLGVDTHLDAHVAVALDGLGRHLGELAVPTTKKGYENLLSWADGFGQVRCAGVEGTSSYGAGLARHLRSAGIGVLEVERPKRRHLRRKGKSDSKDAERAARAVLAGETAGEAKSADGRVEMIRVLRAARRSALKARTQAANQLRGVRVTAPEALQQRLRGLSTKELVGVATRFRLGGDPDDVEEATKFALRSVARRYRALSEEIADLDARLHRLVGEAAPELISLPAVGTDHAATLLVVAGDNPERLKSEASFASLCGVSPVEASSGRVVRHRLNRGGNRDANRALHLICVVRLRVDERTRRYAARRASEGKSKREIIRCLKRYVAREVYRILVPSGASADLSVDERRVVAVTGVT

SEQ ID NO: 161585 - protein, 410 aa, unidentified
MRVVYERCCGLDVHKKTVVACVLITEPSGELQRHIRTFSTMTAGLLALADWLESMHIPVVAMESTGVYWRPVFNLIEEGRTIILVNAQHMKAVPGRKTDVKDAEWLADLLRHGLLTASFIPPAPIREIRDLVRYRKTLVQERAQEVNRIQKVLETANVKLSSVATDVLGKSGRDMLHAIIEGTTDAEVLANLARGLLRKKLPQLQEALDGRVQPHHRILLKHILAHVAFLEQELEQLQQEIEQRLPPFEEEMGLLLSIPGIQALSAAAILAEIGADMSRFPSAKHLASWAGVCPGNKQSGGKRLSGKTRKGNATLRAALAEVVWVISHTKDNYLAAQYHRLARRIGKNKAAMAVAHSVLVIIYHVLDTRKPYSDLGADYFQKQDANRVAQRSLRQLEALGYEVTLTPKVA

SEQ ID NO: 161586 - protein, 402 aa, unidentified
MPMLSIGIDVSKGKSTVCGMKPGGEIVYTPFEVQHTREGMSELVSLLRSSGEEVRAVLESTGSYHCPVVTALLENGIFVSVVNSLRMKRFCSQSIRKVKTDRIDAMQIALYGLAYWQELQPTKLPEDTYRELQLLARQYYQMTSMLIKAKVDFNALCDQVLPGMQELMSDHAGRHKLSDFVLRYHHTTHILEMGETRFRKDYCKWAEKKGYRNCERMAAHIFATAQNGIPVLPNAPSTQIVITEAIRVLHTVEASRDAILTQMQALAKTLPEYSLVREMPCIGDTLAPRLIAEIGDVRRFHSKRALIAYAGIDAPPYQSGKFRANNRHISKRGNRYLRKTGYEVMQSYAMHKPANDPIFTFIEKKRSEGKCGKLAMVAGLNKFLRVYYGKVTELYRSLSAIE

SEQ ID NO: 161587 - protein, 341 aa, unidentified
MRRFIGVDLHKNSFTVCYMRKDGERDLKTFKVSPADVEAFKATITKQDEVAVESTGNTGYFAREIKESVSRVRIINPIQFKIISESVKKTDEHDAITIARYLSKGLIPEVRMRSKEEAKLASLIGTRDKFVKLRTTLKNKIHNILNASGIVTTKEMFSGNKSLDKLLSMGLDQADLFEIRIIVDQIKSLNKSIDEINKELTDRGKKLPGHKNLTSITGIGDLSATILLNTIGNVDDFGDDKKLAAYFGIVPRVAVSNETSQYGKITKRGNKIARTALVQSTLIAIRYNHYLRRFYFKLKAKKGSGKAIIATARKLLTIVYRTLKNDWVFEDFNKFKLAVSV

SEQ ID NO: 161588 - protein, 337 aa, unidentified
MYYVGLDVHAKRSSYCILDEHGRKVKSATVRGPWDKVLCALTLAPQPFAVCFEASTGYGYLHRRLSAMASKVVVAHPGQLRLIFRSKRKSDRVDAEKLAKLLFLDEVPPVWVPSIEVQAWRSMIERRQQFLGERTRAKNRLRALLRSEGIVAPKGLWTKRGLAWVTAQSFPTASEALQRDLLVQQVVFLNEALKTLERGLAAYAARHSGVQVVLTIPGVGVRTAEAVVAYIDDPGRFADPNAIGSYFGLVPRQDESGGRNRLGHITRQGPPTARKLLTEAAWQPIRRSPEVRAYFERVQRDDSDRKKIAVVATAHYLLRVMLAMLRTGEVWRYAPAA

SEQ ID NO: 161589 - protein, 418 aa, unidentified
MQTELSQFTAIIGIDWADKKHDVCIQAAASGQRQIYQVPHKVDKLDEWARSLYRQYGGPIAVALELSKGPIVSALQKYDVFVIFPIDPTTLANHRKTFTLSGAKDDPTDAEYALDLLLKHTEHFKALNPQSVEMRTLMILVEQRRRLMNDRVRLTNRLRNALKQYYPQALEWFNRIDTPLFCDFIKRWPSLAQARRARRTTLEKFFRAHNMNRKALLEQRIQAIKSAMPLTTDEAVIVPYRLQALTLVAQLELALAAIRTYDEEIAALAPQHPDYGLFSTLPGAGPSLAPRLLVAFGEQRDRFANAAELQKYAGIAPVTERSGQKHWTHWRWQCPTFLRQTFVEWAAQTINKSYWAGLYYYQQRAKGCSYQAAVRALAFKWIRILYRCWETRTPYDEAKYLKALQDRGSPLLRTAETA

SEQ ID NO: 161590 - protein, 346 aa, unidentified
MKYYAGLDVSLQETAVCIIDQEGNIVHEAMVTTEPLDISKYLSSKEIIYEHIGIEASNLAIWLYKELRKEDFPIVCIETRHAKAAMAAQNVKTDKNDARGIAQMMRTSWYKPVHIKSEKSQRIKMVINSRRCLVEQRIVVENHIRGTLKIFGLKTGAVTKTKYEGRVRSLIRGDGELEITIIPLLEVRASILRQIQTLEQLLIAAAESDQVCRNLMTIPGIGPMTALLFVTTIDDPTRFDRSRHVPVHLGLTPRKYASGEVDYNGCITKCGDNLLRSHLYEAASVILRRSTKKCGLKTWGLNIAKRSSTKNARVAVSRKLAILMHKMWLTESEFDWNIGSTNQQTT

SEQ ID NO: 161591 - protein, 392 aa, unidentified
MVVFVGIDVSKDKHDCFIVSSDGDVLADVFTISNTLDGFHDLLQRIQDCATPQDKIKVGLEATGHYSYNLLGFLLDNSLTTYVLNPLRTNLYRKSLSLRKTKTDRVDARTIASMLLSDAGLKPYTDTAYHNEELKSLTRYRFDKVKERAKLKSSIARLVCILFPELEKLVPSLHIASVYALLEEFPGAKQVANTHLTRLKALLATASKGHYKRDMALEIRNAAKNSIGSQMPAKSLELQHTIRLIRELDREIDEIEEQIQSIMDELHSPITTIPGLGFRMAAMILAEVGDFTRFDSPDKLLAYAGMSPSTYQSGQLKNCYPHMEKRGSRYLRYALYNATKYVCHWAPAFADYLAKKRAEGKHYNIAISHAAKKLVRLIFAMEKSRQPYCSAA

SEQ ID NO: 161592 - protein, 401 aa, unidentified
MGIWVGVDWGSGAHAVCVIDAKGMVLDRFEVSHDRAGLAALVTRLEKHGALRVIPIAIERPSGLLVDALVEAGFVVTPIHPNVVKACRPRYRAVAAKSDPGDAFILADILRTDGHRLRPLAPQSDAIKALRGLVRGRDDLVGTRVALAHQLTALLESFWPGAARIFSDLASPIALAFLERYPTREAAARLGPKRLAGFLAEHGYSGRRSPEALLERLRSAPEGRAGEAEGEAKGELVRALARTLQALVAEIAKLSSRIEHAIAALPDGRIVMSFPRAGTICAAQILAELGDVRVRFPSEHQLAAEAGVAPVTYQSGKSRGVGWRWACNKRLRAALTCMADNSRHQSPWAADVYRRARARGCSHPHAVRILARAWARVLWRAWTDRVPYDPGRHRGAQAFAA

SEQ ID NO: 161593 - protein, 347 aa, unidentified
MQVTTIGLDIAKSVFQAHGVDRHGRVVLRKRLSRAQVLTFFANLPRCVIGMEACGGAHHWARELTRLGHEVRLMPPQYVKAYVKTNKHDAADAEGCCEAVQRPGMRFVTIKSAEQQALLMLHRVRDQLIGQRTATIPGGGHGALRGHLAELGIVAVQRQAGVRELLATLGDLEDDRLPPLARAVLQALSAQLRALADQIAALDRQLVAQTRTDETCKALVAVPGIGPVIATALVATVPDVAAFRSGRHLAAWLGLVPKQHASGGKARQLGLSKRGDGYLRRQLIPSGPGGARALVKVATDRTGPLWSWINGLRQRRPFNVVVAAVANKLARIVWAMLSRGEAYRAPA

SEQ ID NO: 161594 - protein, 341 aa, unidentified
MQVTTIGLDIAKSVFQVHGIDARGKVVLQKRLTRARMLVFFANLPRCLVGLEAGGGAHHWARELQALGHDARLMPPQYVKAYVKSNKHDAADAEACCEAVQRPSMRFVPVKTKDQQATCMLHRVRDQLIGQRTATINALRGHLTELGIVAAQRQAGVRQLLALIGEVEDDRIPPLARAMLATLAAHLSDLADKIAGLDQRLVALARTDPICRSLAAVPGVGPVIATAFAATVPDARAFRSGRHLAAWLGLVPRQHASGGKDRHLGLSKRGDGYLRRQLIPSSPGGARALVWRTPGREGRLWSWINGLLARRPFNVAVAAVANKLARILWAMLAHGEAYRAA

SEQ ID NO: 161595 - protein, 512 aa, unidentified
MPADADYSVGCEPVYEPGVGARPGRVTHCCLEHAGQTFGSLTDAPGQPSRWKICGLGWRTSEVRMQPEEIPDDDHELVIERVCAIDVAKASGKVCVRTPHPNRPDRRTSRVWDVSATSRAVTELAEHLIGEGIERVTVESTSDYWRIWFYVLEAAGLDVQLVNAREVKNVPGRPKTDKLDAVWLAKLTEKGLLRPSFVPPVEVRQLRDYTRLRVDVTRERTRYWQRMEKLLEDALIKVSSVVSRLDSMSVRDMLEALIAGERDPRRLAELARGKMRPKRAALIEALTGRFDDHHAELARLLLSQIDALSTHIDTLTRRIDELLAILTDPTRGPDGGYRIGDDGAAPFVNGLQAAKRLAEITGIGPVSAPVILAEIGMDMTRFPTAAHLVSWAKLSPRTIQSGATQRGGKTGKGNPYLKGVLGEAAAVAARTDTFLGERYRRIVKRRGKLKARVAVARSVLVVVWKLLADPTAHFHDLGADYHTRRADTDRRLRNHLAQLAALGYRVTVEPAG

SEQ ID NO: 161596 - protein, 416 aa, unidentified
MNAVGIDVSSRKSTVAVLRPLGEVVCLPFDVSHDADGLASLAEKLKALDGETRVVMEHTGRYYEAVAKALHEAGFFVCAVNPLLIKEYGANSLRRVKTDKADAVKIARYALDNWADLRDFTPMDAIRYDLKTLNRQFQLASKQRTASANNLIALLEQSFPGIRKCFDSPVRSDGTQKWVDFAHSFWHVDCVRKQPFPAFCERYRKWCKRHAYLFKQSNAEEVYALAKRAVVLTPKSKVVKVLVQEAANQLSSISRSVEVYRAEMDRLAAMLPEYPVVMAMYGVGKSYGPQLMAEIGDVRRFERKQALVAFAGIDPMPNQSGDKNVRSNKSSKRGSPYLRKTLFNVIRTYLQCAPQDEPVFQFLNRKRAEGKPFYVYMLAAANKFLRRYYAKLRDYFASLDTLQSVDPIPTTLKASL

SEQ ID NO: 161597 - protein, 412 aa, unidentified
MSDIKVVKSSGFFAAEYPRIALGPFRRWLKGQLGQPLSKKLSHWYDCLYQRTIKTSKEPHMDRQNTTRINFRGEKVFIGIDVHKKTYTFSAWCGGVRVKVATVPADIAGFIPCIKKWFIGADIYSCYEAGFSGYKLHRELIKTGIQNIVVNPASIEVAAKDKKTDKRDSNKMGEQLSVGRLRGIYVPSEAEEQARLINRTREQFMKERNRVGHQIKSRLFQFGFIDKDDDRILSEKYLCETESLELPNVLKYSLGLLISHWRFLSQQVEDIKIEMKAQSFDDSYNEAIYQSVPGVGDVTARILSNELGDLSKRFSNQGSLFQYVGLTPSEHSSGEREMKGNIDRQGAARIRKVLVESAWRAIDCDEVLKDCFLRIASTRGKKRAIVAIARKLLGRMRACFVTKTEYCVGLIA

SEQ ID NO: 161598 - protein, 384 aa, unidentified
MEKSITLHVGLDVHKDSIDIATANIGRDGEVRHVGSIGGDLASLDKALRKLTSKGHHLHVVYEAGPCGFVIWRHLTALGQSCDVVAPSSIPKRAGDRIKTDRRDAMLLARLDRSGDLTAVRVPGPADEAVRDLVRAREDGVRECRNARHRLKALLLRNGIAYAGKSSWTGAHLRWLATLKLEHAAQRIGFQEYLHSITEATARIQRLEQAMRDVLSDWSLKPLVQALMSMRGVQLIAAMTLVAELQDFARFDSPRKLMAFVGLVPGEHSSGPRRRQGSITKAGNSAARRMLVEVAWHYQHSPRVSPIIATRQDQLPKAITDIAWAAQLRLHAKFKRLVARRLMKNKAVVAVARELAGFVWAIGCEVQTSGWQGTQIEPASSVAH

SEQ ID NO: 161599 - protein, 398 aa, unidentified
MLPDHPCTGPTAIRVEFDAIFVSLELSRSTWLVTSLSPGHGEKMSRHSVKAGDIGGLLALLAELRRRAKERTGSDYPVVTIQEAGLDGFWLHRALQKEGIESHVVDAASIATSRRRRRAKTDKIDGEALLRALLAYKRGEPRVCAMVVAPSAEEEDRRRLCRERQALLDERIVHTNRIKGLLFAQGISDYAPLRRDRRKRLEGLQTGDGRALPAHLKTQISRELDRLELLLDQIRAVEAEQEALLAAESREAGTDEPGQAEPEAEPRNAVAMLLAVKGIGVHAAAILWSEGLSRPFANRRQVAAYAGLAATPWRSGAIVHEQGLSKAGNPRLRTLMVQLAWLWLRHQPQSELSKWFKARGERGRKGSIVALARKLLVALWKYVTQGVVIEGAVIKTAA

SEQ ID NO: 161600 - protein, 368 aa, unidentified
MNRKSSNLFVGMDVHKDSIDIAVAEGAGEVRHHARIGGEMNALSRAVRKLESLGEPLVFVYEAGPCGFGIYRMLKARGHECWVVAPSNTPRRVRDRVKTDWRDSLKLAGLARAGELTPIYVPDAADEAMRDLVRTREDAVAMQRQARHRLAALLLRNDIRYAGKTAWTEAHRRWIARLILPATPQRIAFEEYVQAVKESTERVQRLSLAIEHELVHWRWQPVVDALQACRGIQLIHAARMVAELGDLSRFNHPRELMAYLGLIPSENSSGDRRRQGAITKAGNNSARRALVEAAWAYRHRPAVSSIIVRRQSGLPKAAIAIAWKAQLRLCARFRRLSAHGINRNKIVVAIARELSGFVWAISQQVKPN

SEQ ID NO: 161601 - protein, 400 aa, unidentified
MISVGIDISKGKSTVCIMKPYGEVIRTPYEIKHTEKDLSDLADIILNFDEESRVILEATGAYHLPVLSYLKQKGIFVTVINPLMMKKYSSLTLRKGKTDKIDSIKISNYGIDNWFHLNDYCVSDVLYDELNTLCRQYNQYVAIKIKCKVNLANLLDKTMPGITNLLRNNDYIGKYKLNSFVKEYWHYDSITKKSEKQFIQSYLKWAKREGYHANESKAKSIYTLAKESITTLSSQMKSTKMLVSEATRVFKEVEKTIRMILLQMQELAKKLDEYNVVRAMPGVGDVLAPRLIGSIGDIRRFHNGKALIAYAGIDAPPFESGNFKGTRQKISKRGSAYLRKTGYEIMTSLNAIKPIEDSVVYDYMLKKESEGKAKKVAKIAGLNKFLRIYYARVKEVYSKV

SEQ ID NO: 161602 - protein, 342 aa, unidentified
MQITTIGLDIAKNVFQVHGIDAAEKVIVRKQLRRSQVLAFFKAVPPCLVGMEACATAHYWAREFTKLGHEVRLMPAKDVKAYVKRNKNDAADAEAICEAVRRPTMRFVRIKSAEQQGQLMQHRTRDLLMRQRTQVINALRAHLAELGIVAAQGDKGVKELLALVVDKEDTRLPIDARASVIVLATQLEATQTVIGAIEKRIKIQHRSNAASQRVETIPGIGVIGATAIAATVADPTVFRSGRDFAAWIGLVPRQDSTGGKQKLGPISKQGDRYLRRILVIGAVSVLRRAQENPGKYPWLTQLLARRPFKVVAVALANKMARMAWALLAHGGTYRAPEIAKAA

SEQ ID NO: 161603 - protein, 355 aa, unidentified
MTGGVSRPERTSNNMSNANAYIGVDLHKKICFITVMDEAGKIKRQTEIKNEKNKIFKFFKRYSSASVAVESTMNWMPFYENLESMGCNVVLSNPLATKAIAAARIKNDKVDSRVLADLLRTNFLPTAYIHPREIRDLKELVRQRMNYVNMRTQIKNQIHSVLFKSGVSHNFTDLYGKAGMEFLKTLELRDVYRQQLNWHLTALSNISIQIKEMSDIIEETAQADYDCRLLMTIPGIGYFNALLIKSEIGDISRFTNANKLCSYAGLIPSTYASADKVRHGRITKRGSKWLRKALVDSVTSGCRHEGRLAYVYRKLKKSKGTGKARVATARKLCHIIFAMLSDKQPFREFTPVKQR

SEQ ID NO: 161604 - protein, 334 aa, unidentified
MQEQLSRQYVGIDLHRRRSVIVRLDQAGNVLGSVRVDNDPVEFALAVAEAGEGPEVALEATYGYYWAADLLKDNGANVHLVHPLGLHWDSRRVKNDIKDATELAKRLWREDLPEAWVAPPEVRELRELVRYRAKLVALRTSAKAQVHAVMAKCGILPGLDDMFGPGGQVLLDKMDLPQPYRYRVDSLRRLIEVFDDEIDIAESQAHKRLARHQGYRAVQALNGVGRVTAAIFVAEIGDVSRFADARHLCSWAGLTPSHRESDDKAHRGHITKQGSSLVRWAAVEAVARYHGGAPIAPAFMRIQARRGNMVARVAAARKLLTLVFMGCGTARSVA

SEQ ID NO: 161605 - protein, 335 aa, unidentified
MNYRLFAGIDVSKMKTDVVFFLIENPDEQFHGTFSNNEEGCNEMMAWMRELTGLSIAEMLFCAEDTGLYTLPICTFFDGQGGNLWVENALRLKRSLGLKRGKSDKADAAEIANYGFLHRRKAVLFKLPSKTIGKLKHLLSCRKQLVKQQTALKNASGELEAFDGDSADFTLEIRKSLIKEYDKKIDMIEAELLRCVKADKLLEKQYRLVNSVYCIGPQTAMFIVVLTQGFSLFDDPRKFACYCGIAPFGNTSGTTLKGKPKVSHLANKRIKTLLTMCALNTIKKDNEFKRYYDRKIQEGKHHSAVLNVLRNKLVSRAFAAVLKDRPYKKDLYNAA

SEQ ID NO: 161606 - protein, 356 aa, unidentified
MSKTNSVKIIIGVDTHKDIHAAVAINEIGARLGTLTIPVRPKGYRDLEIWARAFGVIHAFGIEGTGSYGAGLSRFLQAKGHSVVEVNRPNRQLRHQNGKSDSLDAENAARAVLGGQANARPKSADSSVEMIRHLKVARDTAVKSRTQAMITLKTIIINAPAALRQALDRIIGKMALIRHLAALRPGPILSATASAKAALRAIARRWLMLDAEIRAHDADLEALTASCAPAMLEAHGISTGTAAEMLILVGDNPERIRSEAAFAKLCGACPIPASSGKTNRHRLNRGGNRQANAALYRVVIVRMRSHQPTLDYVKKRKADGKGKMEIIRCLKRFIAREIFGYLCGARQSLTSLPKTT

SEQ ID NO: 161607 - protein, 343 aa, unidentified
MDHFAGLDVSVKETSLCIVDDAGRIVREVRVVSEPEALLSVLTNPTWHFKRIGLEAGPLSQWLFNALAEAGLPVICVETRHMRAVLKAQINKTDRNDARGIAQMMRAGLYRPVHVKTLRSQKLRMLLTHRKLLQAKAIAIENDLRATLRNFGLKVGMVGTVKFEARIKELVENLPDLVILVEPLLVVRRVLREQIGVLHRRLLAIVRDDDVCRRLMTIPGIGPVVALTYRATVDVPSRFRNARAVGAAFGLTPSKHQSGESNRSGGISRCGDEMTRTMLYEAAQILLVRSTKWSWLKAWAMQIARRRGMKKAIVALARRLAVIMHRIWIDGTEFRWTREAAAA

SEQ ID NO: 161608 - protein, 428 aa, unidentified
MMTLTDPDLPAPFRPQRFIGMDIDKRTVVVVGLDSKQKVVIGPVRINLDRFERWCLDNLKSSDAVVMEASVNTWHLYDLILPLVGSVTVAHPLMVRLITAARVKTDKEDAYKLARLLQAEMIPEVWVPPTHVRELRALVAHRNRLIRQRTQARNRLQAVLHRHNLVPPKAVPFGACHREWWLELKLEVCEKLRVRQDLTLLDTLGPLITEVESELVQLSQSTEWAESATYLVQLPGIGIVSAMIILSAIGDIKRFEAAEKLVGYAGLGASVHSSGQTHQSGGITKEGRRELRTVLVEAAWAAAEHHPYWKARFDKLAGRIGKKKAIVAIARKLLVSVWHVLTKWEADRQAEPEKVALKLVIWSRKLKPQGRHGLSTAEFVRSRLDRLGLGAELQEVGWPSTPKLRLPPSGLRDNGSSTTPSPLVAAVS

SEQ ID NO: 161609 - protein, 344 aa, unidentified
MSEITTVGLDLAKRVVSLCGEDAAGRVVVQRTLRREAVLAWFVQRPPCLVGMEACSSAHWFARELSALGHTARIIAPEFVRPFRLSGKNDANDAAAICAAVRQPQLRFVAVKSAQQQARLVVHRLRQGWQEERTAGLNRLRGLLTEFGRVYPTSAAAAVSGARAALADETLPPALRRGVARQLEHLRELDQQIAACDAEIAQDVRDDARARHLLQLSGVGVLTASAVAATVADPQQFRCGRQFAAWIGLTPRQYSTGGKAKLGRITRHGDTYLRALLVQGARSALQAALRAAPARRTRLSAWIVTTYERIGYHKTLVAIANKHARLLWVLLNHDEPLRAHAAMN

SEQ ID NO: 161610 - protein, 349 aa, unidentified
MSIVCGLDLHRGQITFDALEVETSEVWRGRLWQPDRARFRRWLTEELGPRAKGGPVALAVEGCTGWRYVTEEIMAAGFEAHVAEPADTQAARGRKKHAKTDRSDARLMRELLAAGELPESWIPPEAVLEWRERVRLYKTLLDQRGMWIQRIHAELFQHGVSLPEAQITSTETRDWLAADTVQLSEAARQRIEAGYRIIDATDAVRLPLRADLERFGRRQPACKALIAAHYGIGPLTAVVVWAELGDCRRFSRSMQVVRHTGLDVTVDQSDRHRGHGYLSRQGPGTLRWALFEAGMAASRATSPDRAYYQAVKQRHDGKIAAISMARKLARRCYHTLRQMDPEVVYAMPA

SEQ ID NO: 161611 - protein, 376 aa, unidentified
MSQDSTLYVGLDVHKDSITVAYAMGLDEVELFGKIGTTHMEVDRLCKRLQSKARHVHVVYEAGPCGYGLNRRLVEKGFDCMVCAPSLIPRKPGDRVKTDRRDACKLVRSLRAGDLSAVHVPTVEDEAFRDLARAWSSGRDDLKQARQRLKSFLLSHGVRYCGLANWGPAHRRWLSTLSFDSAWQQLAFNEHRRTIEDRLAQCDRLEAALHEAVVSWRFYPVVLALQAMRGIQFTSAVGLVSELGDLSRFEHPRQLMAWLGVTPSEHSSGSKRRQGSITKAGNSYARKLLVESAWSYQHPARVSKDIQSRQEGIPKPIIDRAWDAQLRLCGRYRRLVARGKSRQVAIIAVARELAAFIWDIGRMGMTLAVPQSEQPA

SEQ ID NO: 161612 - protein, 387 aa, unidentified
MVQVNDLSRSLAAFDPISTLVVVVEMSKASWLVSSVVPGVERQPLKKLEPDATALLRLIERWRNEAVRVGRPISRIALAYEAGRDGFWLARWLIARGIEAHVIHSASVAVSRERKRAKTDRLDAAMLMRVFLGWLRGERGHCGMVAIPTMEEEDARRPNRERESLVNERSRIINRMKSALARLGIRGFKPHLRKAPERLAGLRTAEGTGLPANIIEEFRRDMARLALVREQISSIEKTRAERLERAPDTGPHAMVRLLARVIGISIETADMLVREILSRKLRDRRALARYAGLTGSPDESGLKSRERGLAKAGNARVRRGLIQLAWRFLMFQKDSALARWYRTRTEGPSGARKTTMIVALARKLLIALWRLVTTGEVPDGVELRTAA

SEQ ID NO: 161613 - protein, 389 aa, unidentified
MPTQTDQTKAPIAIQTHLAAIFISLELSRSVWLITSLTPGGGEKMSKHSVQAGDVAALLTRFSDLKQKALARTGKTFPVVTIQEAGLDGFWLHRVLTRERVESHIVDPASIATSRRRRRAKTDRIDGEALLRALLAHKRGEPRVCAMVRAPTPEEEDRRRLCRERKVLIAERVEHVNRVKGLLFAQGVSDYEPLRRDRRQRLDELKTGDGRPLPTHLKTQIGRELDRLEMLLNQIKQSEIERDALLAAQHNAQPAPAGRMLLDLKGIGAEFAAVLWVEGLFRQFDNRRQLAAYAGLAPTPWQSGSIDREQGVSKAGNARLRTTLIQLAWLWLRHQPRSALSRWFHERVARDGGRMKKTTIVALARKLLVALWKYVTAGVVVEGAVMKAA

SEQ ID NO: 161614 - protein, 338 aa, unidentified
MKPLNYCIGVDVSKAHLDLAVWLDGKIVAQFAPANGVSALRKCVLEMRRLDGFAMSQAVFCVEHTGIYCAHLLEVLQQAKGRVALVAAVEVQRSLGLQRGKNDQVDARRLAEYAARFSDKLRFWQAPRPVLRQLKQLATLRQRLLNAKIQLQVPLDEGRPFTDKVDQKILEQHSQGPLKALQKALEEIEEQIRSLIQQDEDLRGLFEQITSVPGVGAVTACEIITTTNEFKDFDDPRKFACHAGVAPFEHQSGSSVRGKPRVSHKANKTLKTLLHLAAMSAIRSKSDLQVYYLRKTAEGKAKLSVINAVRNKIIHRIFALVKNHTTYQKNYQLLLAKP

SEQ ID NO: 161615 - protein, 332 aa, unidentified
MTEYIGIDVSKQSLELWDGTHEEEVPNEKGLKTLKKLLKKRYGGEWNQAVRFIYEPTGPYSNYLRAFAAEHEVRVYEVNPKKSANFAKVLGNRSKTDAVDAKMLSTFSTLLTEEDFRIPEIDEIAEQLGAFIGSYEIIQKTRTMLSNHVQSLEYKSGVTRKLKESLEKELKHLGTMEDQLEKEMEAYAEDHEETREDLHNLLSMNGIGVISAMSLLYLFRKYPGANRNEITALAGLDPVRRQSGSSLNGGRKISRAGDPLLRKVLYLACMNCIQHNECIRTFYKHLVSDNHKKPKVALVACMRKLLLIAHHLTVTKSKYRTLQHDATLCLSS

SEQ ID NO: 161616 - protein, 358 aa, unidentified
MGDLVPPMSKFCRCAAPLMFPRGSLTKGRLSMQALRTHVAGVDVHKEILAITIMTGDADKETTTEQFTCNTFSEDLMAMGVILKERGVAEVAMESTGVYWKPVYNVWSKMGIRCTVGNARSMRNVPGRKTDMNDSHWIAQLHRFGLIKASFIPEDKFQQLRLLSRHRTNLTDDLSRVKNRVQKILEDGNIKYGSVVSDVFGVAGLKVLRLLADGVTRADTLAAAVTTNIQRKGEVKKSLSNCFSNHHCFLIKELMQQYDDIKARILEIDRRLAADITPYADLIDELRKIPGIDMTLAVGIIAEATNDVSNFADERKFAAWAGVAAGNNESAGKKKDPSAERARHTLEKFLSKQLTEPN

SEQ ID NO: 161617 - protein, 409 aa, unidentified
MESGYRLMVGIDWATEAHQVCVLNSQGRLLEQRRVEHRSEAIAAMIDRLIGLAGGDPTSIAVAIEVPRGPVVEALVERGLHVFAINPKQLDRFRDRHTVAGAKDDRRDAFVLADSLRTDLSAFRRVHLDDAWTIQIRELTRIEENLNTEINRLANQLRDLLLRFYPQLLRLCPAADQPWLWALLKLAPTPAKAQRLRRSSIQRLLHQYRIRKWTADQVRTELKTAPLSVAPGVTEATSAHIALLLPRMELLMAQYKLCSKAVQTALNERVSAQEEGREHRDVEILLSLPGVGRVVAATMLAEASQLLAQRNYHALRTLGGVAPVTRQSGKRLAVRRRYGCNHRLSNALYHWARVSSQCDARARHHYQTLRRFGHSHGRALRGVADRLLALLFAMLRDQTLYDQTRTHAA

SEQ ID NO: 161618 - protein, 334 aa, unidentified
MHYKLFAGIDISKDSVDVVILVVDTPDQYNHQSFSNDYAGFDQMLKWIDSTTSVSLKDILFCCEHTGLYTNPLCTWMTGKEGQLCVENALQIKRSIGLKRGKSDKADAYAIARYAFTNKHQVRLYQQPPATITRIKHLLGYREQLVRHQVSFKSAVSELKAFDKTNAAFCIDESDEWIKLYAKKIKEVDEQLNTVIQNDPELSNQFELVRSVYGIGKQTAFFILIHTQAFTAFSDYRKFACYCGIAPFEYSSGSSIRGRTRISSLANKKLKSLLTMCALNTVKVDNEFQRYYLRKKAEGKSTLCVMNVIKNKLISRVFAAVRNGRPYQPEILLT

SEQ ID NO: 161619 - protein, 403 aa, unidentified
MKIVYPVCCGIDVHKSFLVATIVSVTDLRTLKHKKERFSTFNKDLKRLKHWLIENNCYDVCMESTGKYWVPVLNVLEPELRVVIVNPKWVKAIKGNKDDVKDSKWIGELFCFGLVRSSFIPEKPIRILREFTRYRYKLVHMRSSEKNRFQNGFTVCNIALDAVVSDMFGKSASLITDYLLTDENPDAEHCTTFLQRSLKKKAVAVVESIEGFQLTEEQKFRMLQVRQHMDYLDSAIAAVDRKLEEMTSPYAAAIKLLCTIPGMKHDSAITVISEIGTDMSQFGSSKRLCSWAGLTPGNNQSAGKKKSVKITRAGVYIKPMLVEVAHAAVKCISQPYYKTKYERIMRRRGKKRAIIAIARMILTAIYHMFCTGEVFNPTDLRQIDMPEEIKKKNVFNAIRLLKQ

SEQ ID NO: 161620 - protein, 373 aa, unidentified
MKVMIHIGLDVHNDSIAVSLAPSDSTEVRRWGILGGTHEHVQRFIKQLQAAHPEATLRFCYEAGPRGYPLCRFLRGLGHECLIVCPSRVPRAPGDRVKTDRRDADQLARLLRAGELAGIHVPEPEDEAMRDLLRSREQVRSAQHRARQQLKMFLLRHNIRYSGQSSWTPAHLRYLARIKMPFPTQQFALQELMSQISELGQRLERYGTQLEREVAGWRWEPAVRALMSLRGVALLNATILVAELGDLHRFARPQELMSYLGLVPSEHTTGADRQQGGLTKMGNGHARRALVEAAHHYRAPARLTPHLQKRQEGLPKAVTDASWEAQRRLHHRYKQLSGPGRKKAPVVIAALARELSGFVWSIARQVKPHPKKT

SEQ ID NO: 161621 - protein, 400 aa, unidentified
MSERRAQVWAGIDAGKGHHWAAAVDETGSTLWSKKIDNDETAILTAMGEILDLADKVSWAVDISGTSSALLLALLAAHGQQAVYVPGRTVNRMSGAYRGEAKTDARDAYVIAETSRQRRDFATIDVPAQLAADLALLTAHRSDLVADRVRMINRLRDVLTGVFPALERAFDYSSHKGALVLLTGYQTPAALRRRGRARLTAWLVNRSVRGADTVAATALEAAQAQQTSLPGEDVAAQIVADLAAEILALDDRLKRVDKQIRETFRGHPQAEIIESLPGMGPILGAEFVVAAGDLTAYTDAGHLASAAGLVPVPRDSGRRTGNLHRPKRYSRRLRRVFYMSAQTSIMRDGPNRDFYLKKRGEGCKHVQAVIALARRRASVLWALLRDERVFTSAPPVTQAT

SEQ ID NO: 161622 - protein, 370 aa, unidentified
MKSIIYVGMDVHKASFTISCFSVTTQETFATVKISPDAKAIKKYLDGVSLSRSEECEFVCGYEAGCLGYTLYHQLTAMNIRCVIMAPTTILRNSKRIKTDRIDAENLARCLAYGGYKSVYIPTAQDEAVRDYLRMRDDHKLMLKKIKQQINAFCLKHNKIYPGNKSKWTQAHVKWLNALEFDGYLQDAFNEYMITYRELTDKVERLESQIEQLAELEEYRDKVKKLICIKGIKTHTALSLIVETGDFSRFQSAERYASYIGLVPGEHSSSEDQNRLGITKAGNRHMRMLLIEAAQCYSRGVPAKKSKDLKSRQKGASPEVIAYADKASIRLRRKYIRMELVNKKKANVAKIAVARELACFIWGMMTDNIA

SEQ ID NO: 161623 - protein, 342 aa, unidentified
MSIVYVGLDLGSSNFQQVALNHDGVSRVNRDFTTSEASLVKAFSDLKGEIHVHVEAGELAPWAASVIAPLVTRVVCSHPQSNAWIAKDADKCDRIDAYKLAELLRLNRFKEVHYAPDQPRRNFKQLVQHYDELTAQQARLKTKLKARLRMQGVIVTGERVFSATGRKEVLARVESRDLRTAIKQLYEVLDQSVAAQEQARLLMLRAAQAFREIKLLRTVPGVGPIGACRFSAYIHTPNRFSSKRKLWKYCRLSVSHRSSNGKPLRRPRLDRSGCGRLKDVSRKAFEVAVRSRQDNGFKRAYQRALETTHDATHARLTVQRKIVSTLRAMWLNQTPYCDELMR

SEQ ID NO: 161624 - protein, 371 aa, unidentified
MFTLPVFVGLDYHTKTIQVCVMNQQRKILVNQSVANDPVAVFQVVAPFGNNVSVAIEASTGSANFAEELIAKYRWHVELAQPGYVARMKQTPDKSDWTDAKLLADLTRVGYIPRVWLAPLYIRELRDLVRHRHGLVQQCTQTKLRLRALLRQHRIDCPHSPWTIKGKKWLLDANNIASKNLLFLLRDHYDTIETFTKKIAAVTTMMETHVAEDTVVKQLLKQPGVGVITAITMRATIGRFDRFRTSKQLAHFCAVCPRNNSSAGKTTTGGLIKAGDELLRQMLIEAAHRLIRYDPYWKAMATRLRANGKKTCVIVAAVANRWIRKLFHQMQEPISNVDVRFLRHGQESTPALENPSDTGRSVSHGFGKLST

SEQ ID NO: 161625 - protein, 338 aa, unidentified
MKEIATIGIDLAKNVFQIHGVDMQGRTVLRKTVTRGKLLETLVNLSPCLVGMEACGGAHHWARKITEMGHIVRLIAPQFVAPYRKSGKNDANDAEAICEAVTRPNMRFVAIKTPEQQAVLTLHRVRESIKADRTALINRIRGLLQEFGIVLPQGAARFPQRLLEAITDADMPLDAIGIFAALRGDLMRLNERLAECDQRIARLAREETTQRLVTIPGVGPVTATAIVATVGDAKLFRNGRELAAWVGLVPRQSSSGGKTRLGRITKNGDSYLRTLFVQGAMAVIHHMGDKEGPRFEWIRALVARRGIQKAAVALAAKTVRTAWVLMARGESYRMAVAV

SEQ ID NO: 161626 - protein, 343 aa, unidentified
MNSTKQEVYVGADLHSSNILLSLADNAGTEIIRKRVKTNITDIDKVLSPFKSQIKVIGVESTFNWYWFVDGLVDLGYNVKLGNPAKMKQYTGIKVTNDYTDARWLAEQLRLGIFPECYIYPKELRSVRDALRCRQLHVRRKTQTFLSFNGLLARYGYTETKAKDALKDWTLDDIENVFQDHFLCQELWVLIESTRFTGEQIKCLENLVRKFIKSTWQYKRIQQLPGIGDILGMTIVLETGDFNRFKSAGCYASYCRTVKSIRTSNDKKKGQNNRKNGNKYLAYAFMEAANFAVMHYPQVQSWYDRKKKRTNDIVARKALASKLSKAAWHVMKGEDFDMKMMFG

SEQ ID NO: 161627 - protein, 393 aa, unidentified
MALYVGIDVSKEKFDACGIGDEGKKLFSLSCSMNRAGFEKFIVQLTKMNTAALLLGLESTASYHIALFSYLTAKGYRVAIINPLLIANFAKLSLRKTKTDKKDAFTIAQFLLMQRAAVTTKTESPRLTELKDLSRRRERLVDQMTSLKNDMKRILAVTFPELETITGIFTKSTLRLLSEFPSAHSITQAGYDAVAAIVTSRSKGRKSRASVKMLMDTAAASVGVASPAKDIILKQEASLLLALEDQASEIMKLIRSLADDTMQRDAKLLTSLRGIGEKTALNFLIEMGGDIKAFEHDRKLIAAAGLDPTTYESGKYKGQSKISKRGNRHLRRVIWLMTTKTIIADPMFRAYYFKRREEGLIYKKAVLATAHKLIRVMFSMLVHQKPFDPERRK

SEQ ID NO: 161628 - protein, 433 aa, unidentified
METAHPYDLVIGLDRSDQKADLHFIDTRSGQRRSQTIDTAPEALWEWLGELRQQHPEARAALCLEQPAVHLIAFLEAYDWITLYPINPITLQKFREAFVTSRAKDDAKDAQYLAELLFTHQPQLQPWAPEDRATRAVQQLVFHRRAVVDERTGLTNRLMALLKQYFPQALVLCGEDLWRPLATRFLLKWSSLQAVQRTKPATLQQFYYLNGSRSAKLLEQRLALVAQAVAVTAEAAVIESFVLRVQLLCRQLQLVVQTIARYDHQIAQAYAVHPDREIFASLPGAGAVLGPRLLASLGSQRDRFATAADLQHYSGVAPVTKRSGGSCYIHRRYLCPKFHRQSFHEYAKESILWSRWAAAYYLQQRTKGSPHHTAVRALAFKWQRVIWRCWQDRQPYDEQIYEASLRRRGSPLVALFDRVELGKSPWKHPVNKA

SEQ ID NO: 161629 - protein, 339 aa, unidentified
MGLYVGLDLHGKSIFIGIVDGEGKRVYRKNLPNDPGIILSELQPYREDIIGVVVESTFNWYWLVDLLMDHGYRVHLANPAAIQKYTGLKYADDEHDAFWLAEMLRLGILPEGYIYPKEDRPIRDLLRKRGHLVRLRTSLILSLQGIIARNCDVRLSVNKVKARRADQVSPLLAGNEDLALAGAVSKESIDFLGDKIRVVEGVVERRVELLEPYRYLLSLPGVGKVLSLTIMLETGPISRFPKVGNYASYCRKIRSRWLTDGKVKGRGNSKNGNKYLAWAFSEAAEFARRYDGDARTYYNRKKQKTNFMVAHNALAHKLARAAYYVMRDQVPFNSAKLFS

SEQ ID NO: 161630 - protein, 361 aa, unidentified
MEKCITSGMDVHERTVKACTAAGSGASEVKTVTNTEAGRNALIRYLRDLAKKHGCKRIETAYEACMLGFGLHDELSAAGIVNHVLAPSLMRKSRKDVKGKTDEADARMIFETLRGHVLAGNRLPTAWVPPQAVREDREVVRARLELGNKATRIKAQIQMLLKTHEVRKPAAVGDSWTLRHRMWLHGLLADGGPELPTGSKIVLSSLLRQLTMLEGEIKTLDQAVENLSRQPRYQVACQALVKQIKGVGLLTAMVFLTEVGDLKRFHNRRQLGSFLGLAPTCSESGEVVDRKGHISRSGTDRVRWVLCQASWVRLRYDPAESAVFERIRKGSKKLTRVAQTACMRRLAILMWHTAKDALAAA

SEQ ID NO: 161631 - protein, 378 aa, unidentified
MKTTAALGEYSEEQVLFLALELSNSRWKVGSTVGLGQKPRVRTIAAGDLAALHEEISRAKRRFGLPASARVVSCYEAGRDGFWLHRHLLEQGIENLVVDPSSVEVNRRRRRAKTDRLDVGKLLRQLIRWWGGEKQVWSVVHVPSVEAEDQRQVHRELEALKSERTRHTNRMTSLLITQGIRLRVGRDFLARLEQVRLWDGSLVPEGLRSRLKREWERWSLVQEQILELGRQRRKALREAQNRGAQEARKLYLLRAIGESYSWLASTEFFAWRDFRNSRQVGGLSGLAPTPFSSGSSEREQGIGKDGNRRLRAMTIEVAWGWLRYQPQSELSKWFQERYGPGSSRSRRVGIVALARKLLVALWRYLETGVPPKGAVFKA

SEQ ID NO: 161632 - protein, 388 aa, unidentified
MIYVGIDIAKLNHFASAISSDGEELIKPFKFTNDNDGFQLLLSKLDPLDKDSLIIGLESTAHYGDNLVRYLVAKNYKVCVLNPIKTSTMRKNNIRKTKTDKVDTYIICKTLMMQESLRFVTFYDLDLMDLKALGRFRQKTIKQRTRLKIQLTSYVDEIFPELQYFFKSGLHQKSVYALLKEAPTPEAIASMHMTHLAHLLKVNSHGRFDKEMAQQLRVLAQKSVGASDSSLSIQVTHTIQQIELLDSQLERVEAEMTEIMKFNDSVIMTIPGIGYINGGMILGEIGDIHRFSSPNKLLAYAGLDPSVYQSGNFQAKKTRMSKRGSKVLRYALVNAAHNVVKNNATFKAYYETKMAEGRTHYNALGHCAGKLVRVIWKMLTDEVEFNLD

SEQ ID NO: 161633 - protein, 358 aa, unidentified
MADKVTEAAVVGGVDTHKDLHVAAVVEQNNKVQGTQYFATTRQGYRQMLAWMTSFGALKRIGVECIGTYGLGQLRYLQNAGLEVLEVTAPDRMERRKRGKSDTIDAECAAHAAFSGIRTVTPKTRNGMIESLRVLKTCRKTAISARRVALQIIHSNIISAPDELREQLRNMTRMQPIRTLGSWRPDASKYRNVTSVYRISLKSLARRYLELHDEIADLDVMIAAIVDELAPELIKRNAIGYESASQLLITAGDNPQRLRSESGFAALCGVSPVPVSSGKTNRYRLNQGGDRAVNSALHIIAIGRLRTDDKTKEYIAKQVAEGHTKMEAIRCLKRYISREVYTLLRNQNKRVNSIPIMA

SEQ ID NO: 161634 - protein, 312 aa, unidentified
MNDTKYIGLDVHQATISAAVLDSTGKLLMESVLETRASTILQFIRGLRGSVQVTFEEGTCAAWLHDLLKPHVLNVLVCDPHKNALLKSGNKNDRIDARKLADLFRSGLLCPVYHGENGVRALQELARSYLALNRDVTRVMNRLKAIYRSWAIPCAGQRVYAPRYRSEFLGRITEAAVRRRAEIYYQQLDGLRSLRQQVRCDLLAESGKHGATKLLRQIPSIGSIRAALLIALMQTPHRFRTKRQLWAYSGLALKTSASGEYRFEEGQLKHSKKFLAIRGLNLNHNLDLKNIFKGAASEPLPSPDHSSSFTPL

SEQ ID NO: 161635 - protein, 326 aa, unidentified
MQGKESSEQKTKGQSNAGIDVCKNWLDAHLVPQGCSLRVRNDAQGHRQLKRWLMKHDVRLIAIEATGKWHRQVHRSLHASGFRVAIVNPLRARLFAEAIGLLAKTDRLDARMLALLAESLSPQAKAPASEAVEALQELVAGRDSAVAEQTALENQLAAANTAFLRRQLKARIVRIAKDIANLQAEIERQIGCDEALARRHAILLSIPGVGPVTAATLIATMAELGSCTAKQIAMLAGLAPLADQSGARDGQRMIRAGRAAARRVLYLCALSAKRCNPAMRGVYDRLTAAGRPHKVALVAVARKLVILANTLISQNRPWQSEPPCHA

SEQ ID NO: 161636 - protein, 425 aa, unidentified
MSLEFVFCTRFCGLSVVDTFSHIFIKKGSFIMKLVGIDIGKKHFFCIMDKDSGEVLLQPSSFSNTKDGFDSLIQKLSSYSKDSILIGMEDTGHYHFALLKYLLEKNFTVALINPKTTDYTRKMQNGITKNDKLDTLTICDVLDTPVRKKQYRITKVNSFDLYEQKQLTRHHHNLKEELNVYTNRLQKCIDIVFPEFNSLFSSKYGIIYMNVLKTFGSAENIASTDIRTIRKCFEIKGRGNRISLTAQQLKDSAKSSIGISSAAEVIKIKHLISQIELINEQLAETDKKIEEFSIQNNSPILSIPGISHFSGTSILAELGEISNYSKPSKIIKAAGVAPYHYESSQYDAQHTAITKKGSPYLRKTLYQIILPVINNNNPVFKQYYDLKISQGKGHRCACGHCVRKLLRIIYHLSSTNQQFDDALLR

SEQ ID NO: 161637 - protein, 386 aa, unidentified
MIEAVIERCAGIDVGKKFLVVCVMTGPLDVEPKTEIRKFGTIVAELELLRDWLIGERCSHAVMESTGSYWKPVFNILEDSVEVVLANAYDVQNRRGHKTDPNDSRWLAHLLRHGMIRPSFIPERAVRELRDLTRRRRQLVGEKARERNRIQKVLEDANIKLGDVLSDVLGLSGRLMIDALVEGVLQAEEIAQFAQRKAKQKIPELIAALRRNRLTDHHRFLLRHVLRHLDFLEKEVEALNVEIRSRLSAEKFRQPHTLLQSIPGIKEEASAAILAEVGPNMAQFPSGAHLASWAGLCPGNHESAGVRKTGRTNRGNKWLRSVLTQCAWAASNKHNSMLSAFYSRLSPRCGRKRSIVALGHRLLRVIYYILLRSQPYQESHGRSIST

SEQ ID NO: 161638 - protein, 381 aa, unidentified
MDQYGKVVARKRLSRSQVMVYTAKIPSCLIGMEACCGAHFLGAALAAQGHEVRLMPAQFVKPFLKSNKNDYLDAEAIAEAAQRPNMRFVPIKTDDQLDLQALHRVRDRLVSRRTSVINQLRAFLLERGITFRQGRAYLRKQIPELLEDAEQRLSPRMRRLVDRLWQEWKALEEQVEALSEEIESIASQDAICRRLLDVPGVGPLIATALVAAVGNGAAFTKGRDFAAWLGLVPKQHSTGGKAWLLGISKRGNAYLRRLMSQLESRTHRNVLVVAVANKLARIAWAVLSKGEAYCAMPVPGRFLVSRAFTKYTSTNRSHICSTSGSPRSLSMLTGSSLCLNSLQGSIHRAKTKPIACRSNLAVAALLAWSPAAWSRDPRCWR

SEQ ID NO: 161639 - protein, 394 aa, unidentified
MYSLFVGIDVSKDSFSAAGLNEKAKLVFSAVPEMNDQGFSAFFTTIMAHGKEPSSIVVALESTGPYHLNLYSFLIAKGITTIVVNPLIIANFAKLSLRKTKTDKKDALTIARFLFLNRESIEKLPSSQTTTDLRDLARERESILKMIASMKNDIKRILQSTFPELEQFVDVLGVTMLGFLKVFPSARLITQASPEAVAQGFNQGDGRRRISVHYTKIIDCAKTSVATTSPSKELILPGKIETLLHLKERADAITRMLVKLCSSMQQKELTILTSIRGIATKTAAPFLAELGDWRNFNSYKKVLAFAGLDPTIHQSGKYEGMSMISRRGNRHLRKVIYNMTFCVVRYAGPFRDYFFRRKREGLPFRKALLATAHKLIRTIFAMLNHGALYREEVA

SEQ ID NO: 161640 - protein, 402 aa, unidentified
MVMNAVGIDVSKGKSTVAVIQPFGVVIAEPFDVFHTDSSLKELVRFIKSLSGETKVVMEYTGTYYEPVANALHNAGIFVSVVNPLLIDDYDTNRVRKVKTDKLDALKIASYALDKWIKLRKYEPAETVRKTLQIMNRQCIKLNKILVMQKNSFIALLDCCFPNANTLFTSPHRVSDGHEKWVDFVMKFPHVDSVAKLPLSVFRTKYQSWCKKEHYNYSESKAEQIHAYARTIVSTLPMTDAVRKMVSEAAKLLNSTLEALGTLHSEMDALASQLPEYETVMNLYGVGKVFCSQLIAEIGDVTRLKSNKSLTALAGIDPPPNQSGKDDPKSRRISKRGSPALRRTLFLIMTIYLQHQPADEPVYQFLDKKRAEGKPYKVYMIAAAHKFLRIYYARVKEVMPKE

SEQ ID NO: 161641 - protein, 340 aa, unidentified
MNIKRIGLDLAKNIFQIHAVDHHEQAVLRKTLRRDRMMAFFFQLSPCLIGIEACAAAHYWARELTRMGHTVRIIPPQRVKPYLKGQKNDANDAEAICEAISRPGMRFVAVKTERQQTLQAEHRVRARLIRARTALSNEMRGLLGEFGLVLPVGIRQLRKALPEILSQQEQWDDRFIRLLGELAEELQILDERVARHDRRLEQSARDDIRIKRLLTIEGIGPVVASALVAAVGDGRQFKSGREMAAYLGLVPRQHSSGGKERLGHISKRGDSYLRTLIIHGARAVLNACQNKTDRRSQWLQALSERRNRNIATVALANKNARIAWAILSGEKEYHGQQGAG

SEQ ID NO: 161642 - protein, 343 aa, unidentified
MQTITTIGFDIAKSVFQVHGVDAAGQVVIRRQLKRRSVLAFFQKLPPCLVGIEACASSHYWSRELQALGHTVRLMPPAYVKPYVKRQKNDMADAEAICEAVTRANMRFVPTKTPEQQSCLMLHRTRHLFIRQQTAVINSIRAHLAEFGIIAAVGRRGVMELLHVVADPSDKRVPEVARACLAALGTRLLRLKEQILEFDRMIMAWHRSNQTSRRLHYIPGVGPMLATALVASVADPRTFRSGRNFSAWIGLVPKQHSSGGKDRLGSISKQGDRYLRSLFVAGALAVIRYAKIHGTKHRPWLTALLGRRPTKVVAIALANKIARMAWAMMAKGERYKQPVALAA

SEQ ID NO: 161643 - protein, 357 aa, unidentified
MTKLLKKLDFTGQPIFIGIDVHLKSWNISVYLQQQYLTSFNQPPTTLALQTFLQNSYPNASYKCAYESGFCGHWIQRELLSLGIECIVINAADVPQTDKTAKNKTDTNDSKRIAQALQAGFLQPIYIPDEEVEADRQLVRCNEKFTNDLTRVKNRIKGMLYHLGIKLPEYFSNSNWSNLFIKWLKELELKNPSAKRAIQHQLTMAENIRIQKLAVLKDIRALLKKDRYSATAKYLLTVPGIGTVTTATLLTEIDNMKRFSNFEQLNSYIGYYPSQFSSGENIHQGNIIGRQHKRLRSLIIEAAWTAIRTDPAMTMVYNQFKLKVGGKRAIIKVARKLLSRIRHVWLNQVEYEKGVIR

SEQ ID NO: 161644 - protein, 339 aa, unidentified
MPTYNLGLDVHKVRTQYCLMDPAGQILAEGNVPTEAVAGLVPGADCAVVLEATGSWHAAYDALCATGARVKLAHPSHVKAIASARVKTDKIDARILAHLLRTDLIPEAWAPPARTRELRDLVRLRWRFVAQRTTAKNRISNLLARRCLRYAGTDLFGRGGRAWLAGLELDPHARTLTQLLLTAIAEADAHVCALTARLHELLDGDDELRLLTSIPGVGFLTAATLLAELGDPRRFRTAGQVSAYFGLVPRVRASAGVARYGHITRAGSPHARRALVEAAHVAVRLPGPVRDRYARLLRRRGKKVALVAAARVLLELSWTLLRRGEVFRADGMGEPAEIR

SEQ ID NO: 161645 - protein, 411 aa, unidentified
MHHRQNYLYVGVDLHKEQHTAVIINCWQEKLGEIQFENKPSAFSKFLLEVETYVCDGITVVFGLEDVGGYGRALAKYLVDHEQVVKEVNPALSFLERKSQVMIQKNDSWDAECVARILVNKFEQLPNVNPNDLFWSIQQLVSRRNALVKAQSALKNQLHIQLNHHYPSYKKFFSELDGKTALAFWEQYPSPSCLEGTNIKRLTTFLLDVSNNTCSVKKASEILKLVKEDGQTMKEYQETRDFLVRSIVRDIEFKKKEMKYSERELKQLVKLLDYQLETMPGIELVTASALIAEIGDVRRFPNANKLARFVGIAPVYFGSGGKGKTHKSKQGNRALHALFYNLAVQQVQVAKGRKLPRNPVFHAYYQKKLKEGKTKGQALVCIMRRLVNIVYGMMKHKTAYELPVVQEKEVV

SEQ ID NO: 161646 - protein, 378 aa, unidentified
MKTVRFVGLDVHAQTIAVAVAEVGGEVRSVGVIPNDPQAIQRVLKKLGKAEQLRVCYEAGPTGYALYWQLTRLGVHCEVVAPTLVPVKAGDRVKTDRRDAAKLARCYRAGDLTPVWVPDAAHEGLRDLVRAREAAKRDQLRARHRVSKFLLRQGRRPPADSAAWGCRHLLWLKQQSFEQPAQQATLEDYLHELEHQSARVMRLERAIDAAVESVPQKMRAVIAALQSLRGVAQISAVTLVAELGEISRFSHPRQLMGYSGAVSREHSSGERIRRGSISKAGNAHLRRIVLEAAWAYRHRPAIGRTLAARQRTQPARITQIAWRAQQRLHDRFRKLIARGKSPQLTVTAVARELLGFIWAIGMEVEQSRQWLPRAARAA

SEQ ID NO: 161647 - protein, 317 aa, unidentified
MERMEFSRKTAGVDVGKHHLDVAVHGLEDLARVSNTAAGHEELTDWLKARGVGRVGLEATGGYERAARLALEAAGFEVVVHQPLEVRRFAQLKRRRAKSDRLDAQLIAAATAQVEAVRAAQDPRLAELAERMTAYEQITDQVVELKTFLEHVTLKDIGSALRTQVRALEALKLRLASQILTAIKAHPDLLARYRLLVSLPGVGPIVAATLLIRMPELGGMRRGQAASLIGVAPFDRDSGQWKGLRFISGGRARPRRMLYLAALVAKRFDPGLKAFGETLRARGKPPKIVTVAVMRKLIEAANLVLQRGQPWVKNMPA

SEQ ID NO: 161648 - protein, 342 aa, unidentified
MKRKIYIGVDVSKNWLDLAYYDGVEIDWKSGHIRVDNNKSGYRRISLWMKKLQIAKESALFCMEYTGLYCYNFRVWLESEGIIYGMINPRKMHRFEPDLGEGEPALDRIKTDEMDSFRIAMYCEKHSRKIKSSPSRLPGSAFFNLKRLLAERRQYVKHSVLYKQQLHDISAYDTEESCKRKQAGLKSLSVLRRQTDIEMRKIIKSDEAIYKNYKLLCSVIGVGLVIAVETIVLTENFTAITNPRKYACYVGIAPGRKESGISIRGGDHVSKKGFKQAKANLSLVALQAIRHDSNIRSYWLRRKADGKHTGVVLNAIKFKMILRMFAVIKRQKPYVEMDAYMK

SEQ ID NO: 161649 - protein, 355 aa, unidentified
MNSEKYIGMDVHQATISVAVMDSSGKLIMECILETKAVTILEFIDGLRGTLSVTFEEGTSAAWLHDLLKPHVSHLVVCDPRRNALLKDGSKSDRIDARKLAELLHGNKLHAVYHGEHGVRTLKELGRSYLTITKDLTRVMGRIKALYRSWAIPCSGTTVYAVRHRAEWLAKILEPGVRLRAERLYQQLDLLQPVRQEARRDLLVESHKHHAVKLLRQIPSIGPIRAALLVALLQTPHRFRTKRQLWAYSGFAVETHDSGEYRFVRGKLVRNRERITVHGLNHNHNHDLKNLFKGAAISASTRPGPLCDFYVALVEKGMRPTMARLTLARKMATITLTIWKKGVEFDAKELNRQAV

SEQ ID NO: 161650 - protein, 370 aa, unidentified
MGKSALYVGLDVHKMSVDVAVAEPGPGAEVRFYGRIGGDLEALDKVTRKLQAKGAELRFAYEAGPCGYQVYRHLTAQGHSCLVAAPALIPRRPGDRLKNDRRDALALARLLRAGELTPVKVPDADDEAMRDLTRAREDAICVERRARQRTVAFLLRHGRVYPGKTTWGRGHWAWLLQQVMDHPAQQIVLQEYLDAVREASARVLRLTGQIRDLVPQWHQAPFVAAYQALRGVSLIVAATVVAEVGDLDRFNNPKELMAYLGLVPSEHSSGASVRRGRITKTGNSHARRVLVEAAWAYRLQARVTRHLLKRQEGLPECVRQLAWKAQLRLCARYRRLLARGKTRQTIVIALARELAAFLWAIGRAVAPATA

SEQ ID NO: 161651 - protein, 337 aa, unidentified
MDTSKHFFQLHGVNAAEKVVLRKKLRRKEMVAFFKALAPTVIGIEACGASHHWARILRSFGHEVKLIAPQLVKPYVKRGKNDTADAEALCEAMSRPTMRFVPVKTAEQQAALMMVALRDRLIRNRTQLSNAIRGYAAEFGFTAARGIAHIDPLLDRIQADENVPVLARELFAAQAEEYAQLQAQIAEVDAKLMAWHKADECSRRLAKIPGVGPIGAALLMMKTPAPEMFRSGRQFAAWIGLTPKDHSTAGKVRLGVITRAGDEALRSVLVVGATAVVQQVRRGGRGSPWIVDLLKRKPPKLAAVALANKMARIAWKLMVTGNSYAAKSAPAALMGAA

SEQ ID NO: 161652 - protein, 427 aa, unidentified
MDILHERVAGLDVHKNTVVGCVRVKAGGETLRECRTFATTTEGLLALGALLKESGVTHVAMEATGVYWMPVWKILCDGDFELIVANAAHIKNVPGRKTDMNDAMWIADLLACGLIKASFVPPEEVQELRSLTRTRKQLVREQTRHTQRIQKTLAEANIRLDSVLSDIMGASGRRIIEAMIAGVRQPRKLADLASKQIKATPKELYDALHGRLTDHHRFLLELHLRQWDGLDVAIRKIDIEINQRITQMDAQIRPGTPPFRDLTDLLSTAPGISAVAAPAILSEIGADMSRFPTAGHLVSWVGLCPGHNESAGKRKPSRLRKGAPWLKTMLVQSAWAAKRKKGSYYRAQFFRLQSKRGPQKAICAVAASILTAAYHMLRDGTFYHDLGPDHFHSASPKAQAQRLVSQIAKLGFVCTITDADPEAVVSV

SEQ ID NO: 161653 - protein, 386 aa, unidentified
MQKLNDLSRSPSPLDPNGTLIAVIELSLSSWLVAGIVPGVERQPLKKLAVDESALVKLLHRWREEAEKAGHRIKRIVVAFEAGRDGFWLARWLSARDIEVHVIHASSVAVSREHRRAKTDRLDTELLKRSFLGWLRGERDHCKMVAIPTTKDEDAKRPNREHESLVGEQSRIVNRMKATLIRLGIRGFNPKLKKAAGRLEDLRTPEGEPIPPNTLAELRRDMERRRLISDQIRQIEDARLERIKQAPGDGPHAMVRLLTRVIGVGIETADMLVQEVLARNMRDRRAVARYAGLTGSPDESGAKRREKGLARSGNARVRRGMIQLAWRFLMFQKESALAQWFRARTESARGTRKTMIVALARKLLIALWRLVREGVVPDGVVLRPAQ

SEQ ID NO: 161654 - protein, 345 aa, unidentified
MTEAYDGRQVVGMDLHRRRSVLVRMTEDGRKLETARIENSPAALRAVIARAGSKPRVVVEATYGWYWAVDVLEAAGAEVHLAHPLGVKAFSYRRVKNDERDCADLADLLRLGRLPEAWIAPEPVRALREVTRYRHKLVGQRTSCKDQVHAVLAKTGIPVSRSDIFGRGGGIWLDGLPLLQPYAAKIGSLRALIAVLDGEIGRLEEQASAMLAGDRGYAAIRQLPGIGPVLGAVIAAEIGDITRFGNPGQLASWAGLTPRHYESDTRVIRGRVSKQGSRMLRWALVEAIQRQPAGTRPRQVKDAIIARRGPDVRGIAKTAAARVLLTQVFYGMRDGHIRRATSQAA

SEQ ID NO: 161655 - protein, 351 aa, unidentified
MEKYIGLDVHAKSCTAAIIDGRGKRLGSQVIETNGKSLVEFFKLQAGRVHLCLEEGTQSAWLTEVLRPYVAELAVTVPRQRRGQKNDELDAYTLAEQLRQGAFTIRVYQQVGPFGELKQLVKTHRSLVIDTRRVQSRLKARYRSRGIATAGQEVYAQSTRSDWLSQLPKSSLRSAEVLYRQYDALCEIRDQARRDMVRESHRFPITRTLETCPGMGEIRVARLVSVVVSPQRFRGRRQFWSYCGLGVVMRSSSDWDQDPSGSWHKVRKPVTRGLNLNFNRMLKDVFKGAATTVLQQGGEEPLYSEYQRQTLRGTKPDLAKVTLARKIAAISLTMWKNEEKYDPKKRKQVLA

SEQ ID NO: 161656 - protein, 419 aa, unidentified
MPFKIIRKNCCGLDVHKTWIFACIGITDTNGRTEYFEKRFSSFSKGLRNLSEWLSKYECTEVCMESTGKYWIPVFNILEKTCSVELAHPKYTKPQKGNKTDRKDARWICDLFMCGMTKPSFIPPADIRHLRDLVRYRFKLSCMLTGEKNRAQNCLTVSNLKLDDVFSDVFGKSSRSITEHMLEHPGEIFDVTPFVDPRCKTPVEEIQAAVDGAISPEQAIKLRQCLNHIDELEKHKEEIEREILRVSDPYLDALSLIRTVPGLDKNPFTAIQILSEIGGDMSVFPTDKNLVSWAGCCPRNDKSNKTIKSTRISRAGSYLKPVLVQVSNALIKSKKHPEITERYRRIKSHRGHKKAVIAVCRMLLTAIWHILSDLKPYTPDGYLTPRPVKKDKVLTTSQALDLLKLRGYVIKDDITIPVS

SEQ ID NO: 161657 - protein, 345 aa, unidentified
MTEAYDGRQVVGIDLHRRRSVIVRMTEDGRKLETVRITNSAAALRREIAKAGEHPRVVVEATYGWYWAADVLEAAGAEVHLAHPLGVQAYSCRRVKNDQRDAADLADLLRMGRLPEAWIAPPEIRELREITRYRHKLVQARTSVKDQVHAVLAKLGIPVTHTDIFGVHGQAWLDGLRLPQPYAGKVTSLRQLAGEFSAEITLLEQVLGDLLAGHEGYAAIRQLPGIGPVLAAVIVAEIGDITRFRKAGQLACWAGLTPRHRESDAKVTRGHISKQGPRILRWALCEAIQHQPAGTRPRQVKDGIIARRGPQARNIAKTAAARELLTLIFYVLRDGRVRRAASPAA

SEQ ID NO: 161658 - protein, 409 aa, unidentified
MRIIGLDIHRAFAEAVAWDDGKLKRLGRVDMRRHLLEAFAKKLTKEDVVVVEATGNAASVAAVIALHVKKVVIANPKQVRIIAHAKIKTDTIDASVLAQLYASGFLPEVWIPDQPTQALRRQVTRRNQIVRQRSRLKNIIQSILHSHLIPSCPHADLCGASGRTWLFHQVLPEDERLAVERHLREFDRLGEDLKVIERDLARSALADDAVKRLMTIPGVDMVVALAIVAAIGEVRRFDRPEKLVSYLGLNPSVRQSGPGPAYHGRITKQGRGHARGMLVEAAWAAARAPGPLRAFFLRVRARRGQHVAAVATARKLAVIIWHLLSKGESYAWARPALHARKLRDLELKAGYRAERGQKGAAHAYNIKSHRDQERRWVEQAEAAYARFVAGWNPRGPKRARTGAANEVRR

SEQ ID NO: 161659 - protein, 329 aa, unidentified
MVGVGIDVSKGSLSVAIHGAGNPWEGTFENTTAGRKALVKVVKKRTKREKQVRAVVEPTATYHVAVAKQLVSAGLRVMVANPRRTKHFFKSRNQRAKTDRADSHALAAYALAMPFEEWQPPAASVEALRSVVRRRKQLVEMCTAEKARLKELRATGGEDAVIASVLAHIKWLNAQIKALAAQAVAIVKADASLWDWKQLLESIPGVGEITSLTVISELAYLNDDLDNKQLTAFVGLDPRPFQYGMMDAKRRISKAGNRHLRTALFLAAWTATKNSPHVRAWKEGYLARGKAKKLVNVACARRLLLTMNAMRRTNASWDGERFHALQESA

SEQ ID NO: 161660 - protein, 392 aa, unidentified
MTTHTTQTANAAGPIVALDLGKYKSVACVYRTADDQQFTTLPTTRAELTRLFARHRPAVVLIEACLLSGWVRDLCLELGIECLVANTTSEAWKFKHLKRKTDRDDALRLAEVYLLGKFPSVAIPAKEVREKRALIEHRQKLVGRRVALQNRIRAILVAQGLAAPVGVRAWSELGLAGIAAHARPLAECAAAELWRGRLELTLNELTYVRALLEQADHKLDELAKADEAIQILATIPGVGPRTAEAVAAFLPEPRRFRTTKQVSAYGGLVPRQYQSTDTDHRGRITKRGPRTLRKLLVECAWCMLRYNGWARAVYQRLTHGGKTRKKQAIVALARKLLVRCWAMLRDGAAWHDPHTAPKEPLPPSKRRRQAEAQQRRAAKQQPPPALLLPATP

SEQ ID NO: 161661 - protein, 338 aa, unidentified
MKVYAGIDLHSSNNYIGIINEEDQRLYQKRLPNRLEHILEALEPFKESMEGIVVESTYNWYWLVDGLQDHGYKVHLANPSAIKQYEGLKHTDDKWDSFWLAHIKRLNILPEGYIYPKEERPVRDLLRRRLMFVRHRTSHILSLQSSITRNLGYKMSSREIKKLERGDAGKLFDDPFLVLAASNNISAIQFLKTRIAEIEKEVKSHIQLKPEFKYLLTVPGIGNILGLTIMLEVGDISRFLKVGNYSSYCRCVKSERISNSKKKGQGNRKNGNKYLSWAYVEAANFFRRYCPKANAFYQHKKAKKNGVVAIKALSNKLARASYYIMKDKVPYDANKMFR

SEQ ID NO: 161662 - protein, 380 aa, unidentified
MKLFVGIDVSSEKLDVCFLTDDDQLSTLSEISVSNDIEGASLTREMILEFNENYLFDQIIIGMESTSMYSFHPSMFFHEDEELKKLNTLVTIENPFRIKQFRRMFDEDKTDRNDALRIADFLRIQRFTTSPIKEEKYMALQRLTRTRYQLIKQLTRTKQHFLENLTYKCNTLVREMKDESTSLFSATVISLMTEDFTLDELAELPLEAFSDLIQEKGRGRFKQPEKIAKAIQRAIRSSYRLGTVAQESIDIVLGVLVCEMRALEKNIKELDKAIEQLVIVIPEYQCLTSIPGIGKVYAAGLIAEIGQIERFEDQTKLAKYAGLSWKVKQSGNYQSQNTPLTKQGNRYFRYYLVEAANSVKNYLPEYEAFYQSKYKEVPWL

SEQ ID NO: 161663 - protein, 346 aa, unidentified
MEISTIGLDLAKNVFQVHGISATGEVVIRKALRRSQMLPFFEKLPPCLVGAEACGTSHHWARELTKLGHEVRLMPAAYVKPYVKRGKNDAADAEAICEAVTRQTMRFVPVKSREQQAALSLHRVRSLLIKQRTQLVNMMRSVLAELGIAIPVGIVKALQMAREIVDRESRLDLPTEATNVVAMLAEQLLQLHVQLRKLDLRLAALQRSDDRARRLATIPGIGPIGATALAASVTDPTQFASGRQFAAWLGLTPRQSSSGGKERLGRITKMGDRYLRQLLIVGATALVRYAKEKPSTVDPRFVALLARKPARVASVAIANKMARIAWAVMARGGVFERGHAPVLAAA

SEQ ID NO: 161664 - protein, 351 aa, unidentified
MLYAGVDAHKKYSKVVLTDDRGAKLAQASLSNDLGCFQEFFSQATEPVKAVVEAGRTWGVIYDLLESIGVDPVLANPLKTRAIAEAKIKTDTIDAQTLAALLRADLIPMVHVPSHEVRAQKNLLRQRFWLVELRTRVKNRTHHILDRNHVTLLACSDLFGKAGRKLLDHIEIPAPDNLLLKAHLELLDYIEKQIDQAEKWTKEALEDHPGVAILRTIPGIGKILASLVALEIDDISRFSCADKLCAYAGLVLTTYASGGKVRHGNLISSCNRWLRWAYVEAAWIAQRTSPYCHVYFERIKKRKGANSANTALARRLCEITWHCLTEKRSYEERSSVCTERIQPAAFESSWS

SEQ ID NO: 161665 - protein, 367 aa, unidentified
MGQHTRFVGLDVHAKTTSIAVADEGRGDPTFLRQVPSDLNRILKTLDQLGPRETLHCAYEAGPTGYGLQRALAHAGIRCEVIAPSKMPKKSGDRVKTDRKDAMRLAHCLRSGDLVSVHVPDEACEAMRDLLRARDDAKRAQLRARHQLSKFLLRHGRRWPKSNWTRPHHEWIEQQRFEHAAQNRVIEEYLHTVNEASARIQSYDSLLAELVPQTEFAALVEALQAFRGIQLLTAASVAFELCDLRRFSSPKKLMGYLGLTASEDTSGERVRRGAITKAGNKALRRLLIEASWAYRHAPREAYRLKKRAEGVAPGVRAIAWKAQVRLNKRYRYLLARGKTKQKVLVAIARELAGFLWAVGQEETLLVH

SEQ ID NO: 161666 - protein, 436 aa, unidentified
MRGCRCSMIMGFTKPIEHFNLKRKKVITMNTLYVGIDVSSKSNVVYLMLPNGDKHSNFSVANSHEGSTQLVKRILSALTSLSLDTVLIGLEATSVYGDNLVYFLREDASLAPFHRKIHVLNPKQVKKFHDTYNDLPKNDYVDSFVIADCLRFGRINKEVYLGDYRYKALQNLTRARFFAVQNLIKEKQRFMNVLFKKYSTMTQEKVFSDTFSTTALAVYDEFDSAEALANMDLHELTDFIIEKGKNRFPDPDAVAKAIQKAARSSYRLPKTVNDSVNQVLSISITSMKALESQIKEFDKAIKAQMELLPNVLISIPGIGPVYSAGIMAEIGDINRFDNQAALAKYAGLAWKQHQSGDFEAEVTRLIPSGNRFLKYYLCEAALSLVRCDKEYSDFYHLKYKEVNRCQHKRALALTARKFVRLVFRLLKDNRLYCPAK

SEQ ID NO: 161667 - protein, 406 aa, unidentified
MFIVGIDVAKKFHQAVITASDGSLVGKPFKFDNTSSGFKILLDKITAACSDLSQFEFGMEATGHYWLNLYTWLVDRKFAIHVINPIQSDALRNLYIRKTKNDSIDAKLIADVIRTGKYSETPLSDDKIISLRDLCRQRFYLIDMASDLKRKIIAMMDRVFPEYEDFFTDMFGKSSVEVLKECTTPEEIMAIDTQKLTDLLRKTSKGRFKEQKAKDLKELASNSFGALLASDTLSLLIKQMLEQIELLEKQVSDLDKIIAKNFESFDTKLTQIPGIGSVLGAVIFSEIGDINRFDNPKKLTAFAGIDPSVYQSGNFISSESHMSKRGSPYLRHALWLAATVAEFHDDALHYLYQKKRDSGKSHMQATGFICHKLLNIVYTVLKNNIDYVPVFPPDVDVSELVDKCLN

SEQ ID NO: 161668 - protein, 418 aa, unidentified
MRRVIGMDIHRTFAEVVFWEDGRLRWHGRVDMTRSGLEGFGRSLTKTDEVVLEATGNAMAVVRVLSPHVARVIMANPLQVKAIAHAHIKTDKIDAGVLASLHAAGYLPEVWLPDAETERRRRLVARRNQIVRHRTRVKNETHAILAAHLVPPCPHAELFNGPGRAWLARQVLPDDERAAIARHLRELDRLGEDLAVLDREIAGASVDDPAVRRLLTIPGVNLTVAAGLVAAIGDVRRFPSPQHLVSYFGLNPRVRQSGLGLAQHGRISKIGRAHARALLVEAAWAAAKAPGPLHAFFLRIRARRGHQVAAVATARKMAVLVWHLLAKETEYLWARPALVAHKLRALELQAGRPMKKGNKRGPAYAYNIKALRNQEMAIAEQAERAYQHFVAQWQPKPTTKRRVTNPAAWSRGAPRQPG

SEQ ID NO: 161669 - protein, 391 aa, unidentified
MSLYFVGIDISKYKHDCCIISAVDQKVVSKFTVKNDKAGFEHLLTIFQSLSSPEYIRIGFESTAHYALNLELFLENAHHSFMEVNPVLIKEYKKSTSLRRTKTDSVDCESIARWLMTVAYKPHSKGFYHAYSLKSLTRLRDRLIRQRSFYLVKMTNFLDHTFPEFKPFFNERLSKTALYLLENYGTAEKMAKMNSASYDKLRCISRGKFSPGQFLQLKGLAVNTVGVNNSIFDVELNSLLTLYKVLAKEIGTLEEEINKLIEEVHPHYMSVPGIGPISAAVIYSEYGDMSNFSNSGQMLAFAGIEPGINESGTASHGGRMVKRGSSQLRYVLINCCLPLIRFDMTFATYYAKKRGEGKPHRVAITHVAKKLVRVIYALERQDVDYSVQKLR

SEQ ID NO: 161670 - protein, 433 aa, unidentified
MKVLYERVAGIDVHKDMIKVAIRSPGEKPWTRTTEIFEYRTFYGVLQQMAADLRKRGVTHVVTEASGACTEPVYYALAEQDFEEVAVINPAHAKALKGHKTDAKDCARLAELFECGLLRGSYIPAPELKEVRDLTRYKIKTVQARTSEIQRLGKALESAGIKLGSVASSITGVSATSMIEALIDGERRGGVLADLALGRMRSAGKLADLSMALAGRFTDHHALLCRLHLDRIKVFDDAAAGLEAQIAARAAPWQRELDLLKSLPGFGDVVAQAWIAEIGPAPHLYFASHEKLACWVSLCPGNNISARKRKHGRTGDAGTYIKPLLVQAAWSAIRVRGRLQARYNRLVRRFGGDKNPAAKKKAITAIAHTLLKIAYQVLKTGTPYQELGADFYTRRESPVQRQAYLERQLQKLHPGCTITITISPPEAALPPGA

SEQ ID NO: 161671 - protein, 392 aa, unidentified
MLYIGIDVAKSKHDCFIIDSDGVIYTDNLRITNDRVGFNKLLETILDALDGEPVTNAKVGLEHTGHYSINIKRFLESQGFVVTSFNPLETSAFRKAFTLRKTKTDKCDAKTIATMLFSNESIPTSPPSYQIQELKSLTRHRFRLIGYRGKLKVSFARIIDVVFPEFPSFVWSVNQKSSHQLLLELPTPDAIAGCHLTRLTNLIHKSSHGKYGREKAIALRDLAASSIGLSDEALAFELQQTIRMIQNVQAEIDALDRKIKSIVQELDTPLLTIPGISYTLAAIILAEIGDINNFSNPSKLQAFAGLDPSTYQSGKYTASYATMVKRGSTYLRWAMFQAARLVAMRDKTFADYLAKKRSEGKHFNVAISHVSKKLLRTIFYMLKHNEAFVPQS

SEQ ID NO: 161672 - protein, 344 aa, unidentified
MNIYKVTQCERKGKSLVLDEFDHFVAIDWSLQTMAIAHMGRRNREPEVFERPSSIKALKKYLVSLKGRTIITFEETTTAQWLYVELRESVDRIFVCNPRHNRLLSQGPKTDKIDASKLCVLLRGGLLKEVFHAMNDLFELRLLVSAYEDLVQAGVRALNQKHALGRGHGDRSKHAPFIFQYLDKSIELYEQNKQQYEAKFETWCRRNRSLKMLLPVAGIGVISAVKIVAVVVDAHRFRKAAHYLSYCGLVKHEKLSGGRSYGRRKAPYNHTLKGVYKMATLSAINGKNPIREYYDHLITGGVAEHNARHAVARYIARITYGILKTGTPYEPYRWRSQETKRNVA

SEQ ID NO: 161673 - protein, 412 aa, unidentified
MLFVGDDWAEDHHDVELMDACGRRLAKARLPEGIVGMSRLHAMIGEALGDDADADAEDAATRVRIGIETDRGPWVQALVAAGYTVFAVNPLQAARYRERLSVSGAKSDAADAHVLADMVRCDSHQLRPIAGDSAQAEAVKVLTRMHQTLIWERTRAGQRLRHALREYFPAALQAFEDLDAGDTLELLAKAPDPASAARLSLSQISAALKRARRRNVAAKAAAIQAVLRAQQLGRPAVVVAAYAASARSLLAVLGTLNEQVKALESEVEAHFGRHPDAEIIRSQPGLGVVLGARVLAEFGDDHDRYASAKARKNYAATSPLTRASGKKKTVMARYVHNDRLVDALRGQAFAALLRSPGARAYYDRQRARGVNHHAALRQLANRLVGILHGCLKTGTPYNEITAWSHHINTTAA

SEQ ID NO: 161674 - protein, 453 aa, unidentified
MNPVPKTMPSLPVLNNYAAGIDIGAPHIYVAVPQDADTQPVRRFETFTQDLEALAQWLHACHIQTVAMESRGVYWIPLFQILEAQGFTLCLVNSRDWRNAPGRKTDVCDSQWLQYLHACGLLRASFRPEQQVCAVRSLLRHRESLISSSASHIQRMQKSLTQMNLQLHHVLSDITGKTGLAILDAILEGERDPDVLSAYRDPRVKASPETIAKSLAGHYRPEHLFTLKQSLCSYRHYQTLITECDAEIERMFADFDARVDPNEKPFPEGSKSKPQRGNVLRFQESDLTEELYRLLGNDLTQVPGFGVLTLYTLLSEVGRDMSAFPTEKHFCNWLGLCPGNRISGDKVLSSKSRRVASRAARAFRIAAQSLWHSRSALGDYYRRMCARLGRAAGNTATAHKLARIFYHLLKTGEAYEEGVFAQEQERSAKHREHRLEKEAAKMGYKLVPVTPKE

SEQ ID NO: 161675 - protein, 337 aa, unidentified
MEHIAIDLGGRESQICVRAVDGSVVDEKRCATKSLKNYLGGRPKGRVIVETCSEAFGVADIAMTAGHEVRVVPATLVRALGVGSRGTKTDRRDAQILSEVSCRIDLPSVHVPGQESRRRKSMCGVRDSLVRARTQLSNCIRGWLRGQGQRIRSGSIETFPWRVRQAVTEVPAFIERQLEIIDEVTKKVLAAEKELAEAARADATCRRLMAVPGVGPNTALRFVAALDEVSRFNSAHKVEAYLGLVPGENSSSERKRRTGITKAGSPALRHTLVQAAWAARRCRRQDPLQIWSLEVEKRRGKRVAMLALARKLAGILYAIWRDGSAYDPTKGARAPRA

SEQ ID NO: 161676 - protein, 353 aa, unidentified
MKYVGIDWAYRKAQWCALSPGGQIASEGQIPADRDGLARLVLELGDEVKACLEMMSGALWVRDQLVDCGWQVEVADARKVKTVAPLAAKTDKVDARLLAELSRRELVPALWLPSLDERALRERLRRRMHLVRLRTSAKARIAGLQTQWGVRVSLQRLRRADGMALLERAGVPEVWRRSVSECLSVIEFLDARIAPLDAELRPLAHADPRAVLLDTIPGVAELLALTIAVEIGEVSRFSSPARLVSYGRLAPRVHQSGQARPHSGPLSKSGSRLLAWAAVEAAQQAWRETNPSHDLYADVARRSGNKNSAKAAVARKILIAAWYMLSRNQPFKPAPRCTRGTSVPASSRLALAA

SEQ ID NO: 161677 - protein, 355 aa, unidentified
MNDAKYIGLDVHQATISVAVLDVAGKLVMEAILETKAETTLQFVQGLRGSLHVTLEEGTCAAWLHDLLKPHVAQVLVCDPRKNTLGKVANKNDRNDARELAELLWRGKLKPVYHGEHGVRTLKELARSYLTITRDLTRVMNRLKAIYRSWAIPCAGQQVYAPRHRTEWLAKISEPGVCRRAEFYYQQFDALAALRQAVRRELLHESRKHFAVQLLRQIPSIGPIRAALLVALIQTPYRFRTKRQFWSNIGLALKTYGSGEYRFVGSQLQRSKKFLAIRGLNHNHNHDLKNIFKGAATWAAANSGPFQHFYQACLVRGMKPSMARLTLARKIAAIALLVWKKGVRFDAEHLKQQAA

SEQ ID NO: 161678 - protein, 452 aa, unidentified
MSRKKTRLQAVTEAPQMRPGAAGIDISPEVIYVAVDPQKDGRPVRSFGTFTGELYHIANWLKACGTRTVAMESTGVYWIPLFQVLEERGLEVFLVNARHYKNVPGRKTDVCDSAWLQYLHAVGLLQGSFRPTQEVCAIRTVLRHRGGLVQAASEEIQHMQKSLDQMNVQIHRVLSDLTGVSGLAIIDAILAGERDAHQLAGLRDGRVRASEETILAALEGDYRAEHLFTLRQSLESYRHYQKLIEECDRQIREMLDQFENRADGQEPPVARKKMRTSTDEELRREFHRVLGVDLTAIPGMNVGTVQILLGEVGPDLSRFRSAGSFASWLGLCPDNRITGGRVLSSKTRKVENRLAGALRMAAESLCRDQSYLGQFYRRMKSALKGGAPEAITAAAHKLARIAYTLITRQQEYDESRFEAAEKRNADKQRQRIIKQARKWGLVLVPETPVPVV

SEQ ID NO: 161679 - protein, 364 aa, unidentified
MYYSGIDQHKRDCMITTYDADGHRVKQQRVPNVPPQLRRYFTAFTGPHHAVVESTGFWYWLADLLDDLGVELILAHATRLKAIAAAKVKTDRLDSDLLAQLLRAGLIPKAHRIAREARGPRDLLRLRVRLVEKRISCLNSLERIREKHHITNRNALDPWYQHQVDVSEAQLALLAQQIHDLEVILHPHLIPNADIQRLLWVPGIGKVNAFTIWTEVDGIARFPSEGQFLSYCRVVPGADNSGGRTRHRSGAKAGNRYLKLAFSHASVRAIQYYPVIKAFYQKHRRRKPVIGARAIVAAELARIVYQVLTKREDFNGLFRGMPLPRTKTRQWPRLATPAAELGRGGCASGHALDWGARRRATRCI

SEQ ID NO: 161680 - protein, 325 aa, unidentified
MAKRITVCAGIDTGKRKLDVAIDGNCELLQVENTAEGHKVLLEWLQRHKVKRIGIEASGGYEQPVVAALRRKRFVVIVFQPAQVRAYAKFHLQWAKNDKIDAALIAACTAAVKKIYPAPDPRLSPFAEQLTMIDQIGEDIMKLKNRIETCRNERIRAVWKEEVARLAKRERAELKALVAAIRQYPDLAERLELIYSVGGAGLPTAVAILVRMPEIGQLTREQVAALAGLAPYDDDSGDQVGARHIDGGRERLRRALYLAALPASMRWNPQLIALYQRLRAAGKEHKRALIACARKLLIFVNTMVARGTPWQSEPPATRTANPSAA

SEQ ID NO: 161681 - protein, 355 aa, unidentified
MNIIYIGVDFHARQQTICYLTTEGGEISLHQLMHDDKAAVRSFYAQFTGHVIVGLEASGYSPWFERLLAELGCEIWLGNAKEIRRRARSRHKNDRRDAELILDLMLHNEFPRVYLLPLQSREVLRMLRYRQKLIKMRTMTKNSLQALALQSGLAKGSHLFSKAGLQELRRTPMSPVMQWQRDQLLQLLEPLDERLSQATLWLQQQSAGDQRISRLRTHPGIGLLTALCLVHALEPVTRFRNSRRVVGYAGFDPLEDSSAERIRYGAISKAGPRVLRYLLNEAAHSSVKKDEELKRFYKRLAERRGRPKAKTAVARKLLIRGYIMLRDEIDYAEFQRRAVAARLARQYRGTPCPCS

SEQ ID NO: 161682 - protein, 321 aa, unidentified
MTHVVGIDVSKAKLDVALCRPDGKFRSKVVENSPSGFVTLTAWLGTHGVTQAHACMEATGTYWEAVAEYLVDAGHTVSVVNPAQIKAFGGAGLVRTKTDRVDARLIAAFCVAQQPPPWQAPPPAVRALRALVARRDALDAMRTQERNRLGVAAATVRPDIEAHLTYLEQALTDIEAAIRQQIDDDPGLGTQRALLDSIPGLGDKTIPTLLAYYGGPLRFDTAKQAVAFAGLDPRQHQSGSSVRGKPRLSKVGHSRLRKALYMPAMVATTRTAWGRALKRRLAAAGKPPMLILGAMMRKLVHVAYGVLRSGRPFDPALHQTA

SEQ ID NO: 161683 - protein, 411 aa, unidentified
MIKENYIYVGIDLHKETHTAVMIDCYNQKLGEITFPNRPADFPKLVAKVKKCNTDGKTIVFGLENAYGYGRALAVWLIDKGYLVKDVNTAISHRQAKHRGAMYRKSDSDDAEAIALATLNMLDKLPDAYPNDAYWSLGQLVHRRDNIMKQRTRLVNQLHEQLCIAYPSYKQFFNDISRPTALYFWEHYPSRKYLKGKYVEDLRAELVPVSHNKCSTKTCEKILDAVASDKVKNNAYQDARDMVTLSIVSDLQHYDKQLAEVDKMLEQMYKMLGCTLTTIPSVNVITAVKILAEIGDIKRFSNANKLAQFAGIAPLHLSSSGKGKDVATKQGNRRLQATIYFLAIQMVQVSSKGTPRNSVVRAYYEKRKAEGKTSQQALICISRRLISIIYGMLKNGTEYRMPVVENAGENR

SEQ ID NO: 161684 - protein, 315 aa, unidentified
MSAVPCFVGIDVAKAQLDIALRPSGERWAVPNDASGVATLVDRVQPLHPTLIVLEATGGLERAATSALAAAGLPVVVVNPRQARDFARATGQWAKTDALDARALAHFADVIRPLPRPLPDAQTQELRALLGRRQQLIGMRTAEQNRLAGTSARLTQAIAAHITWLNTDIATLDDDLETLLRASPLWRENDDLLQSAKGIGPVCAHTLLLELPELGTLTRQQIAALVGVAPLNCDSGTLRGRRTIWGGRAHVRTVLYMGTLVATRFNPQIKVFYERLLAAGKVKKVALTACMHKFLTILNAMLKHRTPWKPQEVQN

SEQ ID NO: 161685 - protein, 403 aa, unidentified
MAKVIIGVDPHKMSATIEVVDTHGQLLGSGRFTTDKAGYAALRRYVSQFPGRIWAVEGANGAGRPLAQRLVEAGELVVDVPAKLAARVRLFDTGHNRKTDALDAHSIAMVAVRTSGLRVVAADGELEALRMLTDRRDELARLRVQTVNRLQRLLSELIPGQRKKDLSALQAKAMLATVRPRDIAGKTRRRMAAEELADLVAVDKKLKKINAELKAAVLARGSTLMDIHGVGPAGAARILADVGDIARFVDRNRFASWTGTAPLDASSGEQIRHRLSRAGNRRMNHVLHIAAIVQLRHDTEGRAYYRRKIAAGKTRMEALRCLKRRISDAVYRQLVADARAADNAEVRTGPGGHYGASQESSAVDLPPYIDTSDQPLPGPAAPTLQPASRPRKSPRTRTPQPTA

SEQ ID NO: 161686 - protein, 313 aa, unidentified
MSYTSRFVGIDISKSSLDVCVLPDGQMAAYQNTPAGIADFLTFVVSLEGIERLVLEPTGGYERHVVAALQAARLPVAKVNAKQVRQFARAGGQLSKTDRIDAFILADYARRMETRILLQRSSRERVLADFVSRYRQLSHMIVQEKNRREKASGQTKDWVEESLNFLLDQRQTIVDAMTACLKADADLGRKAEVLMSLKGIGLRTACFILADLPELGHMDKGKIAKLVGVAPLNRDSGLMRGKRMIAGGRRQLRDALYVAALPAIRFDPDMKAFFQRLKQKGKPSKVALVAVMRKMIIILNARIRDANATVLDT

SEQ ID NO: 161687 - protein, 356 aa, unidentified
MNKYIGFDIDSKKTVCCIVKVGEKDRYATIGSDIGSMRKFLEAEKQNSYRVELAFEISGQAGFLYDSLIGCVDAIKVANPSKMTWIYRTAKKNDRIDARKMAVLLSIGEIPEVYMPSKEVRQWRETILHRKKIVCKVVSVKNRIRATLKSQGYSKPRLKGGWWKKVNRLWMRSVCQASIGVSDLWHMHLCNLLDELELLERQLKQVTDYLDKYLSTHGGGSFLMSIPGVGPRTTEAVLAYTDNVRRFGNYKQYCSYFGLTPKLDESGSTRRMGHISKRGPSVVRWVLCESSWKVIRKSKSLHDFYERVMAGQQSRKKIAIIAVARKLLCIMRAMLMTGEFFNEELVNRVDRLLKTT

SEQ ID NO: 161688 - protein, 406 aa, unidentified
MRYYIGVDWADTEHAVWVEDDTGAQVLSRRLAQTPEAFAEWGRWLDERSAEGLELWAAIEKPDGRVVDFLLDHGVVVYPVNPKALDRARDRFRMSGAKSDPFDARVLGGFLRTDHRHLQPLRPSSEAAQELKGLTRDYARQVRQQTRLLNQLTVTLKEYYPRALDICDDLKSQWAREFLRVYPTPTALQALTERQWQRWARSQRLSAERTAELWAVLQRPQLPIPAHVVRVKARRLGVLRSQLQVTSAAVSTYREAVEDFFAGLPAAQWAASLPGGRSGALVPALWAELGDAPGRWQSRQHLQGHAGAVPVTDRSGKAVVVKFRFACNTHLRYAVHHLAFVSLRHSEWARAYYDRCRRRGHRHHHALRALAAKWLKIIFVMWTRQVPYDEQYHLASIARHQLRQPA

SEQ ID NO: 161689 - protein, 365 aa, unidentified
MQKISTTQTSEKNIFEGQLTIGLDLGDRSSAYCVLNAAGEIVLEHKLATTPEAMKQVFGSLPRCRIAMETGTHSPWVSRLLTALGHEVIVGHAQKVRLITKSRRKDDRLDARTLARLARIDPELLSPVKHRSAQAQLHLTEIRARAALVSTRTALVNAARGLVKSYGERLRKCHTQQVGREMTGELSMGLREALKPLLQEVESLNERIQEYDQRIEKMAKETYPETALLKQVKGVGNLIATAYVLTIEDPHRFRKSRDVGCFVGLQPGRRNSGESEPQMRISKEGDEYLRTLLVQGAHYILGPFGKDSDLRRWGLTLAARGGKNGKKRAVVAVARKLAVLLHRLWVSGEVYEPLRNSQKAMSTAA

SEQ ID NO: 161690 - protein, 345 aa, unidentified
MQNMYYIGLDVHKRTISYCVKDGSGTIHAEGTIPATRFDLDRWMRTLPQLWTAAMEATVFTGWIYDHLQPHAAALKVAHPLMLRAIAAAKKKNDRIDASKICDCLRCDFLPECYMASTAIRERRRTLRYRNLLVRQMVQMKNKIGMLLMEAGVSYNKQRLHKAGYFRELLATNQDIDEGLCSLLRLCRETVVRLQKTESALVRSLERDSLLMDRVERLMTIPAVGPITALTWALEVGEAQRFSSIKKAISYCGLCGEEKSSADTVQRTPLSKQRNKHLQTTLIEAAKMAPRNSPELAMLYDKEKQKGNANRATLAVARKLVAYLMAVDRGQRNFQVVETSNCIAA

SEQ ID NO: 161691 - protein, 525 aa, unidentified
MSYHVRRTGRVQRKAKPRRQSLQKPNGMISPRVQKVGGEHFAIVCVDPAKHRSEWMMADYFGNLLIEPQTVEHQSVFFNVAVETIRQAQQQHDIRDTIVVVERTGNYYLPPKRAFARAGFETRVVHPFATKQYRMPADPGNKTDENDLYAQHRAAVAGFGLCELELEPPYRDLQLRARHRRDLVQKSAALACQIRDHLHLAMPGYAGLYSGLFESPTALPIAVHCDSPAKLLQLGRSRLSRYLSKNKVRHQLRTIDKVLAWAAQATDDPIQDGPMHHAIWTDLYELYQHFQRQITALERQLASDVVRIPYVRLMAISGINVVSAAELAAEMGPISRYANANAITGRAGLFPSRYQSDQTDNADGELIRQANRRLRCVLMGIADNLACHCNYYRGQAELDIARGMDKRAIRVKIAKRFSRLALACVAGDEPMRHPCFQKPDSILDKLRRFHQEHGTPMDVLLADLEAVVAQLPYNTCNQEAKIVADVLEQQTSRRRGPKPIGDVLPAVLARLNIRIAQANKNRDRS

SEQ ID NO: 161692 - protein, 326 aa, unidentified
MEHELHYIGIDTAKEKLDVDVLRPDGRHRTKKFANTTKGHDELVSWLKGHKIDHAHICIEATGTYMEPVAECLYDAGYIVSVINPALGKAFSQSEGLRNKTDTVDARMLAEFCRQKRPAAWEAPHPLERALRALVVRHQALTDMHTQELNRTETAREVQRPSIDAHLLWLEAELKRLEKQIKDLTDDDPDMKHRRKLLESIPGIGEKTSAVLLAYIGLKDRFAHARQFAAFAGLTPRRYESGSSVRGASRMSKAGHVSLRRALYMPAMVATSKTEWGRAFRDRLAANGKKGKVILGAMMRKLAQVAYGVLKSGVPFDASRHNPVAA

SEQ ID NO: 161693 - protein, 345 aa, unidentified
MNIIRVGVDIAKSVFHVHGVDRHGQTQWQGKYARNKWLTALSRKVPAGAEIGMEACASSHYWARELQKRGYFVRLIAAQFVKPYVKSNKNDRVDAEAICEAMSRPNMRYVAPKTVAQQDVQAAHRIREELVGQRTAKANQIRGLVGEYGVVAPVGIQQLRHALPEWLEDAENGLSESFRVLLHGLADDLRYLDDRITALDERITESVKQDPVARRLMTLRGVGPLTASALSGALGDGKAFRKGRDFAASLGLTPRQHSTGGRDRLLGISKRGDSYLRKLLVHGARAVLRHIGGKDDGLSYWLQALVSRKHVNVATVALANKTARIAWALVHNEAAYDEGLAAAGV

SEQ ID NO: 161694 - protein, 339 aa, unidentified
MPLYAASDLHANNNFLAIIEENGKRVFKGKLPNDPERILAALHPHQKDLVGIVVESTYNWYWLADALIGEGYQVHLANPSAIQKYSGLKHADDQHDAFWLAELLRLGILPEGYIYPKEERPIRDLLRKRGHLVRLRTSLIISLQNIVSRNCGVAIQVNDVKRLKEDRISPLLEGNEDLALAGRVSKETIDFLTRQIRAIESVVERKVQLKEPYRYLLTIPGIGKILALTIMLETGPISRFAQVGNYVSYCRKVSSQWESNGKAKGKGNKKNGNRYLAWAFSEGAELARRFDATARAYYDRKKQKSNFMIAHSALAHKLARAAYYIIRDQVPFRPEKLFA

SEQ ID NO: 161695 - protein, 351 aa, unidentified
MLIIGCDWHPRYQIVAWVEEETGEVMKRRLEHENGEARRFYASLPPGAIVGIEATFPSHWFEGLLAECGHELWVGDAARIRASEVRRQKTDTRDAEHILDLLLAGRFPRIWVPSIKERDLRQLLVHRMKMVRTRTAVKNQLHYLAMSQGVCRKRKLWSARGRAELEDLRLLPWASRRREELLRWHDQLDRSVEELDRAVEEAGRGRAEVALLRTHPGVGAVTGLAFVLTVGPIDRFPNSRKLVSYLGLNPSEHSSGGRQRLGAISKQGNRMLRWLLVEAAQTAVRRDPELHRTYQRLKFRRPSGVAKVAIARRLAVRLYWMLRAQVDDAQLVRMSGSPSSAVVPSKSGSRV

SEQ ID NO: 161696 - protein, 382 aa, unidentified
MRFYTQQHPFYCGIDLHARTMYLCILDQAGETLLHRNMPATPEALLKAIAPYREQIVLAAECMFTWYWLADLCADHGIPFVLGHALSMKAIHGGKAKNDKIDAHKIAVLLRGGMLPQASVSPAEMRATRDLLRRRMHLARKRGALLAHVHNTNSQYHLPAIGTKIASKANRDGVAERFADPAVQKSIEVDLALSTYYDELLRDVERTIVTTAKHHDAQTLYLLQTVPGIGKILRLVLLYEIHDLARFPRVQDFASSCRLGKCARESAGKRSGTSGSKIGNAHLKWAFSEAAVLCLRDNPAAQKLLARFEKKHGKGKALTILAHQLARAVYDMWQRQTAFALDTCLHGEGRGVGALNAELDSHGMHLLRHARYGVHHCVAARS

SEQ ID NO: 161697 - protein, 481 aa, unidentified
MKSKSEEKNRATNHPTPHHWHEMNRKQRREMMRKMQREDLRLEVIHPDAAGIDIGNESHYAAVPPSRDSQWVRRFGCTTAELKAMAAWLQQCRIRTVAMQSTSVYWIAVYDILEAAGLEVYLVNARDTKNLPGRKSDVQESQWLMKLHTYGLLRNSFRPSQEIRTMRTYWRQRHDLVQSAGRHIQRMQKALTQMNIQLANVLSDVSGLTAQAIIKVILAGERNPHKLAELRDRRVRASQEKIAQDLEGHWQEDLLFVLKQEQEGYEFCQQQLAACDQQLAQDLQQREDRSQGASVPEETRKGRLQKKKKGKPQFDLRAELFRMSGTDLTRIDGLDVLTATTILSEAGLDMSKWENEHHFVSWLRLCPDNRISGDKVIGKGPLPTNNRASIALKIAASTLRASNSYLGAQFRRLRSKRGAPIAIKAMAAKLARLVYRMLRYGMQFVDRGAEFYETQHHKLQVHHLKCNAARLGFQVVEAHAA

SEQ ID NO: 161698 - protein, 322 aa, unidentified
MGSQTFIPRDYDVFSGLDVDKRSISVTFTDHDRFLKSLRMPYSAEHLLNHVRKHFPNKKVAFVYEAGPTGYGLYDGIVAQGYPCLIAAPSMIPKAPGQRVKTNRLDSKALSENLRGGQLKSIHVPSALYRELRHLTQLRDVLVSELVGMKQRIKSLLLFEGIEFPPAPPGSQWSFMVKDKLRKLPCSGTVRFKLDQLLDSLEFNEKQVLKAIREIHRYCQNDPELSQCMKYLMTLPGIGWITASQLLARIGDWRELNNIRQLGGFLGLVPTEHSTGERTDRGSITRTGDERLRSKLIQASWSAIRQDGEQGSVSTRMRRPLR

SEQ ID NO: 161699 - protein, 411 aa, unidentified
MEVVHLRCAGLDVHKATVVATVRVPGSRRGERHSETKTFGTIARGLTDLAQWLVGHGVTDVAMESTSVYWRPVYAVLENTVHVILVNARHVKMVPGRKTDVRDSEWLAQLLECGLLRASFVPPPAIRDLRDLTRLRKTLIRERGHHVNRIEKTLELAHLKVSGVVTDLMGKTGRAILQALSAGSDDPDQLADYAQGLLRKKRAALREALVGRLTPHYAFLLQQHLALIEALDTHIATLDARIDEAMMPFAEAAALAQTMPGVAGRAAQAILAETGVDMTPFPTAAHLASWARLCPGNHESAGKRQPTTTGKGATWLRATLQQVAWAAIRTKQSYYRALYHRLKARGGAKKAIVAVQHALIVALWHMLKHRVVHHDLGADYFERRDPARLRRHHVRRLEQLGYDVVLVDKAA

SEQ ID NO: 161700 - protein, 328 aa, unidentified
MQEGIKIKEDGSLEATPTFVGIDVSKARLDVFARPMGSRESVANEEAEIKTLVERVRELSPALIVLEATGGVERAVTRALASAELPVVVVNPRQVRDFAKATGQLAKTDTIDAEVLARFGEAVRPALRPLPDEVALELRALIARRRQITEMIVAETNRLSGASQGVRKRIDAHVRWLEAELQRADKDLDQSIRQSPIWRENEDLLRSVPGIGPVTSRTLLAELPELGRLNRKQIAALVGIAPLNRDSGIMRGRRSIWGGRATVRAALYMAALVASRRNAVIRTFYRRLRNAGKAPKVALVACMRKLLTILNAMVKHKTRWSEINLQTS

SEQ ID NO: 161701 - protein, 322 aa, unidentified
MSKVKKIVGIDVSKDTLDVYGVHYGSKNYLNAPKGFRSLVKDFGIDSHYVLEVTGAYSYQLALYLYESGVKVSVINPLIIKRFMQMKLQRNKTDKSDAKMICDYGENQDLTQWEPDPSYVVDSKSLYSSLELYSKQSTACKNQLHSLKSRGLVSGSLIRSLNRQLKHLKSEMVTLEQELEKIVKEYQGDMYARLKTIPGIGSKTAALLIVSTNGFKGFESNGQVSSYFGLAPIERSSGSSIRGVSRISKFGNKKVRNHLFLCSFTACKCNPQCQALYERIVNKGKSKKLALIAVANKLIKQAYGIAKSELAYDANYRSVLVK

SEQ ID NO: 161702 - protein, 446 aa, unidentified
MKEKVSMNVVNPKAAGIDIGSRSHFVSIGQNAKDVREFGVYSPDHQDLIEWLMNVGIQTVAMESTGNYWQRLFSALQLAGFEVLLVNGRQIKNVKGKTDVKDCQWIQKLHSLGLLSGSFLPSTEIEKMRNYERHRSWMVEQCAKMSNKMQKALRLMNIRLDIAISDITGKTGMAIIKAIIDGERSGEKLSMLADPRVRKSKQEIAKALQGQWDAGLLFELKDCYELYCDYQQRIMESDLQVEQLLKSLPKRDGGSKSIQRAKTSKRPHKNQHRINIHEYSFQYLGVDLFAIEGVKQQTIMSFLSEVGMDIVRFKTAKNFVSWLRLAPNNKISGGKTLSSRTPKGKNKMAIALRNAANTIGLMKKGVLKRFFDRIAYKKGRAAAVTATARKLAVIIWNMVIKQQQFQPIDETSYNEWIRKNVIDNINNKMRRMNLSINDLALSKIKS

SEQ ID NO: 161703 - protein, 354 aa, unidentified
MPKSASTQIAVIGIDVGKNSFHVVGHDKRGSIVLRQKWSRGQIEARLANMPPCLIGMEACVGAHHLARKLSGLGHDARLMPAKYVRPYAKGQKNDFNDAEAIAEAVQRPTMKFVATKTADQLDLQALHRVRERLVSQRTGVINQIRAFMLERGIAVRQGLRFLRAELPIILASRTDVLSPRMLRVIEDLAGDWRRLDERIDNLSREIETIARQDAGCGRLMSVPGIGPIISSAVVAAIGSGDVFSKGRDFAAWLGLVPKQISTGDRTILGKISKRGNRYLRVLFVQAAWVVLIKPMSWQRHGLKSWIEAAKKRLHHNVLAIALANKLARIAWAVLAKGRGFEATRTINGSTQPA

SEQ ID NO: 161704 - protein, 447 aa, unidentified
MIKLYIGLDVHKASTSIGLAAADGSEPAYYGKCSSTLRSTEETLKRILKRHGVEQAEVRLCYEAGPCGFVLVRRLLRLGYDICVIAPSLTPKAPGERVKTDRRDALKLARLLRAGELVVVHVPEANDEAIRDVGRARTDAVDDLRRARFRLGAFLLRNGHGWTGKARWGATHMSYLRGLCLETPAHKLVLEEYLLAIDDAEARVTRFEQHLESLLALWDRAPWARSVQGFRGFRLVGSMIVSSELGDLTRFDHPRQLMGFVGLVPGEDSSGTRRRQGSITKCGNSHARWMLIEAAGSYRLPPRVSPELSKRQAGLSKAVREVSWRAQNRLHKRYHRLKRRGLHENKIKVAIARELLGFLWELAHIVRAEESGCDQRAPSAEFSQASVAPSVGSKKAGALRPRPRPMVATPEYPSESCSPAELSSVCSDALSNHQEETQNKDKKQYNA

SEQ ID NO: 161705 - protein, 323 aa, unidentified
MGAVVNQIPSSFASPLFVGIDVSGPFLDIAYHGSVETFRLPNAPEGFAELINRLLPLKPELIVLEATGKLERAVLQALCQAGLPAVAVNSTWVREFARSAGQLAKTDRIDARVIARYGAVMKPKVRPLTDEQTQQLQALILRRTQLIEMLTAEQNRRKRAHKSALPSIDEFIQFITQRIKDADRDIDSFLHTNELWRKNEALLRSTPGVGKTTAATLIAFLPELGSLNNRQIASLVGLAPFNSDSGTHRGERHTKGGRHFVRRALYMDCVAAQRANPYLKAFCDQLRARGKKTKVAFVAGMRKLLTQLNAMMRDGTAWNPPKP

SEQ ID NO: 161706 - protein, 404 aa, unidentified
MNAVGIDVSKGKSTVSVLRPFREVVATPFDVAHTGSDLKVLADFIKKLQGETRVVMEATGNYYEPIARYLHEQNIFVSVVNPVLISDFGENTLRKPKTDKKDSLKIASYALNYWTDLKEYVPQEDLRKSLKLLNRQYQQASKIKTMIHNNLVSLLDLTFPGINKQFSSTSRESDGHEKWVDFVLAFPHCNMISKLTIKAFSRKYKKWCNNNSYYFSETACENIYDFSKECVSSISSEESNGFAVIQAARMLNSAIENCHAIQLEMNRLAARLPEYNTVMSMYGVGKVVGPQLIAEIGDPRRFHNRKAITAYFGYDSENYDSGQKVSVSNSMTKKGASALRRTLFIIMQILLKKKPTDNPVYDFMIKKQSEGKHYYSYMNAAANKFLRIYYARVKEVLTTAEVTT

SEQ ID NO: 161707 - protein, 356 aa, unidentified
MIRKIRTKSAAIATLGIDIGKNTFHLIGLDKRGAIVLREWLSRAQVQVRLANLTPCLVGLEACVGAHHLGRRLQSLGHDVRLMAAKYVRPFCRKQKNDFNDAEAIAEAVTRPTTRYVALKTPEQLDLQALHRVRERLMSHRTGVINQIRAFLLERGIAIRQGWRALRSELPRALAMTDKLTPRMVHLVEDLASDWRQLDARIEAVSIEIEELAHADEAAVRLMSVPGIGPIISSATVAGIGKGDVFTKGRDFGAWLGIVPKQTSTGGRPILGRISRRGNRYLRQLFVQAARVVLLRPKNWELYGLKHWIEAAARRLHYNKLAVALANKLARIAWGVLQSGGTFKTRRVNNDAPQTA

SEQ ID NO: 161708 - protein, 418 aa, unidentified
MNVKATRIKKQVNVENQAIKLLSKEELGIKIEVIKKELRSYTWRDLETNGKFAKNDKLSFITDDMLIAGCDIGSETHYIRAIDVRGRELSSGAFEFSNTSEGFANAKAWVLALAAKNDKKQIVLGLEPTGHYWFALAAWMVSNGISVVQVNPYAVKQSKEIEDNSQLKDDRKDPKLIANLVKDGNYGMPYLPEKVYADMRRLSMFRDQLTEDRIRNINRLHRELKIYFPEYMDAFGKIDGAFTLEVLKVSAIPSDITALGAEGIKNIWHNEKLRGRGYSRANEIVSYAEKSVGLTDGIDAGREAVKWYAEQILKLVACSSGKHKGQTKISHRGRKRLRYWLFQAAKSAVSHADEFKQLHEYYTTRTNNPLKKMQSLVVIACKILRVIYTILKTGTTYDPQKLLEDIKRPTASHAPMAA

SEQ ID NO: 161709 - protein, 411 aa, unidentified
MEVVYEHCCGLDIHKKTVVACVVVSGSGKQPHKEIRTFNTMTADLLELADWLTAQRVTHVALESTGVYWKPAWNVLESSFSLLLVNARHIKQVPGRKTDVKDCEWIADLLRHGLLRASFVPDRPQRELRELTRSRTTLVRERSAERSRIQKTLEGAGIKLGDVASDVLGASGRQMLEALVRGVTDTSLVADMAKGSLRGKRPQLERALTGEFGAHQRFLVGQQLAHLDGLDVLIDQLSQEIGERLRPVQDKIERLDAITGVGLRTAQVFLAEIGTDVKRFPTAAHLASWAAMCPGNNESAGKRKSGRTGKGNQWLRTALVEAAHAVSHTKDTYLYSQFHHVAARRGKKRALVAVGHSILRIIWHLLEHDCEYVDLGSRYLEERDRQQIQRRLVRRLEDFGYKVKLEPASAA

SEQ ID NO: 161710 - protein, 407 aa, unidentified
MRLFAGDDWAQDHHDIEVMDEAGKVLAKRRLPEGVAGMTQLHELIGRFVSGDVDDAEVVIGIETGRGPWVGALVAAGYMVYPVNPLQASRYRERHGVSGAKSDRGDAHMLADMVRTDSHQLRPAAGDTPEAAAIKVVARTHKTLIWDRTRAVQRLRHQLREYFPAALAAFEDLDAPDVLELLGKAPDPDRAARLTRAQVSAALKRGRRRDIADKTTAILAALRGEQLTQPGSLTIACAATVRSLVVVISTLNEQVKALEGEVGEHFGRHPDAEIYRSQPGLGTVLGARVLGEFGDDPHRYADGKARKNYGGTSPITRASGKKKVVAARFIHNDRLLDALMTWAFTSLNASPGARAFYDAQRAKGLEHNDALRRLANRLVGILHGCLKTRTLYDETTAWSHRESSLAA

SEQ ID NO: 161711 - protein, 421 aa, unidentified
MGKLIERCAGIDIGKRFLVCCVMTGAAHEEPRSETRRFDTTVPGLKRLRNWLNEERVTDVVMESTGSYWIPVFNLLEGHVRVVLANPEEVKNRKGHKTDRKDAGHLADLLRHNHVKSSYIPAEPVRQLRDLTRRRVQLTQDATRERNRVQKLLEQVNVKIGSVLTDVFGVSGLHMLLALLDGRAAPEEIAGLARGSAKRKTPQLIEAIEGNRMSDHVRFLIRGCLRHLACLEEEVEELDTEILRRMQLFTFQKAFTLLQTIPGVGQLSAATILAETGPDLDAFPTIEQMASWAGLCPGNRESAGIQKGPQTTHGNPYLCTALVQCAWAATRKRDSVFRSRFQRLAPRRGEKRAIIAVAHHMLIILYCMLKRGVPFLGAEHAPKQRRRERRAHHHLRCLRRLGFSVEIRLSSESTPPGTISR

SEQ ID NO: 161712 - protein, 337 aa, unidentified
MDYFAGLDISMDETHVCVLDREGAVVRESKAASTAEAIAGELSKAPSCRRIVFETGRMAPILFHGLNQLGLPVVCVESRQAYQALKSLATHKTDRNDARGLAHLARTGFFKPVHVKSLRAHALRSLISARKKLVGQRVTLENQIRGLAVVFGIRLPRALTTAFIDQALKASEGVAGLSAAMRGLSAARVAVMTAVAAIDADIRRMTRASAACRRLMTIPGVGQLTALAFVAAIDDPSRIRRSRDIGAYLGLVPRRYQSGEVDYTGGISKCGDGRVRTLLYEAANVMLTRYKGQLKLKDWAFAIAKRSTMRKARVALARRLAIIMHAMLRDGTEFVPT

SEQ ID NO: 161713 - protein, 361 aa, unidentified
MALTSWLVAGMIPGVDREPLKKIAPDPEELLQLLYRWRDEAIKAGREITRIAVAYETGRDSFWLARWLRARGIDAHVIHATSVAISREHRRAKTDRIDTAMLRRGFLGWLRGEPGHCSLAIVPTVAEEDAKRPHRERESLVQERTSTVNRMKSILIQFGVRNFNPVLRKASEKLDAVRTPEGIPLPPNAAAALRRHMERLRVIKEQIKAIERTRLQRLQRDPADKMNAMVFLLVRIIGFGVETAEQLVHEILFRDLRDRKAVARYAGLTGSPDESGSKRREKGLSRSGNGRVRTILIQLSWRLLKLQPGSELVLWYQKRTADAKGSRKPMIVAFARKLIIALWRYVNTGLLPEGFELKPAA

SEQ ID NO: 161714 - protein, 408 aa, unidentified
MRIIGLDVHRTFAEVAIREHGRVRPAGRISTTTAGLQLFARSLTHRDEVVLEATCNTHAIARLLRAHAGRVVVSNPLRTRAIAEAKIKTDKIDAAVLTQLHASGFLPEVWMPDATTEALRRQVSRRAQIVRHRTRLKNQIHAILHRNLLPRCPASDLFGRKGRAWLTTQSLPADERAAVTSLLRALDHADEDLTELDRDLASSILEDAGVRRLMTIPGVDFAVAVGLVAAIGDVTRFRSPQKLVSYFGLNPRVRQSGLQPAHHGRITKQGRAHARGMLVEAAWVAAKTPGPLRAFFVRVRGRRGHQIAAVATARKLAVLTWHLLTKQQDYAWARPSLTEQKRRALELRAGQPAERGRRGRAHAYNLTTLRTRERAIGEQAERAYQTLVTHWRPQRSKRGTGATNAARR

SEQ ID NO: 161715 - protein, 350 aa, unidentified
MAAIMVPEQRVVVVGVDTHSEVHVAVALSELGVRLSAISVPTTPGGFERLVRWAESLGEVRAFGIEGPGSFGATLARHLRDRGHAVLEVARPDRRIRREEGKSDTIDAEAAARTLLSGKDIGEPKSADGCVEMIRSLRVARRSAMKARTQAANQLHALVITCPEPLRSRLHRLPVGALAERAAGLRPGPVDSPQAASKLALRHLARRHVALGAEIADLDRELDVLVAKAAPGLVGMMGIGTDVAGALLVAAGDNPDRLGKEAAFARLCGAAPLPASSGKTNRHRLSRGGDRIANNALWRIVLVRMRYDERTRTYVERRTKEGLSKKEIIRCLKRYVARDVYRRLEGVDSL

SEQ ID NO: 161716 - protein, 381 aa, unidentified
MYYIGIDISKFKHDCAVIDDSGEIVTPSWSFTNDAEGFSQLKLLLNSLDTETRIGLESTGHYGMNLKLFLESNNFSFMEFNPLLINRFVKSKSLRKTKSDSIDCMMIAHYLMTVEYKPYPSSFYHTEKLKSLTRFRDSLIRFRSRQLVELTNILDKVFPEFKPFFGSRFSVTALYILSNYSSPEKIANMNSKSYEALRKLSRGRFSTVDFAKLKQLAKNTIGTTEDYLLLQMQIVLDIYRQLDSKVDETEVSIKECVSDMNPPMLSVPGIGIESAAVILAEFGDFSKFKNASQMLSFAGLEPGYFQSGTSETTGKMVKHGSSYLRYALMNCAQTVVNYEPTFAMFYSKKRAEGKPHRVALLKSCYVSSTHCKLKTLHMMPI

SEQ ID NO: 161717 - protein, 384 aa, unidentified
MHQATTLPERTCSRGDCATLFVSLELSRSTWVATTLAPGSSKMSKYTLVGGDGHQLLDLLARLKSRAEQRIAAPVKVVAIHEVGLDGFWIHRLLEANGIESQVVDPASIAVPRRHRRAKTDAIDGETLLRTLMAWQRNEPRVCAMTVPPSPSEEDHRRISRERATLLQERVRHTNRIRGLLFGQGITNYNPLHKNRRENLEALRTGDGRSVPAHLKSQILREIDRLELVLRQIGEVETERDEMLQLAQPSSPAALLMRLKGIGAEFATVLYLEGLFRQFENRRQLAAYAGLAPSPWKSGSIDQEQGISKAGNPRLRTTMVELAWMWVRYQPGSALSCWFRQRVGSERGRIRRISIVALARKLLIVLSRYVSHGEIPAGAVMKAG

SEQ ID NO: 161718 - protein, 269 aa, unidentified
MEIKSIGIDLGKTTFYLIALGSRSQVVIRKKFSRSQLLAYTANLPGSLIGMEAGVGSHFLGRALREQGHEVRLIPAQFVRPFVKSNKNDYRDAEAIAEAVERENMRFVPIKTEDQLDLQALHRVRDRLVARRTSVINQIRAFLLERGISFRKGPASLRRQMPEILENADAKLSAAMRRLLDFLWQEWKGLQLQIESLNTELEQIASSDPSCVRLQQIPGVGPLVSTAVVSAIGNGAAFKKGRDFAAWLGLVPRQWSTGGKAKLLGISKR

SEQ ID NO: 161719 - protein, 372 aa, unidentified
MKKNNTSSARPKKARSNASPKTTTKLTVGIDLGDQNSAYCVLDAEGEVLSEGIVRTTESGFAQQFQNMSPCRAALETGTHSPWVSRLLHSYGHDVIVANARQVRVIYESDRKNDKVDARTLARLARIDRSLLHPIRHRSEKAQADLAMLRARDTLVQVRTKLMNCARGMVKSVGGRLPGASGECFAKRVREHIPATIRDALTPVLDQIELLAVQIREYDKRIEQMAKTEYAQTQLMRQIPGVGVITSMAFTLTIDDPHRFGKSRDIAGYLGLLPRQGDSGDSKPQLSITKAGDHMVRRLLVGCAHYILGRFGPDCDIRRWGLSLMVRGGRNAKKRAVVAVARKLAVVMHKLWVTGEVYEPLREADQGKAAAA

SEQ ID NO: 161720 - protein, 368 aa, unidentified
MAGRVQVVPDEPHERVFGRVAAVDVAKKSGVVCTRLPDSAGRQVARWWAVTATVSEVSGLAAELAGAGIEKVTLESTSDYWRIWFYLFEAAGLDVQLVNASQARQLSGRPKTDLKDAMWLARLTEMGLLRPSFVPPAGIRALRFYTRTRTRLVQDRTRCWQRIEKLLEDALIKVSSVASKMTTLSVRDMLEALIAGERDPQVLAGLARSRMKAKHDALVQALEGRFEDHHGEIVRMLLDQIDHLVSWAGLCPRTIQSGTRTKQGKKPGNTYLRGYLGQAAAGAAGTATFLGERHARIARRRGPARAQVAVARSIAVIIWHLLNDRDARYHDLGPDWHQRHTDKNKKTRNYIRQLEALGYTVTLTQTAA

SEQ ID NO: 161721 - protein, 325 aa, unidentified
MEKLYGGIDIHKEKLAGCIMDRDGNITREHSFPSSKKAVERFLCGIPNSGITIAIEACGMWRGTYKILTDMGYEVKLANPKKTHDIACKKKTDRVDAKILADLLRTKYLPEVWIPNEQTLKFRDLTRHKSNLTRLKTQVQCKIKSYLLRKGVKYGKLWNEKTLSTLAEEDQNIQNLINVYNSLKKEEKEVMKRIKQIARNRKETTLLMSMPGIAEFSSLMILAEIGDIQRFRSPKELVSYADLCRGIYQSASTERSVRNTAVNKWLKWIIYECSGRAIMLDQRFQQYFYPIQKRKGANTARRATARKMLTIIWYMLTNKETYRAS

SEQ ID NO: 161722 - protein, 412 aa, unidentified
MSVEHETIDEKRTPFTAGIDWASADHAVAVVDAAGVQQDRFLIPHTGAGLKQLVRRLRRAGVGEVAIERPDGPVVDALLEAELTVFVIAPNRLKNLRSRYGSAGNKDDNFDAYVLADTLRTDRARLHPLTRDSDATTTLRMTVRARQDLVAARVAMANQLRAHLQTTLPGAIGLFRDIDSTITLAFLTRFPSQDKADWLSRTRLGNWLRSTGYNHLAKLDQLWAHLDNAPAGTRGPEAEARAQITVAMVAGLGALRAQIKALEEQIAIQLAQHPDAAIFTSLPRSGTVRAARLLAEIGDARGRYPTPQSLVCLAGAAPSTKQSGKVKVVTFRWAVDKQLRGAVVDFAGDSHHDNPWAADLYQRARARNHDHPHAVRILARAWLHVIWKCWQDGVPYDPAKHHALQRLLATTA

SEQ ID NO: 161723 - protein, 385 aa, unidentified
MQASTVGTPTAGHCGTIFVSIELSQKSWLVTLHSPDRDRISRHRLEGGDHTELLALIEKIRARAAEKLGSALRVVSCYEAGYDGFWLHRLLMAVGITNLVFDPASIAVEQRSRRAKTDRIDGELLLRTLMAHLRGEPRVVRIVRVPSVEQEDARRASRERDRLVKEQTGHTNRIKALLRLLGVAVGYPRRRDWLNWLERQRDWQGQPVSPHLLAEVTREHARLMLVRQQLAALEQAQAAQTTPVPAATAERRDQLQRLKALGPSFANTLTNEVLYKDFRNRRQVGAYCGLTSSPWCSGGIDREQGISKAGNPRARLKAIELAWLWLRHQPESELTRWFRTRTANASKRIKRVAIVALARKLIVALWRYLTTGLIPEGAMLKPAEL

SEQ ID NO: 161724 - protein, 346 aa, unidentified
MFYAGLDLSRKRLDFHLLDEQGERVEVGAAPPDADGLATLARRVARHGQPLRAAIESMNGARFVHDQLELQGWQVEIADALKVKGLAPLACKTDRIDAWVLAELARRDLVPAIWLPDPDVRAERERARWRLHLVRHRSSLKQRVHAVLLAHGKPCPVSDLFGVSGRNLLARLALPEPWAGHLQASVRLIDELDREIDDCEAELRRLGAEHRYVPLLLSVPGIGWVLAYTIAAEIGDINRFPSPLKLAGYTGLCPRVYQSGESDRRGPLAKQGPKYLRWALVEAAVHASTHPVYRERYQRTKTRLGRQRGARIAQVDLARKLAEAIWHMLTRNQPFAPAGATDPLAA

SEQ ID NO: 161725 - protein, 407 aa, unidentified
MNAVGIDVSKGKSMVAALRPMGEVALLPQEFLHTGVGLEQMAYAILALGEDTRVVMEATGRYHEPVAAALHEYGIYVCVLNPLYIKQSGGGSIRKVKTDKADAMKIAKYGLDNWVNLREYTPMDTVRQQLKLCSRQYNLYMKTVVSLQNNLISLTDKTFPGVSELFSSPERTDGHQKWVDFVMTFWHCDCICRVSEKAFTERYQKWCKRKGYHCSVEKALDIYASSCGHFTTLPKNDNTKLLIISAAQQLLAGKMTLAALRAEMTRLARQLPEYDTVRAMYGVGDKTAPALMAEIGDVRRFPRRSSIVGFAGIDPGVDESGKHSAKSVPTTKRGSPHLRKTLYQIVCTYLKKSPADEPVYQFLDKKRSEGKPYFVYMTAAQNKFLRIYYARVKECLEAFDVQTTEQK

SEQ ID NO: 161726 - protein, 285 aa, unidentified
MTDSTPSSIFVGIDVAKDKLDLGRSDSDPILTVANNPAGIRQIVDSLRSKKPAIIVVEATGGLERPVLDALLEADLPVALVNPGKVRHLAIGLGILAKTDAIDARVLAKFAQLASPRLTEKRTKNQTELDALVTCRRQLTRTRTEQTNRRGSTSSRAAIKAIDAVIKAVNKQVEDLDRQIRKLIESDDDMDSIDKLLRTVPGVGAVLSSTLLAELNELGRTERRQITSLAGLAPFNRDSGQSQGKRSIRGGRTDVRSVLYMATLTAMRCNPVIIAFAERLKKPGR

SEQ ID NO: 161727 - protein, 353 aa, unidentified
MRAVFGIDVSKASSEVVILVNGKKGHGYPITKDVIGFNQLLGDLKTVHHPKTTGVYSRRPQAFLDDHGYAYTRLNPLDAKKQLDSLRVRKTDKIDAEKLAQPQFVLNRKTTYVQEEVYQNLRDLSRFYQNLTEDIVCTKNRLHKVLQVTFPELENILSASTGEQYWSLVMAFLFKELVLRLTQSELMAIIFRFTSKRISDKRATYLADKLRELAKQSYCAVKKTSPILEEVRYYAQELLRLSERRQAVLNEMVFLAQPLPEYNILLSIPGIAETTATSLIGELGDIRRFQSANQINAFIGIDLRHYESGNFLAKERISKRGNPYARKILFKCIHNIASASHTKPCHIADFYEK

SEQ ID NO: 161728 - protein, 343 aa, unidentified
MQDVATVGLDIAKQVFQAHGADASGETLFNTKIKRENVLEFFSKLKPCLIGMESCATSYYWARQLLEFGHDVRLVHTSYVKPFVKRGKTDANDAEAINVALTQKTMRFVPVKTLNQQAAITIFRTRSLFVSQRTQLVNALRGHLAEAGLVAAKGIQNYSKLLKLMESAADTVLPTVMKQALTDICDQIHRLNDLVTKLDKEIERRVQHDENACRLLTIPGVGPKTAMCVIATIPDIHRFPSGRHFSSWLGLTPRTHSSGGRSVLRRITKMGNSELRTMLYLGGTVIMMRDKKTPIGRWAARLRARRPYKVAAIAVANRLARIIWALLTNGGVYDLTHGREASA

SEQ ID NO: 161729 - protein, 406 aa, unidentified
MSITVGIDWAEAHHDVAVLDEAGRVLGRRCIDTGVAGFTELMTLIAEHSEDPTAVPVAIETDKNLIVVALQSAGLTVHAINPRAVARYRERHGQAGKKSDPGDAALLTDVLRTDRHQYRPLPELSERALAVKALARQHQEAIWAEHETLSRLRSVLLEFYPQALQAFPKLKHKAALTVLSAAATPALGERLSERRLVTLLHRCGRRNDPSLVEQILRDLHRPALRQSPAVEAALGTTTRTLIRIVLQMQAAVTELEAALAEVFDAHQLAPILTSAPGLGAVLAARVLAEVGDDRERFSTAGGLRAFAGTAPVTRASGRSHRVRARRVRNKRLADACHWWAFAMLTKSPGARAHYDRRRAVGDTHNAALRNLANKLLGRLWWCLRNEQPWNEHTAWTQARPAPAIAA

SEQ ID NO: 161730 - protein, 403 aa, unidentified
MNSVGIDISKGRSMIAVMRPFGEVVISPFEVRHTDSELSELARQLKSLDGETRVVMEATGNYHTPVAKLLHDAGLYVSVVNAKLVHGYGNNDLRRVKTDKKDSVKLANYGLDRWFTLPRYIPEEDTRLLLKNCYRQYRQYSKVQTVLKNNLISLLDMVFPNVNRLFSSPIRGDGSEKWVDFVAEFWHCRCVSEKSQKAFTNKYQRWCRKHGYNFSEAKAHTIHAEACGHIDVIPKSETTKLLVEQAVAQLRATSAALAALKHEMQALASMLPEYPVVMDMFGVGPTLGPQLMAEIGDVRRFYSKKALVAYAGLDAPPNDSGDVTGRHKSMSKVGASSLRRTLFLVMSVYLQNAPLDESVYQFMDKKRAEGKPYRVYMMASANKFLRIYYATVKAYLESLEHTA

SEQ ID NO: 161731 - protein, 474 aa, unidentified
MGKGSGGSGMTRGDRRRNARRERLRGLLPRDGAVIGIDLAEDKQAIAVVDHDVRVLARKTVRVKAFRLGQALDWAVAQARAKGFSRVAVACEPTGPRWLQVQRLCAERGLPLVCVQPLVSHIAREQQDYTTHKSDESDCVMIARLAIELHCYIPEELDEAWAHLRHLGRRRAQLITAATASVQRIRDFLSVAWPTVAETCAYPLESTTWLAAVQVVTSRCGGQPARLAEMGPEAFTAAVRGAQRGWGGQKAWGPICRRVFAALTDTEGVVASCRRGLLRRVADELGDLQRTRAQLRAVEADMVCVLDELGLGRLADIPGLSAVGAAAILAETGDPRRYDSSSSLVKHAGLSPAENASGAFAGQAHISRRGRPGLRLAVWRAVWPMLQYNPVMAAKYTAMTRAAGAAADAAAAADAGSRQVSAAAAAARARRAKARVACAASLLRWIYSMIVHDTSWDAAAASGQDAPRRQPEAA

SEQ ID NO: 161732 - protein, 345 aa, unidentified
MSAILAERVDIVIGVDAHTDTHTAAILTRVGTVVAEQTVAADPAGVSRLLSWVDELTGGQRRAWVIDGARSHGIGLVRQLRTTAETLIEAPRTKRRRGGKSDALDAAQVARAALAASHTAIPRADGDREALRILHVCRRHYTDTRTATVNLFKSLILTADDELRGRLRGLSSRKQIRQAAFLAITTDLDTLAQVRREYLRALAEQIITLDRLLADNLKQLRELVTAVCPALLKQPGVGPVTAAIAYASWSHQGRCRNDAAYAALAGVNPIPASSGRTIRHRLNRGGDRTLNSALHIIAKTRIRTHPPTHAYIARRTAEGRNPKEINRCIKRYIARQLFRIMQAAA

SEQ ID NO: 161733 - protein, 388 aa, unidentified
MDVLLSCVCGVDVHEKMIEACILKQKDIGIVAIRQQFSTMPRELSAFVKWLYENECYHIAMESTGVYWRPIYETIEREMPDHKSIIVGNAHHIKNVPGRKTDVKDAEWIAKLIMHGLISNSFVPEKDIRSLREATRTYKKFVGENSRYKCRIEKFLQTHGFKLSSVLKDIFCVTGRNILKSLARRGSLTIEDVASCMKGRLKSSAQEIFEAVNIPLTNTDQRILFLLLDRFDTAERYLEEIKLLIDEIAEPYSRQLEIIDSIPGIDRLSALLILAEIGGEPQKDFQTYGHLCSWAGLVPRNDESAGKIHSKKVLPGNQYLKPTLNQVAWVAVKQRETPFHDWFWLRQKQLGQKKAITAVSRKILKLIYTLISSNTLYNKDVALSNINY

SEQ ID NO: 161734 - protein, 365 aa, unidentified
MKKISTVRVNGNMIFKGHKLTIGVDLGDRWSCYCVLDEAGEILLEQKVATTPEAMKQIFEQIPCGLIAMETGTHSPWVSRLLKELGHAVLVAHAQKVQLITKSNRKDDRHDARTLARLARIDPQLLGPVRHRSAKAQIHLTVIRARAELVSARTGLVNAARGLAKSYGERLRKCGTQQVSRELAAELSVELREVLEPLLKEIESLNERIKEYDVRMEQIARESYPQVELLKQVKGVGTQIALTYVLTLEDPQRFPKSREVGCFLGLRPGRRDSGESHPQMHISKEGDPYLRTMLVQGAHYILGPFGEDCDLRRWGLKLAARGGKSAKKRAVVAVARKLAVLHRLWVSGEVYEPLRNSQKAMRAAA

SEQ ID NO: 161735 - protein, 309 aa, unidentified
MNYSHFVGLDVGKKTFDASLMSADEKELSHKSFDNTPTGIQSLLDWIAGYHLSLSKLLFCAENMGSYVTELSVSSVSMGFSLALVCPLTIKKSIGLQRGKNDRIDAKRIANYAVLHYRKLELYKLPDKDLVRLRGWIIIRDNLVKQKVSSIKLLETFSWMAKLADVTESISFLEEQLKSIKERILEVEEDMEQLIAASTSLYTNYLLLRSIKGIGIINAIVLLCVTDNFQRFDNPRKFACYCGVAPFEHTSGISIRGKTQTSSLALYEGQKKRNNPGILLSVLTINKRSAIAYYHLFSRLDMLDLNGVH

SEQ ID NO: 161736 - protein, 430 aa, unidentified
MKKADQSKRKLEAVTLRTLVVGIDIAKQTQWARFTDCRGMEHDKAFKFENNKNGFNAILSKVYQICNEGNFNGIIVGMEPTGHYWKPLANFLIRQAKITVVLVNPYHVKKSKELDDNSQTKSDKKDALTIARLVKDGRYFDTYLPHDIYAELRVLTTARISMGKRRKAIKNTITAVLDEYFPEFITVFKHPYAGKASMQILKSCPVPRFILELGVDGVLAEIKKAVKKTVGRKKAQQLVEAANESIGVDYGENAAAFKIRQLVEELELLERQFTSIENEMAEALTKTGLSGHLLSIKGIGIASLAMCLGELGDPLRFDDARQMSRMAGYNLIEDSSGKNKSGTCISKRGRKNLRCVLYKMAITMVATNEEMKALYSYLKTRDKNPLKKVQALVVISKKILTLIYILAKKKEDYNPELVFSDIRKSQLKAA

SEQ ID NO: 161737 - protein, 420 aa, unidentified
MPNIEIGVDSMVKENFIYVGIDLHKETHTAVMIDCYNQKLGEITFPNRPAAFLKLVTKVKKCNTDGKEVVYGLENAYGYGRALAVWLIDKGYLVKDVNTAISHRQAKHRGAMYRKSDSDDAEAIALATLNMLDKLPDAYPNDAYWSLGQLVHRRDNIMKQRTRLVNQLHEQLCIAYPSYKQFFNDISRPTALYFWEHYPSRKYLKGKSVEDLRAELVPVSHNKCSTKTCEKILDAVASDKVKNNAYQDARDMVTLSIVSDLQYYDKQLAEVDKMLEQMYKMLGCTLTTIPGVNVITAVKILAEIGDIKRFSNANKLAQFAGIAPLHLSSSGKGKDVATKQGNRRLQATIYFLAIQMVQVSSKGTPRNSVVRAYYEKRKAEGKTSQQALICISRRLISIIYGMLKHGTEYRMPVVESAGEK

SEQ ID NO: 161738 - protein, 409 aa, unidentified
MLFAGIDWASEEHAVAVHDDAGKSVAAFMVEHSAEGLDKLVARLRGMAEPAELTVAIERPDGRLVDRLLEAGHPVVAVSPNAIKVWREGEVASGAKSDPGDAAVIAEYLRLRFRKLQALRPFSDETRALRAAVRARGELVDQRTVVHNQLAAILDAFWPGAREVFADIASPIALAFLRRYPTPASAGTLGEKQMAAFCKKQGYSGRRSPAELIERLRKPPAGIVAGAEMGARKAAVLAYVKVIASLNAAIKDLDKEVFTRLGEHPDGEIFTSLPRSGLINAAQMLAEWGDCRQAYDGPDAVGALAGMSPVTKKSGKHKSVHFRWACNKRFRNALHTFADQSRHGSDWAAGIYDRARKRGADHPHAIRILARAWIRVIFACWRDGVAYDPAKHNAAAALAASSDSAPQAA

SEQ ID NO: 161739 - protein, 346 aa, unidentified
MSSKNTTIGIDLGDRRHAVCVLSAAGDIVAETDLVNTRECLTTFAQQHRGATFVMETGTHSPWISRLLESLGHEVIVANARKLRAISTSHTKNDQEDARMLARLGRADPALLSPVKHRSESAQRALLQLKVREALVRSRVNQINSTRFLLKSLGVLVPAGRKAMTFTRKLRAQVDAPIAALVEPLLGMIDVLNARIKELDQQLEAMAGEQYPITARLRQVPGVGPLTALGFVLTIESPARFPHTRDVGAYLGLVPRRDQSGNTDKQLGITKAGNTQLRCLLVNCAHYILGPFGPPSHLREVGERIAARGGKSAKKRAVIAVSRKLAVTLLALWKSGADYEALRHAA

SEQ ID NO: 161740 - protein, 355 aa, unidentified
MNSLRYVGLDVHRDTISVAVLDEGGRLITQAVLATRASAILDFMQGIRGSVHVTFEEGTHSAWLYDLLVRRVAKLVVCNPRKNALLKSGSKSDAIDARKLAELLRAGMLSPVYHGEQSGLEVQHLARSYQMLTEDTTRVMGRLKAVFRGQAVSCAGTKLYAKRHRDGYLEQLGTAGLRRRAECLYQELDALQALRREARRELIVECRKHAAAKWLQSVPFLGPLRAAVLIGRVQTPHRFRTKRQFWSYCGLALETRDSGEYRVVDGQVERRKKPVMIRGLNWNHNHELKNLFKGAATTASVCQGVFREFYLGLLDKGMQPEMARLTLARKIAAIALKIWKKGEAFDQGHVKSQAA

SEQ ID NO: 161741 - protein, 419 aa, unidentified
MSFKILKNNCCGLDVHKTWIFACIGITDSHRRTEYKQARFSSFTKGLQELCDWLAKYNCTDVCMESTGKYWIPVFNVLEKNNIWVTLSHPKYTKPQKGNKTDRKDAKWICDLYMCGMVKPSFIPPADIRQLRDLVRYRFKLTCMITSEKNSAHNCLTISNFKLDEVFSDIFGKSSRSITEQILQHPGETFDVAQFVDGRCKTPIEEIQAAVDGAISTEQAVKLRQCLNHIDELEKHQAEIEREIFRLSDKYEEVLNLIRTVPGFDKNPMTAIQVLSEIGGDMSVFPTAKNLVSWAGCCPRNDQSNQKIKSTRISRAGSYFKPVLVQVANALIKSKKHPEFTTRYRRIKARRGHKKAIIAICRMILTAIWHILTDLKPYTTEGFLESRPVNDSKILTTSQALNLLKQRGYVIKDDIVSVP

SEQ ID NO: 161742 - protein, 332 aa, unidentified
MNMHLQGGVAKGDRRPNAGVDVSKHHLDVCFNGQSHRVTNDAQGWDELTAMLRQEQVDLIVMEATGGYERGLLCALQSAQLCVARVNPRQARDFAKSMGVLAKTDRVDARVLCDFADVLARHAGRERYVTPMLEQARQTLAELMTRRRQLVDMRVAEHNRLEHAGPKAKRSIHSVIKLLDRQLESIDRQIDDHMDEHFKQQRQLLDSVKGVGPVTILTLTAMLPELGQLGRRQIAKLVGVAPLADDSGARQGKRMTWGGRAEVRSVLYMAAIVAMRHNPVIRAFYERLVAAGKPKKVAIVACMRKLLTILNAMLRDQATWNAARHLSLAIGA

SEQ ID NO: 161743 - protein, 347 aa, unidentified
MAIVTVGIDTAKSVYAVHGVDEAGKVQLRQPKVARGKLSALIAELPPCVIGIEACTGAHFWARRLQAHGHTVKLMAPKLVAPYRMSGKRGKNDAADAAAICEAVGRANMRFVPVKTEDQQARLMVHRARQGYVTARTAAINRIRGLLAEFGVVLPLKAEVVRREAAGKLEDLPGYGNLVIGDLLSEVHHLDERIGQYDAHIRSMARQSTPAQQLMQLMGIGEVTATALVATVGNAREFGSSRQFAAWLGLVPGQYSSGGKTRLGGITKAGDAYLRGLLVIGARAVLNAAANKTLSEKRAQAVVAWLTAHGVAANRLTAAGFGATKPVADNGTEEGRAKNRRVELAKN

SEQ ID NO: 161744 - protein, 440 aa, unidentified
MAAKKNQTSSRVVIGVDPHKRIDAVVVLDELGAVLAREIVPHTSAGFKTLMAQARQFPQRVWAVEGCNGVGKNLAHRLVAVGETVLDVSTRKSSLVRALATNSGRKTDDTDAYSIALVGLRSTDLPVVVLDQQTELLRLLSHRRRELVGLRTQAVCRLHRELAILIPGGASSRLLATRIRALLNGIRPHDEVDRLRKQLARDQLADLVAIDQRLAAINIEIRDAVRATGTTLTEIFGIGPVNAAMILGEVAQVARFDTRHHFAAYNGTAPAQWGSGGDTHDRVNLGGNRRLNHALHIAAITQARYPGPGRDFYLRKLAETKTKKEAVRALKRRISDSVYRRLLADADARDTAGTGPGGQMGAALSSSAADRSPVISNSDTPQPGPVSPDGYARPRPAREAFPGPIPAPSKRADPQTSSSAVCLTRTRTGAPSPRRERPPS

SEQ ID NO: 161745 - protein, 351 aa, unidentified
MNYVGIDIHKRYSVFVALDERGRELKRCRINGNTAFGFDQFFSGLDGKSKVVVEACWNWGRIYDLLGEIEQVEEVVLAHPLKTRLIADAQIKTDGLDAHGLATLLRGDLVARAYVPSKPTRQRKEVLRQRLYWARLRTRVRNRIHALIDRQGELSMPQCSDLFGRKGLNALNKLCLNEPDATLLREELALLELIQSQIKAQEARIVEFNSKDETTLRLQSIPGMGKILAAVAAVEIDCVERFSSAAKLCAYAGLVPRTHASGGRVYQGPLVKSRNKWLQWAFIEAAWVAIGCSAYFGGLYRQHRARGKNANIAITSIARRMCQISFTLLKERRDFIEAFPGRSAVRLTAAA

SEQ ID NO: 161746 - protein, 392 aa, unidentified
MRTMTQADDLSRSFAAFDQNSTLTVVVEMSAANWLVAAMIPGVDRQRVKKLEPDPDALFRLLERWRVEATKAGRTIDRVALAYEAGRDGFWLARWLRARDVEAHIIHSTSVAVSREHRRAKTDRLDTGMLMRVFLGWLRGERGHCGMVAIPTLDDEDAKRPSRERENLVAECTRISNRLKSALARLGIRGFKPLLRRATQRLAALRTPEDLPIPPNMLAEMQRDMARLAVVRTQIKEIERTRLRVLQQAPEAGPHAMVRLLARIVGVGIETADMLVQEVLSRNLRDRRAVARYAGLTGSPDESGAKRREKGLAKSGNGRVRRGLIQLAWRFLMFQKGSALAHWYRTRTEGPKGARKTTMIVALARKLLIALWRMVTTGIVPEGIELRQIAAA

SEQ ID NO: 161747 - protein, 411 aa, unidentified
MDVFCGIDWAEDHHDIALVDRSGQLLARRRISDDAAGLTALLSLLCEHGDSPDDPVPVAIETPRGLLTACLRVTGRKVYPVNPMAVARYRDRHSVAGRKSDHGDAVVLANILRTDMHAHRPLPADSELAQAIAVLARAQQDAVWDRTAAHNKLRSHLREYFPGFLAAFTDARGGITRPEARAILAAAPTPAAAAKLTAAQLRALLKKAGRSRGIDTEAQRLRDAFRAGQMRQLPLVEQAMGRQAVALLRQLDAACASADDLEAAAIESFNQHPDAGIITSFPGLGALTGARVLAETGDDRSRFSDARGLKAYAGAAPITRASGKTKSVTHRRVKNNRLAAAGYIWAFSALSASPGARGHYDRRRDAGDRHAAAQRNLFGRLLGCLHHCLLTGQHYDETIAFPTPEPLPAAA

SEQ ID NO: 161748 - protein, 385 aa, unidentified
MTIENHVRRCIPSDYDVFAGLDVDKKSMSVVFTDHAGSQRALRMAHQVTPLVNYVRKHFAGQRVAFAYEAGPTGFGLHDELVRRAYTCVVVAPSKVPRAPGERVKTNRLDSRKLAESLRGGQLHSIHVPSGVYRNLRHLVQMRDTHVRQLTSSKLRIKSLLLYEGIAFPEEHEKWTARAMRELQTLPCSETVRFKLDDLLDTLHFHFQAAARATKQIRQYCLDDPELQQSIDLLLSLPGIGWIVGSHLVARLGNPREIKNGRQIAGFLGIVSSEHSTGDKQNRGEITRSGDSRLRNKLIQSAWTAIKRDPELRAFYRRIYQRHPKKVAASKAIVAVASKLTNRIYVVLKEQRPYVVRPDSSIAALTVAETVGPRERLDTAQNDQS

SEQ ID NO: 161749 - protein, 374 aa, unidentified
MLIRRRVGHTTDGLAVLDDTLAELSVLRVRVAIERGEGLLVEHLQAAGITVYCVSPKLSSRARERYRLADTKSDAFDAFVLADTLRQQHDQWRPLAARSEQTALVASLSRDRERITLMQRAVESRLRATLEAYHPAPLHLFSSLDRDIALAFIRDYPNPVAASRMTVDRMARFCRRHHYSGRVDPAVLLARMQPHLLAGSPGTTAGKQIMALHLVDQLEMLNQQERDFNVHLAAAVAAHPDGALFTSFPGIASVIAGVMIGELGDDRARFPAPGALLAESGLAPVTRASGRTRQVRFRYAANKHLRHAIDWWMTVAAREDPWSKQVYDQARAAGHSRYRAYRGLGARWTRILWRAWTDHQPFDPDRGHHTPAGN

SEQ ID NO: 161750 - protein, 396 aa, unidentified
MISVGIDVSKGKSTVCIMKPCGEILESPFDIGHTADELDSLISLIKSFDEETRVVMEDTGHYHLPVATYLSSHNIFVCCVNALRMKKFCSQSIRRAKTDKIDSIKIASFGITYWNELVKAYPSNVIYDELKFLARQYYQVTGMLVKSKVNFSNLLDQVMPKINDVLSNQGENHKLTEFVNRYIHFQNILDMGEMKFTSDYCKWAKKKGYRLNERKAAEILALAQNGIPTLPNSQSVKIAVSEAVKLIHSIEESRNTILAQMQDLCNTLPEYSVVKEMDCIGDTLAPRIIAEIGDVRRFKNKHSLIAYAGIDAPPYQSGAFHASERHISKRGNSYLRKTGYEIMQSLIKHKPADNAVYNFIQKKRSEGKCGKEAMIAGLNKFLRVYYGKVMEFYSEH

SEQ ID NO: 161751 - protein, 359 aa, unidentified
MRNAGIHANSLLEVRRMYNAVGIDVSKDKSTVAVLQPGGTVIRKTFDVSHTSQNLNELADYLSSLDGTTKIVMECTGRYHEPMVKALSEAGLFISIVNPHLIKNFGNNSLRKVKSDPADARKIARYTLDNWTELRQYSGMDNTRTQLKTLNSQFSFFMKQKVAAKANLIALLDNTYPGVNKLFDSPTREDGSEKWVDYAYSFWHADCVRKIGLKAFTERYMSFCKKHHYIFQQDRPEKLFNASKELVAVFPKEKTYKLLIQQSIQQLNLASEHVERFRREMNELASTLPEYSTVMGIYGVGKTYGPQLIAEIGDVSRFTHREALTAFAGVGPGVDESGQHKSKSNRASKVGSARHCFRS

SEQ ID NO: 161752 - protein, 410 aa, unidentified
MSVAKVDGSARARFAGVDWAKDDHVVCVLDERGRVLERVTVAHKAAGLARLVAVLRRHGVGAVGIERGDGPVVDVLLQARLPVFVIAPGQVKALRGRYGSAGNKDDRFDAFVLADVVRTDGLRLIRLQADAEETVLLRRLCRARKDLVGHRVAAANQLRAHLETAMPGVVGLFSALDAPISLAFVTRFDTQDALDTLTETRLQAWLTRQRYPGRTSAAVLLERVRAAPRGPTGGYAAGLAGITAALLAAVRVLAQQIAVLDKRIAAAFAAHPDRQVFAGLPKAGTLRAARLLAEIGDARGRFPTASSLACLAGAAPSTRQSGRSRTVAFRWGADKHLRDAVCDFAGDSFHANAWANDLYQRARARGHDHPHAVRVLARAWLNVIWKCWTTHTPYDPAKHGRLQQILAQTG

SEQ ID NO: 161753 - protein, 406 aa, unidentified
MRVVGLDVSRTVAEIAYLEDGRVRAGGRVTLERAALAQYANSLKATDHVVLEATGNTAAIVAALKPHVARVIIANPLQVRLIAEARVKTDKIDAAVLAQLYASGFLPEVWIADDHTQALRRQVARRAQIVRQRTRLKNEIHSVLATHLIPRCTATDLFGKKGRRWLAEQPLPLDERIAVEQRLRELDRLGEDLAVIDRALGEAVLADAQLKRLLTITGVNAIVAISLLAAIGDIGRFPSARKLVSYFGLNPRVRQSGLQPAQHGHISKIGRSHARAMLVEAAWAAAKAPGPLRSFFLRIRARRGLQIAAVATARKLATIVWYVLTDQEDYTWARPSLVAMKERALQLQAGLPAKRGHKGIAADYSVKSLRDRERAVVENAERAYTRFVGRWKPQGPKRRAAASTGG

SEQ ID NO: 161754 - protein, 442 aa, unidentified
MPDALPSKKPEPQWAAFVALDWGDQKHYWKLQDAASPQCRGGELDNTPEALESWAADLAYRYAGGPIAVCLEQSRGAVVYQLSKYPHLVLFPVHSTTSARFRQAIRPSGSKSDAEDCAVLLDLLLHHRDCLRRLDPDSAETRLLQLLVEQRRTFVNERTRHSNRLTNWLKMYFPQVLDWIDNIDSPLGCDFLERWPTLEQLQHSRRGTVHEFFLQHNSRSEERIEERIAAMYAANPAVRDKAMLDAGPMITKEIVGLVRALNSAIEELDKRIEKLTEAHPDKAVFANVPGAGPALLPRLIVAFGTKRERYQTAAELQRYSGIAPVTEQSGKTRYVHVRRACPKFLRQTFHEFAGHSLNKSAWARAFYDQKRSEGQGHHAAVRALAYKWIRVLFRCWKSNTPYDEQKYVQALQKRHAPLVNLLGTGVKWKNVAGFQKLCLENS

SEQ ID NO: 161755 - protein, 385 aa, unidentified
MAPIRMPEAVIGLDVGKSSHWACVATRDGEVLLSTPVANREDDLDSLFGRFPDALVVVDQSRNIGALALARARAAGMSAAYLPGLAAHGAARLFAGDAKTDERDAMVIAKTALGIPDALLPVGDPGPTIAAARALAAQRNFLTCENTRSKNRLRSILLESCPAFEALVDLSDGPQLRLMASLGGAWSVADAGPRRAAALTRGAARGKIEALVRSTTSSTRPDASVVAAEDRAVKLLARRISENSAEIEAITAEISALLEGDDTYRCLLTVPGIGPKTASELAISIDIEDFPSHDRLASYCGLAPRNRQSGTSISSVTASRQGNKRLKNLLIFSCNCLTRTEGRWGDYYTRCRERGMSHGKALKALARKRLKVIYAVMRDRVPYAA

SEQ ID NO: 161756 - protein, 428 aa, unidentified
MNCNTQNAKIASITERTLIVGIDVGSETHYARAFDWRNYEYTKKPLEFSNTEAGFLTFKAWMEDIAQQQGKTAVIPGMETTGHYWFALGKFLQDNGMKPVHVNPHHVKKSKELDDNNPNKNDRKDPKTIAALVNEGRFSYPYIPTGIYAEIRSLSNLRFQTQEELTRIKNRIARWFAIYFPEYKDVYGDLKTVSGRMVLKVAPLPEDIGKLGVEGVNQIWRSAKLRGAGIKRAKTLVSAAEHSVGSKEAPEAARMELKNLLDDMDVYVSRLDELLVNIEEKLKEIPYVDKLMEIKGIGLVTVSGFIAEVGDIGHFDNPKQLQKLAGYAIVANDSGKHNGESRISYRGRKRLRYVLYEAAISLIGKNAEFKSIHEYYRTRKENPLKKMQSVVAVACKILRVFYTILTKGVDYDPVKLLGDIKRPQLQAA

SEQ ID NO: 161757 - protein, 322 aa, unidentified
MQGKVSPEPSATRVYVGIDVCKERLDVYVHPVGQKLAVGNDQNGVKRLKRLLKPYDVAVVVMEATGKLHRPAHRSLSADGFKVAVVNPLRSRLFAEAIGALAKSDSVDARMLAILGESLDPAVTEPPSELVETLQELTRGREAAVAARTALLNQLGASKAKCLIAEIKRQLRALETAVANLEAEIKRLIQSDVRLKRRFEILVSIPSVGETTAVAILAELREIGTLAAKEVAMLAGLAPIARDSGETNGVRHIKGGRVHLRNALYMAALNAARFNPTLKQVHNRLIAAGKKAKVALVAVMRKLIVLANALVREDRTWQPNCP

SEQ ID NO: 161758 - protein, 392 aa, unidentified
MVVSVGIDVSKDKHDCFIVSSEGEVLADVFMIPNTMDGFRSLLQRIWECCDSQDKIKVGLEATGHYSYNLLGFLLDNGLPTYVLNPLRTNIYRKSLSLRKTKTDRVDARTIASMLLSDAGLKPYTDTAYHNEELKSLTRYRFDKVKERAKLKGSIARLVCILFPELEKLVLSLHFASVYALLEEFPGAKQIAAAHLTRLKALLETASKGRYKRDTALEIRDAARNSIGSWMPAKSLELQHTIRLIRELDNEITEIEEQIQTIMDELNSPITTIPGLGFRMAAMIFAEVGDFTHFDSPDKLLAYAGLSPSTYQSGQLKNCYPHMEKRGSRYLRYALYNATKYVCHWDPTFAAYLAKKRAEGKHYNVALSHATKKLVRLIFAIEKSRQPYCSAT

SEQ ID NO: 161759 - protein, 362 aa, unidentified
MKKRGLRFTEDPSAVTLGVFGTTSVKGDPMGQYVAIDLHKRRSLIVRADENGERLETVRIENDPVTLARTVAAAGEHPEVVLEATCGWYWATDVLAEIGANVHLAHPLGLNWDNRRVKNDVKDANALLDMLRLGVVPEAWIAPPPVRELREVVRYRAKLVMLRSGLKSQVQGVLTKEGFLVSRAQLWGPKGRAILDELPLSGSYRKKISSLLRLIDAYGIEIKALHEEIEGWLADDLGYAAIQSIRGVGPVLGAVFIAEIGNIDRFPSPDRLCSWAGLTPKHRESDFKVQRGGITKQGSRIVRWAAIEAISRGQDTSVAELYERVKERRGTNVARVAAARKLLHLVYYGMRDGEIRCLAQTG

SEQ ID NO: 161760 - protein, 344 aa, unidentified
MEYFAGLDVSVNETSVCIVDDAGRIVREVKVVSEPDALLAALKTGAYHFKRIGLEAGPLSQWLYNALGEANLPVICVETRHMRAVLKAQINKTDRNDARGIAQMMRAGLYRPVHVKTLRSQKLRMLLTHRKLLQSKAIAIENDLRGTLRNFGLKVGLVGTARFEARIRELVENLPDLAVLVEPLLIVRRILREQIAVLHRRLLAIVRDDAVCRRLMTIPGVGPVVALTYRATVDVPARFRNSRAVGAVFGLTPCKYQSGESDYTGGISRCGDEMMRVMLYEAAQIMLVRSTRWSWLKVWAMQIARRRGVKKAIVALARRLAVIMHRIWIDGTKFRWTREEVAAA

SEQ ID NO: 161761 - protein, 343 aa, unidentified
MQTITTIGLDIAKSVFQVHGIDAGGQVVIRRQLKRRYVLAFFQKLPPCLVGIEACASSHHWSRELKALGHTVRLMPPAYVKPYTKRQKNDAADAEAICEAVTRANMRFVDTKTPEQQSGMVLHRTRHLCMRQQISVINAIRAHLAEFGIVAPVGRNGVEELLDIVSNPSDKRVSEIARMCLAALGTQLRRLKEQVLEFDRMIRTWHRSNEMSMRLDECPGVGPVLATALVASVADPRTSRSGRNFSAWIGLVPKQHSSGGKNKLGSISKQGDRYLRGLFVVGALAVIRYAKINGTKHRPWLTALLAPRPAKVAAIALANKIARMVWAMMARGERYKEPIALAV

SEQ ID NO: 161762 - protein, 371 aa, unidentified
MNHVTSIGLDVHARSVTAVALDSITGEVRSQKFGYSPAEIAGWILQLDSPKAVYESGVTGFHLVRELREMGVDCIVGAVSKMHKPASDRRKKNDRNDAEFLARQLMAHNIVEVFVPDVETEGARNLSRALEDVRDDLTRAKHRLTHLLIRWGYIWNEFNEDGKRRGSWTHAHWEWIRGIELPDAAARESLDYYISEVRHIESQKKAIEKRVAQCASRPRWRDRVEALRCMKRIETVTAFALTVEAGVFSRFDSARAFASWLGLVPSEHSSGERASRGGITKAGNSHLRKLLVEASWHYTRATKERKRSLYDESVPASISNHAAVGVKRLVERRRHLSCELRKRPVVANVATARELACWIWALGRMSEGALA

SEQ ID NO: 161763 - protein, 400 aa, unidentified
MIPLSRLPSDHLSKEALMARRSKAKGTRQHTKLHMIYTRAAGIDVGSTFHVVAVPPELSAEPVQTFQSFTGDLYRLATWLVEIGVTTVAMESTGIYWIPVFDILEAHGLEVLLVNAQHVKTVPGRKTDVNDAQWLQQLHTYGLLRGSFHPAQDWSALRVYLRHRERLVEYAAAHIQHMQKALMQMNLQLHHVLSDITGTTGMKIMRAIVAGQHDPAVLATSRDARCKASEETIRAALTGHYRREHVFALRQALELYDSYQARIEACDQEIQSTLASLQNEEIAIDTLPAARHKKRQSHEPLFDVREALFRVLGVDLSQIDGFSAYTALKLVGECGMDMSRWPTEKHFTSWLTLAPGNKISGGKVLNTKTRRSANRAAAIFRLSAMHVGQTQTALGAFYRR

SEQ ID NO: 161764 - protein, 340 aa, unidentified
MSSHTAVVDQNNKVLGPQFFSTTRQGYRQMLAWMTSFGALKRIGVECTGTYGSGLLRYLQNAGLEVLEVTAPDRMERRKRGKSDTIDAECAAHAAFSGIRTVTPKTRNGMIESLRVLKTCRKTAISARRVALQIIHSNIISAPDELREQLRNMTRMQLIRTLGAWRPDASEYRNVTNVYRISLKSLARRYLELHDEIADLDAMIAAIVDELAPELIKRNAVGYESASQLLITAGDNPQRLRSESGFAALCGVSPVPVSSGKTNRYRLNRGGDRAVNSALHIIAIGRLRTDDKTKEYVARRVAEGHTKMEAIRCLKRYISREVYTLLCNQNRQINSIPITA

SEQ ID NO: 161765 - protein, 369 aa, unidentified
MNTTTFVGLDVHARSIKAVALDAMTGEVRSATFAYDAAAVAEWVGSLDPAAKCVYESGVTGFDLQKKLTALGVDCVVGAVSKMIKPSADRKRKNDRNDAEFLARMLSVGNVVEVWVPDDECEAARDLVRALDDAREDLKRCKQRLSKFLLRHGHAFSETTPSGRRKGNWTAAHWAWIRSIEFPEKADDEVLAYYVDAVRQATENKKRLEKLVEAEASKPRWKKRVDSLRCLKGVDAMTAADIVFEAGEFSRFKSARSFAAWLGLTPSEHSSGESARQGGITKAGNKHLRRVLVEAAWHYISASPHPKDLAKGQAPDPAARRHAAKGIRRLVKRREEMLGRGVHKNKANVATARELACWCWAVGRMVENG

SEQ ID NO: 161766 - protein, 298 aa, unidentified
MSGSQSTVSYRLFVGVDMAATTATVSWMRLGEKACRPVTIEQPPDGYASLERKLRATGQAPDQVLIVMEATGSSWITLATQLVYTGFQVRVINPAQAHPFAKALLKRAKTDAIDAHTLAQLAMMLHPPPWTPPPPIYYELQQRLAPRDAVLDLQQQVRHQLHALDQLPEVSETVRQRFAQWLTTFATQLATVEAEILEVWQQEAAWATAAQRLQSIKGIGWVTAAWILVTTRNFTTCDTVEGLTAYAGLAPMPRQSGTSVWHRPSIGHTGPARLRTAFYMATLSTAQHNPMIKAFYTR

SEQ ID NO: 161767 - protein, 480 aa, unidentified
MNVKATRTKKQVNVENQAIKLLSKEELGRKIEVVEKELRSYTWRELETNGKFTKNDKLSFITDDMLIVGCDIGSENHYIRAIDVRGRELSRGAFEFSNTSEGFANAKAWVLALAAKNDKKQIVLGIEPTGHYWFALAAWMISNGISVVQVNPYAVKQSKEIEDNSQLKDDRKDPKLIANLVKDGNYGMPYLPEKVYADMRKLSMFRDQLTEDRIRNINRLHRELKIYFPEYMDAFGKIDGAFTLEVLKVSAIPSDITALGAEGIKNIWHNVKLRGRGYSRANEIVSYAEKSVGLTDGTDAGREAVKWYAEQILKLDEQLAVIESTLHEKCREIPYAENILEIKGVGENILAGILAEMGDISRFDDVKEIQKLSGMGLVACSSGKHKGQTKISHRGRKRLRYWLFQAAKSAVSHADEFKQLHEYYTTRTNNPLKKMQSLVVIACKILRVIYTILKTGTTYDPQKLLKDIKHSEASQAPMAA

SEQ ID NO: 161768 - protein, 328 aa, unidentified
MIQLGIDVGKSKIDLCLRPDGPEGRKKTKILTNGPDAAVSVLEWLAKQKVAPADVQVVMESTGTYHEHLAYGLYERAVRVVIANPARVRAFAQGMGILTKNDTVDADVLARYGAMRQPDVWPPPSPAIRELKALLSRRDALVYDVGREQSRLEKLLSTRCSLLVEASVRKMLQVLNNELQAVQALIDNHIDNHPELKRDMEYLTSIKGIGSAVGSTMLVVLRGNHFISAEQAASWVGVVPKEKRSGSSVRGRTRLSKNGPPEVRAKLFMAAIVAVKHNPLLKQFYNRLLAAGKAKMSALGGVMRKLVHICYGVVMKQQKYDENYATAA

SEQ ID NO: 161769 - protein, 348 aa, unidentified
MSQRHYIGLDVSARTVNLCIVDHDGQVVHERKLSSDPEEIAQHILSLRFPIVRVGLEAGMLSQHIYGRLAEAGIPVVCVETRHMKAALAAQLNKTDRHDARGIAQMMRVGLFKPVHVKTPNSQRLRTILTARQLLRNKLQDVENEIRGLIRNFGYHLGKVTARDFEPRVRELIADTDLHAVADALLLARRSLREQFGRLDDMLVRLAKHDEVTRRFMTVPGVGPLVALTFRATVDVPSRFTRSRTVGAHFGLTPRKQQSGEVDRNGRISRWGDEMMRSLLYEAAQVLLTRVKRWSALKAWGAQISRRRGHKKAIIALARKIAVILHRMWIDGSEFDWGKRPETAASSV

SEQ ID NO: 161770 - protein, 361 aa, unidentified
MEYYIGLDVSQRQTAICIVDGKGARVKEGKALTEPSDIYAWIIKHVDRKLIMKVGLEAGAMSAWLYTELSKLGLPMLCMEAFQAAEFLRAQRNKTDKNDARGLAQMVRMGGDFIRPVIIRSQSSQEARTLLTMRQFLVGQKVGIENNIAGTLKQFGLITPRGNASTKTFRERVLASLDRADERGILVREAVMPSLDLYDTLCRQLAVLTKKVETMAKADRVCRLLMTAPGVGPIVALSFVTAIDNPKRFADPEDIGAYFGLTPRQYQSGETDIRGRASRRGDMMTRCHLVMAATTLLTHTKKWCALKAWGMKISKRHGFFKARVAVARKLAIILCKMWLRGQDFCWTNIPADKALAGAIPA

SEQ ID NO: 161771 - protein, 334 aa, unidentified
MEQITTVGIDLAKNVFSLHGVDAAGKTVLRRTVRRDRLVETVASLAPCLIGMEACSGAHEWGRRFEQHGHTVKLMAPKFVAPYRKSDKNDGNDAEAVCEAVTRPNMRFVPVKSTEQQALLALHRVRQGFVVERTAIINRLRGLLTEFGVVLPLRSVTVRRQAAQAAEGLPELARRAIGDLLEQLRLLDERIGAYDKEIEAQARLSEPARRLMKIRGIGATTALAIVATVGNAREFKNGRQFAAWIGLVPGQYSTGGKSRLGHISKRGDAYLRNLLVQGARSVLQSAPAHQDHRSRWALELQQRRGYYRTLVAIANKNARIAWALLAKNEELKTV

SEQ ID NO: 161772 - protein, 397 aa, unidentified
MRFYTTQHRFYAGIDLHARTMRVCILSPEGDVVYDHNLPCDFPSLLKAIAPYREGIVIGVECMFGWYWLADRCAEHDIPFVVGHALYMKLIHGAKAKNDRIDANKIARLLKGGNFPLSYVYPKGMRETRDLLRRRMYLVHKRAELITHLEILNAQNNLPPFGKKLAYAANRAELDIPQRFADPSVRMSATLDLDLIDKLDELIAKVELHLTRTAKVDDTQTYHRLRTISGVGPILALVLLYEMHQIERFDNAGQFLSYARLAPCDHESAGKKLGSGGKKIGNAHLRWAFGEIACLFLRGSERAKQWKQKQEKKHGTAKTLAILAARLARAVYHMLRKEEAFDEERFFNGKAKPSPAPRRSTKPAAAQDEAKQPSTPTSKTKPATPRGARRRAATTAR

SEQ ID NO: 161773 - protein, 366 aa, unidentified
MRKPSTTAVRGRGKLQSEQLTIGLDLGDRSSFYCVLNGAGEVIVEERVATSPEAMKKTFGKMPRSRIALETGTHSPWVSRLLSELGHEAIVAHARNVRLIGQSRRKDDRLDAQALARLARIDPQLLSPIQHRSAQAQADLSVIRARYALVRTRTALICSARGLTKSFGERIHSRYVRGFKPSMGETLSPQLQVALAPMLSALEAITARIREYDAQIEKLAEESYPDVALLKQVKGVGTLIALTYILTLEDPRRFRKSRDAGCYIGLQPGRRNSGQSEPQLHITREGDSYLRMVLVQGAQHILGPFGEDSDLRRWGLKLAERGGKRGKRRAIIAVARKLAVLLHHLWISCEAYEPLHNVQKRRLAAA

SEQ ID NO: 161774 - protein, 342 aa, unidentified
MLEVSIIGLDIAKHVFQVHGADASGGAVLRRKIGRAKVLEFFASQSRCVVALEACGSAHHWAREIAKLGHEVKLIPPAYVKPFVKRQKNDAADAEAICEAAQRPTMRFVAVKSEEQQASAILFRARDLLVRQRTQLINAVRGHMAEFGWIAPKGSWHRVALADLIQKDDTGLPEAARQVLALMLASLASLDGQIAELDQEIARRAREDEVARRLMTIPGIGPITATAIAALAPPAETFARGRDFSAWLGITPLQKSTGGKQRLGKISKMGERTIRRLLIIGSSAVVRQASRHGAPKGSWLEQMLARKPRMLVTVALANKMARIVWALLTRREDYRAPVAATA

SEQ ID NO: 161775 - protein, 345 aa, unidentified
MKAVTTIGLDIAKSVFQVHGIDAGGRIVVRRQLRRGQVLAFFEKLPPCRVGIEACASSHHWGRELSRLGHDVRLMPPAYVKPYVKRQKNDATDAEAICEAVQRPSMRFVPIKAPEQQAGLVLHRTRHLFVRQMTALINSIRAHMAEFGIVAAQGRGGVEELVAVIKDDKDTRIPGLVRTCLFALAIQLDLVRQQIRILDKRLVGWHRTNATCRRLDAIPGVGPALATALVASVPDAKVFRSGRDFSAWVGLVPKQSSSGGKEKLGSITKQGDRYLRSLFCAGALAVIRYAQRHGTRQRPWLTKLLERRPAKVAAIALANKLARMAWAMMATGETYREPLALAKTA

SEQ ID NO: 161776 - protein, 370 aa, unidentified
MNTKSANVSTKRVKANGPILAIDLGKYKSVACIYERAEPSWQLTSFPTNRAELIKLLDKHQPSVVVIEACALCGWVLDLCAERGLSCKVANTTSEAWKFKHSKRKTDKDDALRLAQLEALGQLPTVAIPPKATRQWRALIALRQSLVGRRVAVQNRIRSILVGQGLTAPCGAKAWSALGLQGIGRLARPLEACGADELWQGMLELALTDYRQISALVEQAEKRLDALGKADQDVQRLQTIAGVGPRTAEAVVAHLHEPKRFRTGKQVSAYAGMVPRQFQSGETDHRGRISKRGPRLLRKLLVECAWCLLRYNSWAQAVWQRLTRGGKVRRKQALVALARKLLVRCWAMLRDGTCWRDDPPTGAEPAATPA

SEQ ID NO: 161777 - protein, 406 aa, unidentified
MLIQPIAPVAKNEFAPVFVALELSRSKWLVGVGTAQKWTVRRHQVQGGDLDGLLELLGRISASEEKRSGLPVQVHVCFEAGRDGHWLYRALKAAGYDVYEIEPASVSVDRRARRAKSDGVDVDKLVRTLARLLRGEFDACRVVEVPSEAEEDAKRPHREYERLVKEQTSHRNRVKALLFAQGIREFDPMASGRLERLAALPIMPRLKAELSRECRRLARIIDDIAEIEAEMKAEIVPSKKARPASAASSTPDPAQTKVAQLYRLKSIGVHFSTVLVREVYYRTFQNRRGVGQYIGLAPSPFQSGDMARDQGIAKAGAQSDDRTVLAMAASPARQRALQVVPPARRRPEGARPAHRHRRHGAQTGRCAVALPRDRPHSRGGGLEARLSRPKSERPFEGRSPRPGWDL

SEQ ID NO: 161778 - protein, 346 aa, unidentified
MMIIGCDFHPSWQQVAWFDSETGETGEQKLVHASGDARQFYERLTTPVLIGMEATGNSQWFIELVEDLGHVIWIGDAAQIRASYVRKQKTDKRDATHILKLVVEGRFPRLWAPDREQRDLRQLVLHRHNLVEIRSRVKNELQHLALNKGMQKKRTLWSQTGQKMLRELPLKPWAASRREDLLGLLGMLNQQVGRLDVAVQKAAEEHLQAKLLMTQPGVGPNTALAFVLTIGDVSRFRRGKQIASYLGLIPREESSGGRQKLGKISKQGNRMLRSLLVEAAQIAVRFDPGFRKQYLHRCHQKAKGVAKVAAARKLAVRLYWMLRTQVGYPEIVRIENSPRVPLVGAS

SEQ ID NO: 161779 - protein, 409 aa, unidentified
MRYYIGVDWADAEHVVWVEDEQGQRVSAGMVAHSPVGFSEWGRQLDEWRAQGIGLWAAIERPEGRVVDVLLDHGVRVYPVNPKAVDRARDRFRQSGAKDDLFDARVLAGFLRTDHTHLMVLEPSSEAAQELKLLTEDYQRQVRTQTRLVNQLTATLKAYYPRALEVAELTTALAAAFLQAYPTPATLLALTERQWQRWAKAHHLSAARTTELWASLKQPQLPVPPHVVRAKSRLMQTLVTELAAVMAAVASYRQAIDDFFATMPAAAWARTLPVGEHGVTVPTLWARLGDAPGRWESFRHLQAQAGTVPVTIRSGKQQVVRFRFACDKSLRYIIDHVAFLSLRWSEWAHAYYAGQRARGHSYRQALRALSAKWLKIIFVMWERQIPYDEQYHLAMMTRQQLRQRQEKVA

SEQ ID NO: 161780 - protein, 345 aa, unidentified
MLIIGCDFHPGFQQLAIFDKSTAEITYRRLQHPEQARQFYASLAEPARVGMEACGYTQWFERLLAELQHQLWLGDAAQIRASVVRRQKTDRRDAEHILELLLEERFPRLWVPSNEERDVRQLLLHRHHLVRNRTQVKNQLQAMALNQGVQKKRKLWTKAGREQLQKLTLPAYTAQRRDECLQRLDYLDEQIRQLNQKVEAEAEQREAVRLLRTHPGVGPQTALAFVLTIGEVKRFANAKRVASYVGLIPAEYSSGGKQRLGRISKQGSPLLRFLLVEAAQTAARLDPTLKRMYVRLCMRRSRGQAKVAVARRLATRLYWMLRSGNNYAQLTASGAGKPVSSRGAA

SEQ ID NO: 161781 - protein, 427 aa, unidentified
MDVVIGMDPHKRSATIEVVDRSERLLGTGRFGTDTAGYRAMLAAGRAWTQRTWAVEGANGIGKHLAQRLIADGEKVVDVPAKLSARARVFSTGQGRKTDATDAHSIAVVAVRTSTLRAVEVDGEHVALRLLVDRRDELGVRRTESANRIHKLLLELLPGGAKTFLTAAQAKALVATIRPRDVVGKTRRRIVVALIDELATTDKLIKAANKELKELIEASGSQLMDLYGIGPSSAARLLGDVGDIARFPTKGHFASWNGTAPIDASSGENNRHRLSRSGNRRLNRVLHTMAIVQLRHDTEGRRYFDRKKADGKSSMEALRCLKRRLSDVVYRQMLADEQLRDSGAQPPSGPVHDAAEAPIAPEIVDLDEVLEDVASSAPVTGPGGQAGASTGSSAAGSDPHTGPSEKSLPGPAAPSSTRPRRPRKPPC

SEQ ID NO: 161782 - protein, 334 aa, unidentified
MEESSVCVVDGAGRIVRETKVASEPEALVRFFRGLGIRMIRIGLEAGPLSQWLHAGLVAAGFEGVLLETRHVKAALSAMVNKTDRKDARGIAQLLRMGWFRPVHAKSPGAQEVRALLVARKLLQTKLLDVESSIRGILRGFGLKMGAVSKGRFVARVRELAAGHPMLERITEPMLRAREALRTEYARLHGEMLAIAKPDPVCRRLMTAPGVGALVALTFKSAVDDPGRFTRSRALGAYFGLTPKKYQSGEKDVTGAISRVGDPMVRVTLYEAANIMLSRVTRFSSLKRWALDVAKRRGLKRAKVALARKLATVLHRMWIDGTTFHWGKQADAAV

SEQ ID NO: 161783 - protein, 362 aa, unidentified
MSYGSTEQTKMTVGLDLGDKYSYLCVLDTDSGELLEEGRLRTTPDDLGRRFDSGKQMKIAIEVGTHSSWVNRILHDCGHEVLVANPRKTRLIYGDRRKTDKLDAKKLARLARVDPELLYPIDHRGEESQAHLAIIRSRDALVRARTQLINHVRGTVKSFGARLPKCSAESFHKKVADALPSELAEALEDVVATIGSLTETIRDYERRIERVCKENYPQETGLLRQVPGVGALTSLTFVLTLEDPDRFEKSRMVGAYLGLVPGKDQSGDRDPGKPISGEGDEMLRRLLVGSAHYILGPFGPDSDLRRHGEKIAARGGKNAKKRAVVAVARKLSVLLHRLWITGEAYEPLRNARLSGALREEVA

SEQ ID NO: 161784 - protein, 315 aa, unidentified
MAMSVSVSKPIVGVDVAKNELVIYQAELDLLETISNDKAAIKKWLKALPAPVDLAIESTNIYHLAFADLAHEAGCTIYMVGGYELSHYRKGVNVRAKTDALDAKLLARYLKNEYEELHPWVPPSPLYRRLLSLFRRRAALVQARVGLVQSWANEPLLKSAFAKQVASMQRLETLVEKMIKNQLEEAGLLTQLKRCTKVEGIGFLTGARLIAAFQRGNFRNSDAFIAFLGMDLRVSQSGQKDGRRSLTKRGDPEARRLLHNAAMSACRTSTWKGFYEEQRARGFSTTQALVILARKLARVVFALLKGQSEYQPKAG

SEQ ID NO: 161785 - protein, 357 aa, unidentified
MLALGDSAPRKGADAMTFVGCDLHTRMQQVAVLDTETGEVSERQLAHDGSAVEEFYAALPGPVTIGIESTGYATWFHTLIQRLGHTLLVGDAAKIRAMVVRKTKTDRRDALHLLDLLRHDRFPTTWVPDPATRDLRALLMHRMRLVRIRTMVKNGLHAIALNYRLTRGSTLLRQAGLAQLHALALPPHTAQRRDQSLELLAGLTTQIRALDDAITAAALAHPDAPRLITHPGVGALTALATVVVLGPVARFHDSKHVVSYVGLAPALHASADKYHLGRITKQGSPLLRFVLGQAAAHAARMDPDLTRTYGALVHRRGRPKAKVAIARKLLVRLFIMLRDQIDYDEFRRRGRTAPAAA

SEQ ID NO: 161786 - protein, 388 aa, unidentified
MYHAGIDISKFKHNCFIATDAGVKVKEFVFDNSKSGFTELEGSLKALGKPKEIKIGFESTGHYGTNLKSYLSNLGYTYVEFNAYLTHMFSKALSLRKTKTDKVDAKVISSMLGSVDYETLHTKFYHINDLKELVRQRNVYLNHRSKELIKLTNLLDKTFPEFKPFFNNRLGIGARFVLKRFKTKARIAKLSMSDFDLIKSKMMGRFTYPKFNCLKQLANDSIGVSSKAYDLLIQTAIKQYEHLNETLKIIDTEIITLYKQTDSKLLTIPGLGIITAATIYAEVGDFKNFSNPTKLIAFAGFDVRIIQSGTQEHYGKLVKHGSSLLRNAIWTYALPAVKFIPTINDYYHKKRSQGKHHKVVLTHICRKLIRMIYFIEYHNVSFDSNLSR

SEQ ID NO: 161787 - protein, 416 aa, unidentified
MAEHEQETISWFAGVDWGSERHQVCLLDARGTTVGEREFPHSGEGLAELGDWLLSMASAASTVAVAIEVPHGPVVDALIDRGFVVYAINPKQLDRLRDRFSVAGAKDDRRDAYVQADSLRTDRRLFRRLQVADPRLIELRAWSRLAEELRAERVRLGNRVRHQLWRYYPQMLKLTNDLAAPWFLELWAIASTPAKAGRLRKSTVERLLKQHRIRRLDAETVLRILREPAIKVAEGVAEAASIHMRSLVARLGVVNRELREAERKLDELCTAVSEIEQTSGEGLQRRDVAILRSMPGIGRINLGTLLSEASGPLSRRDYEGLRTLSGAAPVTKRSGKSLIVVRRYAAHVRLRDTVYHWARVATQRDPKCRARYTALRKRGHSHGRALRGVADRLLALACVLLQRQTLFDPYFGRSTT

SEQ ID NO: 161788 - protein, 412 aa, unidentified
MEILYQSCCGLDVHKKMIVACLRWADEAGKVGKQVRTFGTTTSELLSLTDWLVEAGCTHVAMEATGVYWKPVYNILEGQMELLVVNAQHIKAVPGRKTDVKDAEWIAQLLQHGLLRASFIPPQSQRDLRDLTRYRTTLVRERARIVNRLQKALEDANLKLAGVATDVMGVSGRAMLEALLAGQTDTEQLAELAKGRLRKKIPQLKEALTGRVREHHRFMLSEQLSHIDYLDEAIERLVAEIGERLRPFEEEIRLLDTIPGINRQTAEELIAEIGADMSRFPDGHHLASWAGMCPGHNESGGKRKSGKTRKGNRWLRSTLVEAAHGAAHTKDTYLASQYHRLVGRRGKKRALVAVGHSLLIISHYVLKRRQAYYDLGSNYFEELHRQRMERNLVKRLENLGYKVTLEGLTPAA

SEQ ID NO: 161789 - protein, 400 aa, unidentified
MRINTKSGLPWLDKSAVEQAFRTRCDHRATELDALADWLDAKGVTQVVMEATGVYWKPIWHVLEDRGFELLLVNAAHVKKVPGRKTDVKDAEWLAQLLECGLLRGSFVPPPVIRDLRDLTRYRKRLIQDHAREVQRVQKVLEDAGVKLASVASDVLGASGRKMLDALIGGERDADVLADLALGRLRKKIPELRQALAASRFRPHHALMLREHLAHLDYLESAVARLDGQVDELMAPFVPQRDRLATIPGVAKRAAEVIISEIGVDMDRFPTAGQLASWAGMCPGNNESAGKRRSGRTSKGDPWLSGLLTECAWAASYSKDTYLGAQFWQIARRRGKEKAAVAVGHTILLIAWHILREGVTYTELGGDWFDRRRDPAGQQRRLIRQLEALGLRVTVEPTAA

SEQ ID NO: 161790 - protein, 342 aa, unidentified
MNTVYVGLDLGSSSFQQVALNHQGVSRVNREFSTSEANLIKAFSDLQGEIHVHLEAGELAPWATSIIRPLVSRVVCSHPQTNAWIAKDADKSDRLDAFKLADLLRLNRFKEVHYPPQQSRREFKTLVQHYDELTQQQARLKTKIKARLRMQGVIVRGEQLFSATGRKAVLAAVKSVAVRTAISQLYAVLDQSLESQTEARLLMRRAAQAFPEVRIFETAPGVGPIGACRFSAYIHTPQRFSSTRKLWKYCRLSVSHRSSNGKPLRRPRLDRNGCGRLKDMTRKAFEAALRTHQDNGFQRAYRRALATTHDQTHARLTVQRKIVSTLRAMWISQTPYDDQLMR

SEQ ID NO: 161791 - protein, 367 aa, unidentified
MKKVSTVAARQGRNISQQKLTIGLDLGDRNSWYWVVNEAGQIQLEQRVRTNEKALREIFGGMPRSRIALEIGTHSPWISRLLSELGHEVIVANARKVRLIGESRKKDDRLDAQTLARLARIDPQLLYPVKHRSAQAQADLMMIRARAGLVRARTGLVNTARGLAKSYGERLRGCNVRNMNPEKAEGLSPELQVALEPLLNAIESLSERIAEYNEQIETLAERSYPQVALLKQIKGVGTLIALTFLLTLEDPHRFRKSRDVGCYLGLQPGRRNSGRSEPQMHISKEGDPYLRTLLVQGAQHILGPFGVDCDLRRWGLKLAERGGRNGKKRAIVATARKLALLLHHLWVSGEVYEPLHNHRATTVAAAA

SEQ ID NO: 161792 - protein, 348 aa, unidentified
MTTQPHIIGIDLGKHWFHLIGLDHDGAIVLRRKLSRSQLSAFAVTTPRNIVAMESCCGSQYWGRVFAKAGHEVRLAPAQFVKPYVKTNKNDFNDAEAIAEAASRATMRFVPLKTTEQLELQASHRIRRRLVHERTAVINQLRALLLEYGLVTPLGRETFARRWSQILGTASEQLSPRLLVLIQRLRAHWVTLDGQIAEATQELTTWADNSPLCQRVATVPGVGPMIATALVSAVGDGRMFARGRDMAAWLGLVPRQHSTGGTSTLGRISRRGNGYLRQLFLQGAVSAYLWMKRDQSALGAWLHQLDRRRHRPVVITALANKLVRICWKVLTSNTPFRLHPARPVEHAV

SEQ ID NO: 161793 - protein, 412 aa, unidentified
MQAIIERCCGLDVHQETVVGCLLVGEPGAHPTKEVRTFRTVTRDLEALRDWLREAGATHVGMESTGVYWRPVYAVLEGHFELIVGNARHIRNVPGRKTDVKDSEWIADLVRHGLIAKSFVPPRPLRELRELLRYRRKLTESQTAERNRLLKLLETANIKLASVASDVFGVSGRAMLRALIAGEASPEAMADLARGQLRRKRADLILALDGRLEEHHRYLLAVQLRRLEAIEADIAGLDQRIGERLEPYSAPHALLMQIPGVDWVVAAVLIAEIGVDMSVFLSVYHLSAWAGVCPGSYESAGRQKSGRARKGNVHLRTMLVGAAISAAKTKGSYLKDKYHRLKARRGALRAALAIAHKILVSAYHMLAKNLPYRDLGEAYLDQIGQTRTVANLKRRLERLGYRVTLEPNAQPA

SEQ ID NO: 161794 - protein, 356 aa, unidentified
MQTQGTKKIDFKGKDLFIGLDVHKKSWSVTILVEGMEHRTFTQPPDPRTLYNYLQKMFPGGTYYSAYEAGFCGYGTHRALNDLGIKNIVINAADIPTSQKDQIHKLDPVDSRKIARALEKGLLRAIHIFDRDKEELRSLNRTRFYLMRDLRRSKNRIKSFLQYYGIQIPLEYDNNLWTLKYIAWLKQIQMKTSSGQDAFSNLIRSFEYHREQILILSRQIRIRMREYDKELYNLLKTVSGIGPLTSSALITELGDINRFPHINHLSSFVGLIPRVKQSGETSYNAGMTFRCNEYLRTLLIESSWQAIRQDPALMQYYQQHVINNKGQKVIVKVAHKLLNRVRYVMKNRQPYVTRVA

SEQ ID NO: 161795 - protein, 387 aa, unidentified
MIYVGIDVAKDKHDCFITNSDGEVLFKAFTITNNLDGFNELHQKIASVMDDVTKVKVGLEATGHYSYNLLGYLIDKGLPTYVINPLHTNLYRKSLSLRQTKTDKVDARTIASMLMSDVNLKSYSDISYHNEELKSLTRYRFDKVKERAKLKTSVSRLVCILFPELEKLVPTLHITSVYALLSEFPGAKHIATAHLTRLTNLLSEASKGRYGKDTAITFRDAARASIGSNMPAKSLELKHTIKLIQELDSEIDEIEKEIKIIMDEINSPILSIPGINYRMGAMIGDFNRFDSPDKILAYAGFSPSTYQSGQLDGAYAHMEKRGSRYLRYALYNATKYVCHWDPTFAAYLAKKRAEGKHYNVAISHAVKKLVRVIYHLEKTKQQYIKAA

SEQ ID NO: 161796 - protein, 448 aa, unidentified
METMQLEVVNPRCAGIDVGSRSHFVAVGQELSDVREFGVYADDLTEICLWLKEKGITSVAMESTGSYWQNLYVELAKHGFELVLANGKFTKNAKGKKTDVKDSRWIQKLHALGLLSSSFLPDETTEQLRTYCRQRTNWLNMAAETSSKMQKYLKLLNFRLDVVVNDICGLTGMTIIDQICKGNHDPQALAEYRHHNCRKSKEEIARALKGNNRSDYLFGLKQEYESYQFFQRKIADCDKQIEKFMKEQIQCDPVKKKLKATQKKHKKINKNAPDLDLNQMAFQYFGGIDLMAIECVSHSTVLTIISEIGPDGFKKFPTAKHFTSWLRLAPNNKISGGKVLSHRVPKGSNRLKIALRQSANAIGNLKDTHLSDFFRRVAFRKGRQAAVSATARKLSVILWNMMTKNEQYKPETEYLFLEQKRQLKMVTRIRKQIQKFDIKPEQLGIVTN

SEQ ID NO: 161797 - protein, 356 aa, unidentified
MTSNAKYIGLDVHKESISACVRNAIGKVVMESVIETKASMIVQFIEGLRGDLQVTFEEGTSSAWLYDLLKPRVTKVVVCDPRKNKSMREGNQNDKIDARRLAELLRLDHLNPVYHGEHGLRTLKELVRSYLTITKDVARVKSRVKAIYRSWAIPCTGKEVYARCHREEWLGKISEPGVRRRAEFYYLQLDALRLLRRDARRELLVESKKHKVWKRLCGIPSIGPIRAAVLLGILQTPHRFRSKRPLWNYGGLAIEMHSSADHRSVDGQLERSQKNVLVRGLNRNCNHDLKNLFKGAAAVAASKLGPFQEFYTALVAKGMRPEMARLTLARKIATIVLMVWKKGVCFDANHLKPQTA

SEQ ID NO: 161798 - protein, 404 aa, unidentified
MDETFAGIDWASEEHALCVVDERGMTVAGEFFSHDEAGIRELIARMKALGVCRVAIERPDGLLVDRLLEAGFTVLPVHPNKLKATRPRYEAAGGKSDGFDAFVLAELARTDSHRHRALCPDSDETKALRALTRTREDLVGARVRLANELRAQLDAFWPGAARIFADVDSPIGLAFLERYPGPEDARGLGEKRLEGFLARNGYCGRRSPAELLERLRSAPAGRAGAMEAEARRGAVLGLVAALAPIVAQIRELTSQIAGAVRAHPDGKVFLPLFKDPKSVITAARLVAEIGDDRSRYPSCDSLAADAGMAPVARESGKRKVAGFRWACDKRLRDAVACLANSTRHTHPWARKVYLDARARGLEHPHAIRVLGRAWLRVLWRCWRDEVAYDPAKHGNLIRLQPVGG

SEQ ID NO: 161799 - protein, 359 aa, unidentified
MKKSIRESQWKERPDRTVGVDLGDRFSHYCVLNRDGEVMEEGRVRTNEEALRRHWEGEARQRMVLESGTHSPWVYRLLQELGHQVIVANARKVRAIWENESKNDRQDAEMLAQLGYSNPRLLSPIQHRSVERQRDLNLLRARDALVRARTMLINSVRGLVKSAGRRLPACAADSFAAKVIPALPAELRTATTPLVEQITALTVQVKRLDLEIENLVQRYPEIGILRTAPGVGPIVSAAYVLTLDRADAIAHSRSVGAFLGLRPKQSQSGDSDPEHKISKTGNIYLRRLLVQAAHHILGRFGPDSALRRWGLKLAVGGKRAKKRAVVAVARKLAVILHRMWRTGQNYQPFPEATAVAGVA

SEQ ID NO: 161800 - protein, 422 aa, unidentified
MQEANIIKQYDVTPEIAKSWIWHYSGHNYNYRMHYRMQKRGHIMLNKTSIRTIGIDVHKDSFSLCTYCPETNSFVGEITTTSSSKMVANYIKRLQKDVGPNVSVISGYEAGPTGFGLHRDLSKAGLDCKVMAPTTIYEKKGGNRVKTDRGDARKLSKALYWEAFKEVVPLSVQDEATRDYIRMRDDRKDALKRAKQQIQSFLLRKSKHYPEKGTSWTQKYRAWLKSFTFELPADQLTFDEYYAEVCRLEEAVERFDQQIEEYSQDDRYRGKIAVLRCFGGIDTHIAMAIVCEIGDFSRFATAKEFSSYIGLCPGQQSSGGKTQMTGITKAGNGHIRKLLTESANSMARTTMFQKSKRLKARQAGNPASVIAYADRGTSRIRYKYKKMVQEGKSSNLAKAACAREIACFVWGMMTGNICGEVA

SEQ ID NO: 161801 - protein, 409 aa, unidentified
MLFTGIDWSEKFLDFHLRTAEGKVLARGQVHPNVEGMANLFVELEKYGSASEIGVAIETAHGAWVQALLDRGYQVYPVNPKTVNNFRKALSANGVKTDKIDCKVLAMFLVTFHQENKPLRPDAPEIVQLRILCKDRLRLGQERSAKVNELGAILKCHYPAFVGLFGHLDSDIALDFLLQWPTQKQMQKLTERRLRNWLARKRYSYPSRVDRMVEQLKQPVLRVPEHLQEAKKTLICYLAASIKMLNGEVAQRDKQINDHLDGLPESDWIRSLPGAGKVLAPALLACLGRDPQRFSSVGQARALMGTAPVTKASGNYRVVVFRRGCWKFARRTLQLFAEQSRHYCGWAAAYYEQQRDSGHRHHAALRALAHRWLKILLAMRQSGDVYDEHVFLDSQRRYLLHKPAIQTAK

SEQ ID NO: 161802 - protein, 352 aa, unidentified
MEGQKIFIGIDVHKKNWDVAIAPAVGNVKRHTQKASAKELFDFLKKHYPDGDYLAVYESGFSGYSTYYALKEVGIECMVIHAADVPTTQYEEVMKTDRLDSIKLVRSLKAGLLKGIYIREKENIDDRSVVRIRKTIQKQLSGYKARVKHMLHCNGVSLPERFEKPGSHWSKAFIKWLKEDVRLLSSTRNSLDLLIRQVETIRMTLLEATKMMRNLSQTERYKRKFDLLMTVPGIGVAVSMCILTEVYDVKRFQNENQFAAYLGLIPTSHSSGDKVAHGEMTFRGNKQLGPMIIEAAWITICKDAGLGSLYLRYKERMKPQEAIVRIARKLSNIIFAILKNEKEYVPYHQTGK

SEQ ID NO: 161803 - protein, 425 aa, unidentified
MHTKQYNRQMEKRQMIGDHTLVVGMDIGSEFNAACFMDKEGNVFGRYPKIYNSRKGFDYFQMMLVKTKRKHKFTDVLIGMEPTGHYWRKIAFFAKEKGYEVRFVRTTAVKHQRELDESSSGKSDIKDAHTIGNIVREGKYIDTVIEDSVFRQLRTLAHARERILRYIVGSTHGLQAVLNDYFPELRHLFWSMKAKGLWTLLETYPFPEDVRNAGLAAVVTLLAKGTGKKRHVREQAEQVYQAAAESVGLKAIGKADRARLTMYLEEIKRSDARRRLLEREMKELLKEIPLAQYILSLPGMGKVGCAVFLGELGNPEHFKNPRQIIKYAGYDPKENDSGLRVGRKIISKKGRWLLRKCLFFMVLRLVHRSSFFKAYYEHKKKGFDRPLEKTEALCAVILKLIRVLFALMRDRRTFTEELPRCEKAA

SEQ ID NO: 161804 - protein, 394 aa, unidentified
MRHAGIDIASETHVLAVITDNEEILLKPTSFAEDAEGYRKLFDLLGAPDDVLIGMEATGHYWKNLFAALITAGFAVALINPLRTHRFAGEDLERTKTDAIDALGIARFVAQKRPATTALPDGVTEELRELVHLRERLLQDFGDRLRQLHRLVDLGFPEFTRYVHTLDSQLATTILRQYPTAAALVGVPAKHLATLRYDQRHKVGLELAKSLIQAAQLSVGRHHGHAYRVQVQYTCEDLDVFRRRLRDIEGDIDTKLGEHEVGSLLVSIDGIGNQTAARIIAAVGDPAHFRSASAFAAYVGVVPALKQSGKRNGPRAAMTPIGNARLRATLWMPTLTAVRKNAWLRAHYDRLRQRGKMPKVALVACMHKLLFAVYSVAKHRRPFVPMLTTIEGLT

SEQ ID NO: 161805 - protein, 421 aa, unidentified
MVLGGTLPSSIDSKGGFDLARYHVGVDVGKVRHHVCVRDLSNDTYCRAFSVSNDQEGLAQFVASLDTLSEDHDDFLIGVESCPYGLNVSYFLMAAGFNLVEVNTFRAGQFRKAQGKKAKTDRIDARCVAAILSLGDHKPLCIPESISDNLRELTRFRSDLVDEKSMATIHLRETLSILFPEFEKVFRQIDSAASLALLMTFPGPEHVIAAGEERVGEVLLAASPHRMGKGMAKRIMEAALRTVGVTQKQPALGVKISILAKRIAELQSTIRGLEGQITALYDALPSKPKGFPVGRAPSLATIMSEIGDIRRFPTLKKFLSHLGWCPQTFQTGSYRMEHPRMSHAGNKYVRRLIWMLSVCAVQRVPRYREYFQHRVSEGKAKMHILVAVGRKLLSVLYSMLKTGAAYDPDWEENRRLAPARP

SEQ ID NO: 161806 - protein, 419 aa, unidentified
MAFKILRKNCCGLDVHKTWIYACIGITDANGRTEYKQARFSSFSNGLRDLADWLAKHGCSDVCMESTGKYWIPVLNILEKTCWVTLAHPKYTKPQKGNKTDRKDAKWICDLYMCGMVKPSFIPPPDIRQLRDLMRYRTKLTNMLTSEKNRALNCLTVSNLKLDDVFSDVFGKSSRSIIQYILEHPGEQFDVAPFLDRRCKHSVEEIQAAVDGAVSREQAAKLRECLQHIEQLTEHRENIEAEILRLVQPYPHQLELLRTVPGFAAAPLTAVALISEIGADMSVFPSAKHLVSWAGCCPRNDQSNNKVKSTRISRAGCYLKPLLVQIANAVIKSDKYPECKERYRRIKARRGHKKAIIAVCRMLLTAIWNVLSKLESYSAKGYLEDKLTEHSVVISKSQGLELLRKRGYIFKDEVSADSG

SEQ ID NO: 161807 - protein, 309 aa, unidentified
MSDVFVGIDVSKDHLDVASRPAGTVERFGNDAAGIAQLSEQLRRLAPKLVVLEATGGYEARVAAELALVAPTAVINPKQVRDFARAIGQAAKTDALDAELLAHFGEAVRPEVRPLRDEQTRELTDLVLRRRQLVEMIVAETNREQRAQSAVRVRIRKHLAWLRKEVSRIDDDIDTMIKQSPVWRANEELLRSAKGVGPILASTLLGRLPELGKLNRQEIAALAGIAPINHDSGQHRGKRSIRGGRADVRTVLYMATVNAVRHNPSLRGFYQRLVAAGKPKKVAIVAAMRKFLTILNAMMRDGKKYAIPA

SEQ ID NO: 161808 - protein, 420 aa, unidentified
MIMIGPMATPTIRLIVSLDRSDRTAAAVYIDRQSNEIREEIISLTPESMTAWWDALLLHHPANTIAVAFELPAPNLLAFFRPKNPGAIYALNPSLTHSFRRSYKASSARNDPSDARHQALMVSQRLDSLKPWTAPAPSLVALERLTIARRKFCDERTALTNQLEAVLKRYFPQALDLLHPDRWRPINIQFLRKWPSAASLQRTPLSRLKAFYLKQGSRSETQWERRTSIINGIITLAEPDISDLLHLSSLLDMLEALNAVILKYDNEIAKSYEDQRSDTKVINSFPGAGPVLGPRLFVAVARYAPNCTDSTSFAAAVGIAPVTNESGKSRKIYRRLQCDNHTRQTFVEWTNASWKMCSWANAYVRDRLAKGQAFNSIMRSLAYKWIRILWKCWQDRSYYDDSRYIEHLRSKGSPLVRCAA

SEQ ID NO: 161809 - protein, 372 aa, unidentified
MKDDSVIFIGLDTSKLKISVAIADGARNGEVRFFGNISSEPASVALMVNKLSKRGAKLHFCYEAGPTGYGLYRQLIELGHDCVVVAPSLVPKRAGDRVKTNRRDAVSLARLHRAGELTAVWVPDEGHEAIRDLVRAREAAVDALKQARQQLQSFLLRHGRIYTGRKPWTRAHTRWLACQAFDHPAHQILLAEYCQAIEDAGVRLDRLTKLVVETALSWSMAPVVAAYQAMRGVAFMTAVTFVVEIGDVRRFDNPRQLMAYLGLVPSESSTGERVKRGGITKAGNTRARRVLIEGAWTYRFPARVSPTIQARLEGLPRTVREIAWNGQVRLCARYRKLMAAGKPKVVAVTAIAREMAAFLWAIGQEVAPKAKS

SEQ ID NO: 161810 - protein, 359 aa, unidentified
MKEYISFDSHKHYTLAEREDVETGRTRQCRIAHARGAIREYLRRCEPGTPVAVEATANWYWIVEEIEEARLRPLLVHPRKAKLMMGLINKTDSLDLHGLNRLQRNGTLPTVWIPPAQLRDLRELTRVRMVLARHRTRMKNRIQATLSKYGLVVEGFSDPHGKRARAEMNRQIAQLPPQARYVTEILCAQLDFVEGQIHEQEKRLRALVPITPEIQLLMSLPGIGVILGAVCALEIGAVSRFPSAEHLAAYAGTTPRVHSSGDKTRYGGLRPDVNRYLRWAFIEAGHSTALNSERRSERHVSRLYRRLRARRGHYKAVGAVARHLAEASYYVLSKKEPYRDPALHTEGGQALAPGRTREV

SEQ ID NO: 161811 - protein, 316 aa, unidentified
MLTPCDWNRGIMMENVFGVDVAKSWVDVAGPEGYERVGNEDLKAFALRVSEQGGRVAFEASGGYERPLRMALAKARVPAIRINPQRARAFATSLGRLAKTDRVDAGVIREMAMRLDLPECPPEPKEVSQLKALQLRRRQLVEDAKREKIRLSQTSDKGMCASLRRVLRLLQREVAQIEATIAELIASSENLRDRAALLRTAPGVGPVSATALLAEMPELGTLTPRQVAALAGLAPMARDSGVRTGKRRIGGGRKGLRDVLYMAGLSAARNDPSLRAFSDRLRENGKAPKQAIIAVTRKLLIILNAMIRENRPYAPA

SEQ ID NO: 161812 - protein, 378 aa, unidentified
MGNKKSRKPRALAAVHDGGNVFGADPHKKTLTATVLDERGGVLATETFRVSGDGHRATEAWALSFGPITRWGIEGASGLGRHTAIYLIGQGHDVRDVCPTRTAEQSRRRREGKTDALDSVRVARETQADTAMPTAFKRAGGDTGPDETHELLSLWHKARRSILKSRQHLLNEAENLLGELPEELRAALPDTAAVRPRLRVLADRVNRTWDPATKLRLRLLDGHRTTIAELDAQDKEAAKALKELAKQARSTLSEVCGIAERIEAELLVEVGDPRRFTGEGGFARFNGTAPLPASSAEGDGEPVRHRLNRGGNRRVNACLHRIAVTQLRCDPRARKIYDDSRRRGHTTKEAMRVLKRHLSDVVYRRMTRDLKARRAASQ

SEQ ID NO: 161813 - protein, 343 aa, unidentified
MDYYAGIDVSLEESSVCIVDATGKIVREGKVATEPGALIAWFSTVKLKLVRVGVEAGPLSQWLYPELKKAGLAVELLETRHVRTAFKTMAVKTDRKDARGIAELMRVGWFRPVHCKSMNAQETRVILNTRNLVQSKLKDIEASARGMLRNFGLKVGSTTRIRFADRIKTLVEGHPTLEIMAEALLAVHAVLLQQFKNLEKRVRVMARHDEQARLLMTTSGVGPIVSLTYAAAIDDPARFKNSKTVGSHFGMTPKRYQSGETDITGRISKIGDKSVRLALYQAAHIILTKPVKSSVLKDWALRLAKRIGMSKAKVALARKLAVIMHRMLVDGTVFNPAEGAAKA

SEQ ID NO: 161814 - protein, 321 aa, unidentified
MTYVGIDVSKATFVVAYSSAKTSRTRTFKNTVKGVHEFIQTISPATHHCVLEATGNYSALLVYLLSEAGITVSLENPLKIKNFARVMLTVIKTDEIDARLIALYGEKMQPAPYKLRSEPILILKQKRTVLRQLKKQLVATRNLKGSMEVLPFFDPKCKKTIEKTIVFLEKQIKGMEEELASLAQGEYKKQMDLLTSIKGIGITLAAALIVATGGFTYFDNAKQLTRYLGLSPTYQQSGTSVNVKGHINRNGDSALRSQLYVAAFSSLRCNTECKACFDRLRSNGKPGKVAVIAVANKLVRQAFAVVTQGKPYVDGFKSEKP

SEQ ID NO: 161815 - protein, 350 aa, unidentified
MIIVGCDYHPGFQQIAFVDTETGELQERRLEHGEAAEKFYRDLAAQGMNVRVGMEASGHARWFERLLAELNFELWIGDATEIARKRERKQKTDRQDAQHILQLLMEHRFPKIWVPSWENRDLRQLLWHRHRMVQMRTRIMNQLQAVALNEGLRCKKRLWRQHGREQLESFRLAPWASRRREDLLELLDRLNPTIAELSQSIDQEAEKFPEVRWLMTHPGVGPLTALAFVLIIGRADRFQCGKQIAAYLGLVPLEDSSGNRRRLGHITKQGSSMLRFLLVEAAQVTVRSLPEWRGKYFHLMMRRGRKIAKVAMARRLAIRLYWMWRKGWDYEQVKKFGSHAGQLEPGDGVQ

SEQ ID NO: 161816 - protein, 348 aa, unidentified
MRTHFYPKEAMMKFSGIDLHSNNSVVVVSDEEDRMVFQRRLPNDLRQIMAALAPYREELAGVVIESTFNWYWLVDGLMEGGYRVHLANTTAIKKYEGLKYSGDMADALYLAQLLRLGLLPEGYIYPREARAARDLSRKRMQLVRCRTVQILSIENILARQTGGRMTSNQIKRLTTAQADALGLRPDVALALKANLAVCETLQQQIEVLEKRLKERVSLRQEYGLLKSVPGIGQTLATTIMLETGTVARFAKVGNFSSYCRCVDSLRESNGKKKGEGNTKNGNKYLAWAFIEAANFAVRFCPEAKRFYERKKRKTNSIVAFKALAHKLARACYHMLREEKPFDVKRCFV

SEQ ID NO: 161817 - protein, 389 aa, unidentified
MIYVGIDVAKDKHDCCILGLEADKLYPVFTIPNNKAGFDELYEKMFSVTDDKTKIKVGLEATGHYSLNLLGSLIDKGLPTCVINPLHTNLYRKGLSLRKTKTDKVDARSIAMMLMTNKTLKPYSDTSYHSEELKSLTRYRFDKVQERAKLKSSVARLVNILFPELEKLVPSLHMASVYALLSKFPGASYITECHLTHLKNLLETASKGHYGRDMAITLRNTARDSIGSVIPAKSMELKHTIHLIEVITEEIDEIEDSIKSIMDTCNSPIMTIPGISYRMGAMILAEIGDFTRFNYADQILAFAGLSPSTYQSGQLDSSYSHMEKRGSRYLRYALFNAAKFVCKWDENFGAYLSKKIGEGKHYNVAVGHATKKLVRTIYRMELTGEAYRR

SEQ ID NO: 161818 - protein, 415 aa, unidentified
MKFEKDTTGIQRYIAFDIHKEYALVGGQNGRQEWVLAPRRIGMEKLREWAEANLTKGDAVVIETTTNVWDVYDIIELLVSYVVVAHAGAVRQIAEARVKTDKKDIERLIRLLIADIVPEVWVPPVEVRELRGMISYRNRLVKTSTMIRNRLQSLIHRHNLVLPKGGLRDKAWWESQKVSAMEKIQIRQELSMLDEIAKHKAEVDAELGRQSLGEVWGRQAVRLLQLSGFGVIVSMTVLSALGDVSRFESAKKLVGYAGLGAGVHDSGKEHIEKRITKSGRKELRWALVEAAWRAIRISPYWKEQYEKYLKRMRKPNQAIVVIARKLLVAVWHVLTKEETDIHVSEEDLAYKMLVLSWALDEEVRLGLTYKQFAKYALMKLGIETDITRFVRKNVPRRLAPKEEVLARMEALGLSC

SEQ ID NO: 161819 - protein, 521 aa, unidentified
MPRPRTSRPRKVRKAFVLQKPCGQLTPRVQAVGAEHFGIVAVDCAKARSRYFLADFYGRTLLEPATVAHNRGDFQAAIDRVRQAMRQHQLADLVVAIERTGEYHRPVQHAFRQADFETRLVHPFTSKQYRQPADPGNKTDDTDLAAIWRATTHGFGLLEPTWPDNYLTIQLLRRHRRDLVDKNTILQCQIREVLHAAMPGYAELFCHFWDDSPAPLVFARHTTSADAVRQQGIAGLQQIANQAGLRCRTDTFHKILAWAEQAAPASGNVLDRRRILIGLDDDRLAKTRQILELERDLAHRVVHTPYLLLMVIPGINVVTVADLAGELGPISLYVNANAITGRAGLMPSRYQSDQVDCANGPLRRRGNRRLRAVLMQTADNLVQCNHYFHARADQWTRAGKDARWVRVKVAKIFSRLAFAMVAGEQLFPHPCCQKRHYIIGKLLSFHSGHGTELQAMRHDLEVAAAQLPAKQRALEAEPLQKQLDDLANRRGPQPLAEIIPLVLARLAGRVVQSTPSESAGP

SEQ ID NO: 161820 - protein, 347 aa, unidentified
MRFYTRQHRFYCGVDLHARSMYVCVLDQEGSVLVSKDIATAPEPFLELIAPYREDLAVAAECMFTWYWLADLCAREGLVFVLGHALYMRAIHGGKAKNDRIDAHKIAALLRGGMLPQAYVYPQAMRATRDLMRRRNYLMRQRAELLSHITNTNHQYNLPALGVRPARPAERSGLAEHFTEVPVRKSIEVDLSVIEHYDRELPRLERYLESNAQAHDPMALAIVRTIHGMGKVLGLSILYEIHDIGRFARVQQFLSYCRLVKPTKESGGKILGHSGRKIGNAHLKWAFSEAAVCFLRANKPAQALRARLMAKHGKGKSLAIIAAKLARSVYFMLKRGKAFDPERFFAH

SEQ ID NO: 161821 - protein, 457 aa, unidentified
MSKRKKKVQSQSFNLQSLPKQLQHINLKAAGIDIGSEHHMVAVPEGRAEVAVREFSTFTADLNALADWLQQCGVTTVAMESTGVYWIPLFELLERRGFEVKLVDARHVKNVTGRKSDILDCQWIQQLHTYGLLAGAFRPADEICVLGSYLRQREMLTQTASMHIQHMQKALQQMNLLLHNVVSDITGVTGMKIIKELLAGERDPRVLASNRNKQCHNDRATIAKSLVGNYREEHLFALRQAVDLYEIYQTKIGDCDEAIVKQLSAQPDVKDEPPPPGQKLTPARDRQRGGVNVRDLLFKKSGVDLFAIPGLGADTLLVLTSEVGFDLSPWKTVKHFSSWLSLCPGTKISGGKVLSRKVKRNPNRAAQAFRMAAATLARSQSALGAFYRRVKSRTGGKQAITATAHKIARIYYALLTQGTTYVEMGQKAYEQKYQERRLKHLTTQAKSLGFQLVPSTT

SEQ ID NO: 161822 - protein, 346 aa, unidentified
MKKAKSILKISYGIDISSDDFSASYGVFYSDLEREVTNIKKFKNTKRGFDKFLGFTKKHQSKINPDGSIQTWYVMESSGVYYENLAYYLNEKGLNVHVALANKVKSFIKTLENKSKNDELDSIAIAQYGLEKQLLKWMPPSPEMKGLKELSRELSALKDMRTVAKNQSHAKNKAHEINNSSIKRIKELIRYLNKQIKKVEKELVTAVKENPELKTFIEDVTILKGVGFQTVVLVIAETNGFEGILNRRQIASYVGLDIRENQSGKKAGKSSISKHGNKYIRKGLYMPALSCKKHDKKMKDLYERILERHGGKNKKIAVVAVMRKILHIIYALWKNRTKYDPNYGIA

SEQ ID NO: 161823 - protein, 414 aa, unidentified
MQNINIFVGIDLAKDTSKVCILESSGKVVLKPFSIPNNIEGMGEMLSKLKTYTHDEVIFGMEATSNYWENVLSFLSLKGYAAVLLNPYQVRKFCQALGNKIKTDTSDSVAIATLLKTKDFEEITVSTEDAINLKELVKTKYSLETRVKDCKKAILSMLNLVFPEYSQHVAHPFSKVSMHILKEYPTATHMARDGSVSRLLKIFRKYQGCNFSKDKAKALIDSARASFYSGKASPARGLSLKVHIEEIAFLQDKIAQIEAQIIAILCPKDKDTSPTDYEILNSIKGVGINTIAAFMACVGSVERFSNSAKLISYIGFYPRIFESGSYRKQNPSIQKAGPKELRYMLYLTSVASIKHNPQLRKYYLDRVSAGMPAKKALIKVAVKIAKIMYSLLKEKQIYDPVKVFYQNDICPLVA

SEQ ID NO: 161824 - protein, 317 aa, unidentified
MNTLNNQNEINVGVDTGKTQLDIYIRPLDIYFTVENNDGGIKHAIKTLKKHPITRVTIEATGRLEHPFIMACAQANIPFVVANPVNIKRFAGAIGQKAKTDKLDAQLIAHFGEAIKPPLSSLKPEQMRLMSDLLSRRRQLMDMQTMEKNRSQIMPKTISSLIKPILTALKNQIEKVDLKLQKLIKECDEYRVKNDIIQRVPGVGNVVAFNLLSDMPELGCVNNKEAASLVGVAPFNRESGAYQGKRMIRGGRPKIRTAMYMAMMSAIQCNPKFKAIYHRLVAAGKPKKVAIIACIRKLIVIINSMVRDGVMWDPKMV

SEQ ID NO: 161825 - protein, 343 aa, unidentified
MEYYAGIDVSLKDSSVCVVDATGKLVREIKVASEPEALVRFFDELGLSVSRIGLEAGPLSQWLHTGLIAAGLDAVLLETRHVKAALSAMTVKTDRKDARGIAQLLRMGWYRPVHAKSAPCKDSRALLVGRKLLQGKLLDVELSIRGILRGYGLKVGEVSRGRFEARIRELTTGHAILETVIGAMLAARMALWNEFTKLHREMLKIARADRVCRRLMSAPGVGALVALTYRSAVDDPSRFGKSDTVGAYFGLTPKKYQSGETDRDGGVSKVGDGMVRTALFEAAHIMLTRAVRFSSLKRWALDVAKRRGMKRAKVALARKLGVILHRMWVDATEFRWSNAVPAA

SEQ ID NO: 161826 - protein, 346 aa, unidentified
MEHYAGIDVSLELSSECVVDTQGKIVKETKVASEPEALVDFFGSLGLAVTRIGLEAGPLSQWLHAGLKRAGFEAVLLETRHVKAALSAMTVKTDRKDARGLAQLIRMGWFRPVHAKSMGSQEVRALLVARKQLLGRLIDVELSIRGILRGFGLKVGAVTRKGFEARIRELVMGQATLERVAGAMLSARAALKVEYEKLHKTVLAIVREDAVCRRLMTVPSVGPLVAITYKSAMDDPNRIAKSKSAGALFGLTPKKYQSGEKDVTGGITRAGDEMVRTALYEAANVLLARITRFSKLKRWGMDVAKRRGSKRAKVALARKIAVILHRMWVDGTTYRWTDAQPTAVQV

SEQ ID NO: 161827 - protein, 406 aa, unidentified
MGYCCGLDWGGHVHAVCVIDDADGHIVARFTIDHSAEGLADLRRRLDKIAPAACIPIAIERPSGLIVDALIKAGHPVVPIHPNVVKACRPRYRAAGGKSDPGDAYLLADVLRTDGHRFHRLSPSSDAVKALRVLVRTRDDLVADRVALSNRLRSLLEGFWPGAAVIFADIASPIALAFLQRYPTADSALRLDEKRLAAFLAQQSYPGRRSPADLLARLHAAPHGTSGEAESRACGELVRGLATVLTSLGAEIAKMTLRIEQTVAALPDGQIIMSFPRTGRICAAQILVELGDVRERFQTEQQLAAEAGVCPVTHASGKQRGVCFRWACNHRLRRAVTCFADNSRHASAWAADIYKRARGRGCDHPHAVRILARAWIRVLWRAWTDHRPYNEESHRAARIFASIQQG

SEQ ID NO: 161828 - protein, 349 aa, unidentified
MEPSMNEITRIAIDTSKSVFTLHGTDEQGRALLRRNVRRRDLIGLFEHLPAVDVALEACGGSHHWGRTLMALGHRVRLIPPQYVKPFVKRSKNDRNDAEAISEAASRPGMHTVPVKPAEAQAAAMLLSVRELLVRQRTQLVNALRGHAAEFGLVTAKGDKGLAELRSEIAAASSNDAETLPGAAIHALNLLGSEVDRIEVRLAQIEKTLIAQHKTNAQSRRLAEIPGVGPMSALNFSLRVDASQFRSGRHFAAWLGLVPREHSTGGKQRLGAISRAGDERLRQLLVLGATAVIRYAKPDRPGVSPWLIALLGRKPRKLAAVALANKMARIIWAMLTSAEPYRRPTPIAA

SEQ ID NO: 161829 - protein, 313 aa, unidentified
MITIGIDVAKETLVGVILSKSSGVLDSFTLENSPLEINNWLQSIKGKYTHITVASEATAEFHRTLALLCLEYKIPFRLLNPIVTKQFTKATIRKRKTDVSDALTIAKLAQTGEGRMVSEKSFDIAKSYSRTAAKLVQVAGKLHLMQMRLSTISPDDKVSFASLENCIKELKESTLVFRQQASDKIDGQKVKLLESIPGVGQTIACVLIAEIGDISQFRSAKALVAYAGIDPKVKQSGRGLKHNTRLTKRGSPYLRQALFQAAAVARQHDPELKTYYEKKRAEGKRYKEATVATSRKLLYRVYAVLKRQTPYTK

SEQ ID NO: 161830 - protein, 400 aa, unidentified
MLSIGIDVSKGKSTVCGMKPGGEIVYAPFEVQHTIEGMLELVSLLRSSCEEVRAVLESTGSYHCPVVAALLENGIFVSVVNSLRMKRFCSQSIRKVKTDRIDAMQIALYGLAYWQELQPTKLPEDTYRELQLLARQYYQMTSLLIKAKVDFNAICDQVLPGMQELMNDHAGRHKLSDFVLRYRHTTHILEMGETRFRKDYCKWAEKKGYRNCERMAALIFATAQNGIPVLPNAPSTQIVITEAIRVLHTVEASRDAILTQMQALAKTLPEYSLVREMPCIGDTLAPRLIAEIGDVRRFHSKRALIAYAGIDAPPYQSGKFCANNRHISKRGNRYLRKTGYEVMQSYVMHKPANDPIFTFIEKKRGEGKSGKLAMVAGLNKFLRVYYGKVTELYRSLPAIE

SEQ ID NO: 161831 - protein, 363 aa, unidentified
MTTIACSSAQAQIEVVGGVDTHQDTHTAAAVDSAGAMLGYCTFPATGPGYQRLLDWLHSFGTLRMVGVEGTGAYGAGLARHLAAQGVDMVEVDRPDRKARRCAGKSDPIDAQAAARTALGRVRTGVPKARNGQVEALRNLRVARRSAVNQRADCMRQIKTLIVTAPEALRERLRGLGDTRLLGYCAALRPDTTRIGEPEQAAKLALSQLARRYRGLTAEIGDLDALIRPLVEAINPRLLQLHGVGPDIAGQLLVTAGQNTERLRSEGAFAMLCGVAPIPASSGKTHRHRLTRGGDRQANAALYRVVLTRLRWDPRTRAYVERRTREGLSKKDIIRCLKRLIAREIYYVLHPSQTTQKPAALAA

SEQ ID NO: 161832 - protein, 322 aa, unidentified
MESQVSFNQVVSRGCGIDVHKKMLVATISGEGLRTETREFGTVTRSLTELKDWLLENRVTHVVMESTGVYWKPVYHVLEPSGLTVWIVNARHVKNVPGHKTDKQDSRWLCKLLLAGLLKPSYIPPREQRELRDLTRYRTKLVQDISSNKNRIIRILEDCNVKLSSVLSDTSGVTATRLIDKLCQGKEVTMGDIEEVYHKKIEATKEELFEACNGYITGHHIYLLGTIRGNNRHLESLIRDLDEKIKHALAPYENALERLREIPGLNRKSVEDLIAEIGLDMDVFPNEKHLSSWVGVSPGNNESAGKKKTDAPPTGTSRPNPS

SEQ ID NO: 161833 - protein, 343 aa, unidentified
MKLFIGLDVSLAKTAVCVINEHGKIVKEAQVLSDPQAIVDFANTLEGPVAIIGLEAGPLSQWLHRGLADARLEVVLMETRQVKGALKAMPIKTDRRDAEGIARLLHLGWFRPVHCKSVSAQEVRALLSARKAIQQGMIALELSLRGLLRNFGLKVGAISRGQFDARINQLVEGNSMLQAASGPMLRARTSLRHELAGLERQVRLLAKDDAVCRLLMTMPGIGAVVALTFRSAVDDPARFSSSKKVGPWVGLTPSRNQSGERDVIGGITRAGDANLRRALCQAATVMIHRGRSTWLRSWAAQVAKRRGAKRAMVALARRIGTILHRMWTDGTEFSSDRLLAKSA

SEQ ID NO: 161834 - protein, 384 aa, unidentified
MKKNSTAKKGPKALSNGKRNQVREMAAKQRLTIGLDLGDRTSRYCILDEAGETVSEGQLPTSQAGLSSLFAKMPSSRIALEVGTHSPWVSRHLAGMGHEVIVANSHQVKLITQSVHKNDRIDAEQLARLARVDPKLLSPIRHRGREGQADLAVIRARAELMEARTGLINCARGLVKPMGERLKKCDADQVKERMGEGLSAAAQTVIGPLLKGVEAISQQIGEYDQKIEAIAKRYPEVELLTPIYGVGRLIALTYILTLEDAERFAHSRDVGPYLGLTPKERDSGDSQPQLGITKTGDGLLRSLLVQGAHCRLRKGAPDSDLRAWGLGKMKSGGKNAKKRAIVAVARKLAVLMHALWSRGEVYDPLYNQQAALAAAAKGNRKAAA

SEQ ID NO: 161835 - protein, 331 aa, unidentified
MLGCDLHGSVVIDGTKVAADRAGLGQLTGLLDQARIRIGAQLVVVGVEAAGHYHQTLAAHLADRDDLLLRLVNPAAVAAVRKTQLNRRRKTDWLDAAAICDLLVHGEGSRLLLGDDAATALRPLWSGRKDLVDARARLRLQVLALVDCLWPGLTAHDTALGVRPVLRNLFTTKAGRILLGLLAQGWSPERIGTHDMARLKALFARHGCQLKVTVAARILARAHESLPPHPAATAGKPALLAALLATLETLDRQVTELEATMAGLLPHTEGAKLTQINGISTVVASGFVAFVGSARRWGDWSKVWRGAGLDPARCQSGPTDVNFSISREGSA

SEQ ID NO: 161836 - protein, 353 aa, unidentified
MKRTTKYVALDVHQATTVSSVREPSGRVIARSILPTEASALVEYFQGMRGAIHVAFEEGTQAQWLHDLLVPVVARVIVCDKRGEQRGNKADQKDADRLSQRLLSGDLRAVYHGSSNRALLHELTRTYSNLVEDSTRVMLRLKSLFRARAIHAAGQRIYTPAHRAEWLAKLAERGARFRAQVLFAELDVLRELRPKAKSAMIAEARRDPAWHVLRSIPLLGPVRVALLLATMKTPWRFRTKRNLWAYAGLAVVTHSTSDHEFVAGRPVRRRRKPLTRGLNRNHNRVLKSVFKSAASAALGRPGELRDLYRAMLARGMREDMARVTLARKFAALTLRLWKTGERYDPTKLTVQAI

SEQ ID NO: 161837 - protein, 407 aa, unidentified
MDRLLERCCGLDVHKDSICACLVVPGPDGKRTQTSRTFGGTTSDLLQLRDWLAEFGCKHVAMESTGVYWKPVYYILEDEFDVMLVNAAHVRNVPGRKTDVSDAMWIAQLLEHGLLRRSFVPPAEIRELRDLTRYRKTLIEEHAREANRIHKVLQDAGIKLSSVATDALGVSGRAMMKALIDGQRDPERLAALAKGRLRSKEAELQKALLGRFRRHHAFLLSALLAHLDFLDMSIDAVTVELEDLLRPFAASLGLLQTIPGVARRSAEVILAETGGDMSRFPTAGHLASWAGLCPGNHQSGGKRLKGTTREGNRYLRTVLIENALTAIRSKTSFLRTRYYKVKAARGHKLAIVAIAHQLLVSVWHVLSKKEPFKDLGADYYKRRNPKARITYLVRQLKDLGVEVPLAA

SEQ ID NO: 161838 - protein, 342 aa, unidentified
MQITTIGLDIAKNVFQVHGIDAGEKVVVRKQLRRGQVLSFFEALAPCLIGMEACATAHHWARELTKLGHEVRLMPAKDVKAYVKRNKNDAADAEAICEAVRRPTMRFVQVKSAEQQGRLMLHRARDLLMRQRTQVINVLRAHLAELGITAAQGTAGLKELLKVIANDADGRLPVDAHASLFVLAAELQAMQTLIGSLEKRIMAQHRASEASKRVATIPGIAVIGATAITATVTDPQAFRSGRDFAAWIGIVPRQDSTGGKQKLGPISKQGDRYLRRILVVGAHAVLKSAKQNPEKYPWLTQLLARKPFKVVAVALANKMARTARALLAHGGTYRAPRLAAAA

SEQ ID NO: 161839 - protein, 370 aa, unidentified
MRIIGCDLHARQQTLAMLDTETGEVVNLTLMHEGNNVREFYSKLPRPVLVGIEATGSMPWFLNLMEELGIECRVGHPAQIRAAEPRKQKHDRRDADLILKLLAQNRFPAIWLPSKELLDLRALLLHRHQWVRMRVRMQNALQAIALANGLRRGPALWSYDGQAKIAFLPLLPHAAYRRSALQAMYKNMQSEIENLTRRVAEQAGNRCGARLLMTHPGVGPVTALATEVFLGDPQRFTDSKTLASYVGIIPREYSSGEHQRLGGVTKQGSPLLRFLWGEAGAHAARRDPELKRFYRRKLVQKGLGKARVAVARKLGIRLWIMLRDEIDYQEFCRRGQIQQKTVRPVVGMPETGNGAKSHRPSDEATRLPES

SEQ ID NO: 161840 - protein, 399 aa, unidentified
MISVGVDVSKGKSTVCILKPYGEVVSSPFEIMHTEKGLSELSNMILRFDDETRVIMEFTGIYHQPILSYLQKNNIFVTTVNPFEMKQYRSKGLRQVKTDKQDSIEIARFGLDNWFYLKNHESGTRIYEELKLLGRQYRHYITMRIKSIQTLTHMLDYTMPGIKALLKGYNAENGKDKLSDFVEKYLHFDNITKMSEKRFVNSYLSWAKSKGYHQSKDKAVKIYTLAKDAIPTLQSTSTPVKMLVLEAVRMLREVNKTLTKILTQMQELSKSLPEYSVVRAMGGVGEVLAPKLIAEIGDVRRFHSGKALIAYAGIDAPPYQSGKFIGTERKISKRGSSNLRKIGYEVMKCLKSIKKLDDHFVQDFILKKEREGKHKRVAKIAGLNKFLRIYYARVMEVYD

SEQ ID NO: 161841 - protein, 322 aa, unidentified
MSVSVLGIDIAKQKFDAALLVDGKTKHKTCSNSVEGFETLMLWLEKQGIQKVHACLEATGNYGEDLAIYLHEAGHIVSIVNPARIKGFAQSELLRTKTDKIDAALIARFCSAMKPDPWTPPSPEIRFLRALVRRVDSLIDMRSQEKNRISTAHESVISLIKEHISYLDQEIEKIRRQIADLIGQNPHLKQRKELLDSIPGIGKATIPHILAELDDLEKFNHVRQMVAFIGLAPKETLSGSSIKGKPRLCKIGHARLRKALYMPALVSIQCNPVMIAFYNRLKDKGKNGKVIVCAIMRKLVHVIFGVLKSGRKYDPNYKPASP

SEQ ID NO: 161842 - protein, 423 aa, unidentified
MEVMHERVAGLDVHKEAVVCCVRIVAGGKASRECRTFETTTAGLEALLSWLTQSGCTHVAMEATGVYWKPVWNILSDGKFELILANAAHIKNVPGRKTDVNDATWIADLAAFGLIKASFVPGEKIQQLRSLMRARKQLVREQTRHIQRIQKTLEAANIKLDSVISDIMGLSGRRMIEAMVAGVRSPQKLAQLADRRIKASPKALYDALHGRLTDHHRFMLQLHLGQYDALGSSIAQIDAQVDAAIARIDEEAAAGRGSFRDLTALLDGIPGIASLAATSILAEIGTDMSRFASDGHLVSWAGLSPGQNESAGKRKSSRLRKGAPWLKTLLVQCAWAAVKKKDSYYKAQFNRLKSRRGPKKAICAVAASMLTAIYHMLKNGVEHNDLGASHFDRRPAAIKANRLVAQLAKLGFRAELQPLAQAA

SEQ ID NO: 161843 - protein, 376 aa, unidentified
MREKLRFLGLDVHAETIAVAIAEPDGEVRSLGTIANREESIRRLIRKLGPPEHLRACYEAGPTGFVLYWQLTQLGVECAVVAPTLVPKKAGDRVKTDRRDALKLARSHRSGDLTAVWVPDEDSESLRDLVRAREAAKQDQLRARHRLTKFLLRTGQRPPLGLKAWTEKYVEWIQQVHYTHPAREATLLDCLNEVQHMEQRVKRLEQSILEVVKLAPAPVQAVIQGLQALRGVAHISAVTIAAELGNISSRFESARKLMGYSGVFPSEDSSGQRIRRGSITKSGNAHLRRIVVESAWSYRHRPSIGARLRKRQEGVPAQITEIAWKAQNRLYKRYMKLMAAGKDQRKVMTAVGRELIGFIWAIGVKAEAACMQQKAA

SEQ ID NO: 161844 - protein, 427 aa, unidentified
MSAANETRQQPIAAFVGIDWADQKHDIALRAAGLEAKVERSKIAHQPEALSDWVLALRERFADQGKILICLEQSRGALIHFLMGYDCFELYPINPKQLDSYRKAFRPSGAKDDPTDGELLCKYVRLHHQELRPWRPDDEQTRKLALLCEKRRQAVDARSALSNQLKSELKQYYPLALAVLDNDLTTVLAADFLLKWPDFASLKKASAHKVRSFFYGHQCRSEKKIQTRSQLMESAQPLTRDSAIIEAGALTAQMLARQLQALAPYIRQYDEQIAQLFSQHPDRVLFDNLPGAGDALAPRLLSAFGSNRDRFNNVLEPLSFFGLAPVTERSGKTTFIHFRWACPKFLRQTFHEFAGCSVRFCDWAAAFYDQQRARGKDHHVAVRALAYKWIRILFRCWKTRQPYDPQRYRAALAHRASPLATDVKNSP

SEQ ID NO: 161845 - protein, 326 aa, unidentified
MSNILGIDVSKDKLDLVLLSEEGKYHKVIRNDLSGFKELDQWLISRHIDRVHVCLEATGQYGDEVSEYLYERGHDVSVVNPTRIKRYGESKLHRNKTDKADADLIAEFCLKEKPALWEPLNPDLKHLRALVRRLTDLQANYRQEGNRLTSGEKDDWVIRDISVHLEYLKASIEATEAEIQNFTNQTPGLKAKQELLVSIPGVGKKTSARLLAEIGEINRFENAPQLAAYAGLNPKGFSSGSSVHKKTRISKQGRSELRACLYMPAIVAMTHNPVVRALKERLQKKQLPTMAIIAACMRKLLHIVYGVLKSQMPFDPDYDRQFNFSS

SEQ ID NO: 161846 - protein, 348 aa, unidentified
MNALHYIGCDVHKKTISFCVKTAAGEIVEEGSLLAQRGALREWASARPQPWRGAMEATLFSGWIYDTLQPYGEQLEMAHPAKMKAISAGKKKSDTIDARTIADLVRCNLLPACYVPPPRIRELRRLLRYRSLVVSEAVRMKNKMAGLLMETGALYVKEKLHRKKYFATLLEELEEVPESVIDLLRLSRGALEMFESTQKRLVGELLADPELAQRVERLMTIPAVGEITALTRALEVGDPQRFRSSSDAMSYCGLTAALKSSAGKQQRGPISKQRNHWLQTTLIEAAKLAPRWNPQLAALHARELERGHRNRATLAVARKLVAYLLAVDKSGQAFQVRATLEVPTQKAA

SEQ ID NO: 161847 - protein, 406 aa, unidentified
MGQQVFVGLDWAEDHHDVYIEDGGGDRLGGGRLTEGVEGVARFHEWVVRHADDPADVVIATETDRGLFIGALVAAGYVVLAVNPMSTSRYRERHSTSGAKSDPGDAKVLADLARTDAHNHRRVAGDSELAEAVKVLARAHQSMIWTRQRQTNQLRSTLREFHPAALEAFDDLAGRDALAVLAIAPTPASGRGLSRSKIAAALRRGGRQRRIDARTVEIQTALRAEQLAAPPLIADAMGATVTALVAVIAELQAQIGRLETELADRFEQHPDAKIIRSLPGLGMTLGARVLGEFGDDPNRYATAKCRKNYSGMSPITRASGRSHVVLARYARNRRLADACYQWAFATLTASPGARAFYDTRRAAGDTHSRALRALGNRLVGLLHGCLRHRTLYDEQTAWGHRRQLAA

SEQ ID NO: 161848 - protein, 408 aa, unidentified
MNPLYVGIDVSSKSNVVYFMLPDGSKHCNFSVANSHTGSSQLVKRILSAMTSCSLDTVLIGLEATSVYGDNLVYFLREDAALARFNSKIHVLNPKQVSKFKEAYNDLPKNDLIDSFVIADCLRFGRINKEVYIGDYRYKALQNLTRARYFAVSNLIKEKQRFMNILFKKYSTMTQEKVFSDTFSTTALAVYDEFESAEALADMDLHELTAFIMEKGKNRFPNPNAVAKAIQKAARSSYRLPKTVNDSVNQVFSISITSIKALEAQIKEFDKAIATQMELLPNVLISIPGIGPVFSAGIMAEIGDINRFHNQAQLAKYAGLAWKQHQSGDFEAQTTRLINSGNRFLKYYLCEAAFSLVRCDKEYSDFYHLKYKEVNRYQHKRALALTARKFVRLVFRLLKDNRLYTSAE

SEQ ID NO: 161849 - protein, 470 aa, unidentified
MCFASSNEHSDVAWELPTLSIRVSREQSRPGAMQREKEVNKSAMSEAGSIQPEPEFAAFIGIDWADQKHIWCLQAAGSARRETGELEHTPEAVESWVAHLYQRFAQRPMAVAVEQSRGALVFLLSKYEPLHLFPVPSQMASSMRQALYPSGAKDDPRDADLLLDIVLQHRNRLRRLSPDSEATRRVQNLVEERRKLVDEKTAQINRLTDHLKVYFPQMLEWFGRLDSDVVCALLERWPSLEELQKAPPASLRAFLRKHRCRDRERIEHRMEAIRQSIAAIHDRAVIEAKSAAVRVIVRVVRVLGEGIEDLDGQIEEAAAAHPDFFIFNSLPGAGPVMAPRLLAAFGSQRERYRSADELQSFSGIAPLTESSGKRKWVHFRWACPKFLRQSFHEWAGHSIVQSEWARAYYQQQRSKGNTHHEAVRALAFKWIRIVFRCWQDRVAYDENTYLAALVKRGSPLGAIVATGKAL

SEQ ID NO: 161850 - protein, 349 aa, unidentified
MASMPDGGCMVTVGVDSHKDAHVAAAVDQLGRIVGTTQVPTTVRGFAQLERWACRLGPVARFGLEGTGSYAAGLARWLAERGHEVVEVNRPNRQLRRRRGKSDPVDAEAAARAVLAGAGLARPKRANGRVEMLRVLRIARRSAVKARRQAGQQIDSLIVTAPDRLRAQLRGRELAGQVQVAAGLRPGTLDGPLAATKVALRALARRYQALTVEIQQFDAQMATLTAAVAPRLLARGGVGPQVAAALLITAGDNPGRLRSDAAFSMLCGVAPLQASSGKTVRHRLNRGGDRQANNALWTIAVCRMSYDPRTIAYVKRRTQQGKSTKEIIRCLKRSIAREVHRDLQAALAT

SEQ ID NO: 161851 - protein, 367 aa, unidentified
MNILAIDLGKFNSMCCFYNTDTNEYRFQAAATTRHYLTSVFKNHKIDLVVMEACGPSGWISDLCQELGLKTLVCSTNDAAWLWKNVKRKTDKDDSLKLARMAMMGQLTPVHVPKHPVREHRSLVKYRKKLVGRINQIKNSIRGLFAGRGIEIDKGQKAWRTGRELIDSHRKPLAECSMEELWRGQLALELTQLDSLAQQQADVERRLDLIAKDDERIQRVQTIPGVGRRTAEAIVTALDDVDRFENARQVSAYIGLVPRQYQSGETDRNGRITKRGSRLLRTMLLECAWVSLQYNAWSRATYDRIHGGQQTRKKKAAIALARKIAVVAWSMLKHKTDWDPQRAGIAAEATVEEDPPKRTQTKAAVIA

SEQ ID NO: 161852 - protein, 344 aa, unidentified
MEYFAAIDVSLELSSLCVVDGTGRIVREAKVASEPDALVRYLRESGLVLTRVGLEAGPLSRWLHAGLTEAGFEAVLLETRHVKAALGAMTMKTDRNDARGMAQMIRMGWFRPVHAKTVPAQEIRALLVARKQLQARLNDLELCLRGILRGFGLKLGDVAKGRFEARVRELVAGQRTLEGLAEPMLRARAALRAEYAAVHREVLRIVRLDADCRRMMTVPGVGAIVAVTFKAAVDVPGRFKRSRDVGAHFGLTPKRHQSGEVDRSGHISKTGDAQVRTALFEAAHVMLLRAQRFSALKAWALRIARTRGLKRAKVALARKLAVVLHRLWVDGTEFRWNREAAASA

SEQ ID NO: 161853 - protein, 412 aa, unidentified
METVVERPGALDVHKAQVTACVRVPAANGSGREQHVAEFQTTVVGLLTLRDWLAAHGVTQVTMEATGVFWKPVWAILEDEFELLLVNARHVKQVPGRKTDVKDAEWLCQLAEAGLLKASFVPPKPIRALRNLTRYRKTQIQERAREANRLHKALEDTGIKLDCVASDILGKSGRAMLDALVAGTTYPEVLAELAKGRLRAKLPALREALEGRFDQLHAVWIGAILAHLDFLDEQIASLSQTIGEQIAPFEKAVELLCTIPGVQRRTAEVIVAEIGLDMSVFPTAKHLASWAGMCPGNDLSAGRRRSGRTRKGSKWLDWALEEAALAAVNNKDAYLAAQYRRLRPRRGHKKALGAVKHSITCAVWHMLSTGELYNDLGGDYFRKRDPQRTTKRLIAQLEALGHTVTLQEAVAA

SEQ ID NO: 161854 - protein, 342 aa, unidentified
MYYIGLDVHKKTISYCVKDARGRIHDEGKIGATRNDLDSWMKTLVRPWMVAMEATIFTGWIYDHLLPHAERVKVAHPLMLRAIAASKKKNDRIDAGKIADCLRCDFLPECHMASTEIRDRRRTLRYRHLLVRQMVQMKNRVSGLLMETGVSHNKQRLHKVGYFGELLSTNKEVHESIRPLLRLSRETIVRCQKTEYALVSSLQRDPLLAERIKRLRTVPGVGPITALTWALEMGDVSRFRSIKQAISYCGLCGEEKNSADTVLRTPLSKQRNKHIQHVLVEAAKLAPRQSHELALVYEKEKQKGNANRATLAVARKMVAYLLAVDRGKRAFVPLEDHSTTAA

SEQ ID NO: 161855 - protein, 413 aa, unidentified
MQVVYERCCGIDVHKQTVVACAIVSGADGQPVKDTRTFATMSADLEALAGWLQGLGVTHVAMESTGVYWKPVYNLLDGRFAILVVTAEHIKALAGRKTDVQDAEWIADLLCHGMLKGSFIPSQVLRELRDLTRYRTKLGDEHKSAVNRVQKVLEDANIKLASVASDVMGVSGRAMLDQIVAGQSDPAILAELAKGRLRDKQDLLLKALSGRVRPHHRFMLAQHLSHIDFLDEAIDQLDQQIQEQMRPFAAALATWDSLPGINQRIAEIIVAEIGADLAPFEDAEHLASWAGMCPGNNESAGKRKSGKTRKGSPWLRRALVEAAHGAAHTKGKYFQGLYRRLAARRGRQRAAVAVGHSLLVTGYYLITRQTKYEDLGGNYFDERDREGVKRRAVKRLEKLGYRVDLVPSAAPAA

SEQ ID NO: 161856 - protein, 410 aa, unidentified
MSLVGALFFVGVDWAAKTHAVCVLDPAGRPVAAFPVAHTAAGFTGLIRRLAKLGTPGDVPVAIERPDGRLVDALLAAGHPVVPVKPNAIKTWREGEVISGAKSDPGDAHVIAEYLRLRAHRLRAATPLTEHTTALRIVSRTRSELVEARVAATNQLSALLDTHWPGAKEVFADVESPISLAFLTRYPAPAHAAALGEKRMAAFLTKHGYSGRRSTTELLTRLRTAPAGTTSTVIAEALRDAVLAMVAVLTTLNTAIKDLDRSAAAHLYEHPDGEIFTSLPRAGLVNAAQIRAELAEHSAYTGPEAIAALAGLVPVTRASGKHHAVSFRWACNKRLRVAITTFADNSRHASPWAAGIYQRARASGKDHPHAVRILARSWVRVIWRCWIDQQPYDPTRHGGAAQLLDHTTAA

SEQ ID NO: 161857 - protein, 377 aa, unidentified
MSKVLFVGLDVHAETIAVAVAEQGGEIRSIGTIPNRFESIRKMIHKLGPVKHLKACYEAGPTGYVLYWQLTQLGVECQVIAPSLVPTKAGDRVKTDRRDAQKLARCHRAGDLTAVWVPNAAQEALRDLVRAREAAKKDQLKARHRLGKFLLRHGRQRPEGVRAWTSKHREWIKSSVRFEEAALEATLADYLEEVDHVAARIVKLEKAIDEAIQQAPPEIRAVIEALQALRGVAQTTAASIVSELGSLSRFPTAPQLMGYSGLVASEHTTGNQVQRGGLTKTGNGHLRRVVVEAAWAYQHRPNVIGYLLRRQKNLAISDEIKGIAWKAQQRLHKRYKAMDARGKNKNQIVAALGRELLGFIWAIGVKVEEQQRLSKVA

SEQ ID NO: 161858 - protein, 368 aa, unidentified
MFTERTSVGLDVHARSVAAAAIDSVTGEVQQTRLTPSHEHIRSWISELPGPVAVAYEAGPTGFGLQRALTDAGIRCEVVAPSKLHRPSGDRVKTDARDALHLSRLLRLDEVTSVSVPSVSQEAARDLVRAREDCRGDLMRARHRLSKLLLRHGIVYYGGAAWTGAHDRWLRTEAAPQLTAPATRMAFDADYDHVLTMQARRGRLDSAIEHIARDCEFTPIVRRVSCLRGVSTLTGFALAVEIGDWNRFTGNTIGSFVGLVPSEYSSGSSRVQGTITKTGNTHVRRLLVEAAWHHRARYHVGAVMRSRWEQASPAARARGDEGNRRLHGRWVGGFLGTPQASGCRQRSDCPRAGWLVLVPGGHAGLIAT

SEQ ID NO: 161859 - protein, 459 aa, unidentified
MSRKSKSQSKPQAAPVVEWETLNPDAAGLDIGASEIWVAVPPDRDPHPVRSFKTFTPDLQALVAWLKACRVTSVAMESTGVYWIPIYELLEASGIKAYLVNAQHIHNVPGRKSDVQDCQWVQRLHSFGLLSASFRPEAEMVVVRAYLRHRAMLIEHRAPHVQHMQKALHQMNVQLTQVLSDIAGQTGLAMIRAIVAGERNPVTLAQLADPRCHSSQDEIAKALTGSYRPEHVFALKQALALYDAYTGQLVECDRQLEQQYAAAKPRFDPDDPAHPLGPDPKPQSRRRNGPDFDVRTPLFKLVGVDLVAVDGFDESTAQTVLAEIGTQMDRFPSAKHFCSWLGLAPHNDITGGKVVRRHTLKTHNRAAQALRMAAQAAGNSHSAMGDYFRRMRARLGPKDAVTATAHKLARIVYHMLKDRQPYNPLTPEAYTDQMRQRELNYLKRRAAQHGWTIQEPATG

SEQ ID NO: 161860 - protein, 498 aa, unidentified
MESDFTVPSRIEDSSHPTPGQRLDPLELAVEDPGLKLAPYGVGIDCHSRFIQVCVYAQTGGAYLRFEEEFSTRWEDLTRAKQWIVAALTSVGHVVGSSFRYTLESTGCYHLPVCLAWGGEPCLVNPTLASPSRRKTDTLDARLLAYHALTGLWPATYLAPSHVQTLRVLMAARKREVRRATQSLNRINNLLLRFGHTVGSYVPLSRMDVRPLVEDLLEGRPCPPLRGVSTIPVPEPVVRLIQQAYSEYDAAKRKATDLTKQAAGCARLWTVVTERGEIGGAETLNYLCSVPAVGEVTALTWLAEVGDWRRFPTSKAAAAYAGCDPSLKVSAGHVTSQVRRRGNENLHAALVQAAQYAVRTATEPFGQWGRRLWLGGGKGGWQRAVGAVARRLAMGLYWVHRKGEFFTYEGYGLALRPEIPLDISVQEMGLPAGVLRVVLRQGWATSGDIVTAADKGFRAYPGVGQKTAEVLSNWLKTQLSQKGRKVSASGASCSPGNV

SEQ ID NO: 161861 - protein, 465 aa, unidentified
MPNTRKKHARLQRPPDPTAGLPPLNRHAAGIDVGSAEHDVAVPPDRSPEPVRRFASVTADLHALADWLHACHIDTVVMESTGVYWIPLFPILEARGFAVHLVNARHAKNLPGRNTDIADCQWRQKLHTFGLLNSSFRPTDDICVLRSYLRQRDTLISAAATCIQHRQKALTEMNVQLANVISDISGVTGLAILRALLAGERDPAMLAAFKDDRIKASTHTIAKSLEGNWREELLFHLRQSLELYECYQQKIAECDTQIEAHLLTFDSKIEGSAPPLPTPKRRPKKARRHEPHFDLHTQLYRISGVDLTRIDGIEVLTAQTLIAEIGLDMSRWKSEKHFASWLGLCPDNRISGGKVLTRGTRDVVNRAADALRLAAQNLLHSKSALGAHYRRLRARLGAPKAITAMAHKLARLVYRMLKFGQQYVDKGIEHYEARFRQQRLQWLQRQARELNLQLVPNQPVPSPVS

SEQ ID NO: 161862 - protein, 346 aa, unidentified
MKIIGCDYHPSFQQIAMLELETGEYTRKKLMHGSGEAEQFYRGLRGEEVRVGVEATGSMRWFERLLQELGQELVMGDATRIRKMAVRRQKTDRRDAEHLLELLEQGRFPAIWMPSGEERDLRELVLHRHKLVQMRTRVKNQLQHVALNEGLQKKRQLWTRQGREWLEGLRLPPWTERRRKDLLQFLDELNAKIEELDGAVSEAASQDERVRLLRTHPGVGAVTALAFVLVVGDVARFRRSKHLASYLGLIPAESSSGARRRLGGISKQGNTLLRTLLVEAGQSAARCDPELQRAYQRLCRKKQHTGTAKVMVARKLAVRLYWMLKSNQPYARARMQNSPSHSVSAA

SEQ ID NO: 161863 - protein, 349 aa, unidentified
MKTEIAVLGIDLGKNSCSLAGLDGTGAVIKRRRMRPETVVTFTKELPPCVIAMEACCGAHHLARLLAAQGHDVRLMSPEYVRPYVKAQKNDDRDAEAIAEAATRPTMRFVSMKTEEQLDMQTLHRARDRLVGERTALINQLRAILLERGVTVPQGRSKLERSLIEMFDGDEAEPPATLTPRLRALIADMRAEWRELDRRITAFEDEFVARTREDEAARRLISIPGIGVMNATALIAAIGNGETFSRGRDLAAWLGLVPRQITTGGRPRLVGISKRGNKYLRKLLIHGARAALPSLLTSSTPLGGWLRGLTARVHKNAVVVALANKLARIAWAVLRNGGTFDAKSASGMA

SEQ ID NO: 161864 - protein, 446 aa, unidentified
MSLDCCYEHAGLCPGRGPSGPAPGGDGRLPEERRDVMEVMFDRVAGLDVGKETVAVCLRTPGPKGRRRAETRTFKTTTGSLQLMRDWLVEAGVSIAAMESTSVYWKPPFYCLEEVMEVWLLNAAHMKAVPGRKSDVRDAEWIAQLLEHGLLAPSFVPPPEIRRLRMLTRYRVQLMGDRRRDIVRLELMLEDASIKLSSVASSLKTVSARAMLTAMINGETDPLRLADLAKGRMRRKIPDLAQALTGHFDANHARLARSMLRQLDLVDQALAELDAVIVDACQPWAHQIELLQTIPGVGEKVAQVIIAETGGDMARFPTAAHLAAWAGLAPAMNESAGRQTPAGKRHGNKWLTAMLVEAAGSVGRMHGKNYLAAQHARLLKRRGMGRAQVAVAHSMLVAAYWMLKRDEPYHDLGADWHSRRSDEAHTRRLIAQLEHLGHTVIIDPAA

SEQ ID NO: 161865 - protein, 326 aa, unidentified
MQIAVSFFGADVGKAEIVVADHGRAKPVTQILKNTPSSLSKWLQTLPQGSVLAMESTGGYERMLADLAHERGLKVYVLNPKALHHYAKSQGQRGKTDRLDAIMIARFIASEHERLHPYQPCAQYIERLRQMLRLRRMAVITRTQLRLSSERHHQVHDAQAQVQKALDALTELANSLEDQMLAEIQAVPALAQDFKLLTSIVGVGNLTATALVTTFARIPFTSSDAVVAYAGLDPRPKESGTYKGMRKLSKQGDAILRNLAYNAATAAARSITFKPMYQALLAKGWATTQALNIIARKLLRIAFGVWKSRKPFERELFLANQACVKP

SEQ ID NO: 161866 - protein, 344 aa, unidentified
MQTMYYIGLDVHKRTISFCVKDGSGVIHAEGTIPATRLDLDHWMKTLPEPWTAAMEATVFTGWIYDHLQPHAAALKVAHPLMLRAIAAAKKKNDRIDASKICDCLRCDFLPECYMASTAIRERRRTLRYRSLLVRQMVQMKNKIGMLLMEAGVSYNKQRLHKAGYFRELLATNPDIDEGLVSLLRLCRETVVRLQKTESALVRSLERDSLLMDRVERLMTIPAVGPITALTWALEVGDVRRFSSIKKAISYCGLCGAEKSSANTVQRTPLSKQRNKHLQTTLIEAAKMAPRNSPELAMLYDKEKQKGNANRATLAVARKLVAYLMAVDRGQRNFQVVETNCIAA

SEQ ID NO: 161867 - protein, 414 aa, unidentified
MEDILECGCGLDVHKESIVACLLKGTPITGNKPEKEIQEFGTQMKDLIQLREWLQDRHCTYVAMESTGVYWQPIYAILEQSLSDEMHLLVVNARHMRNVPGKKTDMRDAEWIATLLRAGLLKGSFVPEQDIRDLRQYTRYRKALIRDITSQKNRIEKLLQASGFRLSSFLSDIFGASGMGLMQELIQVGYLSQESVMTCLKAAARKKADEILSNLNGMLSVPQRKLLKMQLDHLKDLQENLQEVDDHIHTDFTKFERPIQLLDSIPGIDIIAAYTILAEISANLTAFPTAQHLCAWAGLAPGNHESAGKKRKQRILHGDPYLKTVLCEVAWVVAGQKKLYLSSWYWRLKQRTDSKRAIVALARKLLVIIYAMIKSSQPYNEQKFIERKHVVEQKHVKRMINELEKLGYVMSAAA

SEQ ID NO: 161868 - protein, 318 aa, unidentified
MAQDDRVVVGIDVAKDKVDVCVRRLALQQVFPNSAPGHRKLVAWLRQHQVNKAVMEASGGYERAWAKVLRQADIEVRIVDPRRVRNFALSAGRLAKNDPIDAEMIGWFAETFEAPGQIHDAAREELASLVKARKRLIDLKTQLQTQDEHAAPKAVEKAHTRVLKSLATEIAKLEAAICATVKATPEFAERAEIIESVPGLAETASATLIAGMPELGQVSDVVAAALIGLAPYDDDSGKRRGERHIKGGRRWVRNAIYMPCLGAATLSNPVLKAFYQRLIAKGKEPKVALVACMRKLIIILNTLIARRQKWDPSRYARA

SEQ ID NO: 161869 - protein, 356 aa, unidentified
MHDITPDAIVIGVDTHKDAHVAVAINGLGARLATASFPVTTQGYRQLADWAAGHGAVHTIGIEGTGSYGAGLTRSLTAMGVRVIEVGRVNRQLRRRHGKTDTVDAESAARSVLAGDAQGQPKTGDGAVEMIRHLKIARDTALKARTQAMVTLKTLLVNAPQPLRERFIGITGKMTLIRGLAALRPGMPVSPTASAKMALRALANRWLMLDAEIKEHESVLEVLVRAQAPALMGAPGISTGTIADMLVVLGDNPQRIRSEAAFAKLCGVCPVPASSGKTSRHRLNRGGNRRANAALYRVALVRMRHHPPTREYIKRRTAEGKSPREIRRCLKRYIAREIYQHLCTGKHPAKHYAEDA

SEQ ID NO: 161870 - protein, 386 aa, unidentified
MAGQSLKQGGRVVGNHSEVFVAFDTSKLRNSVAIAEAGRTGEVRFFGEIDNAPAATEKLVRKLAAKYSRLTFCYEAGPTGYGLYRQIEALGHECVVAAPSLIPKKPGNRVKTNRRDALNLAKLLRAGELTAVWVPDTRHEAMRDVVRARGAAVDDLKSKRQQILSLLLRLGRYYPGKKTWTRAHMIWLVSQKLAHREQRIALEEMLLAVRQAQERVVRLDAVIVAAVPDWSLAKVVTALMALRGLDLIAATIFLAEIGDLSRFASARELMAYLGLVPSEDSTGETVNRAGITKAGNHRARRILVECSWSYRHPPRVGKKKLDKVAAAPRDVQDIAWKAQARLTARYRALTRRGKRPTVVVTAIARELAGFIWAVGRAVSAPTTPAM

SEQ ID NO: 161871 - protein, 405 aa, unidentified
MNAVGIDASKGKSMVTILRPFGEIVSSPHEVRHTSDQIDDLIREIRSLEGESRIVMEYTGRYHEPMARWLSEAGLFVSLVNPKLIKDFDNDSLRKVKTDKADSVKIARYTLDKWHKLKQYGAMDELRNQLKTMNRQFGYYTKLKTAMKNNLISLLDQTFPGANTFFDSPARSDGSQKWVDFVDTYWHVDRIRSMSLVAFTEHYQKWCKRKGYNFQPDKPAEIYESVCNIIPVLPKDEVTKFIVRQAVNQVNTASAAVEELRTRMNDIASQLPEYPAVLAMKGVGTSLGPQLMAEIGDVTRFTHKGALTAFAGVDPGKNDSGSYSQKSVRTSKRGSAPLRKTLFQVMDSLIKTMPQNDPVYEFMNKKRSQGKPYYVYMTAGANKFLRVYYGRVKEYLSEHPETAEN

SEQ ID NO: 161872 - protein, 411 aa, unidentified
MLFVGDDWSEEHHDVEVQDEAGRKLAVRRLPEGAAGIARLHELIAAHLGADGDPGQVVVAIETDRGLWVQALAAAGYQVFGLNPRQVARFKERYNLSGAKSDAADAHALADMVRAERHQLRAVAADTAGAQAVKVAARAHQTLIWERTRHTLRLRSALREFFPAALAVYGDLGLTAAGTLELLTRAPDPAAAAKLTTAQISAALRRARRRDVAAKAKAMKDALRVPQLAQPAPVTAAYAAAVQASAAVLITLNDQIRRLEAQVEAHFLQHPDAEIYLSQPGIGPVNGARVLAEFGDAPGRYTSAKARKNYAGSSPITRASGRSKVVLSRYIRNDRLADALQSQAFSALTASPGARACYDKQRARGLGHNPALRQLSNRLVGILHGCLKTRTRYNEATAWPNAAAHTEPLAA

SEQ ID NO: 161873 - protein, 338 aa, unidentified
MTIVTVGIDLAKNVFAVHGVDETGKPMMVRPEVARAKLLELIAHLPPCLIGMEACSGAHHWAREFTRFGHTVRMMAPKFVVPYRMSGKRGKNDAADAAAICEAVTRPNMRFVPVKSIEQQSRLFVHRARQGYVEQRTALINRIRGLLSELGIVLPLKAATVRRETHKHLEDLPGWCNTVVGDALSELSRLDERIAQYDKHLAHIAKEDELSRQLMRLGGIGPTTASAIVATVGKGHDFTCGRQFCAWLGLVPGQYSSGGKQRLGRITKAGDPYLRTLLIMGGKAVLQSAKNKTDPVSRWAISVQERRGYWKAVVAIAAKNARMCWAMLQRGEGFKMPA

SEQ ID NO: 161874 - protein, 316 aa, unidentified
MEHQQGVWVGVDVSKSELVVAVRPGGEFFTLANDERGVAQLSKRLSTLGCTRIVMEPTGGYEAAVAAALWAQGLPVFVVNARWIREFARGLGQLAKTDALDARILALYAERAELEPRELPNEQTRELRALLLRRAELVEMLVMEKNRLEHAPQRLRRELNGHIDYLTKRLKRLDHDLDQMVKSSPLWREKSALLSSMPGVGPVLRASLLGQLPELGRLNRGEVASLVGVAPFPHDSGKLRGVRAIAGGRAALRRTLYMGALSAIVHNPPLRRYYFHLRDKGKPGKVALVAVMRKLLCILNVMLKTKTPWSPPCPAA

SEQ ID NO: 161875 - protein, 338 aa, unidentified
MKLFGAIDLHSNNNVTVLIDERDEVVYRKRLPNDLRLIIEQLSPYQSTLEGIVVESTYNWYWLVDGLMEKEHRVHLANTAAIQQYEGLKYTDDDSDARWLAHLLRLGVLPQGYIYPKEERAVRDLLRKRSQLVHQKTANLLSVQNLYTRNTGLSISANRIKKLTLEQVDGLFTMGDVGLAVKANLSVMRCLEAEIKSLEEVVKERVKLKPAFRYLLTVSGIGQTLALTIMLETGDIRRFPRVGNFASYCRCVGSEKLSNGKRKGKGNTKNGNKYLSWAFVEAANFAIRYEPLIARFYQRKKAKTHGVVAIKAVAHKLSRACYYVMRDEVPFDVGRAFA

SEQ ID NO: 161876 - protein, 350 aa, unidentified
MKIEIVKQNVGIDVSKDRIDVAFSHLTADFNLVVVSTRKFSNTSKGFKELQAWVNGKKYPNMSVHFTMEATGVYYEALAYFLHEQEGYSVHVVLPNKAHKYGQSLGLKSVTDKIDARMLSRMGLERNLRQWQPLSPSLLELRQLTRERNALVRNRTIVSNQLHAYSHQGKPNKESIARSQKLVSFLDVQINQIEKDIFKFVENDKKLDSNIDFLLSIPGVGMITAATIFAESNGFAAIESIKQLSSYSGLDVRISESGNWKGKSTISKRGNSYIRSVLYMPTLSKIRHDKATNQYYERLKEKKGESMVAIVACMRKMLALMYTLWKKQEMFKDASGKIISKEALKKKKKR

SEQ ID NO: 161877 - protein, 338 aa, unidentified
MKTHIGVDLHQRFCYLTAVDANGKLYKQEQVINEGAALRAWLRELPKPRQVVVEACGFWPAFQRAVAPEAERIVMVHPLRVKAIASARLKNDRVDSKMLAHLSRTDLLPEAWMADEQTQQARKLTRLRIALGRQRAAAKNQVQAVLHQEGFLSPVTDVFGKGGRIWLAKLELSVAGRMVVDTWLQVVNHLDELIAQQTRALEQMAEQDARARWLQTVPGIGAYSAMVILAEVGNITRFDNKRALASYAGLTPSLRESAGKRKRGGIGHHGSATLRWIMLQVAQVAARSSPSAKAWIATLRKKKPAQVAKIALARKLLTAVWAMLRHGVCFEESVFAGS

SEQ ID NO: 161878 - protein, 320 aa, unidentified
MSKKKSTSFIGIDVSKRLLEVAAHQSDYQFRCANKASAFGELIVELIALRPARIVLEATGGLEIPVVAALHAAGLPVVVINARQVRDFAKALGQLAKTDRLDTRVLAHFAAAIKPPLRPIKSKDELELDALAGRRGQLIEMLTAEKNRRVSAATETVRKEIKEHIDWLEDRIAELDEQLQTLLKSSKLWRVKDEVLQSVPGIGPVVSFSMIADLPELGTLNRQQISKLVGVAPLNRDSGQQRGTRHIYGGRARVRSMLYMAALTATRCNPVIKEFYERLLANKKLFKVAITACMRKLLAIINVMVRDCTRWKTKDDPVST

SEQ ID NO: 161879 - protein, 401 aa, unidentified
MIVGIDVAKHTHVARILFPDGSESKPFGFSNDRRGFEDFRAWVFSYKGKAENGSIIVGLESTGHYWEPLAFYLDNVPGIRIVQVSPKHVKKTKEVYDNSPGKTDSKDAGVITMLIRMGRFQRLVLPRGHFAELRCYARLREQMIVDLGVKRNILHSLIDLVFPEYGSIFKKVVSKTSLYVLKHYTTPEGIVRAGLKNISTALYTASHGKLSQACAERLIETASTTIGLKDGIEGIVFAIRSTVSAIERIQKEITTIEKELVFALSKIPYAIKLLSIPGVGKISVSVILGETGDLQRYRKAEELIKLAGLNLFEISSGMHQGQRHISKRGRSLLRKCLFFAALRTVKAGGAFRGVYLRLTKMNQMHKTKALVAISKKILRVFFAIVRDGVGYQASRTERVAA

SEQ ID NO: 161880 - protein, 363 aa, unidentified
MFTERTSIGLDVHARSVVAAAIDGVTGQVSQTRLTPSYEHIQEWIKQLPGPVAVADEAGRTGFGLYRALTGAGIRCEVLAPSKLQKPAGDRVKTDARDALHLARLLRLDEVTSVSIPSVNREACRDLVRAREDCRGDLMRARHRLSKLLLRHGIVYHGGAAWTDAHDRWLRARAVPQLLMPATRMAFDSDYEHVLMLQARRQCLDSAIEDIAADSEFTAVVRRLSCLRGVGTLTAFALAVEIGDWDRFTGNTIGSFVGLVPSESSSGSTRAQGPITKTGNTHVRRLLVEAAWHHRPKYQVRAVMRSRWELAPAAARARGHEGNRRLHNRWLGFLARRKRSTVANVAIARELAGWCWSLAVMDD

SEQ ID NO: 161881 - protein, 353 aa, unidentified
MEKVSKFTLGVDLGDRQSVICVLDASGDVIEQSKISTNKKAFKKCFDNYAGQLVAIENGTHSPWVSCLLKELGCQVLVGNARKLPSIWRSPIKTDFRDAEMLARIARFDPKLLYPIVHRDEQAQADLAIIKARDMLVQSRSGLINHVRGAVKSMGGRIPASSADSMHKKAMDHVPEILKPALLPVIEQLEKLTKTIKEYDRQIKNLSEEKYTETQVLRQVTGVGPITALAFILTLEDPARFRKSREVGPVLGLVPRKDQSGEVDKQLPITKCGNTYLRQLLVNCAHYVLGPFGPDCELKRFGERLCQRGGKIAKKRAIVAVARKLSVLLHRLWVTGEVYEPFYNQQVPMQKTA

SEQ ID NO: 161882 - protein, 428 aa, unidentified
MKYNTQNAKIKSITEKTLIVGIDVGSETHFARAFDWRNYEYSKKPLEFSNTQAGFATFKAWMEDIAEKYGKDVVIPGMEPTGHYWFNLGAYLQDNGMKPVHVNPHHVKKSKELDDNNPNKNDRKDPKTIAALVNEGRFSYPYIPTGIYAEIRSLSNLRLQTQEEITRIKNRIARWFSIYFPEIKDVYKKPDSVSGLMVLKVAPLPQDIVKLGVDGINQIWRDAKLRAAGAKRAKTLITAAEHSIGSQEAPDSARIELKNLLNDYEVYCKREEELMGMIEEKLSGIPYIDKLLEIKGIGIKTVSGFLAEVGDITRFDDPKQLQKLAGYAIVECSSGKHKGESHISYRGRKRLRYVLYEAAISLIARNEEFKEIHRYYRTRKENPLKKMQSVIAVACKALRIFYTILAKGVTYDGVKMLQDIKRPQVTVA

SEQ ID NO: 161883 - protein, 355 aa, unidentified
MTAHYIAFDAHCTFTEVAVVTTSGRQTKRLRCETKIPCLVEVLERISRSRYLTFEEGPLADWLYRNLKPHVDALLVCEPRRNRLICQEGEKDDPLDAGKLAQLYRGGYLKAVHHPESLERSILKRHVALYHNQVRQRVREANRIIGFVRHHGVIIREAAFANPQQRGLLLAQLPKSRTLREDLELLWRGYDAAVYQEAEMDRRLRQHARRHEAVRRFQELPGYGWIRSVSFYAYVDTPWRFISKEALWKYCGIGLERRHSGKGPMRVGVVKRANPRLKATVLGGAKTAIQQGKNVFAELYRQWIQEGEISVPNARRNVARSQVATLWGMWKNGSVYDPAWVAGGRAVGAGCVLRG

SEQ ID NO: 161884 - protein, 341 aa, unidentified
MDHYAGIDVSLEYSSVCVVDGSGKIVREAKVASEPEALIAWFASLGFGLERVGLEAGPLSQWLFAAMREAGLAVELLETRHVRKAFEAMPVKSDRNDARGIAQLMRLGWFRPVHCKSMGAQETRATLTARKLVQSKLRDVENSLRGILRGFGLKVGKTTELGFAGRIRELVAGHPHLETIADALLAVHVVLRNEFKAFEKRVRKMARSDTRTRLLMSTPAVGPIVSLTYASAIDDPGRFKSSKQVGAHFGLTPRKYQSGETDYTGRISKMGDSSVRTALYEAAHIMLTKPVKGCSALKSWAMRITRRAGMSKAKVALARKLAVIMHRMLVDGKPFKAVAAA

SEQ ID NO: 161885 - protein, 311 aa, unidentified
MSGGVNAAIDVGKQTLAVALGSAGAQFAAPNEPRAIKRLTQRLVELGCEQVLLEGGSYQNLLVGALRVAELPVVIVNPRRVREFARSLGRLAKTDRLDARVLALYGERVAPPLRELPGEQDQRLRELWVRREQLIEMLVMEQNRLEHASAALQRRLRAHIAYLRQELTQADEDLDQAVRNSPLWDKYEVLRSVPGVGPILSCALLADLPELGRLNRREVAALAGVAPFNQDSGSLHGARAIAGGRTRLRRVLYVATVAAVRCNPVLKPFYRRLRAAGKRPKVALVAAMRRLLLILNAMLKSQTPWRAPCPA

SEQ ID NO: 161886 - protein, 343 aa, unidentified
MKITTIGLDLAKNVFQVHGVDERGHVVVRKQLRREQVASFFANLPACLIGMEACGSAHHWARKLQGFGHCVRLISPQFVKPYVKSNKNDAADAEAICEALVRPNMRFVPIKTMEQQAVLSVHRVRQGFVKARTAQANQIRGLLTEFGLVLPQGIANVMRRVPQLIDAADDLPASMRQLITRLLENMKVLDRQVQELEAQIKAWHKGSQLSRKLEKIPGIGALAASALVASIADARSFKNGRQLAAWLGLVPKQDSSGGKPKLLGMSKRGDTYLRTLLIHGARSAILAAQKKSKPNVWLSGLLIRRHPNVAAVALANKNARTIWALLAHEREFRPDYMPRPAVA

SEQ ID NO: 161887 - protein, 344 aa, unidentified
MDQVSTIGLDTAKRIFQVHGVDEAGAVVLRRQLRRSEVLKFFAKLPRCVVGMEACGGAHYWGREIAALGHEVRLMPPTRVKPYVKWGRKSDKVDAAACCEAVTRPSMRFVPLKTVEQQAALMTHRVRQLLVEQRTRLGNAIRAHMSEVGIIAAKGEAGLAALLAMIGNPKDQHVPAVVRPILVPLVEQWRSAGAQIAELERQILAWHRSNPDSRRLATIPQYGPILSSAMAATIGDAARFDNGRACAAWIGLVPIQNSSGGREHLGGISKTGDRYLRQLLVLAATGMVRRARAHPEDHPWFAGLLERMPPKKAAVALANKLARIGWAVLRHQTPYRATPALEAA

SEQ ID NO: 161888 - protein, 412 aa, unidentified
MKKIKEVSVLISVGVDVSKGKSTVCILKPYGEVLMSPSDYEHTQRDLKKLVDQMDSFEDEIHVTMEATGNYHFPIATYLKKRDYDVRIVNPLEMKRYRCQGIRNPKTDSIDAIMIAQYGIDFWFRSFQEYVASDERMELKTLGMQYFKTMKTRQDRYLVLESVIDRTLPGIGGVLNGYDKSTGKDKKSDFVYDFYHAEKITVYSENRFCDRYESWSKKKGYRYSEKEARQLYSIAKDSIPTLPSSKNTKLMIQDAVKILREVDSALYSILNRMNVIAKKLPEYTTVMEMKGVGISIGPRLIAEIGDPRRFHSAKALIAYAGIDAPPYQSGKFTGTERHMSKRGSRIMRKLGFELMDTINKHQKLYAGDPVCEYFLAKRNEGKKYRVAMFAAYNKFLRIYHSRVSSVLNESVK

SEQ ID NO: 161889 - protein, 359 aa, unidentified
MLHRTIPTTGLTAAFQLAEEAQRVAEPFGAVPVCVFEATSIYWRPPRDLRVRLGLPTATVSAVQVKHVRGTQIRKKKNDAIDSLQVATLFKNGASHASRIPPEPMASLRELCPAHLFFAEFLVAAQNRRTAQRCVRHPESWTPCTRVTQRTPMTLMTQGLIAPARLLTLPLEELTQLLRQVSQDRHGVEEARQVRQSALTTLAMPPAEAAVSYGLALLGRSSLPVADQILPPLEHRIRELLAQVPFRHHLDEIPFFGPIVIGTILGELGHPGWFRTADDVVAWCGLDPAVFASAGKQAAGVPLTKRGSRYGRRILWLAAQNWCKHTAIARRFFRRSRFGKGLSYGATVCAFAARLARLS

SEQ ID NO: 161890 - protein, 428 aa, unidentified
MRSIGLDVHRDFCEVAIVEDSEVRSAGRIATSPESLGLFAQSLCPTDQVVLETTSGAIAIARLLRPHVARVVLANAADVRAIAHARVKSDRFDAAILARLLAAGMLDGVWVPDERIGALRRRIARRAALVRQRTRAKNEIHAVIMRCLLGRPPASDLFGKKGRSWLATQQLPPAEQETVEGCLRQVDFLGAEIAAIDAKLADFALTSADAKRLMTIPGVDVAAACTLIAAIGDIRRFTSARKLTAYLGLDPRVRQSGEKPARHGRISKRGNPHARHVLVEAAHQAMRTPGPLRAFGERVHARKGSQVAAVAVARKIATIAWRMLTNDEDYAFQSPSLVRKKIRNAELKAGAPRLPTRHTGTRQRVTPDERERDRELQQQAETGYRRLIADWQATGPKAGAGATPGRASSRPSTRQATRQTTEPQGSAL

SEQ ID NO: 161891 - protein, 350 aa, unidentified
MIIIGVDFHPEFQQIASVDSDTGEFQEKRLAHREEAEKFYRDRRAQGMRVRVGMEASGHARWFERLVAELQFELWIGDAAEIRTKRVRKQKTDRQDAQLILRLLLEDRFPQLWVPSWENRDLRQLLWHRHRMVQARTRIMNQLQAVALNEGLRCKKRLWRERGREQLESFRLAPWASRRRRDLLELLDRLNPTIAELSQAIEQEVEKCPEAQRLRTHPGVGALTALAFVLIIGKAERFGSGKQVASYLGLVPLEDSSGSRRRLGHITKQGSSMLRFLLVEAAQVTVRSVPEWRSRYFHLAMRRGRKIAKVAMARKLAVCLYWMMRQGWDYEQVNKFGSHAGQPGYRDGVQ

SEQ ID NO: 161892 - protein, 428 aa, unidentified
MSERDYNRQAARRQRISKATLVVGVDVGNAFNAVGFMNKDGNVLGSCARLYNSREGFEQFVEMIEGLKARHHLRDVLIGMEPTGHYWRKLAYFAKEHGYEVRFVRTTALKHHREIDESSSAKSDQRDALTLANITREGKYIDTVIEDGVLRQLRALSKARERLLRYSVSAKNSLHAALDDYFPELHEIFWSMGSRSLWVILDQCPFPEDIVLMKVSTLGEWIARSSRKRAGSAQKANALYEAGQKSIGVKQIGSADRYRLRMCLEEVKRTVLTLKDMDRQLKLMVKDIPSASYLMSIPGIGPLSAAVFLGELGDPAHFHNARQIVKYAGYDPQESDSGSWVSRKFISKKGRWLLRKYLFFMSMRVVVLSKYFQEYYHRKLETKNRVGQQPRRKEILCAVAIKLIKVIFALLRDKRGFEDLASTAVVRA

SEQ ID NO: 161893 - protein, 327 aa, unidentified
MRLHKSLTEKVKTTVAFDVCKAALDVHIHVDAKAFQVPNTHEGFDQIALTLADYDVTLILMESTGGYEDLAACNFQSLGYDVAVINPRHARNFAKAMGKFAKTDRLDAAILADFAAVIDIRPDRARYIKPPTDEERKFLSQMVARRRQVVDLIATEKQRLAHADDYAKASINIIINLIESQLKEINSDISFYVKKNFSGLSNMLSEIPGIGELSVGLLIGDVPELGQIGNRQLSAIIGVAPFNHDSGKMRGKRCISGGRQNVRNVLFMGIMSATRFNPVIKAFFDRLVAKGKPRKLAYIACVHKLLRIINAMVRDGIPFNPDLHAII

SEQ ID NO: 161894 - protein, 400 aa, unidentified
MRVIFGIDVSKASSEVAILVNGEKIHGYTIPNDAIGFNRLLGDLKTVHEPEIVFEATGVYSRRLQAFFEDNSYAYTRLNPLESKKQLDSLRVRKTDRIDAEKLAASQFILNRKPSYVQEALYQELRDLSRFYQNLTEDIVCAKNRLHKVLQVTFPELENILSAPTGEQYWNLVMTFPCNSFVLESDDATLTAIIRQSTAKRISEKRVIYLVDKLTKLANQSYCAVKKTSPVIEEVKYYAGELLRLSEHRQGVLEEMVALAQSLPEYEILLSIPGIAETTATSIIGELGDIRRFHSANQINAFIGIDLRHYESGNFLAKEHITKRGNPYARKILFKCIHNIASASHTNPCHIADFYEKRKRQSQVTSTKPHTIASIHRLIRTMYYLITHNKLYDYTSTQNR

SEQ ID NO: 161895 - protein, 361 aa, unidentified
MHATTIAVDLAKSVFQIAVADDKWKVVEQHRLTRGQFERWFSNRVVGLVIMEACGSAHHWARWLNRQGIDVKLLPAAYIRAYVKRNKTDAADACALLEAARCADIVPVRIKTVEQQALQGLHRIRSLWMSTRTSRINALRGFCREFGLAVPTGARTGVEVMSRTLADPNSPVPILIRESMKLLIEEIRLLELRIAQLEKELTALAKQSPACTTLLSIPGIGLLTATAMVAATSGDVSHFKDARHFASWFGLTPKESSSGNRRTLGRISKKGDRYLRMLLTHGARSVLRTASLARQGGRGLDGLKSWALGVQARTNHNKAACALANKLARICYAVLRDGADYGKAGRPVHRKVEQVSFAMAA

SEQ ID NO: 161896 - protein, 334 aa, unidentified
MGKAERMVGVDVSAKSLEVSRGAADEAVATRQFANTASGCRELARWVTQGGRSARVVLEATGLYSLDVALQLQRTPRVAVMVLNPRVSKEFAGAWGQRARTDATAAELLREYAARMPFTAWTPPSAAALGMRALMRRVVVLTELRVQERNRLHAVEATGALPAVLRRHLHQQIAALGRQIVQLEREARALAEPVPALRTGLARLRSIKGVGLRSALLILAELAVWPVELSARQWVAQAGLDPRPIQSGSSVHPPVRISKRGNGYLRRALFMPALVAVRHNAAVQRLATELAARGKAPLQVLVAVMRKLLHSIHGMLRTNTDFDGEKFRRSLPAT

SEQ ID NO: 161897 - protein, 339 aa, unidentified
MQVTTIGLDLAKNVFQVHGITDDGDVAFNRALRRAQVLSFFEKLEPCLVGIEACGTSHHWAREISKLGHEVKLIPPVYVKPYVKRGKSDAADAEAICEAVTRPTMRFVEVKTPEQQAILAVHRTRDLIVRQRTQTINMLRAQLAEFGIVIPQGIYHALGFAKGCLNGEQPDLPEVAGDVIFELCDQLVFLHSKILRCSRQMTQIAKREKRVALLRTIPGVGPITASAIVATIGSGKQFNNGREFAAWLGLTPLNKSSGGKERLGHISKMGDQYIRRLLVLGMTSRIRSIRTEPEKFDPWFADILSRKPSRLAAVAMANKTARMIWAVLTRNEPYKVRTA

SEQ ID NO: 161898 - protein, 326 aa, unidentified
MEHELHYIGIDTAKEKLDVDVLRPDGRHRTKKFANTTKGHDELVSWLKGHKIDHAHICIEATGTYMEPVAECLYDAGYIVSVINPALGKAFAQSEGLRNKTDTVDARMLAEFCRQKRPAAWEAPHPLERALRALVVRHQALTDMHTQELNRTETAREVQRPSIDAHLLWLEAELKRLEKQIKDLTDDDPDMKHRRKLLESIPGIGEKTSAVLLAYIGLKNRFAHARQFAAFAGLTPRLHESGSSVRGASRMSKAGHVSLRRALYMPAMVATSKTEWGRAFRDRLAANGKKGKVILGAMMRKLAQVAYGVLKSGVPFDASRHNPVAA

SEQ ID NO: 161899 - protein, 344 aa, unidentified
MDVYCGIDWAEDHHDISVVDRDGQLLARRRISDDAAGLAALLGLLAEHGDNPGDLIPVAIETPRGLLTACLRATGRKVYPINPMSVARYRDRHSVAGRKSDHGDSFVLANVLRTDMHAHRPLPADTELAQAIAVLARAQQDAVWDRTTAHNKLRSCLREYFPGFLAAFADARGGITRPEARIILAAAPTPADAATLTLTQLRGLLKKAGRIRGLDTEATRLRDAFRVPQMRQLPLVEDAMGRQALALLGQLDAACAAADGLEQAATQSFNLHPDAGIITSFPGLGALTGARVLAEIGDDRSRFSDAKGLKAYAGAAPITRASGKTKSVTHRRVKNNRLAATGYN

SEQ ID NO: 161900 - protein, 346 aa, unidentified
MAKYSKKNNVKETTQVVNSYTGYDHYIAVDWSQKTMAIARIHSTQKDKIRLAEYESDVKTLQRMLRELKGTSVLVLEESSPAHWLYIKLHDSVTKIVVCDPYVNKSLSIGPKNDRIDAEKLCRLLYNGMIREIYHSLEKVHELRKYVSSYIDLVKMGVRLQNQNAGFLAQEGKTKHQKVAESDTEASRFIIQRLEEAIELYQKQKDEYVTLFGSLCKKNSMLKNLCSIPGIAEISAVKIWATMIEPRRFKTANKYLAYCGLVNYKRESGGRVYGVRRPRFSRVLKEVYKTAAIVVINGQNPLRSYYDGLIEKGHSEHNARHAVARQIAKISYGVAKTGTKYQAKDT

SEQ ID NO: 161901 - protein, 344 aa, unidentified
MTTIDYIGFDIHKKTISFCVKAQDGTILEEGTIPALRNKLLAWAKSRPGPWIGAMEATLFTGWIYDLLKPLAQELKVAHPPMLKAIAAAKKKNDKVDARMIADLLRCNLLPQCYMAPVAIRDLRRMLRYRNLVVRQTTRMKNRIAGLLMETGTPYTKERLHGKAYFNELLGSLQEVPRSVVELLKLSRGQVEFFVAIQQRLLKGLREHADLSQRVMRLQTIPGVGEILALSWALEVGEVKRFPSIAQAASYCGLTSAQHNSAGKEQRGPISKQRNHHLQTILIEAAKLAPRYNPQLAVVHERELQRGNRNQATLAVARKLVAYLMAVDKSGKPFAMRACMEVAA

SEQ ID NO: 161902 - protein, 342 aa, unidentified
MTLYIGVDIHARQQTVSYLDTSDGTTGVVALSHERDDIKAYYSQFEGEVIIGIEACGYTNWFEELIERLGHKLLVGDAAEIRRLARRRQKNDRRDAQLILELLVHGEFPTLFRYSKESREVLRQLRYRHKLVKLRTMVVNSLHALAINAGLSLRAKLLTRDGRQQLRGLSLSAISQQQRDELVTLADELTRRIGTVEQWLKGQAKQDVRVQRLQTHPGVGLLTSLCLVHTLGDVSRFSSLRKVTAYAGFDPMEDSSAERKAYGGISKAGSKLLRYLLVEAAQTAAKDDEQLKQFYRRLLPRRGKARAKVAVARKLLIRCFIMDRAAIDYAEFLRRGQEKETE

SEQ ID NO: 161903 - protein, 337 aa, unidentified
MKTLFIGCDISKKNFEATLRADDVEQSIGTFKTNPHGYGELRKAFDKFNKADYQIHLIAEPTGTYHLGFIAYAYEQEWEVSLPNPVVIRQWAKGQGVRIKTDKIDAHTLAAYGFKEQPAAENSLPTHVEELDLMLKRKDDIKKSLRQEKNRLESYVHRTTGSDATHQSILDAIAFYGAQLLEIQAAIKSYLKQHQDLAKQRTLLSAVPGMGEQGVLKILVFLYRWDARTASLGNANGLVAFAGLDPALHSSSTSVYRRPTISKMGDSEIRRTLYMSAFGGMKAKSSPLVDFCQRLLERDKPNKVALVAGARKILVWAFAVFRSGLPFDNAKAMPKSL

SEQ ID NO: 161904 - protein, 482 aa, unidentified
MKKRNIYQNQSQEIVNLFETAGSSEKVMCVPMDYAKNDHLVMFCNGHGDILRKPFSVKNTPEGIAFIDDQVTRSCRRRGIKKEHVFFGGEDANSFAKNFVSTLRSKGFLVANVNARDAKKQRESVQASTDRIDLMGIAAMLLNCRGNCCPAQSGTYRNLRLLVRHRRKLVQMLTEVKNRVHGIVDELFPGFLKEQNTGIVAFTESSLYLMEDRFSPKQIRRRKRQKLIEILKRFGTSKAEKTAAKLQHYAAKVLHAPVEYVDTMQLSLAQHVKHIRCLKESVVLMDKEIALNLAQTQGAFLTSVRGIGLVLAAGVTAEIGSPNEQKPLNNLSSYAGIVPRIKQTGGINGKTYTGPVARRCNRILKDYVVKSAYHLGLHGPPDLMVDYKRRDASGQHADFGMGRRYLRMAMCLMRTSQVYLPPDLRKGDYAPEEKASYYLMNWPYLRGKWKKVGALEEAFALNRPLGLWRQIVQELYGIKLKL

SEQ ID NO: 161905 - protein, 418 aa, unidentified
MPKTLHVGIDISHHRDDVCLLDESGGRVGQPLRVPNNRPGAEALVAELARLAPDYERVQVGMEATGIYWWHLYRALGRAPELAPYRPRLVVFNPRLIQGFRAAGAAMDKTDPEDAFLIAERLRFGRLPDYPPPDARYFPLQRLTRYRFHLVHTLVRVKAHALTLLFLAASEYDRLEPFSDPFGATSIAVLTEFGGLDELAAVPLEELTAFIDEQGRHRFADPAEPARLLKQVAADSYRLDDAAAEPVRFVLADALAHVRFLAQRLKPLDRRIEEELARFPNTLLSVPGLGPVYAAGLVAEVGDIARFPDDAALAKYAGLWWPRRQSGDFDAADRSLSKAGNAYLRYYLCEAANSLRVHNEDYRRFYDRKYKETPRHPHKRATVLTARKLVRLVHALLRSNQLYAGPGALSPGKPPRRR

SEQ ID NO: 161906 - protein, 400 aa, unidentified
MLSIGIDVSKGKSTVCGMKPGGEIVYTPFEVQHTREGMSELVSLLRSSGEEVRVVLESTGSYHCPVVAALLENGIFVSIVNSLRMKRFCSQSIRKVKTDRIDAMQIALYGLAYWQELQPARLPEDTYRELQLLARQYYQMTSMLIKAKVDFIALCDQVLPGMQELMNDHAGRHKLSDFVLRYHHTAHILEMGETRFQKDYCKWAEKKGYRNCERMAAHIFATAQNGIPVLPNAPSTQIVITEAIRVLHIVEASRDTILAQMQSLAKTLPEYSLVREMPCIGDTLAPRLIAEIGDVRRFHSKRALIAYAGIDAPPYQSGKFCANNRHISKRGNRYLRKTGYEVMQSYVMHKPANDPIFTFIEKKRSEGKCGKLAMVAGLNKFLRIYYGKVTELYRSLSAVE

SEQ ID NO: 161907 - protein, 330 aa, unidentified
MEREYIGIDLHKAFFQACALSQTGTRLWEARVARTPSALAEFVGRLGPATTVAVEACGPTWPFVDAVAASGATPCVVDTRKTKLKAGHAAKTDRLDARRLADAVRRGSVVSIYVPPPAIRALREECRGRQQLVRLRTRVVQMLRALLLRTGAEDAPMRRLYSPRGVAWLAQVALPPAPAQTCQQLTRLLQAIHAEVAQADAAVRTRAAQDPIAQALDTLVGIGPVVAVTLRAEIGDIRRFPRGAQLASYAGLVPRVHQSGGHGYVGRITRDGAPWVRWALVEAAIHAIRRPDALGRWARRLQARKGVTKARVALARRLCDDIVAVWPRTT

SEQ ID NO: 161908 - protein, 319 aa, unidentified
MLVGIDVAKAELVVATRPAGERWMVENDERGVRTLVERLRGDAVELVVLEATGGYELLCVAALAAASLPVVVVNPRQVRDFARATGQLAKTDGIDADVLALFAERVRPAVRPLPDAEAQDLDALLARRRQLLEMLQAERNRLGQVFGRGKRSVKKSLKAHITFLERELRMADTDLGEMVRRSAAWRERDDLLQSVPGVGQVLSFTLLADLPELGRLSRREIAKLVGVAPLSRDSGTLRGRRFVQGGRASVRAVLYMAALVATRRNAVIRAFYVRLLAAGKPKKLALVACMRKLLTILNTMARTGQSWCAERTDLAQTSA

SEQ ID NO: 161909 - protein, 423 aa, unidentified
MDVLYERVAGLDVHKATVVACVRRTTAGKVERECRTFETTTAGLLALLEWLRESKCTHVAMEATGVYWKPVWNILSDGAFELILANAAHIKNVPGRKTDMNDAMWIADLVACGLLKASFVPKERLQELRSLMRTRKQLTREQTRHVQRIDKTLESANIKLGSVICEVMGVSGRRMIEAMIAGVRDPSKLAALAHAQIKASPKQLYDALHGRLTEHHRFLLQLHIGQYDALSAAIDQIDRQVDTAIARLDKEAADGQASFRDLISLLCTIPGVSTLAGTSILAEIGRDMSRFPSAGHLVAWAGLCPGQNESAGKRKRTRLRKGAPWLKTMLVQCAWAAKRKKDSFYNARFNRLSRRRGPQKAICAVAASLLTAIYHMLKDGTEHHDLGAAHFDHRSTAAKARRLVAQLAKLGYAAQLQPLPEAA

SEQ ID NO: 161910 - protein, 372 aa, unidentified
MKQTIIYVGLDVDDTQYHGAALDKHTGEVINFKCRPTLKGLLGQLEKLSKYFPGCTLTLCYEATYIGYTLQRDLAEKGYPCDVVAPTSIPSPRSKQIKTDRIDAVQLAQYYANGLLTFVSVPEPEQEQDRDLMRSRQNLVQQQTELRKHMQALLRRNGLHYKAQTQNKTHWTKHHYCWLERIVNTSTGSLQVNLARLLRQLKGLNSVLAEYGQQIEALAKTQRYEKPVQALTCYKGIKNLFALTMVTEIGDIKRFPHPRQLVSWIGMDIREYSSGGKHHRFGITKHGNRYLRTAFIEANQRGYRTARISKDIKARRAHTAPEFIDVADRCLRRLNKKGNRLLLAGKHPNNVKVACAREMVGFVWESLHKVAA

SEQ ID NO: 161911 - protein, 423 aa, unidentified
MKSLSTHSFTAFVGIDWSDRKHDFCIQAAGSDQHEFGTMDHSPEAIAKWAYSLRDRFGGPIAICLELAEGPLVYALQRYEFLVLFKVHPSTLAEYRKAFVPSGAKDDPTDAEAALDILLRHPEKLQPIKLQSVAMRKLATLVEERRWLAGDITRITNRLVSTLKQYYPQVLDWFEHRDTLIFCDFLSRWPTLKHVKQARRSTLESFFHQHNARRAYLVEERIQGIRAATALTEDEAVIRPCQLVVQALVEQLRALLQSIDRFDAEIDEITRSLPDYDIFAALPGAGNVQAPRLLVAFGEDRDRYANASQVQRYSGIAPVLERSGNKCWIHWRFFCTTFLRQTFVEWAGSTIPRSFWAGAYYQQQRKKGCSHQVAVRALAFKWIRIIYRCWKTRTPYDESVYLKALKKRGSPLLVNLTESAKMT

SEQ ID NO: 161912 - protein, 351 aa, unidentified
MVILGVDAHKHTHTVVAVDDNGRQVASRTVGTSTSEHLGLLRWATQFGDDTGGRRWAIEDCRHLSRRLERDLLAAGEQIVRVTPKLMAHMRDSARTYGKSDPIDALAVARAALREPGLPTARLDGPEREVRLLVDHREDLLAERTRIIGRLRWHLHELDPTWAPAARALDRASAYDAVEAHLDALPEGGTLVARLARSLVQHLRTLTVEIDQVHTEIEARVHQLVPTLLAIVGVGPLTAAKILGETAGVDRFASKDSYARYTGTAPLPVWSSNRARHRLSRTGNRQLNAALHRMALTQMRVHPPAKAMIERRRAGGDGGMEALRVLKRRLSDVAYQALRADLNTRAALTAA

SEQ ID NO: 161913 - protein, 338 aa, unidentified
MKLYAGVDLHSNNNYLGIMDQKDKRVHKKKLPNELPEVLRELEQYRDKLEGVVIESTFNWYWLADGLMENGYKVHLANPCAIKQYDGLKHSDDTKESFHLAHLLKLGILPEGYIYPKEERPVRDLLRKRLMLVRQKTAHILSFQNLASRNLGKQMGGKEVIKLCEEDVEKIFGEKHIILSGKANIAAIRFLLERIREIEKEVLKVARLKGEYKKLLTVPGIGKILALTIMYETGDIQRFPDVGNYASYCRCVGSTKLTNGKKKGEGNRKNGNKYLAWAYVEAANFAVWSYPYVKKYYQKKMSKTNKIVAIKTVAHKLARASYYVMKNQEVFIPQKAFG

SEQ ID NO: 161914 - protein, 342 aa, unidentified
MKITTIGIDLAKHVFQIHGADARGKAVLKKALKREQMAAFFTNLPPCLIGMEACGSAHYWARKLEALGHTVKLMAPQFVKPYVKTNKNDAADAEAICEAVTRPTMRFVPIKNGEQQAVLAVHRARQGFVKARTAQANQIRGLLAEYGIAIPQGISHLATSLPDILEDGENGLPGVFRQLIDRLGAHLKELDRQVHELEVQIQTWHRANDASRKLAEIPGIGPITASALVASISDANAFANGRQLAAWLGLVPKQHSSGGKQTLLGISKRGDSYLRTLLIHGARAVIRLADRKANHAGSWLAGIMGRRHKNVAAVALANKNARIVWALLAHDREYTAAYAPLA

SEQ ID NO: 161915 - protein, 391 aa, unidentified
MTSSHLIDTPAADSKDATLYVAFELSKSKWLIGIVVCGESKLSQHTVPGGDTATVWQAISRKRAYAEKKLGRPVRVVSCYEAGYDGFWLDRWLAAQGVANRVIDPSSIEMPRRARQAKTDRLDLQRLMRVLIRHEGGEPKVCSVVHPPSPEQEDARRLSRERDRLIGERTAHVNRIKGLLHCQGVRDLQPRRKGFLEQLAQVRTGDGRALPPNLAAEIRREHARLVQLGEQLAEVEGQMRAERATAAPGSRASKVNQLIDLKSLGPVGGETLVNEVFWRDFQNRRQVGAYLGLVGTPFDSGQSAREQGISKSGNARARTLAIELSWLWLRHQPGSALSRWFKQRVGDQKGRARRITIVALARKLMVALWRYLTLGLLPEGAIVRAAAPAGR

SEQ ID NO: 161916 - protein, 333 aa, unidentified
MRSVHYQLTVFCMHTSLVSSIGIDVSKASLSFATLRADHSAVVKSCANTKDGIVSMLQFFHEHETAAAVPCVIESTGDYHLRCALMVAEAGFTVNVINPLITKQYQRASVRNSKDDSVDAVRLARIGLMEPNLRRFTATKESVALKKVVASVGRLDHYEQQLKAHVKQLREAGALLGVKVNLSHLEKAIKAIGKQIEEFEVYIHAHAPKEAVEISKAVRGVSQTGVAKILSLLDGHEFTDRDKLVAFTGLDVAARRSGAWKGRERISKRGNPHLRKLLFQTAWGLKQHNAIYKEYYQKMRKRGKHYFTCLIAVARKFLRFLFAYLWKKPALAC

SEQ ID NO: 161917 - protein, 387 aa, unidentified
MPQPNDLSRSLAALDQDTTLIAVIEISQSSWLAAGIIPGVNRQPLKKLAADETALLQLLYRWRDEAAKAGRTINRIAVAYEAGRDGFWLARWLRRRGIEAHVIHPTSVAVSREHRRAKTDRLDTELLKRVFLGWLRGEPRHCSMAMIPTLEEEDAKRPNRERENLVSQRTRIVNRMKSTLARLGIRGFKPTLRKAPERLDRLRTAEGVALPPNTLAELRRDMARLRCVMDQIREIEAARLVRLEQHPEERNHAMVRLLARVIGVGIETADMLVHEILFRNLRDRKAVARYAGLTGSPDESGARRREKGLARAGNARVRRGMIQLAWRFLMFQKESALAQWYRRQTADGRGTTRKTMIVALARKLLVALWQLVTTGEVPQGVVLRQAA

SEQ ID NO: 161918 - protein, 401 aa, unidentified
MQDNQQHSSVDVFVGVDVGKGHHHAVALDRTGKRLYNKALPNDEAKLRALITELKTHGQLLFVVDQPATIGALPVAVARDEGVLVAYLPGLAMRRIADLHAGEAKTDARDAAIIAEAARSMPHTLRSLRLADEPLAELTMLCGFDDDLAAQITQTSNRIRGLLTQIHPALERVLGPRLDHPAVLDLLERYPSPAELAATSEKTLANRLTKLAPRMGKSLAAEIVQALSEQAVIVPGTQAATIVMPRLAQQLASLRKQREEVASEVERLVHAHPLWPVLTSMPGVGVRTAARLLTEVAHKAFASAAHLAAYAGLAPVTRRSGSSIRGEHPSRRGNKVLKRALFLSAFAALRDPISRDYYARKVQQGKRHNQALIALARRRCDVLFAMLRDGTLYQPKSAPHA

SEQ ID NO: 161919 - protein, 355 aa, unidentified
MNKIKTNFAGQTINVGMDVHKSSWNLGIHLNDMYVKNVHQKPDPFIMAAYLKQHYPGAHYKAAYEAGKFGFWIQRQLTQLGIECLVLNPAVIPKSQKVTLQISYAHDARNIGLRLQSGVLRSIHIPDEQQEADRVFFRHRKRIWKDLTRCKNRIKGMLAFSGIDIPEQYDNANWSHNFINWLKALDCKQQSRRQALNYMITQMEFLRKELLSISNAIRKMMREQRYKANYYLLRTIPGIGPLTAASILVEIGDVKRFETFYHLNSFVGLLPMEHSSGQSENKLSLTVRKHRQLRSDLVESAWTAKRTDPAMALYFQEQIKRKDSKIVIIKIARKLLNRIRYVLINQQPYEYGIVK

SEQ ID NO: 161920 - protein, 468 aa, unidentified
MKNEIYLGIDVSKGYADFILLNQKGVILEESFRLIDNQEGHKELFKLIEYWIKKWNAILYCGVESTGGYENNWYAVLKGLQFDSLFVTRLNPKVVKAISDANLRRTITDAVSAENIALYLAKFPERVDYGTNYTIDAEFKEGRNHLTAIRMHIKQRTQLLNQLEGWLYEFFPEILSYCRNGVPNWVLKLLARYPSPQKVMNAKNGLTKIKGITNEKAKRLKGIINKNNFQLSEYYEHLISTTAMEILHKSSVILREESYLEKRYKDKEEVKLLTSIPCIGIASAVKIVLEIEDISRFENSKKMASYFGVHPSFKQSGDGQWKSHMSKRGRSTVRATLYMCCMSGIQHNPILKPLYDKCKEKGMNFRQASGVIMHKLLRIIYGVLKSGKPFNAEIDLNNQENAEYKRALEKKNLLIATNEKERKLYRYQELKPEGPISRRRSVKIKKQVTSQSPNEGENAGLLSAKTKV

SEQ ID NO: 161921 - protein, 357 aa, unidentified
MFFGREVVVLHVGLDLSRKRVDVCLVSGEGELVEHFRAPADRDGLYGLTRRVAVYDEAVRGVVESMNGARFVHDELVKCGWEVLVADAQRVKGLAPLACKTDKVDARVLAELSFRDLVPAIWLPTPELRAERERARWRLHLVKHRAILKNRIHASLIAFGHQVPMADLFGVAGRRLLAELDFPEPWLGHVRASLELIDDLERRIGEIERWLRRSGADHRYIPLLMTAPGIGWITGFTIAAEIGDISRFSSPVKLTGYTGLCPRVSQSGEVDRRGPLAKHGPRYLRWGLMEAAIAASSHPLFKERYQRTKRRLGRQRGAKVAQIELARKLTEAIWYMLNRNQPFKPFAPAGAVIRLTA

SEQ ID NO: 161922 - protein, 366 aa, unidentified
MEVTNKKTETRFVGIDLGKRTYEAAFVGKGGKVTMSNGKTAVYGRQVLYKKLRSGDKVAVEAGNLAFTMAKEIAAAVGCRVYVLNPSQLAVIYASMKKTDREDSLKLAHILEDCNEARLPIVPVPSDREMNRRKLLASYRRAQQDRNRALNQLHGLFVSQGITTKVRSDLSTAANRKEAVTELSGIERSEAEYLLKYLDLCEGRITELEQQMKEESAGDEQIERLQSIPGVGPKTAFAFVAHVAAERFENASQVSNYLGLVPRVYISGETVRYGRITKRGNGYLRALLVQAAWAAVLSKNGGKLKERYEYMTKEKSKSKKTAIVAIARRLAEEMYVLMRDGTRHETRPFMLGKSREKELAQEALSA

SEQ ID NO: 161923 - protein, 354 aa, unidentified
MITIGVDAHKRVHVAVAVDEAGGEIARWHGPNSVAGWQGLAAWAATLGPDCRWGIEGAWNYGRGLAQQLVAAGAAVYEVNPRWTAEGRRHARRSDKNDHLDAHAIALYLRREAAALTALVAEDDTTVLELLVTERDDLVAETTRLRNQLHQLLLHLDPEYTAHLPSPRTQAGVRDLEGYTSASPCPLRQQRAAGVRRLAQRLRLVAEQAKALAAQIRALAAQRFTRLTAICGVSLLTAGALAGLLGPGRRFASDAQLAAFAGVAPLEISSAGRVRHRLNRGGNRRLNAILYRIALTQLRHSAQAQAYVARRVTEGKTKREALRALKRFIVRAIWRQWQQCQDTQTVAMVPAAVA

SEQ ID NO: 161924 - protein, 330 aa, unidentified
MERQYIGVDLHKQFFQACAVNPAGDRVWEMRFPRTDGGMTLFRARCSPLTSIAVEACGPTWAFVDALGPTGAPVCVVDPRKTRLKAGFAAKTDRLDARRLGDALRRDSVVSIYVPPPAIRELREVCRGRHHVVRLRSRVAQMIRSLLLRSGVADVPVRRVYSARGLAWLETVPLPPEAAASLGRFRHLLVAIHAEATAADATVTGRAAADPVACALDAMVGIGPVFALTIRAEIGDVTRFRRGAELASYSGLVPRVDASGDRYWSGRITREGSPWLRWALVEAAMHAMRRADSLGRWARQLAIRKGAFKARVAVARRLCDEILTVWPRTA

SEQ ID NO: 161925 - protein, 412 aa, unidentified
MQDILTCAMGLDVHRDIIVACLVKGAVDAEPEAETRTFSTLIPEMQKLRDWVIESECRNIAMESTGIYWQPIYEMLESCFDGEISILVVNARHMKNVPGRKTDMKDAQWIATLLRAGLLKGSFIPDKAFRELRHLTRYRKSVVHDITAQKNRIDKFLQSSGFRFTAFLSDTFGASGRNIIRHLIEHGSIDREALDKCLKTKTRNRIDEILVALNGSLSEHQCRFLNMVFRHLEDLEAHKHTVEDEITEEVLKHTDTLNLLCSIPGIDVTAAAAIIAEIGTDMSSFPDSQHICSWAGLSPGNNESAGKRKSVHINKGNPYLKSMLCEVAWIMASHRKLYLSGWYWKVKQRKGAKRATIALARKILSIIYIMLKTGTPYNEECFEQRRLRCERKRANRLVNELQKLGYVVVAPD

SEQ ID NO: 161926 - protein, 349 aa, unidentified
MNLKRIGLDTSKAVFTLHGVGQDEKAALRRNMRRAEMEAFFAKLAPTHVALEACGGSHHWGRRLAAMGHTVQLIPPQYVKPFVRRGKNDRNDAEAISEAAARPDMPSVPVRSAEQQAEAIVLSARELLVRQRTQLVNAVRGHAAEFGVVAAKGTSQVPALLEAVATGEAVPDAAKGMLAFLGAQVVQLDGQIAELDRRMKQQHKANPVSQLLAEVPGIGPVTALSLALTIDPGRFTSGRHLAAWLGLVPKQHSTGGRQRLGGISRAGDERLRQLLVVGAMAVIRFAKPGSKSASAWLLALLERKPRKLAAVALANKMARIVWAMMATGEAYRGSKRAAAPAAGAAAAAA

SEQ ID NO: 161927 - protein, 342 aa, unidentified
MHATTLIGMDISKYSFELCGVDDHGKHTLHKRIHRDQLSLFFSNFPRCTIAMESCAGSQHWARELKNLGHQAMLIPAQHVVAFRQGSKNDRNDARAIAEAAQRPQMRTVPVKTAEQQDIQALHRIRERLVNNRTSLVSELRGLLMEYGIVCAKGYQKFRLWLKNQFIVCLETLSLMAQQTFNMLRDELYALETRIAELEKRIGEVFKSNPVCQRLATVPGVGPLIATALVASVADPQRFKNGRQFAAYLGLVPRQHSTGGKPKLLGITKAGNNYLRKLLIHGARSIIYHHRKKVDQRSKWVKELVERCGINKTNVALANKNARVLWKLMTTPEEVFKEKLAA

SEQ ID NO: 161928 - protein, 448 aa, unidentified
MIELHLGGCKQNNQHRRFQMNYTQNEKIEQVTDTTMVVGVDIGSQTHYARAFDNRGRELTKRVFSFQNDIEGFNSFNLWAETLKKENGKTDVLIGCEPTGHYWFAFAKYVKDHRKTLVMVNPFSVKKIKELDDNSPKKTDSKDPKTIAKLVVDGRYSIPYMPEGIYAEIRDLVYSRDRIMKQHNISANRIQRWLAIHFPEYLGLYTKFDTTSGLAVLERAPLPKDIIALGIDGIRKIWHDKKIRGRGVTEDRAKTLVEAAHNSVGLDGGIGSKSELYMLLEEHRLWSSQLEAINKVLEEVILKVRNVEKLLAIKGVGSITIAGFIAEVGDIRRFSSPKQIQKYAGLELVENSSGKHKGRSRISKRGRRKLRKILYQVMIPLLARNEEFRKIYDYYVTRVQNPLKRRQAMVAVSCKLIRVFYAVLTKGVDYDRIKMMSDIHHESDVIAA

SEQ ID NO: 161929 - protein, 427 aa, unidentified
MSYRVAAVDVHKKMLAVVVADVAGEGEYQFERSKFGTTPDQLQVLAQWLVRREVEEVVMESTAQYWKPVWAALEQYWQPARQQRDGAGKMSGRLHLCQAKSNRGPRGRKNDFADGERMVKRLVAEELVLSFVPDPEQRLWRTVTRRRHQITRDKVRFQNQLEALLEQAHIKLSSLVSDLLGLSARRMLKAIAEGETDPTALAELADSRLRATPEQLCHALGACTQLNGVYRRLLKMALEELNMMEEQIEELDEEASNLLQQHQDTVQRVAEVPGFGVGSAVQMIAEVGATAATFDSGGKLSSWVGVCPGSEESAGESKSTRSPKGNSTMRRLLNQAAQSAVKVQGSIFDITFRKLLPRLGYKQAIWAIAHRLCRLLWMILHQGIRYEERGPAVSAKSQRTRAARMIKELKKLGYRVEAGPLPVGTLA

SEQ ID NO: 161930 - protein, 334 aa, unidentified
MDTHADVHVAAALDPVGGLLGVREFPVSPAGYARLLAWLGGFGTVALVGIEGTGSYGAGLARHITAAGVRVVEVDRSDRQDRRRQGKSDPLDAVSAARAAQSGRARGAPKGRDGAVEAIRALMVAKRSAAGERTRTINQARALILTGPDDLRVRFAKHTPAALVTGIASLRPRPGDVAGYATRVALRELGRRAVFLDGQLERLNELIVPLVTVRAPGLLALYGVGPNTAALLLIAAGDHPDRLRSEAAWAHLCAAAPIPASSGKATRHRLNPGGDRQANHALWRIAFTRMGSDEATRAYVERRTEEGKSKAEIIRCLKRYVAREVYPHLRPAAV

SEQ ID NO: 161931 - protein, 402 aa, unidentified
MNAVGIDVSKGKSVVAIMRPFGEIVSAPFEINHTTSDINSLVELINSVDGESRIVMEHTGRYYEVLAHQLSEANLFVSAINPKLIKDFDNDSLRKVKSDKADAVKIARYALDKWQNLKQYNVMDELRNQLKTMNRQFGFYMKHKIAMKNNLIGILDQTYPGVNTYFDSPARSDGNQKWVDFASTYWHVDCVRKMSLNAFIDHYQNWCKRKKYNFSQSKAEEIYGKAKELVPVLPKDAITKLIIKQAVVQLNSASTTVELLRTLMNETASKLPEYPVVMAMKGVGTSLGPQLMAEIGDVSRFTHKSAITAFAGVDPGVNESGTYEQKSVPISKRGSSVLRRTLFQVMDVLLKTHPLNDPVYQFLDKKRAQGKPYYVYMTAGANKFLRTYYGRVKEYLSSLPKS

SEQ ID NO: 161932 - protein, 337 aa, unidentified
MTEFNTIAIDLAKSVFQLCVISNQGKSIKNLRLNRTKFQDFMANRERSRIVMEACYSSHYWGRYFEKAGHEVLLIPAQHVTPFVRGNKNDKNDALAIYEASLRPNIRFVPVKAEYQQDIQCLHRMRERLVANRTSLCNQLRGLLADYGHIFPVGINAIIKGVREIIRDSSLSGSLLSELESSIVEYDYQTKRIDKINKVLKSHSDKNPHSQRLMQIPGIGAHIATAITSTVGKAEVFKNARDFAVWTGLTPRQSASGNKSVMGGITKRGDQYLRKLLVQAARHTVRWAVKESDSKLAKWINEIIVRRGLQKGVVAVAHKLARIIWCVLTREEGFKPA

SEQ ID NO: 161933 - protein, 345 aa, unidentified
MVVIGIDPHKGSHTAAALGSGGEVLAQLRVPANRAMLNRLLKWAATWPERTWAVEGASGLGLLLAQQLVNAGEAVVDVPATLAARARLLHTGHGRKTDALDAVSVATVAMHSPSLRRVAREDHGAILRLLADRRDELTQERRRAVNRLHRLLRDLCPGGAPTDLAAGDAAALLTAIRPVTAVEHERKSMARELVADVRRLDRDLTINRKRCAEAVAASGSTLPQILGISDVLTAKILGHTGDITRFATAGHYASYTGTAPIEASSGDIRRHRLCRSGNRSLNNALHLAARVQAMHPGLGQEHYQRKLAEHKTSREALRSLKRQLAKVVYRALRADHDRLVVQRLT

SEQ ID NO: 161934 - protein, 344 aa, unidentified
MGEVITIGLDIAKSVFQVHGVDGVGAVVIRKRVSRAKMLEFFAGLPRCLIGIEACPAAHHWARELQAIGHTVKLMPPSYVKAYLKRSKNDANDAAAICEAVTRPSMRFVAVKTKEQQAALMLHRARQLLVRQRTMLSNAIRGHLSELGIISAKGRNGTGELLEIITDDADGRISLAARRILKVLAAQYSAIGAEITSIGKSILAWHRSCEPSRRLEEIPGIGPVVATALVAEIGDWKAFRSGRGLAAWIGLVPKQHTTGGKDKLGSITKQGNRYLRWLLVSGAMAVIRYAQKHGTKKHPWLGRLMARRPTKVAAVALANKIARMAWAIMARGERYREPELLLAA

SEQ ID NO: 161935 - protein, 430 aa, unidentified
MIAAEIERCAGIDVGKERLAVCIMVGPLAGEPRVEYREFGAINAELERLRQWLEAEGVTHVVMESTGSYWKPVFNMLEDKVRVYLARSQDVKNRKGHKTDKKDSWWLAHLLRHAMIRPSFVPPRGLRELRDLTRRRRKMIGVASSERNRVDKVLQDANIKLSNALSDIFGVSGQLMLEALLEGKAMPEQIAQFAQRSAKRKIPEIIGALEGHRMNDHHRQMIRYSLEHLRFLEEHIIELDEQIVAKIQKLGYVPQWELLQTVPGMKENSSASVLAEIGPDMGQFPSEKNLSSWAGVCPGNNRSAGKDKGGKTTKGNRWLRGALTECAWGVSGKKNCFLKDKFWRLATKKKRRPPATMAIAHTLLVLFYQVLKTGQPYQERGLPVMDEKQRNRLVCHHVRRLGKLGIRVHSLPIDKDRTTPKSKKAAAKVN

SEQ ID NO: 161936 - protein, 354 aa, unidentified
MLIIGCDYHPGFQQIAYVDTETGELQERRLGHRQEAEQFYRTLSGQAVRVRVGMEASGQARWFERLLAELQFELWVGDAAKIRTKRVRKQKTDRRDAQLLLGLMLENRFPRIWVASWENRDLRQLLWHRHRMVQMRTRLMNQLQAVALNEGIRRKKGLWKEAGRKQLESVVLAPWANQRRHDLLMLLDGLSPRIAELSQRVEEEAGKCAVAQRLMTHPGVGALTALAFVLIVGQAERFRCGNQVTSYLGLVPEEESSGEHQRLGHISKQGNSLLRFLLVEAAQVTVRSDAEWRRKYFHLAMRRGRKIAKVAMARRLAVRLYWMWRKGWDYAQWKQFGPHAGQPGTGVGVQSNTE

SEQ ID NO: 161937 - protein, 534 aa, unidentified
MVVLGQVAVDGGLKVDDRSEDTTPDALASEFREKAFDGIEPGAGLRGEVERPARMPGEPGFDLGMFVGAVIVEDGMDQFPGRDRALDGIEKADELLMGMALHTAAEDTAIERVEGGKQGGCAVALVDAMGRAARACDLGAATTAGRCPMRQANDLSRSLAAFDQATTLIAVIEMSQSSWLVAGIVPGLERHPLKKLAVDEGSLLRLLQRWRDQAIRAGCRIERITVAFEAGRDGFWLARWLRAHDIEGYVIHPTSVAVSREHRRAKTDRLDTELLKRAFLGWLRGEADHCNMAAIPTIEEEDGRRPHRERESLVAERTRIVNRMKGCLARLGIRGFKPTLQRAPKLLSTLRTPEGTPLPPNALAEMGRDLARLHFVEGQISEIETARLERLEQAPTEKSHAMVRLLARVIGVGIETADMLVREILSRNLRDRRALARYAGLTGAPDESGSKRREKGLARAGNARVRRGMIQLAWRFLMFQKESALAQWYRSRTVDARQGTRKSLIVAMARKLLIELWRLVTTGETLLGVKMRPA

SEQ ID NO: 161938 - protein, 346 aa, unidentified
MKKLSKQGPQKEVGKDRATITVGLDLGDRFSHYCVLNEEADVIEEGRTQSTDVALRRHFPAEPRLRMALECGTHSPWVSRLLKELGHEVIVANARKIPSITGSESKNDRNDAEKLARFAAYDPRLLSPVCHRSQPRQLDLNLITVRATLVRARTMMINSLRGLVKSAGGRLPGGSAESAPARFKAAIPAALVPATGPLVVQIAQLNGQIKCLDKQIEKLPRKYPEIALLRTVPGVGPVVAAAYVLTLDRADAVADNRQAGAFLGLRPRQSQSGDSDPQRRITKTGNSYLRSLLVQSAQYILGRFGPDSHLRKVGAETGCQRRQAGQETSPSRGGPQTSRTDAQHVA

SEQ ID NO: 161939 - protein, 398 aa, unidentified
MSTATTSGRVVIGMDPHKRSATIEVMTADEAILGGDRFATDRDGYAEMRRYACQWPDRIWAIEGCAGIGKHIAVRLLADGEEVVDVPPKLSARARVFATGQGRKTDATDAHSVALVGTRMAGLRPVVTDEQLEVLRLLVDRRRSLGEEHTRKTSQLHQLLLELIPGGAKRNLSAAQAKAMLAKIRPRDVVGKTRRRVAAELVADLERIYARKKEANKELTALVKDTGTSLLDLHGIGPTGAARLLVEVGDITRFPNKAHFASWNGTAPLDASSGDQVRHRLSRKGNRQINRVLHTMARVQLRNPTEGRAYYDRKKADGKAPMEAMRCVKRRLSDIVFQTMLNDAVRTTGTTARTGPGGQRGDDSDSSAAGSQPHTNSSDKPLPGPATQHPRTPLTAAS

SEQ ID NO: 161940 - protein, 350 aa, unidentified
MLIGVDYHPSFQQIAFLVEETAEYSERRLNNSDGEAEKFYRDLKQREVRVRVGMEATGYSRWFERLLAELDFEVWIGDPAEIKTRRVKKQKNDRQDAQLLLKLMTEDRFPRIWVPSPENRDVRQLLWHRHRLVQMRTRIMNQLQALAMNEGYRWKKKLFSEQGRGQLEKLALAPWAGRRRQELLELLDRLNPNIEELTAAAEQEARKRPDALRLMTHPGVGPLTALAYVLIIGTPNRFDRGKQIGNYVGMVPSEDSSGGKQRLGHISKQGNSLLRFLLVEAAQAATRSNADWRRRYLHLAMRRHKSIAKVAMGRRLGVRLYWMWRNECAYSPSMEFGSYAGQLGTGHGVK

SEQ ID NO: 161941 - protein, 458 aa, unidentified
MARNRSTDKIIRGMALVHPNAAAIDIGATMHMAAVSADRTPEPVRSFGTFTADLHRLVDWFTECGVETVVMESTGVYWIPIFELLDASGFAVFLVNARDAKHVPGRKTDVSDAQWLQRLHSYGLLSTSFRPKGRIAELRSYVRQRERLLEYAASHIQHMQKALTEMNLQIHHVVADITGATGMRIIRSILAGERDPAVLAAMRDSRCRADAGTIEKALGGNYRAEHLFALEQALALYDTYQEKASACDARIEAVLKELSIDRDRCTTPLPPPGRRMPNTANALDFDVRAALFELLGKDVTRINGLGPYLTLKLIAECGDDLSNWPSAKHFTSWLCLAPRNKISGGKVLSSRTRRSGNKATSLLRLAAISVGRTNTALGAFYRRLATRIGKAKAVTATARKIAVLFYNALRYGMEYIDPGALAYETRYRERVIDNLQRRAKAFGFALQPLEPTPDYAVS

SEQ ID NO: 161942 - protein, 387 aa, unidentified
MDPILECCCGLDVHKDMIEACIIQGFENPKKLQQQFLTTPAELQRFNEWLAAADCRYVAMESTGVYWRPVYESIESYFGGDCFLLVANAHQMRNLPGRKSDVKDAEWIATLFQHGLLDPSFVPERTIRDLREFSRTYKNAVSERSRCINRLEKFLQTHGFKLSSVLSDITNDSGIRILTTLSEKGSLSVDDVEKARSRNTKHSATEIQSAVCGTLTANERFLLADFLEQYQVISRHIEKILNKMKSMVEPYQKLIEQMDSIVGIDITASILILAEISDKPQAYFANSAKLCSWAGLSPRNDQSAGKIKSKKIMPGNPYLKSILCQCARIAVRARKNNFSVWYWSHRAKVGDKKCIIAVSRKMLSTIYYLFANNVFYNTDVALSHLRI

SEQ ID NO: 161943 - protein, 359 aa, unidentified
MTDGSRALTPMVTAGLDVGDKYSYLCLIDQQSGEVMEEGRLRTTPEVFLRRFDSEQQMTVAIEAGTHSPWVSRKLEECGHKVLVANPRNTRLIYGQGRKTDKLDAEKLARLARVDPKLLSPLAHRGEASQAHLALIRSREVVVRSRAQLINHVRGTVKSFGARLPKCSTASFHKKVAACIPEELRPALEPLLETIASLSTRVRHYDRELEQLAEEHYPQTKLLRQVQGVGTLTALTFVLTVEDPGRFEESRSVGAYLGLVPGKDQSGERDPQKRISREGDEMLRRLLVGSAHYILGPFGEDSDLRRQGLKIAGGAAKNARKRAVVAVARKLSVLLHHLWISGEVYEPLYNCRQLKGRAA

SEQ ID NO: 161944 - protein, 353 aa, unidentified
MMIIGCDFHPSFQQIAYVDQETGECGERRLNHREEAVGFYGELAGKQVIVGLEATGNDRWFRKLLSEAGHQLLVGDASAIHASAPREQRTDKREARHMLRLLVENRFPVVWQPTADNEEQRQLLLHRCRLVRMRTRIKNQLDSIAKSEGLTETRSWSSKRRRQIEGLPLRGWYAERRADLLLLLDALELQIKPLNMAVESAAEQNQQARLLMTHPGVGPIVSLAYVLVLGDWRRFLRGEQVGSYLGLIPSESSSGKHQQRMGHITKQGNTLLRWLLVEAAVKAQRHDAGWHRQYLRLSVQKHHGVAKVAIAHKLAVRLYWMLRSGQDYGQIMERGSHARQSECPVGRSKGPVE

SEQ ID NO: 161945 - protein, 347 aa, unidentified
MKYFIGLDAHSSTSTFAVLNEIGDCILRKTVDTSEKNLWNVIESINGERILTFEESTISQWLYISLKEKVDRLLVCNPTYVAKKSGAKTDFRDAIHLANELRCGHLKEVFHDNSHWAQLRTSVSGYLDIVQEIVRFKNRLKSVFRAEGLKTDENNFYKNKDRCIELKNDSARFVATNLFSQVEFLENEKIKYLDWFKSNQKKYRPIRNLMTIPGISIVRANVIAAIVCQPERFRNKHQFWGYCMLVRHIQISAGKIYGNKRVHGRRELRDVFIGAAESAMRTETTLRDYHDALRAKGVSAKDAKVALARKISSLSLHLLKNNDTYNDDYEEYLKERKRLRLLVGQKR

SEQ ID NO: 161946 - protein, 345 aa, unidentified
MEHFAGLDVSVKETSVCIVDETGEIVREVKVASEPEALLAVLKSPAYHFKRLGLEAGPLSQWLFSALAEADLPVICVETRHMRAVLKARINKTDRNDARGIAQMMRVGLYRPVHVKTLRSQKLRMLLTHRKLLQSKAIAIDNDLRATLRNFGLKVGMVGAARFEGRIRELVEDLPDLAALVEPLLIVRQALREQFGILHRRLLVVVRDDEVCRRLMTVPGVGPVVALTYRATVDVPVRFRKSKSVGAVFGLTPARDQSGERDCSGAISRCGDEMMRTALYEAAQVMLTHSAKWSWLKAWAMQIARRRGMKKAIVALARRLAVIMHRIWVDGASFRWTREELATAA

SEQ ID NO: 161947 - protein, 347 aa, unidentified
MVADLFDVVIGVDTHRDSHALAFVRCRDGVLLEERLLPANRAGYRAALRVGGGGGVRRLWALEGCGCYGAGLARFLAERGERVVEVERPAREGGRRRPKSDALDALRAARAALAGQALAEPRAAGSREALRVLLACREGAVNSRRAGLNQLRALVVSAPDRLRERLRGRPAAALVRACARLRPQRRQQPELYATALALRCCARRVEQATREADELERELSLLVAELAPQLLALYGVGPISAAQVLVSWSHPGRFKSEAAFARLSGAPPIPASSGRTIRHRLDRGGDRKLNRALHAIVLTRRRGDPKTRAYIARRLSEGKTERDAIRILKRYLARNLYRILETTPQTT

SEQ ID NO: 161948 - protein, 309 aa, unidentified
MKEELVYLGVDIAKSYLDGAIGSGKRRFSNDTVGHRQLIGWIKQTEGAVQVICESSGGYERKLVQALARARVKVSLVQANRVRQFARASGILAKTDRIDAEVLCEFGRVMRPQTVTAATLEQEHLRELESQRRHLTHLLVMEQNRSARVSDGSVLKLNRSLINQIKKQVERLDLLIKQHIEQSPRLSAKAEKLTSINGVGLRTAALLMAQLPELGQLNRREVAALVGVAPFNRDSGKMRGKRAIYGGRRFVRHGLYMAALVAARHNPILRVFYLRLRAAGKPAKLALTATMRKLLIVLNSSLKTDLSYA

SEQ ID NO: 161949 - protein, 406 aa, unidentified
MQQREHVVIGVDPHKLSATIEVVDQHEQRLGSGRFTTDRAGYAAMRKYVAQWPDRGWAVEGANGAGRPLAQRLLEAGEQVVDVPAKLAARVRLFDTGHNRKTDALDAHSIAIVAVRTKDLRVLKVDGELEALRMLTDRREALTRRRIQTVNRLQALLAELLPGQAKKDITPLQAKVMLAVVRPRDIAGKTRRRIAAEELAELVAVEAKIKKATAELKSIVLARGSHLMDLHGVGPVVAARVLADVGDVTRFADRNRFASWTGTAPLDASSGEQNRHRLSRAGNRRMNHMIHIAAVTQIRLDTEGRVYYRRKRAEGKKPLEALRCLKRRISDALYRQLLADHELAAGVEPGAGPGGHCGATQESSAVDLPPHIDTSDQPLPGPAEPTLRPAPTSRKTDRGSNLEATG

SEQ ID NO: 161950 - protein, 361 aa, unidentified
MNTVIRVGIDLAKYLIQVHAVDAAGKVVTNRVLKREKFLLWCADLPAGCVIAMEACSGAHHCSRKLIDRGFDARIIPGSSVAPYRIQGRTGKTDANDAAAVCEAASRPHMNFVPPKTLAQQGMLCVHRLREGLKEERTSCINRIRGLLAEFGVVLPQSPEVLRRHLSDIVEDASNDIAGVARLVLQRAHEHGRELDAHIKWCDQRIADHQKFDEQVQRAAELMGVGSITASALVATVGDFRQFRNGSQFAAWLGLTPKQRSSGGKTSLGGITKRGSVYLRTLLIQGAKAIALTRQYDNPIFLWAQKLRERIGWQRAVVALANKNARILWAVMTREKRYDAHHVSCIPLLAPVTVPAQVSVA

SEQ ID NO: 161951 - protein, 326 aa, unidentified
MLEGVNGKEDWILEESVFVGIDVSKGTLDIVMRPGGSRESIPNQEAQIGELVRRLSTLRVTLLMVEATGGVERRIVRALAAAELPVIVVNPRQVRDFAKATGRLAKTDKIDAEVLAHFGEAVRPALRTLPAPASEELRAQIARRRQVTEMLTAETNRLAHSAKAVRKRIEAHIRWLEAELDRVDNELDQSIQQSPIWREQEALLKSVPGIGAVISRTLLAELPELGKLNRKQIAALVGVAPLNWDSGMMRGRRAIWGGRATVRAALYMAALVASRCNPNIREFHRRLRAGGKAPKVALVACMRKLLTILNAMIKHRTRWSVIVEAQ

SEQ ID NO: 161952 - protein, 317 aa, unidentified
MTSATTFVGIDIAKADFVVACRPDGATWTATNDATGISATRERVRRLSPTLIVLEATGGYENPLVAALASAGLPVVVANPRHVRNFARAAGQLAKTDRLDAHLLALFAERVHPTPRPLPDAALQQLEALITRRRQLLDMVTAERNQLEHAVVSIRREITRHIRWLERRVADVDRDLDDTIQKSPVWRAKENLLRTVPGIGPVVSRTLLADLPELGLLNRKQMAALVGVAPLARDSGTLRGRRFVWGGRAPVRAVLYMGALVAARRNTVIRAFYLRLVAAGKPKKVALTACMRKLLTILNAMMRTNTTWQQTGQPEHA

SEQ ID NO: 161953 - protein, 318 aa, unidentified
MLNESFVGIDVSKDWLDVGWEPAQQTERLVHDEVAMVGLCERLAQERPCLIVLEATGGLETHLASALAAAGLPVAVVNPRQVRDYARACGRLAKTDRIDALVLAAFARAIRPQVRAPRDDETLELGALLARRRQLIDMRVQEKLRLERASPVQRDSIKEHIAWLTERIARLDTDLTHRLRSSSLWRDQEDLLKAIPGVGTITRVTLIALLPELGKLNRREIAALVGLAPFNRDSGQHRGERVIWGGRAQVRRVLYMASVAAIRSNPVIRAFYQRLRAQGKPGKVALVACMRKLLTIMNAMLKHNTPWNPNALDLEHSC

SEQ ID NO: 161954 - protein, 379 aa, unidentified
MERQQEDPPSIRHRCARVEMFGNHSQDRGSDMQVTTYGVDLAKRVFQVHWVEPDTGEVKRKMLTRGEFAAFFARRAAGLVAMEACGSAHHWGRRLRGLGHQVRLIPTQFVRPFVKSNKTDAADAQAIWEAVQRPEMRFVALKSELQQAVLGLHRVRAQLVKMRTMQANQVRGLLYEFGVVVPRSWRALLLQAGPILADSSRREVPELLRGELQQQLQGLRELTRRLEQLEHSIGTYRQQDEQCRRIEAIPGVGPLSSTAVLASIGDARTFRSGRQFAAFLGLVPRQSGTGGRVKLLGISKRGDPYLRTLLIHGARAVLNHSSRPGKTPSQWLAGLLSRRPKNVATVALANKIARTIWALLAHGRVFDPRWRRALPVSVA

SEQ ID NO: 161955 - protein, 337 aa, unidentified
MDMHWIGIDVSKAKLDVALMDEHGTVLEERKVPNTDQGLTGLMKRWSDTHGLNKAECLVCLEPTGHYSNQALRTLVRLECPTWLAHPRDIQKSIGLQRGKSDKVDARRIADYARRFGDKAHLFTSKDLELEKVGHLLTRRRQLVKERKRYMVQLKDRNPCLADLRVQFDRFDKQQIVALNKAIKQVEAAIEKELRKDTETARTYELLCSVPGVGLVLAAYLMVKTAAFTRFPTPRALACQAGVVPYEHTSGTSVRGKPRVSHHADKSLKSLLHMAAIGMVRLPCDLQAYYLRKVAEGKPKMVVLNAMRNKIIHRIYAVLERGEPYRLDYTPMMRPAA

SEQ ID NO: 161956 - protein, 346 aa, unidentified
MMIIGCDFHPSWQQVSWLDTETGETGERKLVQASGDAERFYRQVAAPALIGMEATGNCHWLVDLLAEIGHELWVGDAAQIRASYVRQQKTDKRDAAHILKLLIEGRFPRIWTPSSEVRDLRQLLLHRYKLVIMRARVKNELQHLCLNKGVQRKGKLWSQAGQQILRELPLKPWAGRRRDDLLKLMAMLDQQIEPLDRAVTEQAQRDKMARLLQTQPGVGPITALAYVLTLGDVSRFPRGKQVASYLGLIPREHSSGGRQRLGAITKQGNRMLRMLLVEAAQAAVRYDPQFRKEYLHRCHQKPKAVAKVAAARKLAVRLYWMLRTQRPYPAVVRIESSPRVALVGAS

SEQ ID NO: 161957 - protein, 346 aa, unidentified
MLYSGIDLHKCFVLITVINESGCQISQVRINNDVNALISFFAQFNEPIEIVVEATLNWYWLVDLLDNLGYTIVLAHPKKLKAIVDTKFVDDKISSETLAQLLRNNYIPKVYYLNPGIRALRDLCRTRLYLVRQRTSLVNGSRSTLLKYNLFAPAKGKLYSPNGLAYLRKPDLAIHDIYKFGLNCRANIIELLTENIDHLEQEIKRNMVTDEIIELLKSISGIGDVLAPTIRYEIGDMSRFYNEKRLSSYCRFTPRTHRSAKRTKQYKTSKDGNAYLKWAFSEVTVNAIRYDSDVKRRYQRLKSKKGKPVALTIIGRNMTTIVYNVWTKREPYRGFKKPKIETNKEQ

SEQ ID NO: 161958 - protein, 464 aa, unidentified
MRKPAGQTGTKLAARVARELSTIRARVAGIDIGSRQMYVCGPVEQDGKREVQNYETTTEGVRTCAQWLKQKQVESVAMESTGVYWIPVLEILEAEGLETLLVDTKPLSRVPGRKTDVLDCEWIQTLHSHGLLQGCFRPSEEIGMLRNLARQKAVLVAEQADWVRRMHKCLDQMNVRVHHAVSDTQGTTGMAIIRAIVKGERDPRKLAAFRDAHCQKSEQQIAALLSGHWRGDHLFNLEQALKLYDSLGERLSEYERQIQEQMKRLTPPENEGRVAPAVRNPAKAKAIKRRAQEEKRQRLYRLAGTDLTAIDGINVETVEVLLSEYGTDLGKFESENQFAAHLQLVPRKPVSGGKPLKKRARKTKGTRTGQALRMAAVTLSRSKSALGAYFRRMARTKDGAVAVFATARKLALLIYRMLRWGREYEDIGQQAYENQYQAARLRSLAATAAQFGYEIAKKNEAVIA

SEQ ID NO: 161959 - protein, 352 aa, unidentified
MIIGIDPHKMSHTANAVDPATNTTAASLRIDATLTGYRELMRWSKQFPERRWAVENARGLGRHLAQWLVARGEVVLDVPCTATARVRELSRGSRRKTDVIDAAAAASVAALHGDATVVAAEDHTTVFAMLEERRANLAAQRVRITNQLHAVLRDLVAGGAAVAITAKSAASLLRTVRPESPAERTRKQLAHDLVRDVRAVDASLADIEKRMTAVLDDHGTRLREIDGIGAITAVRLIGRTGPAARFESPHAFATYAGTAPIEIASGEHSRHRLSRAGDRRLNSAIHLVAVTQVRMRNSIGRAYFDKKIAEGKTRNEAMRCLKRRLANHIWRMMIADELRLTIAPPENSEIAA

SEQ ID NO: 161960 - protein, 450 aa, unidentified
MQKEPDKRKGLSLECIESNAAGLDVGATEVYVAVPPDRDSQPVRHFQTFTPDLRAMAAWLVQCGITTVAMESTGVYWIPPHEILEEAGIRVCLVNSKHVKHVPGRKSDVSDCQWLQYLHSVGLLRASFRPTSEICAIRSLSRHRAGLVESAAMHVQHMHKALTQMNLQIHHVLSDITGLSGMAIVEAIVAGERDPIRLAALCHKKVRSAQETVIKSLVGNYRPEHLFTLKQSLSAYRYFHELIAECDREIERLIRQMDGKIDPQQEPPVSGIKSQKRSKNQFHFEMGPELNRIFGVDLTTIPGVSALTAHTLLAEIGPDLSRFPNAASFASWLSLCPANKKSGGKVLSAKTRQSNSRASHALRISALTQARSQSHVGSFYRRLRARLGAPQAVTATAHKLARIVYHMLTTRQAYDESVFKREDQKQAQRQEKRLRKQAKTLGFELVPIAA

SEQ ID NO: 161961 - protein, 350 aa, unidentified
MKTILAIDLGKRNSVFCRLESGSLKPEYFKAKTGPQTFHNIFAELDGGNSIVLFEVGSQTGWLCDMLRAMRIEFKVANVNHSAWKWSNNPNKSDKTDAHRLAMMYHHGFFPEVYVPVKPVRQKRSLIYHRQRIVKRLTQLKNGIRALLITQAIDLPAGKVCWTKKHRRQLEQLARPFETIDDPCQLWRGQLHMELQQIDALQGCLDKTTGKLDELNKEKKSVELLETIPGIGPRTAEAIVAVIDDPARFKSCRQICNYVGFTPRRYQSGQMDRTGRISKRGNPLLRALLVQASWAALRYDWAKHIYKRVSRGSVKRRKIAIIAVARHLLMRCWAMLRDNKPWQYKKQMRA

SEQ ID NO: 161962 - protein, 366 aa, unidentified
MNFFGIDLHSNRFTCCFLYEDGNREKITFDVSSDAIERFKSMLNSNTSVIIEASTNTFKFIESIKDLVSEAVIVNTYKMKLIPMSGKKTDKVDAEKLAVYLKMCSSSGENLINPVYIPEGSIQELRSLFTTYNLMKRHIGAIKNRIHSLLKQHLQPFTKEYIFGKKTRSHIRLITINPVADYQLKLLFEELEAKERLSDDIEGRIKLEGAKYIKEIEILTSMTGISVITALAIIADVATVERFPNAKHFTSYLRTAPEVDCSNETVIVKGTNKNGRKLSVTLISQSLNHFRDSNPRLKSWYNKKEEHHFKKGKLRMALCRKVLAEIYHMLDKHEYHYYRNADLHNKKMKEYYQFLEVNGIELRKTA

SEQ ID NO: 161963 - protein, 391 aa, unidentified
MPMYFVGIDISKYKHDCCIISAADQQIISKFTITNDKDGFEQLLTALNSLSNPEDIKIGFESTAHYALNLELFLENAHHSFMEVNPVLIKEYKKSTTLRRTKTDSVDCESIARWLITVEYKPHSKGFYHAYSLKSLTRLRDRLIRQRSFYLVKITNVLDHTFPEFKPFFNERLSKTALYLLENYGSAEKMARMNSASYDKLRCISRGKFSIQQFLRLKELAANTVGVNNSIFDLELNTLLTLYKSLSDEINTLETEIIKLIEEVHPHYMSIPGIGPISSAVIYAEYGDISNFSNPGQMLAFAGIEPGINDSGTESHGGRMVKHGSSQLRYVLLNACLPLIRFDLTFATYYEKKRAEGKKHRVAITHVAKKLIRVIYALERQDIDFNAQKLR

SEQ ID NO: 161964 - protein, 408 aa, unidentified
MDVLIERCAGLDVHQATVVATVRVPGAGERRVVTETFGTMTADLWALREWLQAYGVTHVALESTGVYWKPVYYVLEEVVTLLLINMQDLHRVPGRKTDVQDSAWLAQLLECGLLRSSFVPPPPIRELRDLTRYRVQQVRDRAQEVNRLYKVLEDSGLKLTTVITDVMGVSGRAMLAALIDGTTDPAVLADLARGRLRKKLPELRRALQGRFRRHHAFLIEQSLAKIDFLDETLARLNAEIETRLGPFEGMLTALDTIPGVDRIGAISLVAETGGDMTRFATAAHLCSWGAMCPGQHESAGKRRSGKTRQGNRYLRATLIQAALGALHKKGSALQARYHRVKRHRGHKKAVVAVGHQILEIAYYVMHDGVTYDELGADYFDRRHAARAVRRHVRQLEALGFHVTIEKAA

SEQ ID NO: 161965 - protein, 319 aa, unidentified
MTAQIFIGIDVARDSLEVAVRPTGEQWSVGNQTAGMAELLARLRAFRPTLIVLEATGGLELPVLGVLGSAGLPVVAVNPRQVRDFAKATGKLAKTDAIDAQVLAHFADAVRPAVRPLPDAATQALSALVARRRQLVEMLTAEENRRASASATIRPDIQEHIGWLRKRLKGIDKELSQALRTSPLWREQEDLLRSVPGIGPVVTVTLLADLPELGVLGRKQLGALVGVAPLNRDSGTLRGKRTVWGGRSTVRAALYMAALVGTRHNPVLRALYTRLLAAGKTKKVALTACMHKLLTILNALLKHSTRWTTPTSLGASSIG

SEQ ID NO: 161966 - protein, 374 aa, unidentified
MPTMTYSTATQLTPSEQTHQAHHEVTGGVDTHKDTHTVAALDASGRLLGHREFAATPAGYAGLLGWLRGFGQLVRVGIEGTGVYGAGLAGYLQGVGVELVEVDRPDRKTRRWQGKSDPVDAEAAARAAQSGRATGIPKTRGGQVDALRALRTARRSAVAARAEAQTRMKALVVTAPDPVRTALRGLGDRQLVEHCATRRPDRAAAGDPATATVLALRALARRHQQLTAEIDEFDTLIGPLVAAINPALVALSGVGADVAGQLLVTAGDNPHRLRSEAAFAMLCGVAPLPASSGRTHRHRLNRGGDRQANAALYRIVLSRLRWDPRTRAYATRRTTQGMSKPEIIRCLKRYIAREVYTALLNPLPSSVPASTCAA

SEQ ID NO: 161967 - protein, 358 aa, unidentified
MNFYTRQHKHYCGIDLHARAMYVCILDQSGTKLVHKNLPTTPEAFLRVIAPYRDDLAVAVECIFTWYWLADLCAKEGIAFVLGHALYMKAIHGGKAQNDKIDAPKIAVLLRGGMLPQAYVYPAEMRATRDLLRRRCHLVRKRAELLAPIQNTNSQYNLPEIGKKLAYKANREGVEEHFPEPSVRKTIEVDVSLIDHYDQLLGEVELSMTRTAKAHDAQTFARLQAVPGVGKILALVLLYEIQDIARFPRVQDFVSSCRLVKCAKESNNKRLGTSGKKIGKVHLRWAFAEAAVLFLRQNQPGKEYFAKLERKHGKAKALTVLGHQLARAVYYRLTREQPFDLQRFVAASPLRGETEPAA

SEQ ID NO: 161968 - protein, 311 aa, unidentified
MNAQDCFIGLDVSKDTLEVAVRPTEERNTFANQEDGLSLMIDFIKPFSPRLIVLEATGGLEKAAVCACAVEGLPVVVVNPRQVRDFAKAKGILAKTDKIDAGVIAQFAEAIRPELRPLKAEEAQKLDALLSRRRQILQMLTAEKNRLQSAPVWTRKDIQKHIAWLQKELDQFNQDLDRMVKESPIWRAKDEILQSVKGVGPVLSVTLISQLPELGALKGKKIAALVGVAPLNRDSGKYRGRRTIWGGRAEVRSVLLMATRIAIRFNPVIRAFFERLKKAGKIRKVAETACMRKLLTILNAMMKNNTRWQPA

SEQ ID NO: 161969 - protein, 343 aa, unidentified
MDIAVLGIDLGKNVCSVVGLDASGAVVMRRKVRRETLIAVVAKLPPCVVGMEACCGSHHLGRLFAAHGHDVRLMSPEYVRPYVKAQKNDDRDAEGIAEAATRPTMRFVGLKSQDQLDMQTLHRSRDRLVGERTALINQLRSILLERGLVAPQGKRKLEQFLAVLMNEQGGAGLSPRMVALVADARTQWAGLDRRIAAFDAEFVCWAKENEDARRLTTIPGIGAIVATALVAAIGRAEVFDRGRDLSAWLGVVPRQFTTGGKPKLLGISKRGNTYLRKQLIHGARAALPHVAERDTPLGRWAKALMARTHHNVAVVAFANKLARIAWAVLRRGKRFAVTGTMGA

SEQ ID NO: 161970 - protein, 318 aa, unidentified
MKTEAAVVVGIDVSKARLDVAVLPSGEAWSCGNDEAGIKDLVDRVKVFRAGLVVLEATGGYELGVTMALAEQEIPLVVANPRQIRDFARATGRLAKTDSLDAHMLALFGQRVAPEPRPLADEAAQELRALLTRRRQLVDMLSAERHRLDLAKKRVRKSLKAHIAYLERELRISNTELTGLIRESPIWREKDDLLQSVPGIGQVTSQTLVAELPELGHLGRREIAALVGVAPLNRDSGTHRGVRHTWGGRSSVRKVLFMAALTAVRWNPAIRAFYQRLVAAGKPKKVALVACMRKLLTILNTMVRSNQPWNLNAVVKAT

SEQ ID NO: 161971 - protein, 341 aa, unidentified
MEQYVGLDVSMRETSVAVRQNGKRVWRGKCPSDPKALADVIRQRAPDAVRVVLETGPLSTWLYHALKAEALPVVCIDARHAKAALDMAPNKTDANDADGLAQIAEVGFYREVRVKGYAPMLARTLVGARGQLLRISIQLSNQIRGVMKTFGLIVPKGAGRVFETHARALLGTNEAVARVVLPLLEAWRAVRARAAELDRQLIAAARTSPACRRLMTIPGVGAVTAASFVAAVEAPENFGTSRAVGAWLGLTPRRYQSGEADYDGHISRRGDGHLRALVYEAAAAVLTRTRTDSALRSWGLELKEKVGFKRAAVAVARKLAVIMHAMLKTGAAFDPAPNTMA

SEQ ID NO: 161972 - protein, 316 aa, unidentified
MKNYIGIDVSKASIDVYNGKKSYKFKNNDNGFKKIVSLSENIKEAIFIFEPTGIYSYALTNFCSKKKISVVMVGPKESRDFARSLKVRSKTDKIDAKVLYKYQSHVEPSMVKVPVINHHAIKIQEMLNVYEGTLASKQRLKNQLESTNKTHKDLVRTIKRIIDVLDMEATKLFNKIELLLLKDEETKKRYDAISTIPSIGQKSALYLTAFFLKYPTANAKQMTALLGLDPVMRDSGLFRGKQRISKHGGQQLRNLLYLPTLCAIQHNSWIKAFYERLTAQAKTKKLAVIAAMRKLILMAFSIFKSKEVYQPLVVKI

SEQ ID NO: 161973 - protein, 364 aa, unidentified
MKKSSKSQQSGTVVESRPEQVVGLDLGDRYSRYCLLSSTGEMMEEGRIQTTAAAMEKHFGSERRMRIALEAGTHSPWVSRLLKSYGHQVIVANPRKIPTLTKSESKNDRNDAEQLARMAAFDPKLLHPIEHRSAERQQDLNLIHTRSVLVRARTMLINSARGLVKSAGQRLPACSSEAFAEKVPAALPPALKAACTPLLEQITAMNQTIAAMDKQIDKLDKKYPEITVLRTVPGVGPVVAACYVLTLDSPQAMKTNRQAGAYLGLRPRQQQSGDSDPQRGITRMGNTYLRSLLVQSAQYILGRFCPDSELRRWGLKLAASGGKRGKKRALVAVARKLAVVLLSMWRNRKKFVPFPQSAAELATA

SEQ ID NO: 161974 - protein, 580 aa, unidentified
MNRNRSKSRVDRTMPMVHPNAAAIDIGATMHMAAVRADRAPEPVRSFGTFTADLHRLVDWFTECGVETVVMESTSVYWIPIFELLDARGFAVFLVNARDAKHVPGRKTDVSDAQWLQRLHSFGLLRASFRPKGQIAELRAYVRQRERLLEYAASHIQHMQKALTEMNLQLHHVVADITGATGLRIIRAILAGERDPEALAGLRHYSCHSSAETIAKALTGSYRTEHLFALEQALSLYDAYHEKASACDVRIESVLKELIIHRGHDHGSAPPVSRRRNRTDQANALAFDVRAALFGLLGKDVTMIDGLGPYLSLKLIAECGDDLTSWPSAKHFTSWLGLAPSNKVSGGKMLSSRTRRSGGRAAALLRLAAVTVGRTDTALGAFYRRLSSRIGKAKAVTATARKIAVLFYNAVRHGMDYVDPGGLVLRDTLPYTGDQQFAPTCQDIRLCSAALGAESWCCRFLGIVLQRQLPDLGVERLHVDGRRGRRRAPRSKNLGSPTLQLRLPRRYLIGVDVEVLGQLSHRSVALDGSERHLSLESRCVVPARLSAHGLSCSRRLSPLSGRNSTYRPVQISGAGSEPSN

SEQ ID NO: 161975 - protein, 388 aa, unidentified
MYYVGIDIAKYKYDCFIFTSEGEIVLESFTFENTREGFDKLKLILDALNHSQKIKTGLEAAGIYGKNLKLFLSSIGYDFDELNPLQVKRFTNALSNRKTKTDKIDASQIARFVSTGASRTYVYSSYHTEALKQLTRARNSLIDERSKHQTVLTGILDVEFPEFKGFFNNKFTDTALYLLNKYKTVKRISKLSHNDCVLLHNKSRVISTSRFEELRESAKNTCGHHFDYNDSLISANLQIIKCLNNEIDKIEKEINSIMSTINSPVVSIPGISAISAASIIGEFGDFSRFDNAKQLCAFCGVEPSIYQSGTSYHEGKMVKHGSSNLRRTLFNVVPYIIMHNETFKTFYDKKSSEGKAYRVAQSHVVKKLLRVIFTLEMTGSTFAPSKLY

SEQ ID NO: 161976 - protein, 320 aa, unidentified
MAMRVDNFIIGIDVAKAELVCYYEDSAQQQAVRNTKPEIQKWLALQPANTAICVEATNVYHLDLVEMAYEKGFAVYVVDGFQLSNYRKGIGGRVKTDASDACLLARFLDREGSALRPWSPPPAVYGKLQSLLRRRAALVSARTSLTQSWGNEMSLKEAFNSFAKHFESLDLLIQKRLKVLVKEAGLAEQVARCQKVEGIGFLTAVALVTAFIRGEFKSSDSYIAFLGMDLKVVDSGQKAGRRRLTKRGCSEIRRLLHNAAMAASRSAAWKDVYEHYRRAGKATTQALVILSRKLARVAFALMKTQGEYVSKGAKKLCPQP

SEQ ID NO: 161977 - protein, 346 aa, unidentified
MEHYAGIDVSLELSSVCVVDGRGKIVKEAKVASEPEALVYFLKELGFAVDRVGFEAGPLSQWLHAGLTQAGFETVLLETRHVKAALSAMTVKTDRKDACGLAQLLRMGWFQQVHAKSIGSQEIRALLVARKQLLGRLLDVELSIRGILRGFGLKVGQVTRKTFEARIRELVTGHTTLERIAEAMLPARATLKAQYEKLHKAVLAIVREDVVCRRLMTVPGVGPLVAVTFKSAVDDPSRIAKSKAVGALFGLTPRKYQSGEKDVTGGITRTGDEMVRTALYEAANVLLSRITRFSKLKRWGMDVAKRRGSKRAKVALARKIGVILHRMWIDGTTYRWAEAKPIAAQG

SEQ ID NO: 161978 - protein, 414 aa, unidentified
MDLLHERCGGGDLGKRDCKVCIRAPGKGARRHQEVRTFTTTTSGLLELRDYLLAHEITVFGMEATGSYWKALYYLLEATDGIEPWLLNAQHMKAVPVRKTDVTDAQWICRLVEHGLVRPSFVPPVAIRRLRDLTRYRTETCQERTREVNRLANLLEDAGIKLSLVVSDIAGVSALEMLEAMADGERDTEVLAAMARGTMRRKHGELVEALTGNFTDHHGFMVRVLIRAIRDASTRIALLEEEIKRQIAPFRRQVELLITIPGISTTVAHVMVAEMGVDMNRFPTAGHLAAWSGLAPGNRESAGKRKRAPTRHGNVWLKGGLGVAALAIGRTKGTYLAAQYHRLRPRRGEKRTIVAVAHSMLVSGYHMLANDVPYQDLGPDYFTRRLGEERHRRRLVAQLDALGYDVALQRREAI

SEQ ID NO: 161979 - protein, 384 aa, unidentified
MPIRRRTRQAALGLSVENTVGEQGSPSSKLRLRARTVERARARIDQEWARAGDLQKGSRSGKMSQTYVGIDVSKDKLDVAVGSGGELFQVTNDDDGHVELLKRLRDLKPALVVLEASGGYEAVAAGVLWNGGLSVAVVNPRQVRDFAKGMGKLAKTDAIDARVLALFGEKVPIEVRAPLDDQARELQAMVLRRRQLIEMLTMERNRRALISAGRPRKSLDKHIGWLEEAIRRAGSDIDQAVRQSPMWRETEDLFRSVKGIGGVTARTLLAELPELGKLNRKKIAALVGVAPFNRDSGVFKGKRTIQGGRAHIRTVLYMAALTAARCNPVIRPLYQRLIARGKKKKVALVACIRKLLTILTAMMRDRARFVPAAIHRNSTAIDHA

SEQ ID NO: 161980 - protein, 368 aa, unidentified
MNTDKYVGLDVHKDTIVAAIAAGGRDGEVRLYGTITNDLHALEKLLRKLGGEGVVLHVVYEAGPTGYVIYRRLQQLKIACIVVAPSRTPQPKGPRQKTDRRDALMLARLHRAGELTGIQVPEAVDESIRDLTRARADAVHDLTRAKQRLKSFLLRHGYRYTGKANWSEAHQRYLRELVLPLPAQKAVLEEYLLTIAQRLAQVDRLDELIAAQVPLWRMYPAVQALMCLRGVQLNAATVLVAEIGVIHRFARPRHLMAFLGLVPQEHTSGDSRKLGGITKTGNAHARWMLGEVVQHACLPPKVSSHLALRQQGQPLAYRELGWKMQTRLYQRGRHLLGRGVIKPKVTVALARELCGFVWALLRQVPTPS

SEQ ID NO: 161981 - protein, 375 aa, unidentified
MKQYSKYVGLDVHKEKIMVAVAQANRRAPVYYGEVANTSEAIGKVVRKIAGQEETGFCYEAGPCGYGLYRQITAMGHQCEVAAPSLIPKKSGTRVKTDKRDALALAGLYRAGELTPVWVPDKAQEAMRDMTRAREDMKMMERHSRQRLGGFLLRHGKVYPGRSKWTQGHFRWLEGIRFETASQQIVFQEYVDMVKHTQGRVAAMEADMRKALDSYTLKEVVEGLMALRGIDLISAMTIVAELGDISRFTSPRQLMAHLGLVPSEHSSGGKRRQGGITKTGNSHVRRVLVEGSWSYRLPARKTAHLQRKAAKASKAVQEIAWKAQKRLCSRYWYLVYKGKLPVESCTAVARELVGFIWAIACEVMGNKRALPVGKG

SEQ ID NO: 161982 - protein, 374 aa, unidentified
MGNVIEAYVAFDTSKLRNAVAIADAGRGGEVRFLGEIENTAAAVAKLVRKLAAKYGRLTFCYEAGPTGYGLYRQIKSLGHECMVVAPSLIPKKPGERVKTNRRDALGLVKQLRAGDLTAVWVPDAGHEAMRDLTRARETAVEDLRCKRQQVSGFLLRQGLHYPGERAWTKTHRGWLASQKLEYAEQRIAFEEMLLAMRQAQERIERLEQAIRVAVPDWSLADVVTALMAMRGIDFISATAFLAEIGDLSRFPTPRELMGYLGLVPSENSTGDTVRRGPITKAGNRRARRILVECSWSYQHPPRVGKQKQERVSAAPRAVAEIAWKAQCRLTARYRAMIRKGKLKTVAVTAVARELSAFIWAINREIASPRAAAR

SEQ ID NO: 161983 - protein, 376 aa, unidentified
MNKCHSNTELSSHEGTRSQFNGGTGAIKSAVGRMRPVCALGIDVHQDFYVVVEQVDGTNPKPPQRFPKQAFLRWAARLKENTGAEVHAVYEACGFGFSLQRQLSSLGVQCHVVCPQKLDEQNRRVKTDGLDAKALVLKLDRFVQGNRSALALVRVPTEEEEQKRAIHRQREQLVKARKQLEAQGRSLMVNHGLEPVQSWWKPRAFAALPVPQWMKELLANSQPILVALQQKIASLTIQLQSSATPKQPRGLGLMTSVIIDREIGDWRRFSNRRQIGSYTGLCPGEYSSGNTRLQSCVTKHGNPRLRAALVELAWRLVRFQPNYKPIVKWRQILAKGALATGAARKKAIVAVARQLAVDLWRIKTGRLRAEELGLIN

SEQ ID NO: 161984 - protein, 343 aa, unidentified
MKLTRVGVDLAKDIFQLHGVDRAERPVWCKRLKRNRWIEEIEQNVEPGVEIGMEACGGAHHWARLLQSKGYRVRLIAPQFVKPYVKSNKTDATDAQAVCEAMSRPSMRFVAVKSIEQQDIQAVHRVRASLISARCAKANQLRGLAYEYGLVAPREIAALRQAVPAWLEDASNGLTVRLRALLAGLYADLRALDERVRELDKEIRAIGRENEAVGRVQQLRGIGPLIASALVAMIGDARQFKNGRHVAVALGLTPRQHSSGSKERILGISKRGDSYVRTLLIHGARSALRTAAGKNDRMSRWALALAKRSHVNVAVTALANKMARVAWAMLKHGSAYEPNGLAA

SEQ ID NO: 161985 - protein, 341 aa, unidentified
MKGYYYIGLDVHKKVIAYCVKKADGEVVDEGTMRATREDLKEWVNSIEGRWIGAMEATLFTGWIYDFLKPYAFSLKVGHSYMLRAICASKKKNDRIDASKLADMIRCDWFPECHMAPREVRDLRRVLRYRGLLVREAVRMKNKTAGLLMEVGAGYDKKKIHGRKYFDKLLDGLEDVPESVIELLSLTRSNMEIFDINQKRLVNALRYNIILKERVERLMSIPGVGEITALTWALEIDDPRRFSTIKKAASYCGLSSAHDESAGKIIRHPLSKQRNKYLQTVLVEAAKLAPRWNPNLALLYDRERERGANRNQATLAVARKLVAYMLYVDKKEKEFELKEAA

SEQ ID NO: 161986 - protein, 333 aa, unidentified
MNTVGIDVSCKELVVVVMVKGKARKAKSFENTPLGHQSIIQSLAKMNGETKVCIEATGIYHFDLAVALSRAEGIEVMVINPKAAHNFAKALMTRSKTDAIEAENSAIYAERMPFVAWECPADECISLRVISRRIAALSKQKTQTKNQLHALESTLETPGLVIDQMEELVVFLEAQIKSLRDNALMVIQQHYELEKAYLLISGIKGIAQASAIQILSEIMILPKDMTARQWVAHAGLDPRIFDSGSSVSKKPRISKVGNKYIRQALYMPALVASRFEPNIKGYYHHLINDNGLKKVQAVCAVMRKLLHAIHGMLRTNKEFDGARFYALPVSENS

SEQ ID NO: 161987 - protein, 369 aa, unidentified
MADRITYVGLDVHKDSIVVAVAVGGLRGEVREYGRIANTPTALDRLLRKLGGDGMTLRFCYEAGPCGYGIQPRLSTQGHECVVVAPSLIPKRAGDRVKTDRRDAASLAKLHRAGELTAVWVPDARHEAMRDLVRARLDAVHSLRRARQQLSGFLLRQGCHYGRPAWTRLHRRWLAGLKFEQAVHHIVLEDYIAAVEAAEARRNRLTAQIAAMLPDWTLAPVVAALQTMRGMALVNAVTLIAELGDLSRFANPRQLMAYLGLVPSEHSSGASVKRGGITKAGNAAARRLLIEAAWSYRFPARLSRELLLRQESQPRLIRDIAWKGQLRLCARYRRLARTGKPANIVTTAIARELSGFVWAIARQVTVTTD

SEQ ID NO: 161988 - protein, 406 aa, unidentified
MQVVHERCCGLDVHKRTVVACVLTSGGREVRTFGTVTRELLRLADWLHEERVSCVAMESTGVYWKPVYNLLEGQGIELVVVNAQHMKALPGRKTDVKDSEWIADLLRHGLLRASFIPDRGQRELRELVRYRRRLIDQRADVVRRLQKVLEGANIKLGDVATDVMGVSSRAMLRALAEGQEDPAELTKLAKTSLRRKKAELQLAMEGSVGGHQRFMLRRQLNEVEFLEAEIKAMNAEIEERMRPFEAAIAHLDGITGIGRRSAEAIIAEIGVDMSRFPTDKHLASWARLCPGNNESAGKRRSGATGHGNSWLRTTMVEVAWTAARSPDGYHGALYRHLAVRRGKKRAIVAVAHSLLVAIYHMLKDGTAYQDLGPDHFDRINREALVRRSVRRLERLGYEVSIKDAAA

SEQ ID NO: 161989 - protein, 388 aa, unidentified
MEARTVNNLPPAASHDDDAVRCVLAIELSKKSWIVAVNTPLSDKINRLTLKPCEGKELLDLCERIRTRVARETKQRVEIVSCYEAGYDGFWLHRLLEAHGIRNYVIDPASLQVDRRARRAKTDRVDAERLLRSLMAYLRGEPKVWSVVRVPSVAEEDDRRLHRERGRLINERIQHVNRIKGLLAIHGIYDYQPLRRDRMQPLDRLRTADSRTLPPRLKAEILRELQRLELVIGMIKTIEAERDAIALAKTGHTSARKIQHLAKIKSIGPEFATALVGEVFYRSFDNRKQLASYVGLTPAHFQSGATCHDQGISKAGNAKARRVMIELAWLWLRHQPDSPLSVWFRGRVGKLKGRIRRITIVAVARKLLIALWRYLETGLVPDGAALKL

SEQ ID NO: 161990 - protein, 583 aa, unidentified
MAIATSLDRIGVGIDTARYGHRVSFLRPDRQQAAKPLTVLENHTGYQALKERLMQLHVHHPHAHFHVRIDAAGQYAANLEQFLRSLDLPMTLSIGEPKRNKDYQKAHFPKRTTDDTESQAMARFAIVEQPHATPAPAAPMILLREVAGRLQAQVKQTTQSINRLHNLLARVFPELATVTDDIAAGWVLQLLDQYPTAERIAAADLASLEKIPHLATATAQALHQAAEQSVASLRGAVAESLVGDLVAQVRHCQNAEKRMRKLLTKAFAELPASPHVQVVTVPGIGAATAAVLVAKMVDIDRFATPDQVVGYFGVFPEEDRSGVDKHGHPLPPGTLRMSRKGNDLVRSYLWNAARAAIRFNPAVRALYRREKAKGKRGDVAIGHCMRKLLHLVFAVWRTDRPFDAKHHAWENPTDASALPSDSATGSPATTGAGNDEAGGHKRDVPAAKVVTPAPSTVESAAPPVKPAPPPARPQVDFAFVRQQVSLEQVLKHLGLWGQLRGGGPQRRGPCPLHSHPGDRERTFSVHLGKNAFRCFQADCGVQGNVLDLWAAVHRLPLYDAAVHLAETFGLPRNREEEPVPGTR

SEQ ID NO: 161991 - protein, 380 aa, unidentified
MAPQESGYNRFCVLPQTNNPLNKEAATMYYVGADLHKEQTWFYIMDENGTKIDSKSISNSQDSLKSYFASIPTPFTLAVEATYNWYFFIDMAEQFAQTAYLANSYELKAFAKRHKKTDKIDARLIADILRKGFLPKVFIPHQSIRQLKELLHHRINLVRDRSRNIFRLKNTLDKLGADSSGDFTTIKQLRMIPVKTLPEYSQYALTGYIEQIIQLSQRIFKMKTYLKNELLEDKEIQNLITIDGLDYFSAALIKSEIIDINRFASFNRLCAYAGLAPKVSQSGDKAAYHGALMTNRRKNLQWILLETVFHFIRGSSKRMSGYEELKTRKGANTAKVIMARQMLKVIYHVLKEQRPYYSDDNAVRQENQIQSVAAAALHGV

SEQ ID NO: 161992 - protein, 372 aa, unidentified
MPQHPLDRPDRPDRPDRRCIIGVDTHKDIHVAVAIDQLGVRLEELHVPTTTAGYTRLRRWANELGSVEAFGVEGTGSYGAGLARYLTSFGDRVVEINRPDRATRHRLGKSDPIDAEMAARSVLAGVATGQPKHGNGKVEMVRMLKMAKDSGVKARTQSLNQMKALLVTAPSDLREELADLSVTTLLQRCAAFRPGELTCPAAVAVAVAKYTLRLLARRNLELHEEIKNLSERIRLLVGAASPQLLEIFGVGPDGAATFLVTAGDNPERLRSEAAFAALCGASPIPASSGKTQRFRLNRGGDRQANASLHRVVIVRLRWHQPTQDYMTRRLAQGKTKPEIIRCLKRYVAREIYRTLRPATASADASRSTATAA

SEQ ID NO: 161993 - protein, 412 aa, unidentified
MGTTIAGIDVHKKVLMVIVLEVQAEQAGQVAARRRFGSTASELQRLRLWLLEQGAGEAVMESTAQYWRPVWMELEPHMKLQLAQAFSNRAPRGRKHDFKDAERLVRRHLAQKLMLSLVPEPEQRAWRTLTRMKTQLTHDRVRLHNQLEALLEEMGIKLSSVLSDLLGTSGQRILQALAHGETDPERLAALGSSRLQCGKEHLIDALHAKPPAMHRQLLRLYLERLAVLDAQIAELNQMIAAAMKPYEDAVMRLAEVPGFGADSAQQVIAEVGPEARAFDSAAQFTSWAGTCPGKEESAEQNHSSRSAKGNKYLRRVLTEAAQAAVKTKGSHYQIVFRRLLPRLGYKQALWAVVHRLCRLVWKILHDGVHYIEQGIFRDPKAAKQRARTLARALRRLGYDIRLQPLESNALAG

SEQ ID NO: 161994 - protein, 357 aa, unidentified
MRRPKAKSNDKLIAGIDLHGNNLVMGVINQDGTRLMHRKLDCRLEQVEEFLRPLKLRLQSMAVESTFNWYWLVDGLRAQGYPIDLANPAKIEQYSGLKHADDKDDAFHLADLQRLNILPKAHVYDPELRPVRDLLRRRTNLVHQHTALLLSLQSLYARTTGQRLDLGEAKKMEPKQAPKLYEHPANQLIAQVQVEHIGALAKSIHRIEKAVLDCAREIPLYEKLLTLPGIGRILGMTITMEVGDISRFKTAGDFASYCRMVDAKRLSNGKCKADNNQKCGNKYLAWAFVEAANFARRYDESCRRWYDRKAAKAGKIIAPKALGCKLAKAAWYVMAQQCNYDEKRMFPELVNKPMKTS

SEQ ID NO: 161995 - protein, 341 aa, unidentified
MEHYVGLDVSLKLTSICVVNQTGSVVREGVVDSDPEAIAAFVRSNALVRIGLETGPTATWLWTELKRLDLPVICIDARHAKAVLKMQINKSDRNDAAGIARIMQTGWFKEVRVKDLDSHSVRALLASRALLVKIKRDLENQIRGLLKNLGLVIGRAKFNVFAVRAEELIENRPELIAAVRPLLVARKAIEQQVGDLDRKVLTLARRDMQVRRFMTVPGVGPITALCFKATVDDPTRFKRSRSVGAYVGLTTRRHASGEVDWSGRISKCGDRMLRMYLFEAAGVLMTRVPKWSALKAWGTRLAKRNGLRKAKVAVARKLAVILHRMWIDGTEFNWSKKKAAA

SEQ ID NO: 161996 - protein, 426 aa, unidentified
MSEVELVKPEPRYAAFIAIDWADKKHVWCLQGMGSEKRESGELEHTPEAVEAWVVQQCQRFGTGPIAVAVEQSRGALVFMLSKYEALHLFPVAPTMAAGMRAALYPSGSKDDPRDADLLLDLLLHHRGKLRRLQPDTEATRRVQNLVEERRKLVDEKTEQSNRLTSYLKIYFPQMLNWFEHLDTELVCALLLRWPTLEELQRVAPSQLRTFFRKHHCRDQELIERRIQEIGQAIPAIRDRAVIEAKSTVVKVSVRMMRNLLEGIAALDEKIEEAAAAHPDFFIFDSLPGAGAVMAPRLLAAFGSQRERYGSAREVQTYSGIAPVIERSGKKKWVHFRRACPKFLRQSFHEWAGHSIAHSVWARSYYQQLRSRGKGHHAAVRALAFKWIRILFRCWKDRVAYDEVQYLVALARRGSPVAAVDVAIIG

SEQ ID NO: 161997 - protein, 415 aa, unidentified
MALKIVYPVCCGIDVHKTFVVACIAYTNSKGVTTYKRHRFSTFTKGLQELSQWLCEYDCTDVCMESTGKYWIPVFNILEHSCNITLDHPKYVKAIRGKKTDKKDAQWIADLFKHDLVAGSFMPPFSIRQLRDLMRYRFKLTNFSSSEKNRLQNSLTVSNIQLGNVVSDTFGKSSMNIINKLLINPLDTSFDLEPLIHGSMKKKLPELQLAIEGAISPEQAGKIKIIKEHYENLEARKADLEALILSLAGSYSEEIKLILTVPSFKNIFSSIAVVSEIGVDMDVFPTSKHLCSWAGLTPTNNESAGKKKSVRISRAGCYIKPLLVQCATAIAKSEKHPEIRNRYLQLKKRRGHKRAIIAIARMLLTAIYHILKTKEPYNPDLYKKFEVRPVHHEITIEQAIRLAQTQGYRILEIAT

SEQ ID NO: 161998 - protein, 318 aa, unidentified
MTESRYAGIDVAKDRVEVAISKDTSVKSFTNDGPGHEELAKLLLANEIALIVMEATGGYEFDLACALQAAGLAVAVINPRQARDFAKAMGYLAKTDRIDACVLSELARTIAAHPHADRFVKPLADAEQQTLKALVTRRTQLMGMLNAERQRLAISHPASRASIEKLIKTIRDELKGMEAQLQQHIAQNHADLSGLLKSVSGVGPALSAILIAELPELGRLRNRQIAALVGVAPFNRDSGAMRGKRSIYGGRAHVRRTLYMGALVATRFNPVIARFYKRLLAAGKPKKVALVACMRKLLIILNAMVRSGKPWDASLHSA

SEQ ID NO: 161999 - protein, 337 aa, unidentified
MKFSGIDLHSNNSVVVVSDEEDRIVYQKRLPNDLGQIRAVLEPHRDQLAGVVVESTYNWYFLVDGLMDAGYRVHLANTTAIKKYEGLKYSGDFADAAYLAQLLRLGVLPEGYIYPRAERAGRDLGRKRMQLVRCQTMQILAIENILARQTGGRMSSERVKRLTAKQVEGLGFVPDVALALEANRAVSEALQQQIAVLEKRLKQRVKLRPEYRLLKTVPGIGETLATTIMLETGTITRFASVGNFSSYCRCVDSRRESNGKKKGEGNAKNGNKYLAWAFVEAANFALRYCPEAKRFYERKKRKSNRIVALKAIAHKLARACYHMLREQKPFDVQRCFM

SEQ ID NO: 162000 - protein, 250 aa, unidentified
MQYIGIDVSKDDFHVAWNDEKVQIFANSKEGISSFEDSLHHLQYDRQATQIGLESTGIYHLLSSVLLTDHGWAVVVINPYITSKAIKSSLRQVKNDRKDALVIRKVLMLGEGYLFTDTPEILRLKALLREYTSLTKMKAKCKNIISIQNKYQQTTDEALDSVFPQLIDSLNENLKQMKKRLQKTNSEEQKLLQTIPGIGPVCSSALVAFIGNVHRFDHPKKLVAYLGLDCRVHQSGTSINGKGFITKRGP

SEQ ID NO: 162001 - protein, 341 aa, unidentified
MKNLFIGVDFSKEKVDVAIILADGLAETAARVFNEFKTTVSGYRQLVKWVDQNSCGIDSSLWLFCGENTGDYSKGLCNFLYGKGYDMWLENAKSIKDASGLRRLKSDRADASMIAEYAMRNYDKAVMYEPLSESLAQLRELFLYRQMVVRHRCSFQVRRGEKRLTMEKSPVKTMISQSGRHIVSELNKEIEKIDKRIADLIKSDEELTEVFNIVTSVPGIGTQNAVCLMVYTDNFRRFNYDSRKIACYYGIAPFGKDSGTSVHSDPHVHYMANRQIKAMLTQAALAAVNFNPIMAGYYMRLVERGKKKQVALNNVKNKLVHLVTAMVRNRQKFTPEYKISK

SEQ ID NO: 162002 - protein, 323 aa, unidentified
MHTNTKENINVGVDTGKSHLDIYIRPLDIFFTVSNNEDGIKKAINKIKIYKPERIVIEATGRLEIPFIIACSEVKLPFVIANPMHVRRFAGAIGQRAKSDRLDAELIAHYADAIKPKLTELKPEKIRLMSDLVTRRNQLLTLQTMEKNRIQILPKTLASTIKPILTAIKNQIGKIELKIERLIEECEEYQSKNIILQSMPGIGKIAAASLISNVPELGYITNKQAASLIGVAPMIKESGAYKGKRVVQGGRAQVRTVLYMAMMSAMQCNPVFKATYQRLIGQGKPKKVAIIACVRKMVVILNSMLRDDVMWDENTGKNKLLTP

SEQ ID NO: 162003 - protein, 320 aa, unidentified
MQTPTQVLNIGADVAKDEIVMACSAGSFPVRKLANQRTALRAFLKSLPPGSRIGMESTGIYHELLANLAHKLGFIVFVLNPKDARHYAKGVGMRGKTDRVDAELIARMIAHEHTKLYAWTPPTPEQYEIAQLLKRRAKLTSLRAALGMSLKGVDGFCADLKALKKRFDQVIARIDQRVKVLIEASPDRKEHVTHLQTIYGVGSVVSATLVNTLERIPLKNADAFVAFTGLDPRPDDSGHHRGKRRLSKRGPSELRRLLYLAALSAIKTKTWRPIYEHYRGKGLSSTAAIVIVARRIARTAWSMYTYKTEFDPGRLTKGLT

SEQ ID NO: 162004 - protein, 342 aa, unidentified
MTSPLFLRACPSSKSLSQLKEKARARTGRVFPIITIQEAGLDGFWIHRVLHKEGIESHVVDPASIATSRRRRRAKTDRIDGEALVRALLAYKRGEPRVCAMVKAPSPQEEDRRRISRERETLTAERVRHVNRIKGLLFAQGIGDDEPLHRNRRERLEELITGDGRPLPECLKAQIGRELDRLELLIEQVKAVEAERDAVLARAQPSPGVPATLLLALKGVGPEAAVTLWSEGLFRTFSNRKQVAAYAGLAPTPWQSGLVHRDQGVSKAGNPRLRTTMIQIAWLWLRHQPQSALTVWFHERIKRKGGRLGKTMIVALARKLLIALWKYVTAGILIEGALLKPA

SEQ ID NO: 162005 - protein, 394 aa, unidentified
MFFLGIDIGKRSHVASAMNEEGKVILKGFSFPNSTEGGEKLLQKIISLSPIDQFKVGMEATGHYWLSLFSFLDEHDFLIHVINPIQTDGWRKGTEIRKRKNDIIDSVLIADLMRYGTFVETSLSDENIFSLKQLSRYRTYLVGTASDFKRKIIAVLDQVFPEYDTLFSKVGIFGKASKEVLLELSSPDAINHISAGTLADLLGEASRNRLGMKKAEELKTAASHSFGVKFAQEAFTFQLRSMVEQLKFIEKQITDTEKEIKKIMDDIDSVIETIPGIGPINGATILGEIGDINKFSSPAKLVAFAGIDASVSQSGEFEGTHNVMSKRGSPYLRKALFSAALVASRHDPVFKAFYEKKISDGKHHLTALGAVSRKLCYVIYAILKKNEPYEVRLK

SEQ ID NO: 162006 - protein, 356 aa, unidentified
MSSNIKYIGLDVHKEAITVAVRNGAGKLVMESIIETKAVTLVQLLQGVRGELHVTLEEGTWAAWLYDVVKPHVHEIVVCNPRRNALLKEGSKNDRVDARKLSELLRVGMLRPVYHGENGLRTLRELARSYQTISKDLRRVMNRLKAIYRSWGIPCAGTQVYAPRYREEWLNKIRESGVRRRAELFYQHLDGLQLVRRQVRAEFLAESRKHKAVKVLRQIPCIGPVRSALLLALMQTPHRFRSKRQLWKYSGLGVETHDSAQHRYVDGQLQRSKKPSQVRGLNQDHNHEMKEIFKSTATSASRCAGPLHDFYGGLLAKGMKPEMARLTLARKIAAITLTLWKKGARFDANQLKSQAA

SEQ ID NO: 162007 - protein, 410 aa, unidentified
MRTLVERACGLDVHQAVIVACLLVGKAGGTVRKEVRRFASTTAGLLALRDWLTDAQCTHVGMESTGVYWRPVHAILEDDFVVVVGNAQRIKNVPGRKTDVKDAEWIADLVRHGLIPPSFVPPRPLRILRDLMRFRRSLVEARSNCRNRILKVLESANIKLASVASDVFGVSGTAMLEALVEGTKTPAEIADLARGRLRKKLVQLELALHGSLGDDHRFMLDQLLRSLEQEDQRITVAEDRIAAKLEPYQQEHRLLMTIPGIDWAVAATMIAEHGVDMAAFGTSTRLSAWSGVAPGNNERAGKHRRTGARKGNRHLKTALYIAAVSAGRTKDTYLCDKYHRIKARGGPGRAAGAVAHKIVIAAFHILNTGKPYQDLGGDYLDKRTRRRTKHRLVCRLERMGYHVTLEPVAA

SEQ ID NO: 162008 - protein, 385 aa, unidentified
MSELNDLSRSLTSLEQDKTIIAVIEMSQSSWFVAGIIPGIERHPLKKLEPSEEELVRLLMRWRTEATKNGHTITRFAVAFEAGRDGFWLARWLRARDIETYVIHPTSVAVSREHRRAKTDRLDTGLLKRVFIGWLRGEPDHCHMAAIPTLAEEDAKRPNREREGLVRERTRIVNRMKSCLARFGIRNFKPTLRKAPERLATLATPEGVPLPPNTLLELRRDMARLRFVMDQIKEVEETRAQRLEQAPQEKTHAMVRLIARVIGVGIETADMLVHEILSRQLRDRRAVARYAGLTGAPDESGNKRREKGLAKAGNARVRRGMIQLAWRFLVFQKDSALARWYRTRTESAGKKRKTMIVALARKLLIALWRLVTIGEVPAGVVLRAA

SEQ ID NO: 162009 - protein, 359 aa, unidentified
MNQSIKVDFTGQPIYIGLDVHKKSWSVSIHSAMCEHKTFTQPPEVETLVNYLKRNFPGASYRAVYEAGFEGFWIHDHLRQRGVECTVANPADVPTKDKERRTKRDAIDCRKLARSLRAGEIEGIYVPCRPNLEDRSLVRTRQSMVRKQTRCKNQIKGILYFYGISFPEDRVERHWSGRFVEWIGSIQMEKASGNAVLLVHLEELKHLRQIIAKLDREMRVLAMTEEYRDRVELLKTIPGISTVTAMILLTELQDINRFASLDELSCYVGLIPDTHDSGETEHSGDLTKRRHAQLRATLVEAAWIAVRKDPALMMAFHTLGKRMRKTKAIVKIARKLLNRVRYVLKNQRPYILGVVQQVH

SEQ ID NO: 162010 - protein, 344 aa, unidentified
MEKVSIIGLDLAKRSFQAHGALAEGGVAFRKKLSREKVLAFFAEQPRCVVAMEACGSAHHWRRAIRDLGHEVRLIPAAYVKPFVKRQKNDAADAEAIAEAAVRPTMRFVAVKTEEQQGRAMLFRTRDLMVRQRTQLINALRGHLSEHGVVAAQGPANVKVLAEAVEDRGQGTSLPLLVVELARVFLDQIEGLSKRISGLEKVTVHEAACGETTRRLQTMPGVGPITALAIETFAPPMDVFKRGRDFAAWLGLAPRQHSTGGKQVLGKVSKMGQRDIRRLLIIGAMAVVRSASRKGAPEGSWLQRLLARKPKMLVAIALANKMARSIWAMLAKAEDYRVPVAAAA

SEQ ID NO: 162011 - protein, 366 aa, unidentified
MKRVMAGMDLHGNNVMIGIVDADGTRLRHRRLACDLEEVIAFLNPYKPLLDRVAVESTFNWYWLVDGLKAAGFPVVLANPAKIDQYEGIKHADDKNDAYFLAELLRLGILPTGYIYDPESRPVRDLFRRRMGLMRLRTTLLLSSKSLHHRTTGHSLAVGQLKALSPTDLAAFYSHPANRLTAEIQKELIEALNQCIRRIEKMVASEALKKPYYKRLQTLPGIGVILGLVISMEVGEIERFAEPGRFASYCRTVDSNRVSNGKKKGSNNEKCGNKYLAWAFVEAAHAARRYDAHCRRWFDRKSAKKGTTIATKALACKLAKAAWHVMAEAVDYDPARMFPELAAGRIEQISGRQTSASKGVGPEPED

SEQ ID NO: 162012 - protein, 365 aa, unidentified
MLYLGIDQHKSQLTVNLRGEDGLVLLKRQVSTQGEKVRAFFADLAQKAGPEGGFLAILEVCGMNPWLLEMLKHFGCRETVVIQPTERSKQKTDQRDAGELSHLLWVHRQQFLEGKHPLGLRRVEPPTPQQADDRQLTALRARLTKKRTAVLNSLHKILRKHNLEQECPTKKFQTQKVRRWLTELPLPEMDRLEVNLLLPQWELIDSQLKTVEAKIAERAMADERVKLLESVPGISHYSAVAIASRIGDIERFKRADSLANYFGLTPGCRNSGEATQRLGSITKQGSKLVRYLLNQAVLQVLRFDGTMRNWFKRIKRRRGAKIARVAVMRRLATIFWHMLKKQQKYRYEPLIRKHEEFEAFEGEAA

SEQ ID NO: 162013 - protein, 427 aa, unidentified
MNNADAIRIEQFRQFKKEIRGSREYEVVGIDVGKEKHHVFFGTAMGKTLLRSLVIGNDIEGFQKLSEHAEALRAQEGLSKVAYGLEPTGDYHKPLGEHLIRCAKMVVLVSGVALRRNRELLDGRWDKHDVKDAANIADLMAQGKCMFYEYPDGNVRDLRVLLSLKMRLRKQEHGLRVRIRNHLLAQYFPELDRVWGQSDTENLAIVRWCLDPSVVAGLELNDFVRRVCTRDRGARQHARLKRIWETAVDSIGCRVPDAVEVECKVVVEGLRQLRDEIKEVSEEIHRVCLRFPEYPFLLSIPGFGPEVSAQVLGAIGDPHRFENAGEVLKMAGLDLGAHRSGKTAESAVPVISKRGKAHLRYMLYQAALIASCPNRPLMKYYTKKLEGRQQERGIRTKMRIKLAAKLLVIAWTLMKKKEPFDPRRLMA

SEQ ID NO: 162014 - protein, 310 aa, unidentified
MTIICGVDVSKSWLDAWIEPAGHQRFANTAEGVAELGAYCRAHHAALVVMEASGGLEQPAYLALWQAGQPCAIANARSVRKFAEAMGYLEKTDRIDAMMIARFADAKRMVATPPPSADQQRLIALAARLRQVTADLGVQKQRLHSVRDPFARQSIQEAIAFFTTQASRLAGEIAALIEVDPLWVALDRTFRSIKGVADRTVAYILAELPEIGTLSNRAVTKLVGLAPLPDDSGQRRGRRSIRGGRAGLRSILFLVADVARRYDQSLTDFRERLLARGLSKMEVRIALARKLLVRLNAKARDVRAELAHAI

SEQ ID NO: 162015 - protein, 451 aa, unidentified
MPRKRVSKKVALPVLNPDAAGIDIGATEIYVAVPADRDPEPVRMFATFTQDLNELADWLQQCRVRTVAMESTGVYWIPLMQILETRGLEVYLVNAKHVKNVPGRRTDVSDCQWLQYLHAVGLLRASFRPAQEICAIRSLLRHRISLVDMATCHVQHMQKALDQMNLQLHHVISDITGTTGLAILDAILDGNRDVDALAALRDPRIRASHETIAKSLVGDYRREHLFTLRQSVALYREYQRQIAACEEEMQVWMKSLESKADPTATLPAAKDSVKKCKVMPPARAMALREEAYRILGVDLTAIPGISVLHVQCLLAELGGDVSKFRSAGAFSSWMGLCPDNDISGGKILWTGTRKVKNRIAVTLRMAAQSLHQSESALGVFYRRMRAKLGAPKAITAAAHKLARIVFHLIKTREPYDESVFAKEEQRYLQRMEKRLKAQAHALGYTLLPSQT

SEQ ID NO: 162016 - protein, 387 aa, unidentified
MPELNGLSRSLITLEQDSTLIAVIDLSQSSWLVPGIVPGVERHPLKKLPPDEAALLQLLQRWRNEAAKAGRAVQRVVVAFEAGRDGFWLARWLRAHDVEAHVIHPTSIAVSREHRRAKTDRLDTELLKRAVLGWLRGERGHCSMAAVPTLEEEDAKRPTREHESLVGERTRVVNRIKASLARLGIRGFKPMLRHAAEHLDALRTPEGAPLPPNTLAELQRDIARLRFVREQIKQIEDARVERLERASGTGGHAMVRLLARVVGVGIETADMLVHEVLSRDMRDRKAVARYAGLTGAPDESGAKRREQGRAKAGNARVRRGMIQLAWRFLLHQKGSALAQWYRARTADARPGTRKTLIVALARKLLVGLWRLVTTGEAPDGVVLRPAP

SEQ ID NO: 162017 - protein, 329 aa, unidentified
MKVQHIIGADLSKKSIDLVCHLLHTHIQIENSIAGFKDLLQWMCKQNVNSSETMIVMEHTGLYSFCFESFLHKHQIAFCKVNALAIKRSIGLVRGKTDKLDAARIAAYGYEKKDKLAIDVPVSDVLKRLQMLHSTRERLVRHRASLTCAIKEYKHIGISEKDIIMQTQLQLIKNFDKQIEKLMTEIEAIMEKQETLKQNFRLLQSIKGIGKVVALVTIIKTHNFTRFTNARKFACFCGTAPFPHDSGTSIKKRTRVSHLADKQMKSLLDLSAKSAIQYDKELREYYLKRTEGGKPKMSTINIVRNKILYRMFAVIKRQTPFLENYLQAA

SEQ ID NO: 162018 - protein, 315 aa, unidentified
MEGEVMVGIDVSKARLDVAVLPGEEIFSEEHDSRGIAALIERLKKIAPALVVLEASGGLETDLVAELVAAGLPAAVVNPRQVRDFARAAGQLAKTDTLDARILARFGERMRPQLRKLPDQQELALKALVVRRRQLVEMMMAEQNRLDRAPKVLHRQLRRHVDWLRKQIHSLDRDLDHELRNSPVWREKETLLRSVPGVGPVVCSTLIAGLPELGTLSRRQIAALVGVAPLNRDSGTLRGRRMVWGGRSQIRTALYMSTLVAVRFNPALKSFYLRLRAAGKPPKPALIACMRKLLTILNAILKHRKPWASPCPANL

SEQ ID NO: 162019 - protein, 341 aa, unidentified
MSESALIGIDLGKHTFHLHGQDKSGREVFRKKCSRAQMMQFFGNVPSCVVVMEACAGSHFVARQLMAMGHTAKLISPQFVKPFVKGNKNDFVDAEAICEAASRPSMRFVTPKTESQQTLSVLHRMRESLVHDRTKTANQMHGFLLEFGISLPKGLAIMKRLASVLAEHDLPVRLTVLLQRLHDHFVYLDEQIKALDKELAGQLANDDLGSRLLSMPCVGPITASLLAVEMGDGKQYRCGRDFAASVGLVPRQYSTGGKANLLGISKRGDKHLRQLLVQCSRVYMQRLDHQKGALADWVKTLLSRRHSNVVACALANKLARIAWAIAARHTQYEAGPDALNA

SEQ ID NO: 162020 - protein, 453 aa, unidentified
MKKDKKKEQKVVELDAFEQINHNAAGIDVGAEEFYVAVPKGRDTESVRKFPTFTADIHRLVDWLAQCSVETVAIESTGVYWIPLYEILEKRGFEVYLVNARHLKNVTGRKTDVLDCQWLQQLHTYGLLRASFRPSEQICAIRSLVRHRDMLIAYRSAHIQHMQKALNLMNVRLTNVLSDITGVTGMKIIRAIVSGERNRKTLASYRDAKCAKSEEKIEKSLEGNYKLEHLFVLKQALELFDFYDQQIQHCDRELETLYHEFEEPDQPGTPAPEKRKRKRRKNQPHFDLSESLYRMTGGIDLTKIEGLDALTVQEVLSETGTDMSRWPTVKHFASWLCLAPNNKITGGKVKSSHTPHTKNRASTAFRLAAQSLMKSKSALGAYCRRMAALHDAPTAITATAHKLAKIFYFMLKRREAYRPLTADYYEKEHRDKVVRSLQRRAASLGFRLETVTS

SEQ ID NO: 162021 - protein, 382 aa, unidentified
MQASNICTPIADHIGTIFVAIELSQKTWLAVVRSPDRDRLSRHKLEGGNAAGLLALIESVGARAARALGSAPAVMSCYEAGYDGFWLHRRLVAAGITNFVFDPASIAVEQRRRRAKTDRIDGELLLRTLMAYCRGEPRVVRIVRVPSPEQEDVRRGSRERERLIKEQTGHSNRIKALLRTLGLAAGNPRRRDWLRWLAEQRDWQGQPVPPHYLAELKREHARLMLVGEQLRGLSQTPDATDVPAAARMAKQKTQMRQLKSLGPASAGTLIDEALYKDFANRRQVGSYFGLAPSPWASGSTHREQGISKAGNPRARHQAIELAWLWLRHQPDSALSRWFRQRTAGASARVKRIAIVALARKLMVALWRYLTTGLIPEGAVVKA

SEQ ID NO: 162022 - protein, 443 aa, unidentified
MSVGVDGPSAASLCQNEVVADLIQEEPSVNDLIRIGMDTSKSVFVLHGVNAAERPVLRKRLRRRQVIEFFAKLPSTQVGMEACGGAHHWGRELGALGHEVKLLPAQRVKPYVARNKNDAADAEAICEAMSRPRMTFVPVKTAEQQAALMLVGMRDQLVARRTQVSNTIRGYAAEFGLVAATGLDKLEPLLARIATDATLPALARELFAVLGEEYAELKLKLGQIEAQLMAWHRQNELSRRLAEIPSVGPIGAALMAMKVVHPRAFRSGRDFAAWLGLTPKDHSTAGKLRLGVITRAGDEALRRVLVLGATAVIQQVRRGRGHPSSWLVALLKRKPPKLAAVALANKTARIAWKLMVSGERYRGTRATAVAHGNPCSDGASSQSRKPRAVLAAVKARPISAAARCTQTTTAGLDGGCARRVTATAVGTKKRSAVEQRNESQRQD

SEQ ID NO: 162023 - protein, 346 aa, unidentified
MAAFAALDVSKKSTSIHIVDEKGVCLWRGKTLTNPDALAEALSPFSDDLTLVGLETGSWTTWLWHELTERGFPMVCMDARQAHAALSVTINKTDANDAQGLAHLLRTGLFREVRVKGWEDMQKRTLLRARSTMLRCVLDLANAIRGALRTFGISPPAGTGNGGAKTFERRVVACLAARADLAIIIGPLLEAWRAGRTQVARHERAIRAIVRSDPRCQLMMTVPGVGYLTAVGFVGAIGDPETFRSGRTAAAWIGLTPRRYQSGTINQQGRISRQGDKLLRAYLYEAAAHILTRSSKDSAIRRWGLKLRDRIGFKRANVAVARKLAVVLHAMWRSGRPFEAEGCATG

SEQ ID NO: 162024 - protein, 388 aa, unidentified
MIYVGIDVAKLNHFASLISSDGEILVGPFQFSNDGDGFQYLVSAFEPFDDEEIIIGLESTAHYADNLIRYLVAEGYNVCVLNPISTSSMRKNNIRKTKTDKIDTYIIAQTLMMQKSYRFVTFEDLDLMNLKELGRFRQKTIKQRTRLKIQLTSYLDQTFPELQYFFKSGLHQKSVYALLKEAPTAKAIASMHLTHLAALLTKTSHGHFKKEQAAELRVLARKSVGQSDQALSIQVTSVIAQIELLDEQIARVEAEMTEIMRFNDSVIMTIPGIGYLNGGMILGEIGDIHRFSTPKKLLAFAGLDPSVYQSGNFNARRTRMSKRGSRILRYALMNAAHNVVKNNATFKAYYDKKMAEGRTHYNALGHCAGKLVRVIWKMLTDEVEFNLD

SEQ ID NO: 162025 - protein, 377 aa, unidentified
MKAPSTRPAAVLGLDVGKSSHWACLVDRDGEVLASAPVRNREAELDALFASAPAGTLVVVDQFRNIGSLAVRRARAAGLGVAHLPGLAASRAAGLFAGEAKTDERDAAVIARTALGVPDSLSGVPGRGEALEAARALSSQRDHVVACATRDKNRLRAVLLESCPALEAAVDLSDRRWLELLAGFGGAWGIARSGAGGPRAEAAGEAAAASTAPPPALVEAENRQVRFLAARISEALDEAGALEAETAALLEGDETYACLLTVPGIGPRTAAQLAVSVDIGRFPDHDHLASYCGIAPRVRSSGTSVRSVRASRRGDARLKSLLIFSCNSLVRSSGRYGEYYRACRARGMGHGRALKAVARKRLRAIYAVMRDRVPYRE

SEQ ID NO: 162026 - protein, 469 aa, unidentified
MKEDSVIFIGLDTSKLKISVAIADGSRNGEVRFFGDISSEPAPVASMVSKLSKRGAKLHFCYEAGPTGYGLYRQIVELGHDCVVVAPSLVPKRAGDRVKTNRRDAMSLARLHRAGELTAVWVPDEGHEAIRDLVRAREAASDALKQARQQLKSFLLRHGRIYAGREPWTRAHRRWLTCQAFDHPAHQILLAEYCQAVADASVRLDRLTKLVVETAASWSMAPVVAAYQAMRGVAFMTAVTFVVEIGDVRRFDNPRQLMAYLGLVPSESSTGERVKRGGITKAGNTRARRVLIEGAWTYRFPARVSPKIQARLDDLPRTVREIAWKAQVRLCARYRKLIAAGKPKVVAVTAMREKWQRSYGRSGRRSLPQQKAKGECPARTKKLNPKIEIIFCWTKMEAGLRWGTLAGSMWRTIPSPRLDRGSPRRIHGNAVPNPRIRVCQPSSKCPASSFVQQLHACVLSSSRPERKES

SEQ ID NO: 162027 - protein, 338 aa, unidentified
MQYLGIDWGTRRASWCAIDQAGGLQEGTVAAEQDGLSRLALTLGADTEVCGCIEMMSGAVWVRDQLATVGWDIRLADARKVKAIAPLACKTDRVDARVLADLVRRDLVPEVWVPSVEERANRERLRRRSHLIRLRTSAINRTFGLLTQWGLRRGLTALRKPDAITELEELGVPATWRQSIVTLLGVIDDLDAQLAPLEQELRPHARQDPRVQLLMTIPGVAELLGLTLASEIGDIARFPSARQLVGYSGLTPTIKQSGQSSRTGRISKAGPDTLRWAAVEAAQQAWRPTNPWNRLYTDTKNRHGKANPAKAAVARKILIASWHILARQQPFKSACAAA

SEQ ID NO: 162028 - protein, 327 aa, unidentified
MTLPALGIDIAKLKFDVCLMNTQGKLKHKIFSNTAAGFAQLAAWLSKQQVERTHVCMEATGAYGEALAYALHAAGHRVSVINPAAIRAFAGSRLSRTKTDKVDAELIARFCLAQQPLAWTPPAPAVRELQALVRRLEALIEMRVAEENRLEAGSVVAAVRASVEAHVAYLSAEIKRTEEVIRNHIDNHPNLKQQSALLDSIPGVGKTTAALLLAEIVDVTQYRSARQVAAYAGLVPRQRRSGSSVRGRTRLSKIGNPRLRKALYFPAITALRCSEFFQSWAKGLRERGKSKMSVIGAAMRKLIHLAYGVLKSGKPFDPEWVQKVKTA

SEQ ID NO: 162029 - protein, 411 aa, unidentified
MEVVYECCCGLDIHKKTVVACVVVPGPGKQPHKEIRTFNTMTADLLELADWLTAQRVTHVALESTGVYWKPAWNVLESSFTLLLVNARHIKQVPGRKTDVKDCEWIADLLRHGLLRASFVPDRPQRELRELTRYRTTLVRERSAERSRIQKTLEGAGIKLGDVASDVLGASGRQMLEALVRGVTDASLVAELAKGSLRGKRPQLERALTGQFGAHQRFLLAQQLAHLDGLDALIEQISREIGERFGPVQDKLDRLDAITGVGRRTAEIFLAEIGTDVKRFPTAAHLPSWAAICPANNESAGKRKSGKTGKGNQWLRTALVEAAHAVSHTKDTYLNSQFHHVAARRGKKRALVAVGHSILRIIWHLLEHDCEYVDLGSRYLEERERQQIQRRLVRRLQDFGYKVKLEPTSAA

SEQ ID NO: 162030 - protein, 381 aa, unidentified
MTTTATHNAHDTTPGRALFVAFELSEKTWKLGFTTGHGQKPRERSIAARNQTRVLQEVAQAKRRFGRPETAPVFSCYEAGREGFWLHRFLEAQGIPNHGVDSSSIEVNRRKRRAKSDALDVRKLLSMLMRYAHGARDVWRVVRVPSVEAEDQRHLHRDLATLKQERASTTTRLKGLLSSQGVRLTSVNKLPEQLEALRLWDGSPLPSGLRRRVLRVYAHHQFLSEQIAALEAERRARLQSAHDASIEKVHQLMHLRGIGINGAWLLVMEFFGWRALKPRREVGGLAGLTPTPYQSGESARAQGITKSGNRHVRWMTTELAWSWLRYQPESALSCWFRERFGGGGKRMRRIGIVAVARKLLIALWRFLETGVIPQGAELKAA

SEQ ID NO: 162031 - protein, 353 aa, unidentified
MNYTGIDYHKRYSVACTLDAQGRQLKQARIDHNAPEAFAAYFAALDEPSETVIEACWNWATLYDLLEDTPGVAKVVLSNPAKNRIIADAQIKNDKVDAKALATLLRGNFVSTVHVPGKEVRQKKNTVRQRLWLARVRTMVRNRIHTVLDRHPRIERPAHKDPFCNQGKAWMKRVELPAADRQLLDDDLEMHELLDKHIRATEDRIETDNAAHADALRLRTLPGVGKVLGPVIALEIDGVSRFKTADKFCAYAGLVPTTHSSGGKTSHGRMLPFCNRWLKWAFIEAAWVAIGCSDYFGSFYKRHRARGKGANEAITITARRMAKIAWKMLTDKRDYSTVPVVAKPLSPAALVSD

SEQ ID NO: 162032 - protein, 341 aa, unidentified
MNVKTIGIDLAKNVFQIHGVDEHGKRLFNKQLRRAQMASFFANIPPCLIGMEACASAHFWANKLISMGHNVKLMAPQFVKPYVKTNKHDAADAEAICEAVTRPNMRFVPVKTAEQQAVLALHRSRQSFIKQRTAQANQIRGLLAEFGIVVPRGIQQLQRRLPELVEDADNPLPVLFRTQLSLLQHHMAYLFDVIATLDKQIEQCYRQNALCPRIGKIPGIGPVTASALIATIGKANNFENGRQLAAWLGLVPRQHSSGGKQVLLGISKRGDTYLRTLLIHGARAVLQSAKHKQDAVSSWANQLMGRRNNNIASVALANKNARTVWALLAKEREYCAPIISA

SEQ ID NO: 162033 - protein, 458 aa, unidentified
MTGKNKPVQSRGMSPVHPRAAAIDVGAKMHVAAVGPDRASQPVRTFGTFTDDLVRLADWFQECGIRTIAMESTGVYWIPVFEMLEQRGFEVLLVNARDAKHVPGRKTDVSDAQWLQRLHEFGLLRASFLPKGEIAALRAYLRQRERLVELSASHIQHMQKALMQMNVQVHHVVSDITGVTGRRILRAIVTGERDPGVLAANRDRRCRADVETIQRALTGNWRAEHLFALEQALALYDACQEKVADCDKKIEATLKRIEAQSAKPVGKPPPARSTKRQPNALDFDVRSALHAVLGVDLTQIHGLGPSLALKLVGECGTDLSAWPSAKHFTSWLGLAPSNKISGGKVLSSSTRRTSSRAASLLRLAAVTVGRTDTALGAFYRRLGARIGKAKAVTATARKIAVLFYNALRHGMEYADPGASYYEERYRQRTIDNLQRRAKALGFVLQPSDDTLQAGTGVS

SEQ ID NO: 162034 - protein, 345 aa, unidentified
MKTVAGLDVHKDSVYLCILRENGEKIERVYGVLTPQLDSMRDFMAENKVSEVAMESTSVYWIPIWRVLVDSFELKLVNPYFIKQLPGRKSDVKDAQWIAECVMKELIRGSFIPSPLVQRLRLYDRRIFEINAELVRKYSKIDAILQRCNIRLSNYVSNTDCKSYKAVVKQISEGVTSPQELLRHVHKRIINKHGEDTILAALTGVVSDSEIDMLAQYVAESAILEDNKNKCIEKMREICNSEFKEQMKNLQEIPGVSERSALTVLAEIGPDVNAFPSAKHLVSWCGFNPRNDESNKKIKSNKITHGNRFIRIASVQCAWAASRTKDCYFSKFYAFHTQVRKKFKL

SEQ ID NO: 162035 - protein, 338 aa, unidentified
MNKVITIGLDLAKRVFQVHGVDEAGAVVVRRTVRRSQLVSYFSRLPPCVVGMEACATAHYWGQVLGELGHTVRLIPPAYAKAYVRRNKNDAADAAAICEAVSRPSMRFVPIKTAEQQAAAGIHKVREQLMKQRTMLINGLRGLMAEFGIVVAEGPQHVGDLVAVLADASDRRVPAPLHAGLVTMAAALAGLEQHLEAIDRQIADWGRGNQTCRHLITIPGFGPILSSAMAAVVVNPALFASGRDFAASLGLVPRQESTGGKARLGPISKRGNGYLRRLLVNGAMSVLSSKRAKGDPWLVRLLETKHRMVAAVALANKMARIAWAVMVRQEDFHFQPAA

SEQ ID NO: 162036 - protein, 368 aa, unidentified
MKQVTTYVGIDAHKKDLFIAMLIGQQKTPVTWQLANEPQAVRRLVRKLEREAPGPVSVFYEAGPCGYALQRQVTTSRVSCDVVAPGLIPRKPGERVKTNRRDARKLVELGRAGLLTTVQPPTLEDEAVRDLARARDDAREDLQRCRHRLGKLLLRRGLHYAGRNWTRAHRQWVDGLVWTHAAERAVVDDYLLAIDHTEARLLELDARLAEMAEREPYRNPVGWLRCFRGIDTLTAMLILAELHDFRRFASAPALMAYLGLVPREDSSGEKHRRGRITRTGNALVRRLLVETAWHYQHRPSVGVALTRRRKGQPGRVIAIADKAQQRLCRRFRKLAAEHKPAPKIAVAIARELAGFLWAALQPAPVSVK

SEQ ID NO: 162037 - protein, 367 aa, unidentified
MPDVSSTAPAQVRLWVALDVHKHSIVAATLPPTGGAPEVQRIESSERAIRRLIDRLGGPSGLAVAYEAGPCGYDLFRLFGRLGVACDVIAPSLVPVRAGDRVKTDRRDAKKLVRLYRAGELSFVAAPTPEQEGLRDLVRCFDDLRCARTAARHRVAKQLLRHGRIFREGKKSWTKQHVAWVRRQRLEQPNAQRALEHMLAHLNGLDAQLGALEHELAALATSDPWRDPVAWLCRFRGIGLRTALGLLAEIGDFRRFGSARELMSFLGLTVSEYSSSDRQHRGHLTKTGNRHARRLLIEAAWHYQHPPRRPPAPARSPSPSPAPSTRAPGRRRSACTTATGTSPTTASARPSRSPPSPASSPASSGPP

SEQ ID NO: 162038 - protein, 345 aa, unidentified
MNKISVIGLDLAKNVFQVHGIDTDDEVVVRKQLRRSEIRKYFARLEPCLIGMEACGGAHFWSRELTRLGHTVRMMAPAFVKPYLKSNKNDRNDAEAICEAVQRPSMRFVQPKLPEQQAVLHLHHGRQLLVRQRVALSNHMRGVLSEYGIVVPQGVKVLSRQLPEILEDAENTLPMLARHLLAELKAEHDQLIERVGRFEKQLKAWHANSTVSQCLASIPGIGVLTATALAATVGEGQDFKNGRQLAAYLGLVPRQASSGGKNRLLGISKRGDGYLRSLLIHGARAVIHHIRRRLKAGRPGGNPWVEQLLLRCHVNEAAVALANKMARTAWVLLARNETYCLAHAA

SEQ ID NO: 162039 - protein, 457 aa, unidentified
MEKKGYLGIDVSKGYADFLLLGSESQVLEEGFQLQDNKEGRQKLKELIADWQKHGLEDLYCGVESTGGYENNWYGYFKSNYKGSKVLVCRINPRGVKAVSDASLTRTITDRVSAENIANYMIKFPLKVDYGNNAVAGKEEFKEGRQHYTFIKMLVKQKVQLNNQFEKLLYQHFSEMMVYCRHGVPVWLLIMLTKYPTAKMVRKAGAARLSSVKGISVEKANSILCKAKESEQEISIQVCHVIMATAKEILHKVSAIDEEKRYVVVMHKDEEEVKLISSIPGVGIESAITISMEIENVDRFETAKKMASYFGVNPTYKQSGDGIWGKHMSKKGRGAIRGVLYMTTLAAIRYNPLLKQVYARFRAKGMKHYQAAGVVMHKLLRIIYGILKSKTKFNAETDEQNQLKSAEKQKQKEEKDKKDKKINQLKKHRFQGPTKEAPISRKAEQELKKQIASQTSE

SEQ ID NO: 162040 - protein, 346 aa, unidentified
MEQVIRIGMDTSKHFFQLHGVDAAERPVLRRKLRRNDVVAFFAKLPPTVIGMEACGASHFWARELGKQGHEVKLTAPQHVKAYVKRNKNDGRDAEALCEAMSRPTMQFVAVKSEEQQAALMLLGLRAQLIARRTQLSNAIRGYAAEFGLTTARGLDKIEPLLSRIAQDETVPALARELFALQGKNYAQLQGELKTIDAKLLAWHRADACSRRLAQIPGVGPIGATALVMKAPDPRAFASGRDFAAWLGLTPKDHSTAGKTRLGKITRAGDEALRSILVAGATAVIQQARRGRGSSSSWLTALLERKPPKLAAVALANKTARIAWKLMVSGDSYNGARMPATSASAA

SEQ ID NO: 162041 - protein, 337 aa, unidentified
MKFCGIDLHSNNSVVVITDETDHVLVSRRCPNDLARITALLEPHRADLAGVVVESTYNWYWLVDGLKACGFEVLLANTLAMKRYDGLKHSDDKDDAAFLSHLLRLGVLPTGYIHPPQERALRDLGRKRIQLVRNRTQHILAAENLLARQWGHRLSSNEIKKLSAPSIDRLGLPMDVALALNASVAIIQALQTQIDGLEERLLHEVKLRPEYCLLTTMPGVGEVLAAVIMLETGDITRFAEVGNFASYARCVSSARYSNGKKKGEGNVRNGNAYLVWAFIEAANHAKRFSDDAKRFFEKKRAKTSSTVATKALAHKLARATYHILQERQPFDSKRCFA

SEQ ID NO: 162042 - protein, 330 aa, unidentified
MNYQEVIGIDVSKKTLDAHLHLANEHQQFENSHRGIAQLCRWCAKKGSGENSKHLFVLEHTGIYSYALCVDFHEKGLDFALVSGLEVKKSQGINRGKSDKADAKMIARYGYQNQDKLRLYELPVISLQRLKKILNLRERMVSQRAGYKNSLNEAKSVLSKKDFPTYFTAQQSMIKSLSRQIEVLEKKIAQIIESDEQLRNTHSLLTSITGVGKVTAITMIVLTDCFTQFSTWKKFACYAGTAPFPYQSGTSIHGKSKVSHLANKRIKVLLDCGARAALQHDPEIRRYYQKRLAEGKAKRNTINIIRNKLIARMFAVVNRGIPFVNTMKYA

SEQ ID NO: 162043 - protein, 347 aa, unidentified
MEQQETTSYSAFVGIDISAKTADITFLTDVNNKHKHWKIKQTPGEYKKLCDRLNRYHPESSEVLVVMESTGAYWRNLADYLHTTGGYAVCVLNPYRAFYFARAMMKRDKSDKIDSLLLAQMGYLTHSLLPLWTPPPPMSKKLYQLLQQRDKLTHISVQQTNRRHAFDYHTDDPLPEVIERDDILRTLIDKQRRRIRKEIMLLMKEDEAYNRTFQHLMSVDGVGVITAGYLIYVTENFSPTLFSEPKHLASLIGLVPRTYESGTSVHKSAKIGHSGRPHLRELLYLAAMSATQSKYAGSNLYNYYHRLLRKGKTKKQAFIAVAHKLLYICWAVATKQEDYVSDYKKAS

SEQ ID NO: 162044 - protein, 340 aa, unidentified
MQQIAIDLGGRNSQVCARSSDGQIVEERSCETRSLRAYLRQRPPSRVVIETCAEAFGVADAALELGHQVRVVPATLVRALGVGARGIKNDQRDARLLSEASCRMDLPSVHIPAKQSREWKSMCGMREALVSTRTKLINTVRGWLRGEAWPLRSGATETFVERVRKLFRERSATSLPRFVERQLTTIESLNEQIAEADDELADLANNDETCQRLMTVPGVGPVVAIRFAAAIDERERFANAHRLESYLGLTPGENSSSERQRRTSLTKAGAPQVRWALTQAAWSARRWRPNDPMVQWCKQVELRRGRRVAIVALVRKMAGILYAIWRDGSSYDPSRGASST

SEQ ID NO: 162045 - protein, 387 aa, unidentified
MPEDAPRPAQAAIRTDLGAIFVSLELSRRAWLVTSLSPGGGEKMSKHSVQAGDIAGLLRRFAQLKEKARARTGRDFPVITIQEAGLDGFWIHRVLQSEGIESHVVDAASILTSRRRRRAKTDKIDGETLVRTLLAYKRGEPRVCSMVKSPTPEEEDRRRICRERRALVAERVQHTNRIKGLLFAQGAFDYEPLKRNRRAHLEDLKTGDGRPLPVNLKAQISRELDRLEVVLQQLQTVDAERDALLEPASEASPAPAAMLSQLKGIGPEFATILYTEGLFRGFDNRRQVAAYAGLAPTPWQSGSVDHEQGVSKAGNPRLRTTMIQLAWLWLRHQPDSALSRWFQDRVQRNGGRMRKTTIVALARKLLVALWKYATSGVVIEGAVLKAA

SEQ ID NO: 162046 - protein, 479 aa, unidentified
MEEQDGQPRRLVGIDLGIASRHSVRVLEADGRVAGRSSCVPTVESLSAVEQAALAGAPDGTRLAVVFEPTGPAWMPIAVFFARRGHAVYRVSSAKAADLRRFLRRHAKTNGIDAETLARMPLADPRGLQRLELPGPEAAALDRRVRACGRLTEAASKHKVRIKDLVRQLMPMTPLTGDLGKADLAVLERFADPRLLLAAGAAGLTRLITTASGHQQGPQRAGQWRAAAAAAVELYGDHPAVPYDELAAEVATEIRLLRAIQAELAAHAAAREQHYQHADPGQLARSLPGFAEISAPVLVAAMGRPGRFRDGTRFKSYAGLTPRASETGETDRKGQPMSKAGPSPLRSAFVRAADTARRQDPQLARIYYRQMTERGATHLKACCVVASHLAERAWTVMSRGTPYVICDNNGNPVTPGEAKKIIAEKWTVPEDIRKRRRSRKQAGKAPQAASARPDRRGDPPRPRSSRPPGQAVKPATPPG

SEQ ID NO: 162047 - protein, 458 aa, unidentified
MVTSRPKGNSVSKGMPIVHRHAAGMDIGSTFHVVAVPADADAEPVRKFSSFTGDLHRLADWLKHVGITTVAMESTGIYWVPVYEILEERGLEVVLVNARDAKNVPGRKTDVNDAQWLQRLHECGLLRASFRPQETIVALRTYLRHRERMIEFAASHIQHMQKALMQMNLQLHHVVSDITGLTGMQIIRAIVQGTRDPATLSKLRDVRCKASEATLCQALTGNYRAEHLFSLRQAVELYDTYQEKIQDCDKEIERCLSQLNANREVPAAELPKRRQRRPCRNEPAIDLQSSLFTLVGGIDLTQIHGLGPYSALRIVAECGTDMTRWPTVKHFTSWLTLAPGNKISGGKVLSSKTRRSSNRATSLFRIAAIGVGKTSTAMGAFFRRLAARVGKAKAVTATARKIAVLFYNTLRYGWAYKDPGVDYYEERYRQRSLDNLRRRADLLGFKLVQSTPSRIGVS

SEQ ID NO: 162048 - protein, 351 aa, unidentified
MNYIGVDYHKKYSYIVVKNEDERVGGRGTVNNTKEEVQRFLEPYRPGMAVVEATRNWGLIYDWLDEVLDDVTLAHPLKVKAIAEAKIKTDKISADILADLLRADLLPRAYAPSKQTRELKNILRQRMFFVRVQTMMKNRLHDILDRHPEVLSQAPEASDLFGAAGMQWLSQTALPGEDNKLLTSELGFLKFLKEEISQSNGMVKKLAQKDRRARLLQSIPGIGPFFSVLILYEIDDISRFRDEKKLCAYAGLVPSTHASGGKVFHGRITKTGSKWLRWAAIEAAQTAVRSDSEFHAYYQRIRIRKGTNAAKVATARRLLTIVYRLLRQGRFYERRTTNTRKIVTPAALVTD

SEQ ID NO: 162049 - protein, 339 aa, unidentified
MTVKAVDLDLAKDVFQVHGISENGRVIFNRTIKRAKLLRFFEALPPCRVGMEACGSSPHWGRQLRTLGHDVKLMPAGYVKPYVKRGKNDAVDAEATCEAVRRPTMRFVEIKTENQQVILSIHRTRDLAARQCTQMANMIRSLLREFGHILPIGIEAVTAFAKRHLDGDHPGMPEIANGKLGIQCYQFIGLNARIEGYSKMIEQHALLNADARRLMRMPGIGPITASAIVATIGDAHQFRTGRDLAVWLGLTPLKKSSGGKEYLGKITKKGDCYIRKLLVVSMTSRAVMAKRAPERVDLWTAKIIADKPFRLATTTMANKAARTIWAMLTKKQEYRQPAF

SEQ ID NO: 162050 - protein, 341 aa, unidentified
MQITTIGLDIAKNVFQVHGIDADEKVIVRKQLRRGQVMAFFEALAPCLVGMEACATSHHWARELTKLGHEVRLMPAKDVKAYVKRNKNDAADAEAICEAVRRPTMRFVRIKSAEQQGQLMLHRARDLLMRQRTQLINALRAHLAEFGITAAQGREGIKELLAIVAQEEGSRLPSDAHASLTVLATQLQAVQTMIGSLEKRIVAQHRSNEASKRLETIPGIGVIGATTIAAVVPDPRVFRSGRDFAAWIGIVPRQDSTGGKQKLGPISKQGDQYLRRILIVGAHAVLRRARQQPEKYPWLTQLLSRRPFKVVAVALANKMARIAWALLAKGGTYRAPQLVAV

SEQ ID NO: 162051 - protein, 406 aa, unidentified
MTEETICWFAAVDWGSEKHQTCVLDAHGGVAGEREFRHSGAGLAELADWVQSITGEASVVAIAVEVPHGPVVDVLLDRGFIVHSINPKQLDRLRDRFSVAGAKDDRRDAYVAADGLRTDRHLFRRLQVADPRIIELREWSRLAEQLKQERVRLGNRLHHQLWRYYPQLLELTDDVAADWFLDLWAMAPTPAKGKQLRKATVERLLKRYRIRRIDAETVLRSLHQPAIKVAEGVAEAASVHIRSLIVRLHLVNREQRNAEHKLDELCAAFEGGEQDDVAILRSLPGIGRINLATLLAEASGPLSRRDYPALRTLSGVAPVTKRSGKSCIVVMRYAAHVRLRNTVYHWARVAIQHDPRSRSRYTALRQRGHSHGRALRGVADRLLNVACVLLQRQTTFDPDHGQPAAA

SEQ ID NO: 162052 - protein, 372 aa, unidentified
MKKRSSSRQNPKPAVKAERGRQSVTIGMDLGDKTSRYCLLSDEGEILQEGQVGTTKAGMTKTFGRIGRARIAIEVGTHSPWVSRLLRSFGHELIVANPRQVKLITESSRKDDRLDAQTLARLARIDPQLLRPIQHRSEKAQTALMVIRVRAALIAVRTSLVNTARGLTKAVGERLPKCDADQMGVIQTESLPPKLRQVLGPLLKEVESITEKIKDSDREIEQIARRDYPETALLQQVGGVGPLIALTFVLTVEDKGRFQKSRDIGCYVGLRPRRSDSGQSQPQLRISKEGDPYLRTMLVQGAHYIVSRRGPDTDLKRWGLHLAEHGGKRGKKKAVVAVARKLGILLHRLWVTGEVYEPLRNQNLRAAGKKAA

SEQ ID NO: 162053 - protein, 371 aa, unidentified
MASIIYVGMDVHTTSFTLCCYSIEKDEVFATAQIEPDYKKVLKYIEQVKKNYGKECEILCGYEAGALGYSLFHQLSDNGIYCVILAPSSMPKTNKREIKTDKRDAAKIAKCLAYNTYSAVNIPTEEDNAAKEYIRMRDDEKGTLKKIKQRILSFCNRHGKQFTDGRSKWTIKHLSWLSKLDFGNEVLQEAFDEYLVIYHQADSKVKLFDKRIEALAHSGSYEESVKKLLCFIGIREHIALATIVETGDFNRFETAQQYASYLGLAPGESSSGDSRRVTGITKAGNSHVRKLLIEAAQSYSRGAIGAKPKALAKRQAGNDPKDIAYADKANERLKRKYHRLTRLSKDRNTAIAAIARELACFIWGMMTGNTA

SEQ ID NO: 162054 - protein, 339 aa, unidentified
MVLIGIDPHKGSHTAVAIDGHETHLGELRVRSSNQQCDRLLEWASVFPDRRWAIESAGGLGYLLAQQLVAAGEDVVDVPPTLSARVRVLGSGKAQKNDPNDALSTAIAALRGRRLRAVTLDDQVAIIRLLATRHHDLVAHHTQALCRLHAQLANLSPGGVSGRVSPKRAEALLAAITSSDGVVAARKEHCAALLADVTRLRAALVESRARIGVAVLASKTSVTDVYGVGPIVAAIVIGQSGNVFRFASRDHYASYNATAPVEASSGPTKRHRLNPRGNRQLNHAMHLAAVTQISRDTPGRVYYQRKIASGKSMKEAMRALKRQISDAVFRQLVADADRL

SEQ ID NO: 162055 - protein, 445 aa, unidentified
MDLVHAHAAGIDVGSRFHMVAVNQNADDVKEFGVYTEDHQRMIEHLKNEGITSVAMESTGNYWQTLFSALQIAGFEVILVNGRQTQNAQGKKTDVRDSLWIQKLHSLGLLTGSFLPGCHTEQLRTYYNHRQYLVEQTSRYINKMQKALRLMNIRLDVALNDITGKSGRAIIDAILTGQRDPQKLASIVDSRVKKSKEEIAKSLHGNWREDLLFELKECLSLYDTYQSKILVCDQQLKKVLESMQNTPAVMAPLSKLKKQRSKHSPLFDVRMMAYAHFGADLFAIPALSFNTILCLMANISREELQKFPTVKNFTSWLRLAPNNKKTGGKIISSRTPKGKNKIALALRQAANTIGNMKTHPLLAFFRRVAFKNGRAAAITATARKLAVIIYQMITKQQPYQPLNSEVLNKKIKSQQIKNIKRRLEKLSLNRQELDTLFSSLSLSTD

SEQ ID NO: 162056 - protein, 448 aa, unidentified
MRTRKPARPKKMNLPKHLQHINPHAAGIDVGSRSHFVAVPEGSCEQSVREFTSFTDDLHRMADWLLACGVTTVVMESTGIYWIPVFEILESRGLEVRLVNARHVKNVPGRKSDVLDCQWLQRLHSYGLLEGAFRPAEQVCTLRAYVRQRMNLVRYASAHIQHMQKALSQMNLQLANVVSDITGVTGMRIIKAVLAGERDALVLARLRHPRCKNDESTIARSLRGNFRSEHLFSLKQAVDLYEFYQHQIGECDRQILDQLASFDAADGPANGPPANLEQALLRMSGVDLTRIDGIDTNSALKIISEIGTDMSRWKTAKHFASWLGLCPGTKVSGGKVLSAKSKPVANRAAAALRMAAFTLLKSKSALGAYFRRQRSRLGAPKAITATAHKLARLVYSMLKHGTAYVDEGQKQYEERYRTRVVQNLKRKAQDLGYALVEIAEKQPQPATI

SEQ ID NO: 162057 - protein, 370 aa, unidentified
MDDTIFVGLDVHKATVSVALAEGRRGREVRHVGVFANRADQIGKLVERLAKGGRRLSFCYEAGPCGYGLYRQLTELGHACLVVAPSLIPMKAGDRVKTDRRDAVMLAKLHRAGELTAVWVPDGAHEAMRDLVRARATAVRVLGKARQHLQGFLLRHGRIFGGKKGWTLAYRRWLATVRFDHPAQQLVLQDYIHAVADAETRVARLTEQIQDLVPGWSMAPVVEALQAMRGVAFVVATTVAAEVGDFSRFDNPRQLMAYLGLVPSEHSSGNTVRRGGITKAGNTLARRVLIEGAWTYRMQARISRKLHDRVENASQAVRDIAWKAQLRLCARYRRLAAAGKPKVVVTTAIAREMVGFLWAIARQVQVNAAI

SEQ ID NO: 162058 - protein, 414 aa, unidentified
MEDILECCCGLDVHKESIVACLLKGPIEGGAKPKSEIKEFGTQLKDLMALRKWLEEHTCRYVAMESSGIYWQPVYAILETSLSDEMNLLVVNARHMKNVPGKKTDMRDAEWIATLLRAGLLKGSFVPERDIRDLRQYTRYRKALIRDITSQKNRIEKLLQSSGFRLSSFLSDIFGSSGLAVMQQLVQAGCVSEQSLKICLKGRARLKTAEILSSLNGTLSLPQRQLLKMQLAHLKDLQDNLGEIEEEIRTDFSQFEGPRDLLDSIPGIDHTAAYAILAEIGSQMSAFPTAQHICSWAGLAPGNNVSAGKKKKQRVTPGNNYLKTILCEVAWVIAAHKNQYLSGWYWRLKQRTDSKRAIIALARKLLVIIYTMLKTNQPFDERKFLERKETTNRKRVNRMVSELTRLGYVVSMTT

SEQ ID NO: 162059 - protein, 340 aa, unidentified
MKRIFIGVDFSKLKFDVAVFEGATKEYLGFSVFENNLEGCQQALAWVATVTDVSPDGWLVCGEHTGLYSVTLTHYLCASGVAVSLEPGLQIKLSKGMTRGKNDKIDAGYIAEYAYRFQDKVKPYRVASAALSGLKDLVAYRNRLLGFKKSLTTSQQELQRVKADQTAVAFIYDDSKAAVNDLNARIKRVEAAMRDILQSDAELLENYALLTSIKGVGMLNAVVFLVVTGNFTLFSSARKLGSYCGVVPFEHRSGSSIRGRDKVSKLANKKMKVLLTLAARTAVLHDPVLRAYYLRKLAEGKHDRVIINNVRNKLVHRMFAVVRDKKRYDPSITHPLQQAA

SEQ ID NO: 162060 - protein, 350 aa, unidentified
MTTIAEARPLVTGGVDTHLDVHVAAVVTAVGGVLGTEQFSTTTAGYQRLLSWMRTFGQLDRVGVEGTGTYGVSLARHLRAEQVPVVEVMRPNRQVRRRHGKTDVVDAIAAARAVLSGEANATPKTHDGPVEALRTLKVLQRSATKARTQALNQLRALLVTAPDELRGRLRDLSQRELLATCAAFRVSADDDSLAAVTRFALRELAQRVLYLAEQLEQVKLRLKRITEQVAPALTNLKGVGPDVASTLLLAAGDNPERLVNERSFASLCGASPVQASSGKIHRHRLNRGGDRQANAALWRIALVRLNCDQRTKDYLARRVSDGKSKTEAIRCLKRYIAREVFAALPGPATT

SEQ ID NO: 162061 - protein, 426 aa, unidentified
MLKIVYPICCGMDVHKSFVVACIASTNEQGVTTYKSKRFSTFTGDLRQCADWLSENNCKDVRMESTGKYWIPVYNILESTCNIVLAHPKYVKAIRGKKTDKRDAKWIADIFKHDLVAGSFIPPADIRQLRDLVRYRWKLTNFTTGEKNRAQNCLTVSNFKLDDVFSDVFGKAASAITDRILENPAEKITDVSCFRTKGMKATNEQVLAAVDGEMCEEQAEKLRIIRSHMDNLELCKANLESLILTTAEKYLPQLGLVMTVPGIQSFAAIGIISEIGADMSVFPTSKHLCSWAGLMPQNNESAGKKKTTRISRAGAYIKPLLVQCALSAIRAKQFPEIRNRYLALRKRRGHKKAIIAIARMLLTAIYNMLKKNEPYNPELYRKDDRPPAHREVSVEEAIFILQRQGYLVAAPSTTWFFRTSSFFARF

SEQ ID NO: 162062 - protein, 354 aa, unidentified
MRAVFGIDVSKTSSEVAILVNGEKVHGYTILNDAIGFNRLLGDLKTVHNPEIIFEATGVYSRRLQAFLEEYSYAYTRLNPLEAKKQLDSLRVRKTDKIDAEKLAKSQLVHNRKPTYVQEEVYQHLRDLSRFYQNMTEDLVRTKNRLHKVLQVTFPELETLLSTPTGEQYWNLVMAFPCKEFVLSLSQSDLCEIIRQSTSKRISEKRIAYLTDKLIKLAKQSFCAVKNTSPMLEEVRYYAQELLRLSERRQVVLNDMVALAQPLPEYDILRSIPGIAETTATSIIGELRDIRRFKSANQINAFIGIDLKHYESGDFLGQEHITKRGNPYARKILYKCIHNIAAASHTNPCHIADF

SEQ ID NO: 162063 - protein, 338 aa, unidentified
MVSVGIDLHRRRSDLVGVDDLGSVVWKRRIPSSPADFLHVFGELEPGSFEVAFEATYGWGWLADLLQDVGIPAHMSHPLATRAIASARVKNDTIDATTLAQLLRTHLLPEAWIAPPEAREARRLVRSRAALVRIRSRLRCQIHAVLADHGITPEMSDLFGVAGRRLLAELELPPLSRHRIDGCLRLIDALTVEVESVDREMRVVFGQHSALPRLMRIPGIGFVGAATVIAEVWDVSRFRRADQLCSWAGLTPTERSSAEHTRRGHISKQGSRWLRWILVEAATNHTGRDPELRQFEARIARRRGLKIARLALARRLLCLCFYALRDPAGCAAYPLAAA

SEQ ID NO: 162064 - protein, 456 aa, unidentified
MPKQRGTKSKSKPDPFSGLPPLNLNAAGIDIGSREHYVAVPPDRDPQPVQMFKSFTCELHRLADWLQACRIDTVAMESTGVYWIPLYQVLESRGFQVYLVNARQIKNVPGRKTDVLDCQWIQKLHTFGLLNSSFRPADEICVLRCYLRQRDNLISSASTCIQHMQKALTEMNIQLANVISDISGQTGLAIIRAIVSGERDPHKLAKMKDYRIHASLETIAKSLQGNWRKELIFRLQQALALYDTYQSKIAECDHQIHVHVGAFPNHVDTSEKPLPPRKSSKRPHGNSPLFDLRDELYRISGVDLTSIDGIDVITAQAIISEIGLDMTRWRTEKNFASWLGLCPDNRITGGKVIKRSSRHVINRATHALRIAASTLRDSKSALGANFRRLKARLGAPKAITAMAHKLARLIYRMLKYGQQYVDKGMQHYEQKFRHQRIKWIKKQAMELNLQIIEQTP

SEQ ID NO: 162065 - protein, 274 aa, unidentified
MTRNYIGVDLAKDFLEVRDPVRGGARVANRPAAVGRWLGGLGEADFIVFEATSGCDRALRVGLGQTGREGVRLNPLQVWHFARSRNRAKTDRLDAGLLADYGRERQPAPDPAPDPARDTLRALVHRRDQLKRMEVQEKNRLSGCLAEGAPALVARDIRSELAGLARRIARIEATIRDQVDRDDALGRDARLLRSVPGLGPVTAVTLLAYLAELGRVDRRAIASLGGLAPRARDSGKYRGRRFLGDGRRHVRRALCMARLSALRRSSSSPSRDAC

SEQ ID NO: 162066 - protein, 326 aa, unidentified
MEESIKKYCGIDVSAETLDICYEAEGGSLLNFQVTNDKKGFQQMIKACGKDYHYIMESTGVYHVELMFYLHDKKITFTVENALKIKRFIQMQLDQSKSDKKDARWICLYGINQKPTATHRPENEYFECRALNGAIHDITKEINQICNRIHALERCPYDVKPILKSYRSMLTKLRLEKSKLEKELLEKLKSWQPELLTLVSSVKGIGKRAAAELIIFTKAFNGMTDYRQLISYAGLNPTEHSSGTSIRGRGRISKRGGYQLRHILYMCAMNAMQTNRACRELYQRLISKGKNGKVAIIAVCNKLLKQVFGCVKNGIPYDDNYGKSFV

SEQ ID NO: 162067 - protein, 392 aa, unidentified
MYIVGIDIGKNHHEASIVSPKGKQIGRSLRFATTHKGADSLMSFIFKNIGNSPCVFGMEATGHYWYPIYSFLKAKGYTIYVINPIQSDSLRKMYIRQTKNDSIDSFLIAEVIRFGQFGTTSMADENILAMRQLCRYRDSVISSRTEIKLRIGTIMEQIFPEYEKQFSSLWVSTSMGILEKYLTPENIENTPIDELFEIIKDKSHNKLTMKKAISIREAAADTFGIKIAQDAFSFQLKQLIDRMNFLDKQIEALDIEIMKYYEQFDCYLHTIPGIGIIGAATILAEIGDISRFKNSSALVAFAGIDPTVRQSGEFNSTHNHMSKRGSPYLRHAIFLAATTCSFHNSPLNAYYKKKRDQGKHHLTATGAVARKLTTIIYAVLRDSKPYEPKKFC

SEQ ID NO: 162068 - protein, 353 aa, unidentified
MSEDKYIAFDVHQATTVVSVMNAAGREVKTAVLPTQAQPLLGFLESLRGRLHLTLEEGTYAAWLYDLLQGRVAELVVCDPRHNALLKEGSKTDHQDAHKLADLLRTGMLRPVYHGNRSLRNLRELAHAYQALVQDTTRVMNRIKAYYRSYGIDCAGRGVYSRKQRESWLERLPAGASRVRGELLHEQLEQLRSLRRRARRELLGESRKYLVAARLCGLPGFGPLRVALLIAGMQTPHRFRTRGKLWSYSGLGLVQKGSSEYRLVEGRAVRRPGALQLRGLNRSHRPGLKALFKSAALVAIRQPGPFQDYYQSRLQQGVDPAILRVTVARKLAALVLSLWKKGGRYRAEGVKQA

SEQ ID NO: 162069 - protein, 336 aa, unidentified
MRYIGVDLHTTQITVCYLTPQNEISIRKYQLFEMEKFISGLEPTDEIAVEATCNTKWFAGQVEKSVKRVVLVNPRAFEVVKNSVKKTDKNDALNLARFLKADLLPEVRAKREEAGRVQSLVNTRTKLVRLKTSLINKIHALYVANGRKLKKTSLNSEKGLGHVLEEKWSAIEAIELEIIIEQIRSLKVSIKKLDQAINEEAGKLKGFDNLQTISGIGSLSAGILLAVIGEIRDFASADKLAGYFGIVPRVSNSNETVHHGRITKCGSKTGRTTLVQCSLAALKKSEYLKKYYEQVKARRGHGKAKIALARKYLGIIYNTLMNNWVFADFNNFELAE

SEQ ID NO: 162070 - protein, 320 aa, unidentified
MQTPSAVLNIGADVAKDEIVVACSEGSFPVREVANQHTALLAFLKGLPAGSRIGVESTGSYRELFAEAAHKLGFLVFLLNPKDTRHYSKAVGLRGKTDRVDAELIARMIAHEHTKLHAWIPPTPQQRELDRLIKRRATLISLREAVEMSLHELGGFADELKALRTRFNQLIARIDLRVKALVEASPDRKQNFTRLCTISGVGAVVGTALVNTLERVPVKSADAFVAFTGLDPRPDDSGQHRGKRRLSKRGPAELRRLLYLAAMSAAKTKTWRPLYEHYRAKGLSSTATLVILARRIARTAWSIYTYKTEFDPARLTNPLT

SEQ ID NO: 162071 - protein, 341 aa, unidentified
MSAYVPIDLHRRRSVVMHMADDGEVLGWVRLANDPEALVAEVLKAGEAPEVAIEATYGWYWAVDALQAAGANVHLVAPSKVAAFDGRRVKNDQRDCQLMGDLLRANMLPEAWISTPQVREWRELVRYRAKLVALRTGLKSQVHAVLAKHGVQETMSDLFGVGGRQLLAHLLETDPWFRSPFGQRVESLLVLIGAFDHEIDELTATMAHVFRDHAGYHAIQAIDGVGPITAGIFTAEIGDVTRFTSAVHLASWCGLTPRHHESDTTLRRGPITKQGSKLVRWAAIESAQKLRKDSVLHQRREHLAERRNNRRIAKVAIARRIVTLVYYGLRDGHIRCLEPAA

SEQ ID NO: 162072 - protein, 369 aa, unidentified
MTSILYVGIDVHKESYTVCSYSYEKDTLEYQQKLPPDYKMVLTYVGQLRKRHDEAVEIVCGYEAGCLGYTLYHQLMAHGLRCVILAPSTMGITNSDRIKTDKRDAGNIARCLAFHTYSAVYVPTAEDEAVKEYIRMRDSQKKALKIIKQQILALVLRQGYHFELGKNYWTQKHLNWLRALDMGGALQEALSEYLLTYAYLVDKIERLEIEAFAQTERYAQSVKRLSCLIGVKAHTALSVLVEVGDFKRFAKADKLAGYLGLVPGENSSGDRHRHTGITKAGNSHVRRLLVEAAQSYTRGAVGYKSAALKKRQAENPPEIIAYADKANERLRRKFYHMVLKNKSQRNVAATAIARELACFMWGMMTDHAA

SEQ ID NO: 162073 - protein, 347 aa, unidentified
MLHAGLDLSRKKLDVCLLSDAGAHLDQLAVPPDVDSLRTLARRIGEVHREPVCAVIESMTGARIVHDTLEACGWSVEIADAQKVKGLAPLACKTDKIDSMVLAVLSHRDLVPAIWLPDPRVRQERELARFRLHLVKHKSALKCRVHSTLINFGRACPVTDLFGAEGRRLLRRLEVPEPWRSNVTASVELIDDLEQQIAEINRRLKEEHAYHPYIPLLMSVPGIGWVLAFTIAGEIGDIERFSSPEKLTGYTGLCPRVNQSGERDRRGPLTKHGPTYLRWALLEATMHASRHPAYAERYERTKRRLGKQRGAKVAQIDIARRLSHAIWHMLSSNRPFAPRGAAFRLAA

SEQ ID NO: 162074 - protein, 343 aa, unidentified
MGEVSTIGLDIAKSVFQIHGVDAGGAVVIRKRITRAKLLEFFAALPPCLVGIEACPTAHYWSRRLQALGHMVRLMPPSYVKAYLKRSKNDANDAAAICEAVTRPSMRFVATKSEQQQSGLMLHRSRQLLVCQRTMLSNAIRGHMAELGIIAAKGRNGTAELLKNIANEQDDRIPEAARFSLDVLARQYAAVRAEIVAIEKRIHAWHRSSEESRRLEEIPGVGPIVATALVAEVGDWKVFSSGRSLAAWIGLVPRQHSTGGKERLGRISKQGNRHLRWLLVAGAMAVIRYARQHGTKRPWLTRLMDRRPIKVAAVALANKIARMAWAMMVRGERFKEPKLLPAA

SEQ ID NO: 162075 - protein, 318 aa, unidentified
MHATIVAIDLAKDVFELACADPAGRILERKRLTRRAFSRIMENCPQLVVVMEACGSAHYWGRRFQARGHTVRLLPPRDVRPYVRRNKTDRADAAGLVKAARCEQIADVRVKSPRQQGLQALHRIREQLKGQRTATINLVRGLLREYGVVIPNGSSKVRAAVLEALEDAENEVPMVLRATLAEQLEHIARLQTDMAAIEKRLAEEAGRDVAVQRYLTVPGVGLLTATALRAGAGDLSRFNSGRHLAAWIGLVPREHSSGHHRRLGRITKRGDAYLRTLLIHGGRPVLRSALAAKLARRLSALDHYGAAFNPNHISHKPV

SEQ ID NO: 162076 - protein, 402 aa, unidentified
MERQLERCCGLDVHKESIAACVRLGGRTGKAEQYVQTFGTTVAELLVLHDWLAAHGVTHVAMESTGVFWKPVFYALESDFTCLLVNAAHIKQVPGRKTDVQDCVWIAQLLEHGLLRGSFVPPAPIRDLRDLTRYRKALIHDRTRVANRLHKALEEAGIKLASVASDILGVSGRAMLAALVQGTTDPAVLADLARASLRRKLPALRQALANRFRPHHAFVLGQLLAHLDYLEEAITTISTEIERVMAPFAEPLRRLDTIPGINQRTAEVILAEMGPDMSAFPSARHLASWAALCPGQHESAGKHKSGKTRKGNRWLRTALIEAAAGASRAKNSALQARFRRVLRHRGPKKAVVAVAHALLRMVYHVWPTERSIAKPALITTIVTTANASRVVPSRRLNARATA

SEQ ID NO: 162077 - protein, 408 aa, unidentified
MNMKHVLAFDVSMGKSTMVIYNHYKKCEFEGEINHNKLSFKALNEKICEITKLDGQAPEIVFEASGVYSRPLEYFFQTEGYPYHRVSPLEANLQTASMRRHKTDKSDAHELAKSHFRTERTTTYQEENYYKQMRALTRYYDELESESTNLFSRMHAILQLSFPELEHLFSKRSALFLNIVQLYPHPDEVLECSKTVIRNRLKANTKKNLSLTRAEEKGIGLLHAAQNSYPAISKEDVRCEQVRDYAKRISDLKEKKEQIIKQMAELSKGRIEFQVLTSFPGIGEVTAVRLIGEIGDLRRFQNHKQLNAYVGIDIMRYQSGNTFYKDKINKRGNNKLRKILYFMIQTMIKLRKKTNNHIIEYYDKLKTQPHGKPHKVASIACVNKFLKVAFHLITHNITYDYEAASTCS

SEQ ID NO: 162078 - protein, 343 aa, unidentified
MTHIITIDLAKEVFELAVANQHYRITERHRLSRTDFEVFMRQQSSETVIVMEACGMAHHWGRTFQQAGHQVLLLPAQYVRPYRRRNKTDRADCGALLEAHRCDGLKPVSVKSIQQQELQHLHRLREQWKQTRNARFNFLRAVLREQGIFLPTGNKAALSKANQAIDQLSLVSLQIIQPVIAELGQLESNLQKVEQEIARLTCANPVVQRLRGIPGVGLITSTALVAAIGKADQFTSGRHLASWLGITPRESSSGHRRQLGSITRQGNPYLRTLLIHGARSVLLGSQRKAKAGKPLNRLQDWVVQLEKRVGHNKATVALANKLARIIWVCWARDVDYSPEGSVA

SEQ ID NO: 162079 - protein, 414 aa, unidentified
MDVIHTHCAGLDVHKKVVVIAIIVPDGAGGLFKETRSFGTMTADLLGLSDWLMSHGVTHVAMESTGEYWKPIFNILENNFEVILVNAQHISKVPGRKTDISDAEWIAELLRHGLLAASFIPPVGQRELRELTRYRSTFVKERATLINRVQKVLESANIKLASVATNVVGASGRAMLEAMLAGTATPEQMAELSKGRMRSKRTELSQALEGRVKPHHRFVLTELLRQIDSLDETIARFNQEIEEYCRPFEEAVVLLDTIPGVARQTAEIIVSEIGTDMSRFPTANHLASWAGVAPGNNESAGKQRSGRTTKGNKPLGVALVQAAHAAAHTKNTYLSAQYHRLAGRRGKKRATVAVAHTILVIAYYLIKRKEPYRELGSDYFDKRRPEATAKRLVRRLEQLGFQVSLQPLSVPVPA

SEQ ID NO: 162080 - protein, 336 aa, unidentified
MKYSGIDLHSNNSVVTVTDEEDRVMAEKRLPNDLATILGFLLPWRDELVGVVVESTYNWYWLVDGLQEAGYRVHLAHCSAIKKYEGLKHSGDEADARHLAHLLRLGILPTGTILPREQRALRDLGRKRMQLVRSRTQHILAVENITARERGARISSEQVKRLSVETIDQMPVPEDVALAVKANVAVIHTLSVQIDLLEKRLQKAVPRTEYDLVTTIPGIGRILATTILLETGPIDRFASPGNFASYARCVDSQHTSNGKKKGEGNTKNGNKYLSWVFIEAAHFAMRYCVEAKRFYERKKSRTNNVVAIKALAHKLARACFHMLKERKPFDVTRCFA

SEQ ID NO: 162081 - protein, 304 aa, unidentified
MTTFAGVDVSKNFLDVFNGQEIRRYTNDPKGWDGITTETRGPYVIEATGIYHIPVARHLWRAGQTVYIVSPLQVRRYAQALMARNKTDSLDARVIAAYAEAVGDRLRPWTPLDADLSAIRVLVGYARGISQQSAANRNRLHAVRFAYPEHAGNIVETVADLKRTARRFYREALKVAYENPAIAHWIDQMTEVSGIGERVALIVVAYGGNLERFTEARAFAAYTGLTPMRKQSGEKEGKARISRMGPGALRQAFYIAARVAVMKNERYRAYYERKRAEGKAHLLVMTAIARKLAVVAWKKAVGRP

SEQ ID NO: 162082 - protein, 345 aa, unidentified
MAIVEVTRPVTGGVDTHLDARVAAAIDPIGGLLGVESFPTTPAGFTELHDWMIRLGDIERVGVEGTGAYGAGLARFLGGCGLEVIEVDRPNRQARRQAGKSDPADAVEAARAVLSGRATGIAKTGDGAVAAMGALLIAKRSGREARISCLNQLRHLGFCGPDDLREAFRGVPRTALGARAAALRPRVSGDDVAHATKIAMRTLGRRVLALDADNDELDALLAGLVHTTAPDLLGVYGVGVDTAAILLVAAGDNADRIRSEAAWAHLCGVAPLPASSGKITRHRLNRGGNRQANHALWRIVFTRLGSEPRTRDYLERRLAEGLSKREIIRILKRYVAREVYRHLPR

SEQ ID NO: 162083 - protein, 343 aa, unidentified
MDHFAGLDVSVKETSVCIVDDTGKIVREVKVASEPEALLKVLRSPSHQFKRVGLEAGPLSQWLYSALAEAGLSVICVETRHMRAVLKAQINKTDRNDARGMAQMMRVGLYRPVHVKTLRSQKLRMLLTHRKLLQSKAIAVDNDLRGTLRNFGLKVGMVGATRFEARVKELIENFSDLAVLVEPLLVVRRVLREQLGILHRRLLTVVRDDDVCRRLMTVPGVGPVVALTYRATIDVPARFRKSKAVGAVFGLTSAKYQSGEIDRSGAISRCGDEMMRTMLYEAAQSMLFHSIRWSWLKAWAMKIARHRGMKKAVVALARRLAVIMHRIWVDGTEFRWTKEAVTT

SEQ ID NO: 162084 - protein, 361 aa, unidentified
MRSIVYVGMDVHQDFMVLTGVGEKGEEILFETRVRNDAEVFGRRILKLKESYELRCCYEASSCGYVVYRWLKAIGVDCMVIAPSLLPRFTGDRIKTDRRDALKLALSYRAGILTGVYVPEESGEKVRCLLRCRDALRSDVVRLRHRVLKFLQGKGLVYRDGRNWTIKHWQYLRRLEFEGADEIVYREYLELLDYYLLRLREMDQKIKELADSPAYRRKVERLCCLRGISTLTAMILLSEVIDFRRFTGAPALMGYLGLVPSQHSSGHSTRMGSITRTGNGRCRRVLIESAWHYRHKPALGVRLKKAWAEQSAELTALAWRAQQRLYKKFWRIVNRTGNSNKAVVATARELSGFIWAIMTEA

SEQ ID NO: 162085 - protein, 412 aa, unidentified
MLFVGDDWAEDHHDVEVVDDSGQVLARRRLPEGLTGVTRLHALIAEHAPPEWADLEPQAAAALVKVGIETDRGAWVAALVAAGYEVFAINPLSVTRYRQRHSTSGAKSDAADAHLLAGIVRLDRANHRPVAGDSHDGEAIKLTARSHQSLIWDRTRHVLRLRSALREYFPAALEAFPDLDAPDALELRQRAPDPDRAARLSRARITAALRRARRRDVEAKAARLQDIFGAEQLRQPAAIQAAYAAIVTSQAAVIEALNTQINQMGAVVAAHFGRHPDAEIYASQPGLGTILAARVLGEFGDDPHRYLDAKARKNYAGTAPITRASGTKKIVLARYARNRRLGDALQQWAFCALRGSPGAKAYYKQLRDRRIGHQAALRQVANRLVGILHGCLKTHTVYNEHTAWAHHNTVAA

SEQ ID NO: 162086 - protein, 361 aa, unidentified
MKRALKDNQDAFAGQEFYVGIDVHQKQWTISVQSNQMALAKPLTIDPSAGKLSSYLQRCYPGGKYHAVYEAGYSGFWPARDLLTHEIDTIVVNPADIPTMHKERATKTDSVDSRKLARSLENNELRAIYIPDRKAEEYRLLNRYRSQLVRDETRIKNRIKAILAEFNYRVPVELEGNRWSGAYVRWLQTITFETPYAQIAYNERLGQLAESRKRLAKVLRELKLMATQESSIASLVKLLQSVPGVGFLTAILLVVELIDMHRFKRFDDLVSFIGLAPSVHQSDERSYSRGLTKRQHHELRSRLLESAWIAVRKDPALSLKYGQLCKRMNKNKAIIRIAKLLLSRIRTVWKTQTPYVYGVIE

SEQ ID NO: 162087 - protein, 356 aa, unidentified
MTIGVDVSKDTLVCSERNGHPFSHANSAGGVKRFLCQLEAATIIAMEATGRYHRLLADTAHSMGFMVIVLNPKDVSRYAKSVSPRASTDPIAARVIAEFASIREHRLYASPPAFVDALKNLVRTRAGLVKQRVALRNQAGQHSDIASLLRSAIASIEESVNKLDRKIVEVAKSVPEYQLLVKVKGFGELTAAYMTAMLASGVFRTSDAFVAFIGLDLRVRESGKHKGRRKLSKRGDPEARHLLYMAALATSRQPGPFADLRAHYLERGFTKTEAAVFIARKLARVAWAVYTKKQPYCADRVLAQPVSPSHSTDNGMESIPSQSNPVAAPAAPSRSHSTVKAARQRRSANQLSGRTT

SEQ ID NO: 162088 - protein, 414 aa, unidentified
MNTCLFVGIDTHKGSHTAAVIDSYFNTLCIITFANSYSGFDKLMEKISSVAGSRSITFGLEDSQGLGFFLADYLVQKGFSPMDVNPIYTDRARKATIHRDHSDAGDAVLIAKALIRERDKLSPVKIDKVSIEIREMVRYRQMLVEESTKLKNRLHCLLFSQYMGVTSVFSDLFSKGALAFFKKYPDPHLLKGVEEDTLATFLKANSKGRHGIKKARAILSHLPISIDRNLSDTRAYIIASHIKRFTDLRKELASAEERIKALVEKSSYVCLISIPGIESVTAAKIISQVIDISRFSSASKLAKFVGIAPREKSSGRKKKFEKSKYGKKFLRSTIYFMVLTHISRTRNGNDINPVSRAYYLKKIAEGKTKKEAITCLSRRLIDLIYAVMRDRSIYNFSKSKFLVQHTQILDTVAG

SEQ ID NO: 162089 - protein, 307 aa, unidentified
MLPTTSPYVGADVAKDTVAFCGAKAATIKNTVAALCAYLGALPAETHVVCEATGRHHHALQQACQALGRPLTVLNPAHARAYAKSLGKLEKTDAIDAALLRRLGEERRPAATPPPSAEHRALLDLLMLRSALVEDLSAYRHRRALLTGAAATELDALIAVLRERRQALEHRLEAWLESAPGDWPERVQTLCLTVGVRALSALQLLAYLPELGTCNRGQIAKLAGLAPLPWDSGQMRGLRCIQHGRAPARRVLYQCAVTAAHWNDTLRPYYQQLRARGKPAKVAYVAVARKLLLFLNRLLSDAPPLTA

SEQ ID NO: 162090 - protein, 400 aa, unidentified
MVSPQLQVAVDVGCRRHRVAVGNVAGAVLEEFDIEHNAAGLAEFFARIERLRAERGWPVAVAMEGYNGWARPLDRQVLLRGWRLYNVNNLKLARYKEIFPAPSKSDAVDTRRMLELFRLHGQLRGARNVLQEVAPVPLENDQLKRFTRRRRQLVGEKGRVLNRLQSDLQAVCPGLLSITGEADNLWFLNLLACREDIRKVVGLRRATLLSLQGVGQKYAAVIQGWQKQACFSAEAPWVGPMIVADARRVLELKGQIHALDHAIAGLVQRSEMAGHIDTIPGFGPTCSGELAGEIGTLERFRTEAGLAVYLGMATLDNRSGDSNGAKPPRQVNTRAKAAMMVAVARHVEQVPASRAYYEKKRTEGRTHNQAIRALGRQLVRVIWSMLKRGRDYELRAAVPG

SEQ ID NO: 162091 - protein, 415 aa, unidentified
MKLKQIPAGYLTIGIDPHKRKHAAVAITEDLMVRTKFKFDNSRDGFDRALRNAREEIIKAGCRGVIFAIETGGHYWRNFAYFLEERGIPFRLVSQITLKRMRDGRDINRRKSDFRDAEMAANILRTGDFTETELPQGVYADLRSTHSAYFRLVRERSRIVNLLKGLLDGLFPEFTQVFKDPCGRTALAVLMTLPSPAAIASVEEHVFVAKIREKRPRHLMVRRLRALHQTARNSIGVKPGADAVAVEVSLLADRYRLIEEQIDQVAKLLIGLVNRTEEGIYLLSIPGINYLSAGALLAETGSLGRYQNAKQVIKMAGTNPIESESGGKRLGETPMSKKGRPRLRYSAWNAVIPLFRHNPDFRSWAKRLRERPSHANPLNGKEVVGAALNRLLRLAFALVKKREFYRSPQIALMTK

SEQ ID NO: 162092 - protein, 427 aa, unidentified
MSEVESVRPEPQFAAFVGIDWADQKHVWCLQAAGSEKRESGELEHTPEVVEAWVGQLCQRFNNRPIAVAVEQSRGALVFMLAKYEPLHLFPVPSTMSASMRKALYPSGSKDDPRDADLLLDLLLQHRNKLHRWSPDTEATRRVQNLVEERRKLVDEKTAQTNRLTSHLKIYFPQILNWFERLDTELVCALLERWPTLAELQKVPPAKLRTFFRKHHCRDEALIERRILAIGQAIPAIRDRAVIEAKSTVVKVIVQIVRSLVEGIADLDEKIEEAAAVHPDFFIFESLPGAGAVMAPRLLAAFGSQRERYGSAYEVQTYTGIAPVTEKSGKKKWIHFRWACPKFLRQSFHEWAGHSIPHSVWARAYYQQQRSKGQDHHAAVRSLAFKWIRVAFRCWKDGVAYDESKYLASLARHGSPLAAVTATAKTL

SEQ ID NO: 162093 - protein, 380 aa, unidentified
MSIQNSAPAAGAENSAVVFVAIEMSRSRWDVVVHTPVSDKLSRHCLEAGNGAALIEFIDRVKGVARRRGRDVRVVSCYEAGYDGFWLDRLLRQNGIANHIIDAASVEVNRRARRAKTDRLDAEGLLRVLLRWWQGDRQACHMVHVPSLAEEDAKRPARERQRLVKERIQHVNRIKGLLATQGIYDFHPLRADREAQLAPLAVPTHLRSELRREFARLVLVLEQIAELEAARNAVVAGRTTAQDDPATAKICKLFTLKSMGPEFSTGLVREVFYRDFANRRQVGSYLGLTGSPWRSGRLAVEQGISKAGNPRARTMMIEAAWMWLRYQPDSALAHWFGERVGQQRGRMRRIAIVALARKLAVALWHYLEHDILPEGAVVKS

SEQ ID NO: 162094 - protein, 340 aa, unidentified
MTEVSRIGLDLAKSVFQVHGVDAREEVTVRRPLRRGQMLGWFGKLPPCLIGIEACGTAHYWARELTRLGHTVRLIPPGYVKAYVRRNKNDAADAAAICEAVGRPSMRFVAFKTEQQQAASGIHRVRALLMKQRTAAMNTLRGLMAEFGIIANKGMSGINELLAIVADPEDSRIADPLRAGLVAIAATLRALDTQLGTVDKAMAAWGRADKTCRHLNTIPGYGPVLSTAMAARVTNPQGFDSGRHFAASLGIVPRQDGTGGKVKLGPISKRGDGYLRRLLVNGAMSVLRSKQAKHDPWLVTLLASKPLKVVAVALANKMARIGWCVMMRQEDFRVAPVTAA

SEQ ID NO: 162095 - protein, 298 aa, unidentified
MKAPSTRPAAVLGLDVGKSSHWACLIDRDGEVLDSAPVRNREAELDALFASAPAGTLVVVDQFRNIGSLAVRRARAAGLGVAYLPGLAASRAAGLFAGEAKTDERDAAVIARTALGVPDSLSGVPGRGEALEAARALSSQRDHVVACATRDKNRLRAVLLESCPALEAAVDLSDRRWLELLTVPGIGPRTAAQLAVSVDIGRFPDHDHLASYCGIAPRVRSSGTSVRSVRASRRGDARLKSLLIFSCNSLVRSSGRYGEYYRACRARGMGHGRALKAVARKRLRAIYAVMRDRVPYRE

SEQ ID NO: 162096 - protein, 374 aa, unidentified
MVDDTALYVGLDVSKEKIAVGLAEAGRKGEVRYYGEIANRADAVRKFVDKLAGRHGRLCFCYEAGPTGYGLYRQLSGLGHECLVVAPSLIPTRPGLQIKTDRRDAVALAALLRAGELSSIWVPDETHEAMRDLCRARETAVSDLRRARQHLLSFLLRHGRVFEGRSHWTKAHRNWLAAQRFDHRAQQITMEEYIRAIEQIEERRERLTQQMLAFLPDWSLNPVVEAIQALRGVAQISALTLVSEIGDFRRFSNPRQFMAWLGLVPKEHSTGASVMRGSITKAGNTRARRMLVEGAWTYRLPARVGLEILKRSEGLPENIRAIAWKAQVRLRQRYRRMQASGRPTNIVIVAIARELAAFVWAIATTIPITSTKAA

SEQ ID NO: 162097 - protein, 347 aa, unidentified
MYPFYLGIDLHLKRSYVVLINAEGGVLDKRRMANKDFATYLLEKVPKETYAVMEASRNWPYFYDLLGTHVERVELAHAKQVRSIATAAVKTDQVDASVLAHLARLNFLPTAYAAPQAIRDLRQHLRYRAWLIDERRRAKNRIHAILAGYNLASPFTDLFGRSGREWLQGVVELELRTTSRRVVLETLMLIDQLDDQIKALGREIPLPEDLKPRAALLTSMPGVGQLTAATILAEIGDIQRFKSAKSLCNWAGLTPRVHSSDAIVRHGHISKEGSRYLRSAMVTAAITACRVSPRWSRVYERVAQRSGWRAAKVAVGRRLLTVIYYMLKRNQPYREDYEQQRRSEQGA

SEQ ID NO: 162098 - protein, 413 aa, unidentified
MDVLHPRCCGLDVHKSSISACILLREGRRVQKQQRRFGAMTQELQELAEWLRQFHVTQVAMESSGVYWKPVWNILERQFTVVLANAQHIKNVPGRKTDQKDAEWIAQLLQYGLLRASYVPCEIIRDLRDLTRMRASLSQEASRISSRIQKVLEDANVKLASVATNVLGKSGRAMLEDIITGEDAPERLASLALGHLRVKIPQLRLALAGKIRSHHRFLLRRLLDQIQFVEHEVALLDERLEDIGRQRPDLAQAVARWDTIPGIDRVAAWALLAEIGDNMAQFPTAEHLASWAALCPGNHESAGKRLRGATRQGSPWLCRMACQCAWAAARTKNTYLSAQFRRLAARRGKKRAIIAVAHTLIVIAYHLQKNQSNYDDLGGNYFDRIHSDGLKRYLVKRLEQLGHKVTLQPIEAA

SEQ ID NO: 162099 - protein, 481 aa, unidentified
MLHNLRMSMEESPMGHNRSRSRQPGGKKFKHPSLLKRINRNAAGIDCGSEAHYVAVPLERDPELVRSFKTFTADLHRLADWLGACKIKTVAMESTGVYWIPIFEILEERGFEVVLVNAQHIKNVPGRKSDVLDCQWIQELHSVGLLRGSFRPAAEIVSLRAYLRHREKLVQSAASHIQRMQKALVQMNLQLHNVISDITGVTGMHILRDIVAGVTDPMALAAHRDPRCRASQDEIAASLTGNYRAEHLFVLRQHLELFDTFQQQIQACDTEIECLLHKLAARQRKSKTPIPSPRCKLRFYDNEPRFEIRDPLYRLAGADLTQIDSIGPFTALKLIAEIGTDMSRWPTYKHFTSWLTLAPKNKITGGRLISSRTQPSANRAATVLRMCAMVVGRTSTALGAYYRRIAYRIGKPKAITATARKLAILVYRTLKGELDYADPGASAYEEQHRERTLRNVRNRAKRLGFGLVDLETGELLQGAVS

SEQ ID NO: 162100 - protein, 339 aa, unidentified
MKTSALGIDLGKNSFHVFGVDEDGKATIRRKFTRTKLILFMAKLEPCLVGMEACGGAHHLARTFQNHGHNVRLMSPQFVKPYVKSNKNDFLDAEAVCEAVGRPNMRFVSVKSVEQQDIQMLHRARSQAVAQRTAQANQIRGFLLEYGIVVAQGIAVLRHRLPEILEDGETGLTTAMRELLAELRNELMHLHERVVYFDERIEALARGNELCQRLQTIPGIGPLIATALVAAIGDGSVFKSGRELAAWLGLVPRQRSTGGKALLLGISKRGDAYLRTLLIHGARSVVLRGAKREDRRSRWVRALAERRGKNVAAVGLANKIARTAWALLVKGTSYRPVMN

SEQ ID NO: 162101 - protein, 402 aa, unidentified
MNCVGIDVSKGKSTIAVMRPFGEVVVSPFEVCHTASELSELARLLKSLDGETRVVMESTGNYHAPVAWLLHGAGLYVSVVNAMLVHDYGNNSLRRGKTDKKDAVKLANYGLDHWLTLPRYVPEEDARLMLKTCYRQYQQYSKVQTMLKNNLISLLDTAFPDANRLFTSPPRADGSEKWVDFVAAFWHCECVCGLSKKAFTTKYQKWCRKHGYNFSEDKALDIYVSACGRFGVMPKTKTAKLLVEQAISQLQATSAALAALKQEMQSLAASLPEYPVVMGMFGVGPTLGPQLIAEIGDVRRFHSKKALVAFAGIDAPPYQSGQIDVRSRSISKRGSASLRRTLFLVMGVLLQCAPMDEPVYQFMNKKRSEGKPYRVYMMASANKFLRIYYASVKTYLESLEHD

SEQ ID NO: 162102 - protein, 346 aa, unidentified
MIIIGCDFHPSGQQICWLDTATGETGERKLEHALGGAEKYYRGLPGSARIGMESTGNCQWFVELLTKLGHEAWIGDAAKIRACDTRQQKHDRRDAALILKLLVEERFPRIWMPSSQERDLRQLLIHRDKLVRMRVQVKNELQHLAMNQGITKKRRLWSAAGEKVLCELPLQPWASRRREDLLRLRSLLDEQIALLDQAVKQVAAENEKAQLLMTQPGVGPITALAFVLMIGDVQRFPRSKQVASYLGLIPREYSSGGHQRFGSISKQGNRFMRMLLVEAAQSVVRYDPEFRNEYLHRCHKKPKGVAKVAAARKLTVRLYWMLKTNTAYPEIARVESRSRVPLASAS

SEQ ID NO: 162103 - protein, 358 aa, unidentified
MRIIGCDLHARQQTVAMLDTDSGELVEKTLQHDDEELRKFYSGLSRPVLMGIEATGSMQWFLELMEELGIECRVGDPAKIRAAEPRKQKNDRRDAQLLLKLLVEDRFPTIWVPSSEQRDLRTLLRHRHQWVRLRSRVQHTLQSMALNHGLRRGHSLWSQAGQHALRVLPLAPHASERRGALLSLYPRLQESIGQLDQQVSQQVQQRPQARRLVTHPGVGPITALATEVFLGDPMRFGDGKALASYVGMIPSEHSSGGRQRLGAMSKQGNALLRYLWCEAAMHAVERDPELKRFYRRKLVQKGLGKARVAAARKLGIRLWIMMRDQIDYQEFCRRGKARQESGSVRAGIPAINSGPAQQ

SEQ ID NO: 162104 - protein, 353 aa, unidentified
MWIGVDAHKRIHQAVALGGDGELSERTIDNTPVGWASLLTWAQQWPERLWAVEGSGSLGRGVAQFLAEHGQRVHEVSPKWTAQRRRTQRKPGKSDRLDALAVARLLREEATSLPLVLPDEDDVASLQLWSRLREDVVADMTRVRNRLHALLLLCDPTYKTHIPDLTTRTGIRACQAYTAPGQGVLARHREQAVRQVAAQLTLLADQEQQLHRQLEGAVARRFAPLQAIPGLGPLTAAALVAELGAPRPGLGESQLAALAGVAPLEASSAGGVRYRLNRQGNRRLNRLFHQITLTQQRIYPPAEGYLASETARSYTPRSAACAQTAPGSFRLATVASLLEPYTRCRPSGCLITP

SEQ ID NO: 162105 - protein, 353 aa, unidentified
MHTHQKSSDPVATIGLDIGKNTFHLVGLDRRGAIAMRIKVSRSQLVHRLVNLPPCLIGLEAGSGSHHIARQIQPLGHHVRLIPAQYVKPFLKGHKNDYRDAEAIAEAVQRPTMNFVAIKTPEQSDLLSLHRVRSRIVRQRTAIINQIRGFLIERGITVRQGPRPLRKVLPEVLSSPPEALSPRLVRLIAELDDDWRRLDERLEALSTEIESLSENDAACHRLMTVPGIGPIISSAVVAAIGTGSGFKQGRDFAAWLGLVPKQESTGDRTKLGRISKRGNKYLRTLFVQAAHVVIERRPAAAMRALWPWIEKTSRRLPHRNLLAIALANKLARVAWAVLARGRDYEPRITPNAA

SEQ ID NO: 162106 - protein, 445 aa, unidentified
MPELAEPAVPVAYVGLDVSQDEAVVCFLLADGREPVPRWAVANSASGATALVARLAELAVEHGVGELRVGLEATGLYWWHLACALKDAPALAAFRPSVYALNPKLVHDFRKHYGALPKTDRADAFVIAERVRFGRQLPPPFQIDVRYAPIQRLTRFRFHLAQTLAREKSYFLTFLFLKFSAFSQVHPFKDSFGATSCAILEEFTTEELAQAELADLAAYLDAKGRGRFADPDAVAATLQRAARDSFRLDKVLDEPLTLVLGTTMATIRTLQSQLKTLDATIARELRAIPQPLTSVPGLGPVWSAGLIAEIGDVGRFQDEAALAQYAGLVWKAHESGQFQAEDTPMAKTGNTYLRYYLVEAANSVRVHCPEYAAYYQTKFAQSPRHAHKRALVLTARKLVRLIDALLRTGSLYRPPEARQDQTEVHLPTTNRPSANRRSRRAASVG

SEQ ID NO: 162107 - protein, 338 aa, unidentified
MFFCQTSDSASVRKGVRIMLATEQMKECFVGIDVSKSRLDVDAYPTAEPLSFANDEAGRCDALAVLRNKQPTLIVVEATGGLETPMVAMLAAEGLSVAVVNPRQARDFAKALGILAKTDRVDAHVLARFAQAIRPEARPRPSQETTELAALLVRRRQLIEMHTAENNRLKSTLPRVAKAIRTHLAWLEKRLAETDQDLDGMIRASPIWQHKVELMESVPGMGRVTTTSLLAQLPELGTLSNKQISGLVGVCPYSRDSGSMRGRRTIWGGRASVRAALYMAALVGSRYNPVLKAFYQRLVAAGKPKKAALVACMRKLLTILNSMIKHDQPWKHEVMKPA

SEQ ID NO: 162108 - protein, 347 aa, unidentified
MKRIAIDLAKSIYQVAESVQVGRVDRRKRLDAGAFARYVQEQIEPVEWVMEACGTAHHWGRLMQEKGHCVVLLHPRYVRPYRRRNKTDRNDCDAILEAARCQDIRPVPVKSVQQQQVQQLHKLREGWKKSRVQRINLLRGILREAGVETPNDIKPFLRQACELIERPEVRALRGALQVVLAEINLYEQSMRECEEQLARWHADDEIVHKLDEVSGIGLLTASALKTAVGKPERFASGRHLSAWLGMTPSEYSSGERRRLGRISCKGNVYVRTLLIHCARAALLAAKRCKARTPERLTQLQIWALQTAERIGHNKAAVALANKLVRICWAVWCHERRFSGNWRSTKPA

SEQ ID NO: 162109 - protein, 371 aa, unidentified
MEYTRFVGLDIHKERISVTVAESGRSGAVEYLGEIANDPGAISKLCDRLGRSGKPLAFCYEAGPCGYGAHRQLTKLGHRCDVVAPSLIPKKSGDRVKTNRRDATMLARLHRAGELTPVWVPDADHEAMRDLVRLRSVVRQIVTHARQHLQGFLLRHGRKHGLGAAWRMAYRRWLSTLAFEHPAQQIAFQDYVDAVTDGERRLQRVEEQISNLLPEWNLRPVVDALQAMRGIALINAVVLVAEVGDFTRFSNPRQLMAYFGLVPGERSSGETARRTGITKTGNSHVRRALVEGAWAYRMRARIGRHKVDRIEALPKAVRDIGWKAQVRLCARYRRLTARGKTANVVNVAIAREMVGFIWSIACTVQSAPKAA

SEQ ID NO: 162110 - protein, 407 aa, unidentified
MLFVGDDWAEDHHDVHLMDEAGAVIARRRLPEGLAGIRALHELIADHAETPAEVVIGIETDRGLWVQALVAAGYQLYAINPLAVARYRDRHNVAGAKSDAGDAKVLADLVRTDRHNHRLLAGDSADAEGVKVLARGHQSLIWSRNRQTNALRSALREYYPAALVAFDDLAHHDCLAVLAKAPAPADGARLTIGQITAALRRGGRQRNLQRRAEEIHAALRGEQLAAPAAIVDAFAATTKAAVAIIAELNRQIQQLEASLTDRFEQHPDADIYRSLPGLGVVLGARALGEFGDDPDRYANAKSRKNYAGTSPITIASGKKTSVLARHVRNRRLYDTIDQWAFCTLTNSPGCRDYYDQRRAVGDLHHQALRALGNRLVGILHGCLKHRAHYDEHTAWAHRTHTENRQAA

SEQ ID NO: 162111 - protein, 348 aa, unidentified
MVVKYSVGIDISSKKFDSNLSVIDSEQKVKVIASHKFDNTASGFEQCHKWIAKHWKQKEIRLTITMEATGVYYENCALFLFRKGYTVSVVLPNKAKKYLQSIGLKSKNDKIDAKGLARMGAEQSLRSWEPMTEFFYQLRELTRQYQSLQEHRTILLNQVHANEKGMFVNAMVLKQLKSLVAVIDKQIEATQTAIEKQVASNSEVADKVKKITTIKGLGVLTVATLIAETNGFALFTTGSQLVSFAGYDIVQNQSGDHVGKTRISKKGNSRIRRALHMPAFGVVKWEQTPFFNLYERTLEKHNLKMKSYVAVQKKLLVVIYALWKKNEEYDNNYLIEKCAAQEQMKKAA

SEQ ID NO: 162112 - protein, 467 aa, unidentified
MVAHTSAATPSAKLHSLPIQHPHAAGIDVGDRSHWVCVGHTPDGGEPVREFPAHTQGLRELVAWLRHCGITTVALEASGVYGQVLFLTLVEAGFATVMTSPAFTRQIKGRPKTDRLDCQWIQRLHAHGLLPPVFQPDDATHTLRSYVRQRGNLVRLSGHYVQRMQKSLVAMNLKLTNVVGDITGVTGLKIIRAILTGQRDPQALAQLRDRRCRHAEPEIATALEGRYRPEHLCELRSSLTLWEQHLAVIADLDAEIETHLAHMRRDSQLPRLPTKPRVRGKKPHDPRFDVRTALYYATGVNLTAIEGIDEIHALTLVSELGTDFTKWPTVKQFASWLGLCPQFKQTGGKVKSSHTRLGKNRAATALRLAAWGLMRSKSYLGAYLRRQRSRLGAPKAITATAHKLARIVYNLMRYGVEYMKRDEAAYAEEQREKLERSFHRRALELGYEVRKVASPPTPETEAENETT

SEQ ID NO: 162113 - protein, 343 aa, unidentified
MKIYALGIDLGKTVFHLVGLDANGQVVIRKRCSRTQLLTFTANVQAQLIGMEACSGAHFLGRALRAQGHDVRLMPAQYVKPYVQTNKSDYIDAEAIAEAVQWPRMRFVPIKTEEQLDLQALHRVRERWVMRRTAVVNQVRSLLLERGLTVPKGRRHLNQALPRILEDAELPLSGSFRVLLAQLKLELEQLAARIEQMDAVIEQEARENEACQRLTTIPGVGPVTATALIAAIGNGSAFGKGRDLSTWMGIVPGEYTTGGKQKLLGISKRGNKYLRRLFVQGARSVLQQRDKQAPGLSLWLAQLLACKHQNVVVVALANKMVRIAWAVLCKNESYRAPVLAVST

SEQ ID NO: 162114 - protein, 327 aa, unidentified
MSTDKEVDVLGIDISKAKFDVALLKGKDKTKNKVFTNNLEGFTELQTWLTSQGVTNLHGCMEATSIYGNALARFLVAAGYKVSIVNPSRPKAFGRSELSRTKTDRADAKVIARFCAALQPAAWVPPAVEVEQLQALVHRLDNLTAMQQQEQNRLATVDPILVESITAHIDFLNEQIVETKKRIRDHFESHPALKAQRDLLISIPGIAETTATVILAEIRDLDTFDSADQLAAFAGLTPQEFSSGSSVHGKPRLSKIGNSRLRKALYMPAIVARRYNPFIRTFCDRLLAKGKSKMSMVGAAMHKLLRQVFGVLKSQKPFDPNFLPLTS

SEQ ID NO: 162115 - protein, 314 aa, unidentified
MTIQTPIIGIDVAKENLSLYRLDTQQSATLANDRRAIVTWLKTLPADCAVAIEATSTYHVLLADLAYQCGHRIYVIDGYRLSNYRKGIGGRAKTDQSDARLLARYLAHEQNQLHPWNPACKAYRRLQLLLRRRATLVRSATALRLSFAQDRQMARELKPVLERIKRLERRLNEQVHKALQEAGLAEQAKRCQAIEGIGPLTAAALNLAFLRGSFRNSDAFIAFLGLDVRVKESGRYSGRRKLSKQGDSEIRRLLHNAAMAASRTAAWQQRYQQYLQRGLKRTEALVILARKLARIAFALMKTQQPYRPAVDTVG

SEQ ID NO: 162116 - protein, 479 aa, unidentified
MSRPQVIDDEEHERVHDRVAAIDVAKDSGMVCTRTPHPSRPGARRSTVWTVKARMNAVRALGRQLKHDGIEIVTLESTSDYWRIWLFVLEACGLAVQLVHAAQAKNLPGRPKTDKLDAMWLARLTEMGLLRASFVPPKAIRDLRDYTRMRTRLTQERTRCWQRLEKLLEAALVKVSSVVSKLTTISAQDMIKAMIAGQRDPHQLADLARGSMKAKHDDLVEALDGIFDDHHGELAGLLLDQITVLDAKIAQLGARAAELAAAMPAAWGVDADGTTGPGAGTGPGAPVLNAVARLAEIPGLSPGLARSIIAETGLDMGRFPTAGHLVSWAGLCPSARQSGPRARAGKKGQGDTWLRGSLDLGLGQEAFEAAQRAYRELNATPVGRRSLSQVIGVRIDIATARLLNHDRDGAEGAIQPVLTASAPLRNVSLTGRLIRTRNTLVAQPWARDTPAHQLADEIREWLAHHAGPMPPSEATATQR

SEQ ID NO: 162117 - protein, 335 aa, unidentified
MTKVMGAVFVGIDVSACMLVVALESDHQPGRQRREFPNTAAGHQLLIQWLSKSATAVQVCLEATGLYSLDLALALDRAEGIEVMVANPRAIADFAKALLQRSKTDKLDAEVMLEFVRRMPFVPWQPPKPHRLDLRALMRRITGLKLASQQEKNRLHSVSQSAEITPLVRKDIQSHLVQLERHVEKLEQQAEAIVQVDPELAQQFRHLVSVRGIARVSALHILAELVILPPDMTARQWVAHAGLDPRHHDSGTSIHKPARISRARNRYLRAALFMPALVATQHDPNIRAFYQKLVDRGKTKMQAIVAVMRKLLHALHGMLRTGSDFVGEKFYVIPS

SEQ ID NO: 162118 - protein, 349 aa, unidentified
MKYFAGLDVSLEETAICVVEESGRIVKETRAASEPAALSKALREVGFALERVGLEACSLTAWLHDGLRTEGLPAICIETRQANAAMKTMPNKTDRNDARALAQIMRTGWFRAVHVKSRQSRLWRSLLVARRTLVNERRAIENVVRAVLREAGLKLGRPSCAAFAGRVRELAGDDPTVRPIVEPLLAVLATMLGQLARLTKQALAITRREEVCRRLMSVPGVGPITALAFRATIDRPERFRRSRDVGAHLGLTPTRYQSGETDIVGRISRCGDELTRTALYEAAHSLLVRSRKWSALRAWGMKIAKARGMARARVAVARKLAVILHRMWSDRTAFRFGREPAAVAVLAVA

SEQ ID NO: 162119 - protein, 341 aa, unidentified
MKVSTIGLDIAKNVFQAHGADETGNVVFRKQLRRNKLLEFFASCAPCVVAMEACSGAHYWAREISKLGHQVRLIPPVYVKPFVKRQKNDAADAEAICEAVQRPTMRFVAAKSESTQASAVVFRGRDLLVRQRIQLINSLRGHLTEFGVIVAQGTAHVTHLIQHVRNPDSTLPQAARAVLNVLIEALQVLEEKIKLLDQEIIRRSREDEDARRLATIPGVGPVTATALVALAPAATSFRRGRDFAAWLGLTPKQNSTGGKQRLGATSKMGERTLRRLLILGACTVVQHAGQRKISKESWLAKMLARKPRMLTIVALANKMARIVWALMSKGGIYQASVGAVA

SEQ ID NO: 162120 - protein, 419 aa, unidentified
MGSSEAKEVKDIIKEALIVSLDIGKGSHHAYFRAPDGTDIEPFAFTNGKRSFEGFWSKLSRFKEQHHLKEVVIGFESTGPYAEPLFHFLSTKAVKLVQVNPMHTKRVKELTGNSPHKSDKKDPRVIADVICLGHALTVVIPQGAAAHLRRLTQARERAMERRTALTNQLQHLVFVIFPEFLSVMKDVSTKSASHLMRHYPSPHSIVSLGVEGLTEVLRKVSRGKLGQERAEQLCAAAKCSVGITEGKESILLEIAHCVNGIERECRFIKGLEEQMCHHLEQIPYSHSILSIKGIGNVTAAGLIGEVGDFRRFTTIGEIMKLAGLNLYEISSGKHKGQRRISKRGRSLMRKLLFFAAINAVKSKGIMHEPYQQMLDRGMPKIKALIAIARKLLRVIFAVVRDNTVYVEDHNHMHTLKSAA

SEQ ID NO: 162121 - protein, 407 aa, unidentified
MDVVHPKCAGLDVHQQTVMACARAGSGKAVTYDRRTFGTSTPELLALGDWLATRGCTHVAMESSGVYWKPVWHVLDGHFELVLANAMHIRNIPGRKSDVNDATWIADLLAHGLIRSSFVPPPSVQELRDLTRTRKQLVREIAQHTLRIQKTLETANVKLTSVLADIMGGSGRAILAALVAGETHPERLAALASEKVKASRAELTDALHGRVTAHHRFMLKLHLGQIEALEAAVRDVEARLGEALAPFRAALEHLITMPGVSETVARVIVAEIGFDMTRFPSAAHLVSWAGLCPRLHESAGKRLSTRTRSSNPWLKTTLVQAAWSAARKKECYFRAQFLRIKSRRGPKKAILAVAASMLTAAYYMLRDGADYRDLGADHFDRRDKAKLAKRLIARLHDLGLIVDVRAA

SEQ ID NO: 162122 - protein, 358 aa, unidentified
MQKNKISFKGQKIFIGIDVHAKKWEVASLTESGFVKRHSQEPSAKVLFDFLRKNFPDGEYHAVYESGFSGFATYYALSEYGIDCIVIHAADVPTTQYEEVMKTDKIDALKLARSLRAEELRPIYIRKRENIDDRAVLRIRRTIQKQLCGYKSRVKHLLHCNGVTMPDRFAMPCTHWSMAFIKWLKEDVTLLSPTRKSLDLLINQVETLRASLLTATREVRKLATLERYKENYELLRSIPGIGIIVAMSILTEIYDVSRFKNEKQFASYLGLVPTCHSSGDKESHGEKTFRGNKQLGPMLIETCWTAVYRDYGLGLAYASYKQRMKPQEAIVKVARKMSNIIFSILRNRKRYEPYKWEN

SEQ ID NO: 162123 - protein, 375 aa, unidentified
MKEKVRFLGLDVHAETIAVAVAEADGKVCSLGTIANRFEAVRKLVKKLGSVEQLRACYEAGPTGYVLYWQLTQLGVDCAVVAPTLIPMKAGDRVKTDRRDAERLARSHRSGDLTAVWVPDEGSEALRDLVRAREAAKQDQLRARHRLSKFLLRSGRRPETKIKIWTGLYMTWVRQLRFAQPAQESTRLDYLHEVEHMAERVQRLEESIREAIKLASPQMQQVISGLQALRGIAEISAVTIASELGNVSRFQSARQLMGYSGAVPTENSSGTRTQRGSITKTGNAHLRRIMVEAAWSYRLRPGIGPELRKRQQGVPEEIKEIAWKAQIRLTKRFARLAAAGKDQRKIATAVGRELLGFIWAIGIKAEAACEQQLAA

SEQ ID NO: 162124 - protein, 326 aa, unidentified
MEHELHYIGIDTAKEKLDVDVLRPDGRHRTKKFANTTKGHDELVSWLKGHKIDHAHICIEATGTYMEPVAECLYDAGYIVSVINPALGKAFAQSEGLRNKTDTVDARMLAEFCRQKRPAAWEAPHPLERALRALVVRHQALTDMHTQELNRTETAREVQRPSIDAHLLWLEAELKLLEKQIKDLTDDDPDMKHRRKLLESIPGIGEKTSAVLLAYIGLKDRFAHARQFAAFAGLTPRRYESGSSVRGASRMSKAGHVSLRRALYMPAMVATSKTEWGRAFRDRLAANGKKGKVILGAMMRKLAQVAYGVLKSGVPFDASRHNPVAA

SEQ ID NO: 162125 - protein, 414 aa, unidentified
MEKQWNIVCGADIHKKFLIATILSRSGTKKTKRFGMTLDELLNFKNWVIENGCEQVAVESTGTYWTPIHAVLEGSVGFIVGNAYKIKHTPGNKNDLADADWIAELCLNGMIEPSRIFPKADQDIRRLTRIREGYVNDMTREKNRIHHALDSCGMKLSAVLSDIFGKTGQSILDGLLEGRNIDDILKGINLKRIKATAEEIKNAIKGSLDFTQILLIRGSLEQMGAIQKRIDELRKEIKERIAYRKEDLKVAMSIPGVGFTSASTLLAEIGDINDFKKPEQLAAWAGLVPSVYQSAGKLITGSITKHGSRHIRWIRVQVARVIARGRNSKLKRFFLRVKAKKGSNVAVVALARKVLCILHHLLINKEMYKEDGINKKVKVDVGKEFPQQEMNLEEMITYIVRAGYEVRKGSEGGG

SEQ ID NO: 162126 - protein, 366 aa, unidentified
MQKLSTRRVMRNKILRGQQLTIGLDLGDRWSFYCVLNEVGNVVLEQKLTTTPEAVKRTFEKLPRSRIVLETGTHSPWISRLLTELGHEVIVAHAQKVQLITKSSRKDDRHDARTLARLGRIDPQLLGPVRHRSAQAQMHLTVIRARAELVSARTALINAARGLAKSYGERLPKRGSEQVGRELAAALSTALRQVLEPLLREVESLNERIREYDQRIEQIAKQAYPEVALFKQVKGVGTQIALTYRLTIDDPHRFAKSRDVGCFLGLRPGRRNSGQSEPQKSISKEGDRYLRTMLVQGAHYILGPFGEDSDLRRWGLKLAERGGKNAKKRAVVAVARKLAVLLHRLWVGGEVYEPLRNTNRAMGAAA

SEQ ID NO: 162127 - protein, 344 aa, unidentified
MSKHSVRGCDVAGLLERFAHLREKARARTGQRFPIIVIQEAGLDGFWIHRMLNAEGIESHVVDPASIATSRRRRRAKTDRIDGEALVRTLLAYKRGEPRVCSMVKAPTPEEEDRRRLCRERKVLTAERVLHVNRIKGLLFSQGITGYEPLRRDRRERLEQLQTGDGHTLPDHLKGQVRRELDRLELLLNQIKAVEAERDALLAAERAAARTPAAMLLDIKGVGPEFAAILWSEGLFRHFDNRRQVAAYAGLAPTPWQSGSVDREQGVSKAGNPRLRTTLIQLTWLWLRNQPHSALTLWFHERVRRNGGRLRKTTIVAVARKLLVALWKYVTAGVVIEGAVMKPT

SEQ ID NO: 162128 - protein, 449 aa, unidentified
MSRPQVIDDQEHERVHNRVAAIDVAKDSGMVCTRTPHPSRPGARRSTVWTVKARMGAVRALGRQLARDGIEMVTLESTSDYWRIWFFALEACGLAVQLVNASQAKNLPGRPKTDKLDAQWLARLTEMGLLRASFVPPKAIRDLRDYTRMRTRLTQERTRCFQRLEKLLEGALVKVSAVASTLTTISAQDMIKAMIAGQRDPHQLAALARGRMKAKHADLVEALDGMFDDHHGELAQLLLDQVTSLDGKIAQLGARAAELAAAMPGAWGINADGTTGPDAGTGPDAPVLNAVARLAEIPGISEDLARAIIAETGLDMSRFPTAAHLVSWAGLCPSARQSGPRTRAGKKGRGDTWLRGSLGQAAIGAARTATFLGERYSRIARRRGKAKAQVAVARSILVIIWHLLKDPAARFTDLGYGYYQARTDVNRKLRNHIRQIQALGFEVALTKAP

SEQ ID NO: 162129 - protein, 391 aa, unidentified
MFYLGIDIGKFSSVATLIDEKGTIVDKTLKFSNTTDGANSLLELIDSYVFECSNLAIGMESTGHYWLSIFSFLAKKDFSVSIINPIQIKSFRKSFTIRKVKNDFVDSILIANYIRIFGYDKFSLPNEKLIELKQLCRHRHFLVGNVSELKNKSIAVLDRVFPEYQKIFSDTFGVTSLELLSTYPTPEDIINIDTQKLCDILEKVSRGRINYDKVSNIQNIAKNSFGIKFALDGFTFELKQLIAQIQFLESQLKDLDNEINSIYTSFNCYLSTIPGISNTLAPIILSEIGDINKFSSPSKLVAFAGIDPSINQSGEFVGNENTMSKRGSPFLRRALFLAAFVAENNDPSLKAYYQKKINEGKHHYVATGAVARKLVYIIYGVLKEQRPFKDF

SEQ ID NO: 162130 - protein, 347 aa, unidentified
MEYYAGIDVSLEQSSICVVDASGKLLREAKVCSEPEALIAWFCGLPFGLSRIGLEAGPLSQWLYAAMKEAGLAVELLETRHVRDAFKAMPVKTDRKDARGIAQLMRLGWFRPVHCKSVPAQEVRALLTARKLVQSKLYDVEMSLRGILRGFGLKVGPTNVKSFAGRIKELAAGHPTLQAIAEALLSVHTVLARELAGFEKKVRSIARCDARVRLLMSAPGVGAIVAMTYVFAIDDPARFKSSRMVGAHFGLTPKKYQSGETDVTGRISKIGDSSVRAALYEAAHVILTRAVKGSDLKSWAMRLAKRAGMRKAKVALARKLAVVLHKMWVEGTKFIAEKACRPVAAAA

SEQ ID NO: 162131 - protein, 399 aa, unidentified
MNVLYTPNELQIGIDVGSLNHAVAVSDGFGNIINEFEMTHTQKGFDYFFKIIEDEAYKRDATITIAMEGYNGWARPLDSLILQKGYKLYNVNNVKLARFKEIFPAAAKTDAIDARKIVELFSLQKHLPVAKKVLQEIRISDDINAQLKKLTRRRKQLVEERMAIANRFGSDLQAEAPDLKSLTSSVDNLWFLRFITLKNDIRKLSKLRQQSIVKIKYLGKKNLASIMQWQKEVIFADTLDYTASILYDDAMRILELKNKIKELTGQIDTLIPFSKIARVIKTIPGFSTISAGTLAGEIATLNRFNNEGSLALYLGMTNLDNSSGKYKGSKRNLATNRHAKMAMITATMKHTQHVKESKLYIEKKISEGKKYQQAIRSMGRHLTRVIWNMIKQDRDYAIR

SEQ ID NO: 162132 - protein, 428 aa, unidentified
MNEEDRSRLEEFRQFRREVRGSSEYLLVGIDVAKDKHHAFFGTARGKTLFRRLVFENNIEGFRKLLGQAEAMKVQNGLSRVVFGMEPTANYHKPLGEHLIRCGHAVVLVSGVAAYENRKTLDGRWDTNDTRDAANVADLVSQGKCLFYEFPVGVLRDLRNLLSLKRRFKRVEQGYRVRIRNHLLAKYFPELDRYYEQSPATSLAIVRWCLDPSVIAGLEYKEFVQRVGTGRRRVSQENRLQAIWKLAVDSVGCEAGPVVEFEAQVMGEGLKQLRESIRQIDEKIQELCSPFPEYECLLSIPGFGPDVSSKVLGAIGDPFRFENGRQVLKLAGFDLSAKRSGKSSESVIPVISKKGKADLRYALYQAALIASIRNQGFMIYYTHKLRGREREAGIKTKMRVKLSAKLLLIAWTLMKKREPFNPDYVAIR

SEQ ID NO: 162133 - protein, 323 aa, unidentified
MTLYIGVDFHPHQQTVSYCNTEEGEVGQTSLFHNLKLVRRFYEQFPKAVVGIEASCTARWFEQLMQDLGHELQVGNPTSIRARARSRHKSDKRDADLLLDLLLKDEFPALWRRGVEGQSVLEQLRFRHALVNQRTKLCNRLQALAHAAGLPKRGIQTKRARLALMGSNFTETQSFERDQLFEMLDDLSARIKLIEGWLEEKAAGDRRVELLLTHKGIGLLSALVVVHTLGDISRFPSSKEAVAYTGLDPLERSSAGRVRTGSRRTSRKQRSAALARTGDARCRPLRLGTQSVLSKIGESALEVDRQNRRDKKAADPSFHHAQR

SEQ ID NO: 162134 - protein, 340 aa, unidentified
MNATTYGLDIAKRVFQMYWVDAQTGEIANRRFGREDLIAFLAQRPAGRVALEACGSAHWWARKIRALGHEVVLLHAQFIRPFVQTNKTDAADAKAIWTAVQQPGMRTVAAKTEDRQAMLSLHRMRSLLVKFRTMQVNQLRGFLYEFGITFRAGRLAGLAEIRERMAQLEHTLPRSIILNLQDQLRRINAFEEDIDQLEKRIGSWQKQEAACRAISEVPGIGRLTATALVATIGDARTFKSGREFAAFLGLVPRQSGTGGKIRLGSISKRGDPYLRTLLIHGARSVLCHAKVPTAWQKGIQERRPGNVAAVALANKMARIVWAILAHESSYEKNHVSVRPA

SEQ ID NO: 162135 - protein, 345 aa, unidentified
MKVSTVGIDLAKNVFQLHGVNELGKTVFKKQLRRDQMAEFFVDLPGCLIGMEACGGSHYWARKLQGFGHTVKLMAPQFVKPYVKTNKNDAADAEAICEAVARPNMRFVPIKDVEQQSVLALHTVRQGFVKARTAQANQIRGLLSEFGLIIPQGIWYIAKRVPELIEDASNELPGSFRLLIQRLLDHLKELDTQVDELESQIVRWHRQSSASSKLAQVPGIGPITASALAASLGDAKNFDSGRQVAAWLGLVPRQHSSGGKQNLLGISKRGDIYLRTLLIHGARSVIYNGKEKTDPTCKWINAIVSRRNNNVAAVALANKNARIVWALLTHDREFRPDYTRETVGV

SEQ ID NO: 162136 - protein, 400 aa, unidentified
MKGFLHMKLIGIDIGKNKHFFCIMDQQTGEIIFQPVSFSNDKEGFDFLIQKIKSYPKDSILIGMEDTGHYHFALLKYLLDLQYTVALINPKTTDFNRKMQGGITKNDKLDTINICDVLDTPERKKQYRISKVNSFDLYEQKQLTRHHHSLKEEENVYKNRLQKCIDIVFPEFNKLFNSKYGTVYMNILKTFGSAENIANTDIRTIRKCFEIEGRGNRISLTPERLKECAGSSIGISSSAEVIQIKHLTAQIELIEEQLTEIDKKIEEFSIQNNSPILSIPGISHFSGTSILAELGDISNYSKPSQIIKFAGVAPLHYESSQFNAQHTAITKKGSKYLRKTLYQIILPVIRHNQVFYKYYQLKISQGKGHRCAQGHCVRKLLRIIYHLLKTNQQFDSQLLR

SEQ ID NO: 162137 - protein, 411 aa, unidentified
MEVVHPRCAGLDISKKDAKLCVRVAGTGRRKAVETVTTWSSMTSQVLALREHLIAEQVTCVVMEATGDYWKPFYYLLEDAGFEVVLANARHVKNLPGRKSDVADATWLAQLGAHGLVRGSFVPPEPIRQLRDLTRTRTAVTRERSREAQRLEKLLEDAGIKLSAVASDILGVSGRAMLEALIAGDRNPAALADLAKRRLRSKIPALTQALTGRFTDHHAFLARIHLDLIDQHTAAIGDLTARIEVMMEPFRGFRDLICTIPGIATLTADVIVAETGADMTRFPTAKHLASWAGTTPGNNESAGKVKSSTTRPGNPYLQGALGAAAMACAQNPSTYLGARYRRIATRRGPQKANVAVQHSMLTAIWHMGHTGTLYDDPGPDYFTRLNPTRAKNRAIHQLEAMGYTVTLDTAN

SEQ ID NO: 162138 - protein, 419 aa, unidentified
MTECNITASTPLLVAIDISKGRHEVLIEVPDKKRRRRVSVLNTLDEFERLITLLRSFQRPVCVAFEATGNYHRALAFQLGAAGFNIKLVSSVALARTREALHNSWDKNDPKDAQVILHMMSIGAEQFYHDPLLHGTNDIQELSKTHDMISRAKTELWHRILTHYLPLYFPEAERFHRSSRSDWFFAFLELFPSPHLIAALSKEAFIEAAWDVVGRKVGKERLLSDIYETSIRSIGLPVAPDSDAILMFRMVLADGRSLIAQRNLIEARAVEMLKDNPDYKLLTTIPGIGPINALTILAEAGDLRRFNHHRQFLKFCGMDLATIQSGMFRGQTKLSKYGNARLRRTLWMAAQVAILQRPNSFRDKFERYITKDRHNPHLRRKAFTAIAAKMARTVHAVIKSGETYRPFYEGAIHSGRTFL

SEQ ID NO: 162139 - protein, 424 aa, unidentified
MKVTYQTCCGVDVHKSFLVATIVKTTGGIEPSYQKKRFSTFNNSILEFKQWLLDNDCHDVCMESTGKYWVPAFNLLEDEINVVIANPKWVKAVKGNKDDTKDSKWIGDLFRLGLVKGSYIPCKKVRILREYSRYRYKLVSCRSSEKNRYQNALTVCNVALDSVVSDIFGKSSSSIIDYLLEQSGTSINHEEIASKLLRSLKSKEDAVIESIEGYQMTDAQKYRMRLVRAHMDYITAEINDVDKMIEKMISSNPDFENAVQFLCTIPSVKRDSAITIISEIGTDMSQFSSSKRLCCWAGLTPGSNESAGKKKSVRITRAGVYLKPALVQCAHAAVKSDKSPYYKKKYESLVKRRGKKRAIIAIARMILTAIYQMLSTGEQWNPSDLYKIDMPVALVEKQKAKAIKQAKKLLQREGLLPPDESLAS

SEQ ID NO: 162140 - protein, 393 aa, unidentified
MVCVGIDVAKDKHDCFIISSEGEILADVFTIPNNAEGFDTLLQAIRRSTRPEDKIKVGLEATGHYSYNILGFLLDKGLDTYVINPLHTNLYRKSLSLRKTKTDRVDARTIASMLMSDVDLKSYTDTVYHNEELKSLTRYRFDKVNERAKLKTSISRLVCILFPELEKLVPSLHGASVYALLSELPGARQIAEAHMTHLKTILCNASKGRYGRDMAETIRNAARCSVGSVMPAKSLELQHTIRLIRELDSEIQDIEAGIQAMMEEIASPITTIPGIGVRMGAMILAEIGDFSRFNSPDKILAYAGMSPSTYQSGQMSLTGAYSHMEKRGSRYLRYALYNATKYVCLWNPTFSAYLSKKRAEGKHYNVALSHAAKKLVRSIFAMEKSGQPYSSAA

SEQ ID NO: 162141 - protein, 400 aa, unidentified
MLSIGIDVSKGKSTVCGMKPEGEIVYAPFEVQHTREGMSELVSLLRSSGEEVRAVLESTGSYHCPVVAALLESGIFVSVVNSLRMKRFCSQSIRKVKTDRIDAMQIALYGLAYWQELQPARLPEDTYRELQLLARQYYQMTSLLIKAKVDFNALCDQVLPGMQELMSDHAGRHKLSDFVLRYHHTTHILEMGETRFRKDYCKWAEKKGYRNRERMAVLIFATAQNGIPVLPNAPSTQIVITEAIRVLHTVEASRDAILTQMQALAKTLPEYSLVREMPCIGDTLAPRLIAEIGDVRRFHSKRALIAYAGIDAPPYQSGKFCANNRHISKRGNRYLRKTGYEVMQSYVMHKPANDPIFTFIEKKRSEGKCGKLAMVAGLNKFLRVYYGKVTELYRSLPAIE

SEQ ID NO: 162142 - protein, 350 aa, unidentified
MSKRTNSIAVSTIGIDTGKNTLHMIGLDEKGVIVLREKVSRSRIAARLVNMQPCLVGIEAGMATHYMARQLVALGHVVKQVPPAFAKPFRQGHKNDFRDAHAVAEAVQRPSIRWVPIKTDDQLDLQALHRVRSRLIGDRTAVINQLRGFLLEHGITVRQGHRFLRQQLPQIVATRTDMLSPRMIRIIGDLVEDWAHLDERVERVTDEIEGLARTDVSCGRLMTVPGVGPIIASAMVAAIGDGASFSKGRDFAAWLGLVPRQMSTGDRTILGRITKRGNRYLRMLFIQGARAIQLHPASWAKHSFGRWLTAAARRLHCNVLTVALANKLARIALTVLLEGRNYETRIKPVA

SEQ ID NO: 162143 - protein, 364 aa, unidentified
MKHVKDNVNRVVRYIGMDVHKDSTTAAVLDAQGKLVMQVTLRTEGTVLVDFLRGLSGALHLTFEEGTYSAWLYALLSPWVEKLIVCNPRQNALLKQGNKSDPIDARKLAELLRLGSLTAVYHGSPGMCTLKELAASYATLVKDGTRVMNRLKSLYRGRGIRCGGTQVYSPRHRAHWLEQLREPGAHQRAKLLYQELDLLLKLRLQARRALLAESRQHSAQKILRTIPGLGPLRVALLLAWLQTPHRFRNKRKLWGYGGMGLLTRGSAQYRLQQGELVPSPQGVSVRGLNPAHNARLKDIFKGAALAACQRPGPLREAYERCLREGMDEHLARLTIARKIATLVLTLWKRGERFDAQRLRREQAA

SEQ ID NO: 162144 - protein, 335 aa, unidentified
MKYFSAIDLHSNNSYLVISDEEDRSMVEKRLANDLKLILRELEPFKSDIQGIAVESTYNWYWLVDGLMDAGYTLKLVNTSAIQSYSGLKYTNDVHDARWLAKLLRLDILPTGYIYPKEQRKVRDILRKRAGLVQQRSLNITSFKSMFARQLGFTIKSNDIHKNMEQFCFEDPMLEACCAPHKQLYKVLTEEIDKLEKLVGSQLKESSIYTQLQTTPGIGKILAATISLETGNISRFNKVGNYASYCRCVKSTRVSNYKIKGKGNAKCGNKYLSWAFSEAAHFAIRHYKPIKCFYDRKKRKSNGIIAMRAVAHKLARACYFIMRDNVEFDMKLAFG

SEQ ID NO: 162145 - protein, 464 aa, unidentified
MARTKRAPEEILDEEHEQVLQRVCAIDVAKEFGQVCVRTPRTDGKRGSKVFAVDATTGDILKLGESLLEQGIEMVTLESTSDYWRIFYYLLEACGLRVQLVNARDVKNVPGRPKSDKHDCVWLAKLTERGMLRPSFVPPHEVRVLRDYTRTRVDLTRDRTRHWQRLEKLLEDALIKVTTVASKITTVSVRDMIDALIRGERNPETLADLARGVMRDKRRELVRALDGRFDDHHAELAKILLGQIDSLTAEIDRLTARIEHLVNELPAPEQTGDPDGGHATGKTAPGHSTTTDTEPVPAPLRRPPLQRLADIPGINLDAAEVILAEIGLDMSRFPTPKHLVAWARLTPQLIQSGNKRRGGKTSKGNPYLKGVLGSAAASASRTNTFLGERYRRIVKRRGKGKALVAVARSILVIVWHLLADPNATYRDLGADYYESRIDRERRKRHLVQQLEALGLQVTLTPAAA

SEQ ID NO: 162146 - protein, 473 aa, unidentified
MQNRNAIGIDPDSQGFVCAYVKRSEAKVDTRGYMATDAELKSFLKWVKGEGDVIIAIEGSNGWSRPIEKVLRKAGIIFFSFKPGDTDKFRKAVLGQNKTNRKDAESVARYAMALEAQGRLDQYRRVWFPDMDLQLLTRRHKNVTEQLTAEVNGLWKLLRYASPDLYLALGGKNPEVLSNRKVLKNQGILNLLTSTPDVGQWKSLSDEQILEAMGGGDYSGRRALVAELRKVMDSFQPTSESMALLLRTSAQHIQTLKGVLRDIEKMLEKLTAENAAVQELRQMRGIATNTSAKMIAEIIDIRRFAREDSLACYTGLGMREHSTGQTTTMVPSELFNHRLKDAFMTAAKKVVQYNPDSHLAGYYRNLIKGGMSELGATKRVARALVRVIYRRLSALAAQTSEAHAPKNEQHQEEEESGMASGLTRSGRSHMSNTPPSPVNNTVMVASRVKRVVTRMTSRATKLRGRTKTSKKNT

SEQ ID NO: 162147 - protein, 425 aa, unidentified
MVLKGVPMALKIVYQICCGIDVHKTFVVACIASTNKQGVTTYKRHRFSTFTQGLKELLQWLLDNHCKDVCMESTGKYWGPVFNLLEDEMNVTIANPKWVKAVKGNKDDTKDSKWIGDLFRLGLVQGSYIPCKPIRILREFTRYRYKLTSCRTSEKNRYQNALTVCNVALDSVVSDIFGKSATSVIDYLIEQSGNSINHEEIASRLLRSLKKKSDSVIESIEGYQMTAPQKYRMRLVRAHLDYITSTINDIDTMLDSLIAPYENAVQLLCTIPGVDRNSAITVISEIGTDMTPFSNSKRLCCWAGLTPGSNESAGKKKSVRITRAGVYLKPALVQCAHAAVKSDKSPYYKKKYESLVKRRGKKRAIIAIARMILTAIYQMLSTGEQWNPSDLYKIDMPVALVEKQKAKAIKQAKKLLIREGILSES

SEQ ID NO: 162148 - protein, 331 aa, unidentified
MRIKQTIGIDISKLKFDVRIHSNQMFSVFENTNKGFKKPIKWVNCNNPFSKEETLFIFEHTGIYSYLLSVFLTEQNLPFALVSGLEIKRSLGIARGKDDKVDATKIALYGYRLRDEIKPYEMPCEEIINLKRLLSLRDRLVKQRAGYKSSLKEFSRVLLKKDNEILLPTQEKMIKYLTKQIDIVDKGLDTIINNENTLKDIFRLITSVKCVGRQTALFIIAYSEAFTKFKSWRQFASYCSVAPFPNTSGTSIRGKTKVSHLANKKIKSLLDLCAKASINYNPEMRTYYYKRVSEGKNKMNTINILRNKLLSRIFAVVNRQTPYVDIMKYAA

SEQ ID NO: 162149 - protein, 427 aa, unidentified
MAYRIAGIDVHKKKLAVVVADVEVEEEYQFERRWYGSNPEQLQRLAEWLVEQEVEEVVMESTAQYWQGVWGALERYWRPICQKREGAGAMSGKLHLAQALSNRGRRGRKRDFPDAERLVKRLVAQELVLSFVPDPEQRLWRTVTRRKLQMTRLHVRMQNQLESLLEEAHIKLSGFVTDLLGVSARRMLQALADGETDPAALAALADKRLRATPAQLCDALGACTELNPVYRRLIKMALAELQFLEQQIAQLEQEIAHLLRPHEDAVKRLAEVPGLGVDSAQQIIAEVGPTVATFPSDKQLCSWVAVCPGDNESGGVNYSHRSPKGNRHMRRILNQAANAAARTKGSIFEIVYRRQVTRMGHNQAIGVIAHRLCQLIWILLHRKVRYEERGPAVTERSKRKRTARMVRQLLSLGYHVDPPTLQQNTSA

SEQ ID NO: 162150 - protein, 357 aa, unidentified
MAALSIADVPANVTVGVDTHKHSHIARAKDGLGRHLGQLEIETDPQGYAGLLAWAQGFGPVVTFGIEGTSSYGAGLTRFLRAHGQAVIEVLRPVRRDRRFGGKSDPIDADVAAGAVLSGKATAVPKAGDAGVEMVRALKIAKQTAIKARTQAVNAVKAMIVMSPDPVREQLRHLKTPALTRTCCAYRVDGVSDPTSAIKLSLRSMCRRYVALDHEVRALEKELDVLTVRLVPQLRERFGVGQDVAATLVLAAGNSGDRLRSEASFSMLCGASPIPASSGMVQRHRLNRGGDRQANAALHHIVIVRLRHDEATKAYFAKRKAEGKSKKEIFRCLKRYVAREVYRTLVGPREEAIRSAA

SEQ ID NO: 162151 - protein, 421 aa, unidentified
MTPTSHDTFAAFVGIDWADAKHDICLQAAGTAKRECFQLDHTPEAIEAWVTTLRTRFSGQPVAVCLELTKGPLVSALRKYDFLVLFPINPLTLARYREAFTPSRAKDDPTDAELQLELLLTHRDKLQPLQPQSPAMRALEQLVEHRRRVVGDKVRITNRLTSTLKNYFPQVLQWFQDKDTHLFCDFLSRWPTLKAAQLARRSTLEPFFRDHHVRVGDVLATRIHAIKTATPLTTAEGVIAPNALLVQALVSQLRVTLDAIEAFDHAIAQRAQRHPDFPLFQALPGAGPVFASRLLVAFGEQRERYTSATALQKYAGVAPVTERSGKKAWVHWRLQCPKFLRQTFVEWAAESIRHSFWAQVYSQQQRDKGNTHQAAVRALAFKWIRILYRCWQDRTPYDESVYLQALHRRGSSLIHNLAEAS

SEQ ID NO: 162152 - protein, 451 aa, unidentified
MSRRKRKFTINDLPEQLKKVNLNAAGIDVGSDRHVVAVPPGRDEVSVRECGAFTSDLHALADWLERCGVTTVAMESTGVYWIPLFEILEQRGFEVKLVDARQVKNVSGRKSDVLDCQWLQQLHTYGLLAGAFRPPDQICVLRGYMRQHEMLVQASSMHIQHMQKALQQMNLLLHNVVSDITGVTGMKIIKAMIAGERKGEQLAQLRDRRCQSSAATIAKALEGNYREEHLFALTQAVSLYETYQAKIAECETAIARYLESQTKLNDQDPPAGDKASRDRDRLRGGVDVRSQLYKLTGVDLFNLPGLGADTLLTLAGEVGFDMTPWTSEKHFTSWLALCPGTKKSNRKILSRKTKRSANRAAAAFRIGAASLARSKTALGAFYRRIKSRVGPAEAVTATARKLAVLYYSLLKYGSAYIEIGQATYEQNYQQRRLQTLQKQALALGYQLVPAV

SEQ ID NO: 162153 - protein, 376 aa, unidentified
MEHDSTLYVGLDVHKDSITVAYALGAGEVELPGKTGTTKTDIDRLCKRLQSKARHIRVVYEAGPCGYGLYRQLVQKGFECMVCAPSLIPRKPGERVKTDRRDAVKLVRSLRAGDLSAVYVPSVEDEAFRDLARAWVSAKDDLKRARQRLKAFLLSHGVRYTGRADWGPAHRRWLSTYAFDSPWQQLAFEELRRTIEDRLAQCERLEAALREAVLNWRFYPAVLGLQTMRGVQFTTAVGMLAELGDLSRFTHPRQLMAWLGVTPSEHSSGDKRRQGSITKNGNSYARKLLVEAAWSYQYPARVSPEIQRRHEGIPKPIVDRAWDAQLRLCRRYRKLVARGKQKNIAVVAIARELAGFIWDISRQSMSLATRREGLTA

SEQ ID NO: 162154 - protein, 411 aa, unidentified
METIYRCCAGLDVHKETVEVNVRRLDDKGRLHSETRQFRTFTKALLEMSDWLAEEGVTHVAMESTGVYWKPIFNILDGCFEVLLVNARHVKNVPGRKTDVNDCQWIGQLLQHGLLRGSFVPSRELRELRDLTRHRTQLVAEKTRVSNRFHKVLEDANIKLGSVATDILGKSGRAMLKDLISGKDDPEQLAEHARGRLKNKKAELQLALQGHVSKHHRFMLKLLWDQLMEVEKLIARVEERIDEQMRPFEEAVELMCEVPGIDRQVAHTIIAEMGVDMSQFPTHRHLASWAGMCPGNNESAGKRKSGKTTKGSKWLRKALVQAAWASSHTKDTYFSAQYSRLARRRGRKKALVAVGHSILVAVYYILKKHECYKDLGHDYLDLRNQRYLTKHLVKRLEGLGHKVSLEPVAAA

SEQ ID NO: 162155 - protein, 315 aa, unidentified
MVDVPCFVGIDVAKAQLDIALRPAGERWTVPNDASGIASLVDRLQALHPTLIVLEATGGLERAATAALAAAGLPVVVVNPRQARDFARATGQLAKTDALDARALAHFADVIRPTPRPLPDAQTQELRALLGRRQQLIGMRTAEQHRLAGMSERLTKDITAHMTWLNADIATLDNDLETLLRASPLWRENDDLLQSAKGIGPVSAHTLLLELPELGTLTRQQIAALVGVAPLNCDSGTMRGKRTIWGGRAHVRTVLYMSTLVATRFNPQSKAFYERLLAAGTVKKVALTACMHKFLTILNAMLKHRTPWQPQEVQS

SEQ ID NO: 162156 - protein, 387 aa, unidentified
MCASAPASAQAAIHINLAAIFVSLELSRSAWLVTSLSPGGGEKMSKHSVRGGDVTGLLNHVATLRAKAQARTGKTFPVIAIHEAGLDGFWLHRVLEQEGIESHVVDAASVLTSRRRRKAKTDRIDGEALLRTLLAYKRGEPRVCAVVRAPSPDEEDRRRLCRERKTLVAERITHVNRIKGLLFAQGIADYEPLRCNRRQRLEELTTGDGRPLPAHLKAQIGRELDRLDLTLQQLKAVEAERDALLAPKGEVAPAPVAALAGLRGIGPEFAAVLWLECFFRTFSNRRQVAAYAGLAPTPWQSGSVDHEQGVSQSGNPKLRSTMIQLAWLWLQHQPTSALSRWFKERVKQNGGRGKKAAIVALARKLLVALWKFVSNGVVIEGAVMKAA

SEQ ID NO: 162157 - protein, 429 aa, unidentified
MTRISVGVDVSKNRSTVCIMDQDGKVIMRPFLVWHSTEELDFLADTLKRLNGEVRVIMESTSIYQYPIALHLKEKGIFISIVNAYKVKKFANTDFRGGKTDKKDSRTIASYGISYWDKLVEWQIPKDTYFNLDLLNRTYMNAKKHRQIILQELQHYIDCAMPGMDKELHSLNLSTKKDFMLDFVEKFWHRDEIVNMTEAEFTEVFTAWAKKKGYRPVEGKAAKIYAIAKSCIPYYPANPTVKTILQCIVDKLSGVNRTLVTIVTQMIEEAKKLPEYQIVREMPGVGDPLAARFFGSAGDIRRFKNSKALVAYAGIDSPPDESGDFSSTHRHITKKGSKVFRDTGYEIMMALRAQKRTWEKVRKNPDVYDYMLRKEAEGKPPKVAKIAALNKFLRIIYARIKELYDNMALAERAKTKTRSKTRAKTKVTA

SEQ ID NO: 162158 - protein, 344 aa, unidentified
MTSMHFIGLDIHKKTISYCVKDVSGTVLSEGTIAATRAQLDDWVKTLPVPWTVAMEATMFTGWIYDHLLPHAAAVKVAHPLMLRAIAAAKKKNDRIDASKICDCLRCDFLPECHMVSAEVRERRRTLRYRKLLVRQNVQLRNKVSQMLMESGVVYNKQKLHKVGYFKELMETNPDISRELKPLLAICRETIVRIGKTESALIRSLRRDPLLHARVERLMTIPAVGPITALTWVLEVDDVARFHSVKQAVSYCGLCGAERSSAETIKRMPISKQRNKHLQSVLIEAAKLAPRLSPELALVYDTEKQKGHANRASIAVARKLVAYLLAVDRSGREFVVAGERRAAA

SEQ ID NO: 162159 - protein, 386 aa, unidentified
MHHVTNIPSPEQTGTGADYAILFVSLELSRSTWVATSLAPASKKMSKHTLVGGNGRDLLDLLARLKARAEQRIAAAVKVVTIHEIGLDGFWVHRLLDANGIESHVVDPASIAVPRRHRRAKTDTIDGETLLRTLMAWQRGEPRVCAMTVPPTPSEEDHRRVSREREALLRERIRHTNRVRGLLFGQGINNYNPLHKNRRERLKELQTGDGRPLPARLKAEILREIDRLELVLRQISEVEAERDEMLRSAEASSPAALLMRIKGIGTEFATVLYLEGLFRHFENRRQLAAYAGLAPSPWKSGSIDHEQGISKAGNPRLRTTMIELAWMWVRYQPDSALSRWFRDRVGSERGRTRRISIVALARKLLIALSRYVTHGEIPAGAVMKAV

SEQ ID NO: 162160 - protein, 318 aa, unidentified
MTQDLFVGIDVSKARLDVAVSPGEHSWSVANTEDGIQEFLVRIRQLGAPKIVLMEATGGLERRPLALLAAAGLPVTAINPRNARDFAKSIGLLAKTDRVDAKALALFALRNQPPCRPLPDAQTRALQDIITRRRQMLDMLAAEQHRLGIVENLKVRREITSHISWLKKRIHVVDHDLDTTIKNSPAWQPKSDLLKTVPGVGPVMTATLISRLPELGNLTNKQVSSLVGVAPFNRDSGTMHGRRCIWGGRAEVRNVLYMATLAAIRFNPTIKAFYLRLRATGKLPKVALVAAMRKLLTILNAMVRDKTPWRTSQVENLS

SEQ ID NO: 162161 - protein, 355 aa, unidentified
MNSEKYIGLDVHQATIVVAVMDSSGKLVMESILETKAATILQFFAGLRGTLAVTFEEGTWSAWLYDLLNSQVDKLVVCNPRKNALLKDGNKSDRIDARKLAELLRGNQLKPVYHGETGVRMLRELSRSYLTIVKDLSRVMNRLKAVYRSWAIPCAGRDVYYRRHRTQWLAKIREAGVRRRAERLYEQLDMLQHLRQQARRELLAESRKHAITAKLRQIPYLGPIRVALAVALIQTPHRFRTKRQLWAYSGLALETRTSAEYRFVEGQVRRSKKLLSIRGLNKDHNHDLKGLFKGAATMASVRPGPFQDFYQAALAKGIKPTMARLTLARKIAAITLTLWKKGENFDAEKLKSQAA

SEQ ID NO: 162162 - protein, 425 aa, unidentified
MPYKIAGIDVHKRMLHVVVSDVEVDGEYDFTRRVFGSCPEALCSLATWLVEQEAEEVVMESTAQYWRPVWEVLERYWKPDCQKRQGACPISGTLHLAQAQSNRGRRGRKKDFRDAERLVKRLVANELVLSFVPDAEQRLWRTVMRTKYQATRNRVQLQNRLEALLEEAHLKISSLVSDLLGVSARRMLKAIAEGQTDPAAVVAVADARLQATPEQLRDALGVCRELNPLYRRLIKMALEEVASIDQRIEQLDQEMANLLRRHEDQVQRLAEVPGLGADSAQQIIAEVGATAATFPSDKHLSSWVGACSGSEETAEVNHSGRSPHGNRHMRRILNQAANAAVKYKGSIFEILYRRHVPRLGHKHTIAIIAHKLCRLIWHILQRGMRYEERGPEVSKKSKQARTQKMIRELRRLGYRVEPTTPAMAT

SEQ ID NO: 162163 - protein, 387 aa, unidentified
MPACGPRPGRVAIQVSLAAIFVSLELSRSTWLITSLVPGGGDKMSKHSVRSGDIAELMTHFAKLRDKAHARAGTSFPIIAIQEAGLDGFWIHRVLDRAGIESHVVDAASILTSRRRRRAKTDRIDGEALLRTLLAYKRGEPRVCAMVKAPSPEEEDRRRLCRERKTLVAERVAHVNRIKGLLFAQGISDYEPMRGDRRQRLEVLRTGDGCFLPPHLKAQIGRELDRLELLLEQLKAVEAERHALLEPTNEAAPVGVQALAGLRGIGPEFTAMLWSECLFRSFSNRRQLAAYAGLAPTPWQSGSVQHEQGVSKSGNPRLRSTMIQLAWLWLRHQPTSELSFWFRERVKRNGGRGKKTAIVALARKLLVALWKFSSSGVVIEGAAMKAA

SEQ ID NO: 162164 - protein, 343 aa, unidentified
MYYIGLDVHKKTISYCVKDAAGRVCQEGKVGSTRLELDAWIKTLPQPRMIAMEATIFTGWIYDHLLPHAEKVKVAHPLMLRAIAAAKRKNDTIDARKIADCLRCDLLPECHMASTEIRDRRRTLRYRNLVLKQAVQMKNRVSGLLMEAGVSYNKLRLHRMGYFAELMATNEEVSESIRPLLRLCREHIDRSIKMNTVLLTSLERDPLLAERLRRLRTVPGVGPITALTWALEVGDTSRFHNIKQAISYCGLCSAEKSSADKVMRGPISKQRNKHIQQVLVEAARLAPRYSDELALLYERERQRGNGNRATLAVARKMVAWMLAVEKRNQDFVPSGGFKRTAAA

SEQ ID NO: 162165 - protein, 340 aa, unidentified
MKHIGMDVHSTTTDACVRNGKGIIVLERRIRTTKSELIDFVESIRGQKRVVLEEDQMADWVTRVLQPHVDEVIRSQPQYNKLISGSEDKWDKMDAKSLSELLYLNRIKPVHHPEMIYRTLREAVRAYWTVSRDLTRAKNRLKGWYLFNGLHETGRSIYSLRNRSKHLKAIKQQGRNIELVELLYEQMDACRQLKAKYVRMLRNAAQPVKDLVRLATTIPAIGPISGYTLVSLLEDGWRVPNKRKLWRYAGLSLRRYESRDTGFKGASKTGNRILKRVVMSAAITIVSRGEPNALLSLWERDIRKNVDPKRARRNLARKIVVIAQHLLRSRQEYINELIKV

SEQ ID NO: 162166 - protein, 348 aa, unidentified
MGEVSTIGLDIAKNLFQIHGVDADGTVVIRKRIGRARVLEFFADLPPCRVGMEACATAHQWARELRKLGHDTRLMPPTYVKAYVKRGKNDAADAAAICEAVTRPSMRFVPIKDVEQQSVLMLHRARDLLIRQRTQLINALRAHLAELGLVAAKGREGLHQLVAVVTECGSERLPSNARFACQAIVTQLHAVQIEISGLDKRITQTHRANADSKRLDTIPGFGVILSTAVAATMADPKAFRTGRDFAAWIGLVPRQNSTGGKERLGSISKQGDRYLRRLLVVGATSVINCARARPHKYPWVIELLGRRPTKVVAVALANKMARIAWAVLAKGQPYRAPTRSSNATVLAA

SEQ ID NO: 162167 - protein, 371 aa, unidentified
MGKSSKSLFIGLDVHKDTIAVAYAAEDRGIEVVSLGMIGTRQYDIDKLIRKLEAKGATLLFAYEAGPCGYWLYRYLTRRGLSCAVVAPSLIPRKPGDRVKTDRRDAVTLARLLRSGDLSSIYVPTVDDEAIRDLSRAREDAVRDLKRHKVRLKAFLLRQDIRYEGRANWNAAHLRWLARVVCPTPAQQIVFQEYVHAVSEQTDRLGRLGTELQTAVTTWRLYPVVAAVQALRGLNLTGAVTLIAEVGDLTRFDTPRKLMSYLGLTPSEYSSGEHRHQGGITKAGNGHARRALVEGAWAYRYPAKVSRHLQLRLENVPAEVRAIAWKAQLRLCKRYRLLSARGKHVNQVVVAIAREMAAFAWAIARTVPIAA

SEQ ID NO: 162168 - protein, 328 aa, unidentified
MTMNPVLSAFNHVVAFEVAKDSLVIHVLPTDKQSVATNKPKAIRKALMAEMRRNAEASLGPLLVVCEATGGYERHVLAICVELGVAVHKAHGARVRHFARYLGLLAKTDPIDARVLALYGLKTQDLRLYIPLSPEVLALRDLKTRRDQLQEMLFAETSRLEHARHASVSRNLKAHIASLGKALVALEAEIAAHVKACETLARKARLMRTLKSVGPATVAAILAYMPELGDLKKGEAACIAGLAPINKDSGALQAPRHIEAGRAAVRKTIYMTAVVAIRHNPVMRLFADKLRRKGKPSKVVITAVMRKLIVTLNAILRSGEPWSHAKIA

SEQ ID NO: 162169 - protein, 343 aa, unidentified
MQITTYGLDLAKKVMQLHWVDMETGEIHRKQMKRRALLEFFANRQPGIVAMEACGSAHYWGRELRKLGHEVRLVAAQFVRPFVKTNKNDAADAAAIWETVQRPDMRFVAVKSEEQQSVLSLHRIREQLIKVRTMQVNQIRGLLYEFGADLPQGRQKGLKEVPDALADLEESLSPMFLDTVRQQLKRLEQMDKDIADIEKCLALWKKDQEAVTRLMAIPGVGLLTATAIIATVGDIKSFRSGREFAAFLGLVPRQSGTGGKVRLLGISKRGDSYLRKLLTHGARAVVNCQIKNRNLWIDKLLCRRPHNVVVVAQANKMARTIWALLVKNTEYVASHTINAASIS

SEQ ID NO: 162170 - protein, 341 aa, unidentified
MGQASTIGLDIAKRVFQAHGADATGRVVFRKRLVRAKVLEFFAGQPRCLVALEACGGAHYWARELGKLGHTVRLIPPAYVKPFVKRQKNDVADAEAICEAAQRPGMRFVPVKEEAQQANTVVFRARDLLVRQRTQCINALRGHLAEYGHVVPQGPAHVNRLVALVEDPKSAVPESARGILQVLIRTLNALEEQLKELDGEIARRAKADPVARRLMTIPGIGRIAATAITALVPAPEGFRAGRDFAAWLGLTPLQKSTGGKNKLGAISKRGERTIRRLLILGASAVVRWASQRGAAAGSWLARMLARKPRMLVTTALANKMARIVWALLVKGGTYRAPAVAA

SEQ ID NO: 162171 - protein, 345 aa, unidentified
MVQQGLLFFFKYKNMKKVKETVGIDVSKLTLDVHLHKAGLHQQFGNDLSGFKKILAWVKSKELKSDDVLFCFEHTGWYCVLLGYFLHEKGIDYCCVNPTEIKRSMGLKRGKSDKADAKEIAYYAWLRREDLKPSQPPAANLIELQRMMSMREQFVKQAVALKNLRCGMEQLTGKKSHDFSILAITETIEHLESQARKVEKAMEALIKSDEAMQVNYKLSKSVKGVGLVLAVQMLLHTHNYTRFDSWRQFSSYCGLVPFPYQSGTSINGRSKIHPIADRKMKSLLSMSAISAIQHDKELKMYYTKRVSEGKPKMLVLNIIRNKLVSRIFATVNRGTPFVELNQFVA

SEQ ID NO: 162172 - protein, 348 aa, unidentified
MAVVAQEFEYVIGVDTHAATHTLAVVAAATGAVLSKGQFPTSPAGLARAADWITRHAPGKRLVGIEGTGSYGATLTRLLIERGQDVCEVKPPARTARAGKGKTDDIDAVAAARSVLSVEADHLISPRADGIRAAVSVLLAARKSIDGRRTADRNVLTMLLRTYELGVDARRSLTQAQLEQIAAWRTRPSDDAAAATIRGEARRLAKAVQAADTELEDNHKALEEHVRQLVPGLLEIPGLGPVTGGIVLSAWSHHGRIRTEAAFASLAGAAPLPASSGNTIRHRLSRSGDRQLNRALDVIARVRMSNDPATRAYVERRTAEGRTRREIRRCLKRYIARQIFRQLHALTA

SEQ ID NO: 162173 - protein, 446 aa, unidentified
MRQGKRPASRGVARRNAKLMALRELVGRDRAIVAVDLASQRQAAVVCDHDSVVLARRMFRGSAWCIGEILAWAAPVARQAGFTGVVLACEPTGHRWKPLVVTGRAGKIPVVCVQPLLVRRAREGEDFTRSRSDFGDAVIIARLTAELRCYVPYLPEGPWARLRHLGARREGLVRRAVAAREQVRDLLECAWPAVLEAAADPLESRTWRAALAVSADPAVLAAMSEQEFLAALRERLVAPGGKKVWRRIAVAVHAAAADPGGIAAEREAILERAAFAYQDWTCALAAQADIEARMAAVLDELALTALVTTIPGLTSVGAAVILAQTGDPARYDSPRTWVKHAGLAPQANESGTYRGRTPSSGRGRPGLRTAAWRAMFGAVRCNPVYAARLTYLTSREVNRLTSGQAHTALAAALLRQLHVVITRRVPWQAAIASGTSTPATVVMPAA

SEQ ID NO: 162174 - protein, 364 aa, unidentified
MKQKEKHNTIGLDLGEGRHRFCVLDEAGEVIEQGSLSNERAALARLTQCYRGALVVMEAGTHSPWISRYLKELGSEVIVSNPRKVRAIYQHERKSDQRDAQMLARLGRMDRALLYPVRHSSEQAQQDLLRIKLRDSLVRARVGLINSVRFSLKSLGYTVRNPSSERFHKVVWETLPEAVRQMISPSVQALAELSVRIKVLEHEINVLARTKYPQTLWLQQVPGVGALTALYFVLKIEDPQRFENVRDVGAYVGLCPRRDQSGGNDPQLRISKRGDAYLRRLLVSAAQYILGPFGPKSALRAYGLMLAADGSARAKKRAVVAVARKLAVLLLSLWKNRTDYEAFPHWQRIEDKRSGTIAVHRVKA

SEQ ID NO: 162175 - protein, 339 aa, unidentified
MAILYVGIDLAKNVFAIHGVDEHGKAVLVRPSVPRARLHQFVAALPPCTIGMEACSGAHHWARLFVQHGHTVRLMAPKFVAPYRMSGKRGKTDAADAKAICEAVQRPNMRFVPVKSEDEQARLCVHRVRQGLVEQRTATINRIRGLLSEFGIVLPQKAATVRRDAAAQLEDLPGWANTAVGDSLSELHRLDERIAEYDRHVVLMAREDERSRALMQLSGIGSTTASALVSTIGNARDFKNGRQLAAWLGLVPGQYSSGGKTRLGGITKAGDGYLRTLLVLGAKAVLAAAKNKDDRLSRWAMALEVRRGYWKAVVAIAAKNARMAWAVLAKGENFKRLEG

SEQ ID NO: 162176 - protein, 347 aa, unidentified
MKYIGLDCHKQYDHATMIDTETGEIKAKRLAHIKEEFSEFIGDKACTRMVIESCRDWPRTYELSKDLVEEVILAHPLKVKAIASAKIKTDVIDSRTLAQLLMADLIPEAHLRKGDNRLKQRIIRHRAFMVVMRTRVKSRIHALVDSQFLPPEVLLEKPINLFSKKGMKWLTSLQWEKEEDKKMIESHLRVMEAINQEISITNDMVKEIYLKDRDAQLLATIPGIGITLATLLSIEIYGIERFRSPSKLCSYAGLVPSTHSSGGKVYRGKITSEGNRWIRWALVEAVVPAYYSDVEIRERLDAFRKKRANVAKTVIARWLLKVVYHVLKERRPYIIASNKVVKTGVVF

SEQ ID NO: 162177 - protein, 333 aa, unidentified
MLYAGIDIHKSVFQAVVLDPDTGELTESRFQPTREQLADWATEWQGKLASVAIEATTGWRWVARDLAQHGFEVHLVDPGRASALQGRRRRPKTDRLDARWLALLLARQLLSECESWLPPAEIQRLRDKTRLRKTLAGERTGWAQRLHALLTHEGWPCARGRLLTGEGRRWVDALNLEPYVRTQVEVMLAMIAALEQQLELLERELRNFARADQRCQALETIFGVGPILACHLLAEIGDAHRFQRARQLVRASGLDPTVVESADSKRRGRLAKQGSRHLRWALVEAAQHAHRHTSPDHALYTSAVRRCGRGRARLTVARKIGHRAFHVLRAEAA

SEQ ID NO: 162178 - protein, 345 aa, unidentified
MKHYCALDVSVKETAVCIVDETGKICRETKVATHPEDLISVIKDPKWQIERIGLEAGPLSQWLYEGLAEAGLPVICIETRHAKAFLKAQPNKTDRNDARGMAQMMRVNLYRPVHVKTLTSQKHRALLTARKLLQEKAIAIANDIRGLLRNFGLKVGLVGKIKFEERINELVEDRPDLHEIMQPLLAARKLLRDEFTKLHKKVLDLVREDEVCRRLTTIPGVGPVVALTYTATIDIPARFAHSKAVGSVLGLTPKLNESGESKRVGRVSCCGDAMMRSLLYEAAQVLLVTVKKWSWLKAWAMNIARRRGRQKAVVALARRLAVIMHRMWSDGTEFCWTRESLPVAA

SEQ ID NO: 162179 - protein, 348 aa, unidentified
MSYRIAGIDVHKKMLAVVVSDVEIDGEFHFERRMFGSNPEQLRSLTAWLLEQEVEEVVMESTAQYWKPVWEALERYWKPLREKREGACRKSGTLHLAQAQSNRGRRGRKRDFPDAERLVKRLVARELTLSFVPDPEQRLWRTVTRRKYQLTRDHTRLQNQLESLLEEAHIKLSSLVSNLLGASARRMLKALAEGETNPAALAALADERLRATPEQLCDALGACADLKPVYRRLLKMMLEQVQFLEEQITKLDQEMASLLSQHQDAVQRLAEVPGLGVDSAQQIIAEVGPTAATFPSEKCLSSWVGACPGDEESAGVNYSHRSPQGNRHMRRILNQAANAAVKAKGSIF

SEQ ID NO: 162180 - protein, 349 aa, unidentified
MLADEVDYVVGVDTHRDQHVLAVVVASSGGVIAQRSVRSNAHGYTEAIGFARDYAPGARIWAVEGAGHYGAGFARYLSSRGETVHEVSSTARGERRLQGKDDLLDATRVARSALASTARALPRSGERQEALRLLLLARRSAVDVRRVAIVQLRSVIVTAPESLRDELRRLPLGELLRRCSRFRRSSSRTPDQIATILVLRSLAQRIQAATREASELEREILTHVRALVPELLDEPGVGPIVAAQLIVTWSHHGRVTSEAAFARLAGVAPLPASSGLTTRHRLSRGGDRQLNRALHTVILHRRQHDPATRDYIARRITEGKTPRDATRILKRYLARHLYRVMQNASPAMT

SEQ ID NO: 162181 - protein, 370 aa, unidentified
MSVRRILAKTIDTDLEYEAIGIDLAKNCVSTALLTTDGEVVCIDRLDYSELEKSAQVLTPTTFAMEPCTEMNYLVQKLEAWGHRCLVIGGKNVQNYVENHYSGQKTDLNDAQALAFLAQDKQLRTIKAKDIEQQKYASLTTLREQYIKQYRQTIVSLKGICQAWGLNISKGISGKAQLKDLIENHAAFPEELRESLVDMVTHAQTAQKALNKITKTLEVLAKNDKVCQLIQTIPGLGTICSCRLRATIGDIKRFKNPKDFPAYYGLVPRSIATGHNEKKGKITHRGDRTMRSLMVQGAGCVIRLATCGKLKSKHLTKWILKKQKEKMPWGKLVCAVAAKLLRIVRAILISSKPYNPKIAGVAKCSLSKGS

SEQ ID NO: 162182 - protein, 369 aa, unidentified
MGKHSEVFVALDVAKKKHAVAVAEGGRTGEVRFLGDVENSPLPIERTIKRLAERYERLHVCFEAGPTGYGLYRQIQALGHDCMVVAPALIPKRAGERIKTNRRDAVTLARLHRAGELTGVWAPDEAHEAVRDLVRAREAAADDLRRKRQQLLSFLLRHSRIYSGGGHWTLAHRRWLAHQKFDHAAQQIVFQEGIDIIEDALQRLRRLEKQLALIVPEWSMAPVVEAYQAMRGASFLVAVTFAAEIGDVRRFDTPRQLMSFLGLVPAESSTGDTIRRKGLTLAGNRRARRALVEAAWTYRYPARVSETLRARLEGLPKPVRDIAWKAQVRLCARYRRLSATGKKLPIVVAAIAREMAAFLWAIGREVAPR

SEQ ID NO: 162183 - protein, 348 aa, unidentified
MVVIGVDSHKRTHTVVAVDGTGRKLAEKTVPARSAGHLELVRWAARFVDHSWALEDCRHLSRRLSTDLLVAGESVVRVPPKLMAGARRSSREPGKSDPIDALAVARAALREDLPAATLDGPDRDVRLLVDHREDLVAERTRAQNRLRWHLHELDPGNEPAARSLDRTVVLTALDRGLAEAPGTVGRLARELVGRIQALTVTINDLEREIAGLVAELTPTLLEMTGCGRLTAAKLLGEAAGIGRFRSRAAFARHNGTAPLPVWSGNTERHRLSRTGNRQLNVALHRIAITQLQREGPGRTYFEHRRALGNTKTEAIRALRRRISDEVFRRMRHDEAARAASPSGLAAAA

SEQ ID NO: 162184 - protein, 259 aa, unidentified
MSETPVFVGIDVAKAELAVAVRPTGERWTTANAEAAWPPLVARLQALAPQLVLCEASGGYELPLVGALAAAGLPVVVVNPRQVRDFAKATGTLAKTDRLDAGILAHFAEAVRPAVRPLPDAATQLLAALVARRRQLVEMLTAERNRLGVAPGPLRAELQDHIADLTRRVAQLDQDLDQHLRASPLWRAQEDLLRSVPGVGPVTARTLLATLPELGTLDRRTVAALVGVAPFARDSGTLRGRRSCWGGRAAARRPGRADR

SEQ ID NO: 162185 - protein, 343 aa, unidentified
MTHHVGLDVSVRETSICIVDEAGTIVKEARVPTEPSIIIEMLTAPGIACRRIGLEAGPLSQWLFNELAKAGLPAICVETRHMKAALAAQVNKTDRNDARGIAQMMRVGLYRPVHVKTRISQEKRMLLTSRKLLQGQIRALENDLRGSLRTFGLKVGATSAGAFDERVRELVVEHPALAAIVGPLLAARGTLRTQFVVLHHMLLKLVRSDPICARFMTVPGVGPIVALTFQATVDQPQRFAKSKTVGAHFGLAPRQHSSGETDYSGRVSECGDAIMRSALYEAAHTLLTHTRRWSSLKAWGVRIAMRRGLRKATVAVARKIAVILHRMWIDSTEFRWGAQPVAA

SEQ ID NO: 162186 - protein, 421 aa, unidentified
MKPQVSEAFAAFVGLDWADAKHAICLQAAGTVQREFLSLEHSPEAVHTWVQTLRTRFNGQPVAVCLELNKGPIVSALRNYDCLVLFPVNPLTVAKYREAFTPSRAKDDPTDAALLVDILLKHRDKLAPLSPQSPAMRALAQLVEHRRRLVGDKVRLTNRLTSALKNYFPQVLQWFSEKDTAIFCDSLSRWPTLKAAQLARRTTLEAFFRTHHVRSTDLIATRIEAIKSARALTTDDGVITPNVLLVHALVAQLRVTLQGIADFDRVIVQRAQDHPDFPLFDALPGAGAVFAPRLLVAFGEQRERFTSAEELQKYAGIAPVTERSGKKAWVHWRLQCPKFLRQTFVEWAAESTRHSFWAQVYYQQQRDKGKAHQVAVRALAFKWIRILYRCWQERTPYDEAIYLQALKRRNAPLLHSLANVS

SEQ ID NO: 162187 - protein, 413 aa, unidentified
MRVFCGIDWAEDHHDIALVDADGSLLARRRISDDAAGLSQLLELLAEHGDTGDGQIPVAIETPRGLLTACMRATGRKVYPINPMAVSRYRDRHSAAGRKSDHGDAVVLANVLRTDAHAHRPLPADTELAQAIAVLARAQQDAVWTRTGAHNKLRSHLREYYPGFLAAFAQARGGIIRPEARAVLAGAPDPATAAQLTLSQLSALLREAGRSRGIDAEAARLREALRELQMRQLPLVEQAMGRQAVALLGQLNAACQAAADLEQAVIESFNQHPDAEIITSFPGLGPLTGARVLAETGDDRSRFADAKGLKAYAGAAPVTRASGKTTAVLHRRIKNQRLAAVGYLWAFSALTASPGARHHYDKRRAAGDRHAAGQRNLFSRLLGCMHHCLATGQHYDENAAFPPPAPAGQAIAA

SEQ ID NO: 162188 - protein, 421 aa, unidentified
MTNVTPQEFAAFIGLDWADAQHDVCLQVAGSDKREGKTLAHQPEVIEAWVTDLRQRFEGQPIAMALELNKGPIVEALRQYDGLVLFHINPLMLARYRQAFTPSRAKDDPTDAELQLELLLRHRDKLKPLMPQSPEMRALAQLVEHRRRLVGDRVRITNRLTSTLKTYFPHVLQWFPHKDTMLFCDFLSQWPTLKAAQLARRRTLERFFHQHHVRDEQRIHECLAAIKSAVPLTTDEGVMMPNALMAQALMTQLRVCLAAIERFDHAIAERAQRHPDYALFEALPGAGPVLAPRLLVAFGEQRERYGAAEEMQQYAGIAPVLERSGKQSWVHWRCQCPKFLRQTFVEWATGSIRFSGWARAYYEQQRDKGASHQAAVRALAFTWIRIVFRCWQAGVPYNESVYIAALQRRGSALISHLAPSS

SEQ ID NO: 162189 - protein, 407 aa, unidentified
MEVLYPRSAGLDVHKDVVVACVRCVSTPVHQEVRSFHTTTSGLLSLVDWLNSHGCTHVAMEATGVYWKPVWHMLEEDFELVLANAAHIKNVPGRKTDVNDATWIADLLAHGLIRSSFVPPAAIQELRDLTRTRKQLVREVSQHSLRIQKILEDANLKLGSVLSDVLGRSGLAMLEAIIQGEADPEKLADLAQGNARKKRGELVEALRGRVSAHHRTMLKFHLDVIRALKRTLEELDVAVGKALTPIRERAQLLTTMPGISDIAAQVLVAEIGVDMTRFPDQGHLISWAGLCPRNDESAGKRRSTRVRKGAPWLKTTLVTAAWAAVRTKNSYLQAQFLRIKSRRGAKKAILAVAASMLTAVFFMLRDGVAYQDLGTDHFSRHDKTKTIQRLLRRLSDLGCNVAIAQPA

SEQ ID NO: 162190 - protein, 424 aa, unidentified
MNFKMQDKQNQLIERISDRHLVVGVDIAQQFHVARAVNYRGIVVGDPLTFENNEEGFNRFLEWINKLKGKNSLDTTIVGMEPTGHYWINLSKWLSNEKIDVVTVNPHLVKRNKENRDNTQSKSDKKDALVIADMVKNGYYSFVHMASESFEKLRVLMSNRDVIVKRLVSSINQLNRWVDVVFPELRQVFKDVKGKGAIATLRLFPTPIELRSMQPQDIVAKWKSVMKRQPGLKKAYQLIDLAKRSIGSHQAHDAYKLHLEQLLEEYDLATTQLERVEQEVTNVLQQIPFAKKLLAIKGISEISLAGILGEAGDLSGFAHGNSLLRHAGLHLSEASSGKWKGQIVISKRGRSRLRRFLYLTTMCLVMNNPEFKALHANNVKVKKIKKMKSIMKLVGKLARVFVGIAKRNESYSPQKLQPFSALAA

SEQ ID NO: 162191 - protein, 384 aa, unidentified
MSIVMVRYVGLDVHKRVVEACIVDQSGNVVHRERFALNRRTLELFANKVLRPTDHVAFEATTNCWAVADALRPQVAKLVVSNPLATKAIAQAKVKTDKVDAHVLAQLLRCDFLPEVWQPDEATRRLRELTGRRSVLIGQRTMMRNRIHSVLAMRLIEVSRKALFDAGGVEWLKTVEIDPQGRLLIDSDLGQLESLQKEIATLDLELARRGHASDAVKLLMTLPGVDVGTAEAMLAAWGDFTRFPDADHAASYLGLSPSTKQSAEKCYHGPITKRGNSHARHMLVEAAQHLGKHPGPLGHFFRRLMKKKTRNVAVVAAARKLALIAWLMLKSNEPYRYAIPRTAETKLSKLRVKATGQAPVEPMAFLIALSIPHGILPFQENTSL

SEQ ID NO: 162192 - protein, 465 aa, unidentified
MTAGKKLWRNRKERKEWARRLQSEDPGLEVVHPHAAGIDVGNSVHYVAVRPDRDPEPVRRFECFTADLHRMADWLHSCGVKSIAMQSTGVYWIPLYEILDERGFEVYLVNARHTKNLPGRKSDVQESQWLLKLHTYGLLSNSFQPVSEIRGLRTYWRQRGEDVRGAATCIQRMQKALTQMNVQLANVISDISGLTGQAILRAIVAGERDPRKLAALSHPSVHASPEEIAKSLEGNWRPELLFVLQQEVDMYDTYQKRIAECDQQLQKQLARLTGVTPPGKAPTPKPKAKPAAAKNAPRFDLSSELQRITGVDLTRIDGIDVMTAQTLLSEVGLDMSRWKTESHFASWLGLCPDNRISGDKVLAKGTRRVVNRAATALRQAANTLIRSRSYLGAQYRRLRTKLGAPKAITAMAHRLARLVYRMLKYGQAYVDKGTAYYEERFRQQQIQLLRKRAAKLGFQVAEIPA

SEQ ID NO: 162193 - protein, 411 aa, unidentified
MNNTLFVGIDISKRSNVATFMNCEGKVVGRLAFSNNGSGADRLVAKILSYYEKGDFEAIRIGMENTSVYSKNLVWFLYEHEALNEHKLSIIPLNAIMVANYKKSFLDMDKDDITDSFAIADFIRIRPGLLPFKLDDRQEALKIMTRSRYNYVQALSRMKSQFLTRLFLSFSEMEAGKPFYSIFSKTSLSLLEEEFTLDELAEKPIPELVEFLQEKGGGKFQNPEEIAKVLKKAASSSYRVPAMVRESLNRTMASDMEIMRILENEIHNCDKNIKKLMKSVPAILVSIPGIGPVLAAGIMSEIGDISRFQKQESLGKMAGFKWKRNQSGKKESEDKAAVLSGNKKLRYYLVEAANRVRIHDPVFEAYYRKKYAESKTHAHKRALILTARKLVRVIFYLLKENKLYKPDVGIS

SEQ ID NO: 162194 - protein, 423 aa, unidentified
MEEARKESTRESSYKVAGIDVHKAMLAVVIADAAEVGEFHFERRKFGAAPSDLKALAEWLTAQGVKEAVMESTAQYWKSVWQELEGKCELHLAQAHSNRAPRGRKRDFADAERLVRRHVAGELILSFVPDPQQRLWRMMTRTKHQLTRDRVRLHSQLEAFLEDARIKLSGCLSDLLGVSGRDMLKALAAGQKDAAAIARLAQPEVKATQAQLCDALSAAACLSDLRRQILQLFLQRLELIENQMETLTQAIAGELREHEDAVRRLAEVPGFGADSAQQVIAEVGPGAAAFPSPGQLSSWVGSCPGREESAEVSKNNRSPKGNRPMRRVLDQVANAAVKTKGSVFEALYRRLVPRLGHYKTIWAIANRLCRLTWKILHQGATYQERGFRPNPKAVRQRATKLMKALRNLGYNVRISPSHTGASA

SEQ ID NO: 162195 - protein, 356 aa, unidentified
MNILAGSADAVIGVDTHRDTLAAAVVTPIGAVLASTQAGADAHGYRALLDFAQARAPGRRCWALEGAGSYGAGLAAFLATHGEHIVEVCRPKRPPRAGARKSDAIDAIRAAREALSAEHLISPRRRGEREALRVLMSTRSSAVTARTRAANHLKALIVSAPETLRAELRGKTSDAQISYCANLRSRPSQSIEHRMTVTALRSTASRILALRAEADDLEREITQLVTTAQPQLLALPGVGAISAAQVLISWSHTGRFRSEAAFAAFSGAAPIPASSGLTTRHRLSRSGDRQLNRALHTIALTRARTDPDTRAYLARRTADGKTTREARRCLKRIIARQIFRHLEHQPGADPASLDRT

SEQ ID NO: 162196 - protein, 412 aa, unidentified
MDVIVERPAALDVHKEQVTACVRFPAPDGSRAQEVRQFNTTVGGLLVLHDWLKAYGVTRVAMEATGVYWKPVWAILEDDFELLLVNAREVKNLPGRKTDVKDAEWLCQLLEAGLLRASFVPPNPIRELREFTRYRAAQIKERQREANRLHKALEPAGIKLDCVATDILGKSGRDMLDALCSGTTDPEVLAELARGRMRTKIPQLKEALQGRFDARRALLIGAILAHLDFLDEQIERLSDAIEEQLRPFQPAVELLRSLGGIETRSAQNIIAEIGTDMSIFPTADHLCSWAKQCPGNNQSAGKRKSGKSPKGPKWLDDALKNVAMAAIRTNDSYLQAQYKRLKPRLGHGRALGAVKHSILYAIWHMLTNGELYRDLGGDYFRKRDPERQTKRLIAQLERLGHKVTLEALPEAA

SEQ ID NO: 162197 - protein, 426 aa, unidentified
MSERDYSKQVARRQRIGSTTLVVGVDIGSAFNAVGFMNKEGKVLGSYPKMANSREGYEQFVKITEELKAKHGLMDVIIGLEPTGHYWRKFAYFAKGKGYEVRFVRTTALKHHRELDESSSAKSDKRDALTLTNITREGKYIDTVIEDGRMRHLRILVKVREKIQKRNVSAKNSLRAALDDYFPELHRIFWSMNSRGLWVLLERCPFPEDVVTLEVSALEEMIGRASRRRAEATQKATVLYQVAKESIGLRQIGGADRYRLKMCLEEVKRTELTIKDIEREIRRMLKEIPEAEYLLSIPGIGPISAAVFLGELGNPSYFKGARQVIKYAGYDPQESDSGYRISRKFISKKGRWLLRKHLFLMSMRVVVLSRYFQEYYERKLQTKNRFGQLPRKKEILCAVAIKLIKVIFALLRDKRNFEDMATCAVE

SEQ ID NO: 162198 - protein, 410 aa, unidentified
METIFERVAGLDIHKAQVTACVRLPTASDGREQHLAEFSTTVRGLVALRDWLEAHGVTDVAMEATGVYWQPVWHVLEDAFELMLVNARHVKQVPGRKTDCSDAAWICQLMEAGLLRGSFVPPKPQRALRTLTRYRKTQIQARADEANRLHKALEDTGIKLDCVATNILGKSGRAMLDALVGGTTDPQVLAELAQGKLRPKIPALREALEGRFEPHHALVIGAILAHLDFLDEHIDRLSEAIEEQLGPFAPGVPLAATITGVAERTAQVMVAELGTDMSRFPTAGHLASWAGRCPGNDQSAGKRRSGRTRKGSKWLKIALDEAALAATRTKDSYLQAQYQRLRPRIGHGRALVAVEHSMLVAYWHMFTTGETYHDLGGDYFRKRDPERATRRLIAQLEALGHKVTLQPIAA

SEQ ID NO: 162199 - protein, 367 aa, unidentified
MSFNGTSVGLDVHALSVVAHAVDKESGLVERARLCPDHGEVLRWLGQLRGPLRVAYEAGPTGFGLARALAGARIECVVAAPSKLVRPAGDRVKTDVSDAAHLTRLLRLGEITPVTVPEADVEAVRDLVRAREDARADLMRVRHRLSKLLLRQGRAYSGGQAWTGPHETWLRQQRFTDAHTAAAFDHHFDAVLSATAARDHLDEQIVGVAASPRWADTVDRLGCRRGISALTGLALAVEIGDWSRFTGASIGAYVGLVPTEYSSGASRVLGSITKAGNAHVRRLLIEAAWHHRASYRNPGPTMRARWAKVDPALKARGHAGNRRLHQQWCRFLERKKHPAVANVAIARQLAGWCWSLDHPGLTPGQIT

SEQ ID NO: 162200 - protein, 414 aa, unidentified
MERLYTCCAGLDVHKQTVVACLLHPDGATERKEIRTFSTTMGALEELRDWLSAAGCTHVAMEATGVYWKPIYHVLEGHYTLLVVNAAHMHAVPGRKTDVRDAEWIADLLQHGLLRASFIPSREQREWRDLTRTRTSLIDERSAAVNRIQKVLEDANIKLAGVATDIMGKSGRDILAALIDGETDVTAMADLARGKLRRKHDALEQALRRRMADHHRMLITLHLEHVDLLDEQIDRLSADIAARLHPYEAVLRRLESIPGVGRRTAEILAAEMGLDMSRFPSAGHLASWAGMCPGVHESAGRRKSGKRGEGNKALRRVLTEAAHAAARTKKKDQTYLRGQYRRLVVRCGKKKAAVAVGHTILRIAHYLLVQETTYQEQELVYLDERRRARTQQRALDQLKALGYEVTLTPKAPAA

SEQ ID NO: 162201 - protein, 311 aa, unidentified
MTILTSQTVVGIDVAKAEIVVYRADQQTLESIKNERAALKRWLKTLPAQSAIALEATNIYHLDTVELAHEMGHQVYVVDAYRVSHYRRGVGQRAKNDPCDARLLARYLESEQSKLRIWTPPPKAYSTLKSLLHRRATLIKNHTGLMLSWTSEPLLKKLQTAQQKAFKQADQAIQKLLRKVSKEAGIEENIERCKAIEGVGELTATGLAATYIRGDFANSDAFIAFLGMDLAVDDSGKKNGLRSLTKKGDPEVRRLAYNAAMAACRSAKWKPFYEAYLVRGFSKTQALVALARKLCRVAFALMKNQSEYLSA

SEQ ID NO: 162202 - protein, 465 aa, unidentified
MKHAQPRHRRTPTSHSSLLARINPNAAGIDCGAEEHYVAVPADREAAPVRSFTTFTTDLHRLADWLTACGITTVAMESTGVYWIPLYEILEARGLDVVLVNARQVKNVPGRKTDVMDCQWLQELHSVGLLRGSFRPTAAIAALRAYLRHRETLVQSAATHVQRMQKALLQMNLQLSTVISDITGVTGLRIVRDIIAGQTDPRALAQHRDARCQASEASIMAALTGHYRPEHVFVLQQNLELFDAYQRQLAACDAAIEAHVHTLATEAPAPAAPLPGPRTRKKPRDNEPRFDIRTPLHQLTGVDLTQIDAIGPYSALRLLAEIGTDMSRWPTEKHFTSWLTLAPHNKITGGRLLSSATLPSANRAAGILRMAAMSLSRTETALGAFYRRLAFRVGKARAITATARKIAILVYRTLKERLVYRDPGAAAYDAQHRQRVIRRLRQRAAHLGLALVNRETGELIEGAVS

SEQ ID NO: 162203 - protein, 445 aa, unidentified
MLRIIYKRVAGLDVHKKTVVATRMHVTEEDRVEWETETFGTTTPDLLKLHDWLHEWNCTHVSMESTGDYWKPVFNILEDSFEVWLVNAQHVKHVSGRKTDVKDSEWLAELMLHGLLKPSFIPPKPQRALRELTRYRTRLVQERARVVNRVQKLLEGANIKLSSVATDIMGVSARAMLAEIVAGQTDAEHMADLARGRMRDKIPELEKALTGLVQPHHRFVLAQQLDHIDFLDEKIETLSIRIGQQLESMSWPDGPAEPDASKDTQEGAQVADESELPLTWDTAVALLDTIPGVNRRIAEVMLAEVGLDMSRFPTADHLASWAGLAPGNHQSGGKRYSGRTTKGNKSLSSIMVQGAWSAVRTKDTFLKARYHRLAARRGKKRAIVAVAHSMLVSAWHMLTYQQPYQELGDDYFDHRKKETKVSYLVRRLEKLTGGAVSIEIQPAVA

SEQ ID NO: 162204 - protein, 403 aa, unidentified
MNSVGIDISKGRSTIAVMRPFGEVVISPFEVRHTGSELSKLAKQLKSLDGETRVVMEATGNYHAPVAKLLHNAGLYVSVINAKLVHGYGNNELRRVKTDRKDAVKLANYGLDRWLTLPRYIPEEDTRLLLKNCYRQYRQYSKVQTVLKNNLISLLDTVFPNANRLFSSPIRGDGSEKWVDFVAEFWHCRCVSEKSERAFTSKYLRWCRKHGYNFREAKAHTIYAEASGHIGVMPKSETTKLLVEQAVAQLRATSTALAALKHEMQSLASQLPEYPVVMDLFGVGPTLGPQLIAEIGDVRRFYSKKALVAYAGLDAPPNDSGDVTGRHKSMSKIGASSLRRTLFLVMSVYLQTAPLDEPVCQFMDRKRAEGKLYRVYMMASANKFLRIYYATVKAYLESLEHTA

SEQ ID NO: 162205 - protein, 349 aa, unidentified
MIIIGCDYHPSFQQIAWVDSETGECGEQRLAHSDGEAENYYRGLNGHGVRVGIEATGHARWFERLLAELKYELWVGDPAQIWAMRVRKQKTDRQDAQHLLKLLVEDRFPRVWVPSAENRDLRQLLWHRHRLVQMRTRVMNQLQAIAMNEGVRRKKGLWSKQGRRQLESFSLAPWATRRRQDLLELLDRLNPSIQELSTAIEQEAVQRPEVKRLMTHPGVGPLTALAFVLIIGSPERFRCGKQIGSYLGLVPCEDSSADRQRLGHISKQGNALLRFLLVEAAQATVRSDPEWRHQFLHLAMRRERAIAKVAMARKLAVRLYWMWRKGWDHQQMVQFGSHVGQPVVSHGVK

SEQ ID NO: 162206 - protein, 321 aa, unidentified
MQFIGIDAAKATFDIALPLSGGKYRTKAKLPNTPKGFDELLAWRAKHAPNAAVGMEATGIYHQALAGALVKAGVMVHVANPARVKAFGQAEGIRTKTDRSDAKLIARFFEAQRPEKLHPYVPPTPSEVKLRALVRRRDDLQEMLQMEHNRLDVADISVQQGIKDVIRTLEGQIKQVQKAIEDHIDNDPDLRRRHQLLTSIPGIGNTSSAQLLAMLGDLSKYSDVRQVVAHAGLNPAQRQSGNYEGKCRISRVGDANFRKKLYMPALTGKTYNPRLKSFADRLSAKGKPFKVVMCAVMRKLIHLVWGVLRSGRPFEPDAALA

SEQ ID NO: 162207 - protein, 341 aa, unidentified
MHQATIIGIDLANRTFQAHGTTSDGKVAFRKKLSRSQLLAFLTQQPRCVVAMEACATAHEWGRAARELGHEVRLIPPAYVKPFVKRQKNDAADAEAIAEAASRPTMRFVAVKSEAQQARAMVFRTRDLLIRQRTQLINALRGHLAEHGIVAPQGPANLKLLADAISDTKISLLPIVRDLGLLYLEQIKGLGEKIAALDRTLRRESKSATTACLQTMPGVGPITAVAIEAFAPAMTTFKRGRDFAAWVGLVPIQHSTGGKQRLGRTSKMGQRDIRRLLITGAMTIVRWASRKGAREGSWLARMMARKPRMLVAMALANKMARAVWAMLTKQENYRDPAAALA

SEQ ID NO: 162208 - protein, 413 aa, unidentified
MKQLLDPVAGLDVHRDNVVAATRTVGADGEVAFTKVRFPTNRRGIAELAGHMTQAGVVRVAMEATGVYWKSLYYSLEGLFPELWLCNAQHVKNVPGRKSDLSDAEWLADVAAHGMVRPSFVPPPEIRELRELTRYRKTQIDERAREIQRLEKTLQDAGIKLTSVASGVWSVSSRRIVEALIAGEADPAKLASLALGRLRPRTAELEEALAGHFGPHHGIVCQQVIDHIDFLDSSIAKLSEEIAARLLPFEAAVALVSSVPGIGEISAQVIIAEIGVDMARFPTAGHLCAWAGLAPASHESAGRRRPAGTRNGSRWVRRTLIEVARVAARSRGTYFSAQYSRIARRRGPNKAAVAVANSMLAAIWHLLTTGAFYEDPGADYFERRHDPMLEAKRLQTRIEALGFVVTMTPKAAA

SEQ ID NO: 162209 - protein, 356 aa, unidentified
MELHTLGIDLGKVVFHAVGLNERGDVVTRKKCSRTQLLRFTANLKVDLIGMESCGGAHFLGRSLREQGHEVRLIPAQYVKPFVKTNKNDYIDAEAIAEAVSRPTMRFVPIKSDDQLDLQSLHRVRERWVMRRTAVVNQIRSVLLERGIILRKGRKFVDQELPGILENAELRLSGALRMLLAQLRIELGQLAQRITEMDRIMQLTAIEHEGCRRMQAIPGVGPVTATAIVAAIGSGGAFGKGRDFAAWIGLVPRQYSTGGKQKLLGISKRGNPYLRTLFVQGARAVLQKRMHQSPGLRCWLERLTSRKHGNVAVVALANKLARMAWAVLAKNEPYQPYALVRAGQLPGGIHREFSEA

SEQ ID NO: 162210 - protein, 392 aa, unidentified
MIYVGIDVAKDKHDCFITNFDGEVLFKAFTIANNLDGFNDLYQKIVSVTEDITKVKVGLEATGHYSYNLLGYLIDKSLPTYVINPLHTNLYRKSLSLRQTKTDKVDARTIASMLMSDVNLKSYSDTSYHNEELKSLTRYRFDKVKERAKLKTSVSRLICILFPELEKLVPTLHMASVYALLSEFPSAHAVASAHLTRLINLLSQSSKNRYGKDTAVMFREAARNSIGSNMPTKSLELKHTIKLIQELTSEIDEIEAAIKQIMDEEIQSPILTIPGISYRMGAMIIAEIGDFCRFDSADKILAYAGMSPSTYQSGQLDNCYSHMEKRGSRYLRYALYNATKYVCHWDKSFGEYLAKKRSEGKHYNVAISHAAKKLVRLIFAMEKSRKAYLPTA

SEQ ID NO: 162211 - protein, 467 aa, unidentified
MYRELHPLRQALASEVSARLPGLAGIEPDKLLASYLDRLTLYVGLDVADASFTAVALDAGREVLGELRACPNRQAGFVRFQGWVESLQAKFNLRLVAIAAETTGVYYWALWDYLAEHSPCARVLFNPRTTQPMGEVLSVKVRDDLVDALLLAEQLRLGSTPEVQLCEDADLLSARLCSRAARDLARQINRKKCQVRAYLRAYSPAINHTFPKAKFHHPAVAALLKQYLFADEFIAAGEAELTRLLTQNCRSAFDQTQVQQLLAECQHVIARPIQREVFRYRVHCLLDDLHSLAQQQQHFLKLGYHLIKKRPETPLVKAIPGAGISNTLALVSELADVARFPSGAHLASFLGLTTSKHISGTSLYQAKHITKQGSPNARYAAVNLASFLVRTVPRYQHMYQAIRQRKPPRKGHFVALVAVARDFVTNVLYDMLTKHRPFFVEVEAYRKYRQQRQLSASPEPPSASGQA

SEQ ID NO: 162212 - protein, 341 aa, unidentified
MTEIIRIGLDIAKNVFEVHAVNAQEQVVVRRSLRRNQVLAWFSKLPACLIGMEACGTATHWARELSGLGHTVRLIPPAYAKAYVRRNKNDPADARAICEAVSRPSMRFVPIKTVERQGEAVTHKARQLLIKQRTMTQNSLRGLMAEFGIVVPQGPQHISKLLVILADPEDPRIPAVARTALNAMADLLAALEQQVETLDKTIRAQVRANPTARRLDTIPGFGPILSGAIAAIVADPRHFDSGRDFAASLGLVPRQDGTGGKVKLGPISKRGNGYLRRLLVNGATAVLNGKNARNDVWRAKLLDSKPKKLAAVALANKMARIAWAVMTRQETYRPRAVAAAA

SEQ ID NO: 162213 - protein, 335 aa, unidentified
MTYYAGLDLSMETTQVCIVDETGRKVALMKVESSPDMIAYALREVGGVERAVIETGRMSPAICHGLRALDIPIVCIDARQAHQSLKALKANKTDPHDAAGLAQLARTGFYKEVHVKSPAAHGARSIIATRNHLVESRVRLDNMIRGLCATFGFKPGPGQGKAFIDRVMEAAKTPGLGQSITALLAVRTGLTAQIKEMDRVLRELAHRSQSCRQLMTIPGVGVQTSAAFVAAVDEVGRFRQSRTAGAYFGLVPKRHQSGEIDWTGRITKQGDSTVRKLLYEAANSILTRSRGSFALKGWAMKIAKRRGLRKARVALARRLAVIMHAMLRDGTLFEA

SEQ ID NO: 162214 - protein, 359 aa, unidentified
MNKKTRKRSLSDDVLTIGIDLGDRWGHYCVLDAQGDVAEEGRVRMTRTALSAHFSCPRACVAIETGSQSAWVNDHLRALGHEVIVANARELRAISGSNSKHDAADAEKLARYARVDPRILHPIQHRDLDIQKDLVQVRARAAAVRARTQMINAVRGMVKSFGFRLPDCSTRFFGRRYWGELPQGLRDALQPLFVAIEAVSLQIKEYERRIEHMAREIYPETQRLTQFDGVGSLTALTFILTLADKHRFARSRDVGCYLGLRPRRYQSGGRDPELGITKAGDSYLRSLMVECSQRLLGRFGKDSALRRWGLKLADRGGKNAKKRAIVAVARKLAILLHRLWLSGEPYQPFYGVDEKLLTA

SEQ ID NO: 162215 - protein, 349 aa, unidentified
MRFYTNQHCHYCGIDLHTKTMYVCILDRDGQVLVHKNLPSNPEAFLEVIAPYREGLVVAVECIFTWYWLADLCAAEGIAFVLGHALYMKAIHGGKAKNDRIDALKIAMLLRSGMLPQAYVYPAGMRATRDLLRRRLHLVRKRGQLLAHIQMTNHQYNLPAFAKRIAYPSHREGVADHFEDRVVRKTIAVDLALLDRYDSLLVDLESYLVRQAKQHDAQAFQLLRRVPGVGKVLALTILYEIHDVKRFDRVQEFASYARLVKCAKESAGKKHGTSGAKMGNVHLKWAFSEAAVLFVRHNEPGKELLARLEKRHGKGKALSILAHKLGRAAYYILLRGKAFEIERFVATVN

SEQ ID NO: 162216 - protein, 426 aa, unidentified
MKLNEKEQERAIRAWIGIDWADEKHDVNVYDVASGKRGAGVIRQTPEALQEWLGELRTKYEGGKVAVVLEQGRGGLLNALLGCEFLVLYVINPKSLSSFREAFYGSGATSDPVDAELMCDMVRQNPSRFRAWCPDDVMTRALRLLTEGRRDLVNQSTALTNRLTALLKGYYPQALKWSGSLDTTWACDFLEQWPTLQSLQTSRRRQILRFYEKHPRASLDLSEQLKQIQEARALSQDAAVLESSALMVRALICQLRPLLSSIAEFDRKIATIFRKHPDRPIFESFPGAGAALAPRLIAAFGADRDRFQAAAEIQELSGIAPVTEKSGKKNFVHWRYACPKFMRQTFQEFAEHSRRWCKWAKAYYQQQRRRGKSHNAAVRALAYKWIRIMFRCWKQQRPYDDAVYTKSLSQHGSPLASLLAESVENR

SEQ ID NO: 162217 - protein, 387 aa, unidentified
MSEAFDPRKSATAFDQASTLVAVLELSGKSWRAGASVPGVSRRPMRQLAPRDMSGMLKAIEQWKSEAGKAGHEVRRVVVGYEAGLDGFWIARALREHGIEVYVMHPASISVERRGRRPKTDRIDVDILLRALLGWLRGEPRHCTMAPIPSEAEEDMREPGRQRETLTAARLKVENQMRSLLVRFGIADFRPRLKKAPEHLEKLRTFDGRPLPPNTKASLERLLARHRLLSAQLKEIETARERVVAIADPDRLGRMIQLLAALVGVGVETATTLVHEVFSRRFRDRKALAGFVGMTGTPYDSGGSQREQGVSKNGNPRVRRMLMQLTWRWLIFQPQSALAQWFLARTQGAKGRMKKIMAVALARKLLVALWSYVETGVVPEGARLAAA

SEQ ID NO: 162218 - protein, 447 aa, unidentified
MLPIHAVSARVRLSEWMPPGGVRWSAVTLNRGMGIRQLKLELRSPEVACASPTPAAPDPQKEAPLFAGIDTHKDTLAVAVIDPNGRQLAHREVPNTEPGFGDLLLDTHQVTRVGIEGSGNFGRAIAVHLAIEWQPGRDTVVVEVPTLMTSREPRAQPGKGKTDPVDALAIARITARETQLPPVRLAIGPAADLRALLDYRDDLIAERTALVNRVHADLTGLAPGYQAQVTKLTTRTRVRTVLALLEPDRSVRADLCRRRLERVTAIDTEAAELKRQIATLVEASGTTLTDEYGIGPLVAARFLADVVDARRYPNRDTFAASNGTAPLPASSGRTVRHRFNPGGNRQLNRALYTVAITQIRAETEGRAYYDRKRAEGKTSREAIRCLKRRLSDVIYRTMRADAEKASAGTQPVASPHASPVHRPRSTVAGGQSLAVGADDANEARLTA

SEQ ID NO: 162219 - protein, 348 aa, unidentified
MGGRDRAVASKIQGCDYHPSFQQVAFVDTRSGECGERKLTHQMEAESFYRNLQGQEVRIGMEATGHARWFERLLAELQFELWIGDPGEIRTKRVRKQKTDRQDAELLLQLLVENRFPRIWVPSPENRDLRQLLWHRHRLAQMRTRVKNQLQAIALNQGMRRGKGLWSKAGRAQLEALELAPWSGRRRQDLLELLDRLHPRIEELSAAIQQAAEQKPEAQRLMTHPGVGPITALAFVLILGVPDRFRCGKQVGSYLGLIPCEQSSGGRQRLGHISKQGNTLLRFLLIESAHAVVRYEPDWRRRFLHLALRRGRSIAKVAMARKLAVRLYWMWRKGRDYQQISKFGSHVE

SEQ ID NO: 162220 - protein, 443 aa, unidentified
MKTQSIVGSCAEAWTVGIDLGYHSHRICLVDPQGKCVFEQEVVHTGAAIEALVQQLLARTGSDPAPLEAALECPHGALVEAFLARGFSVWAINPKALDRFRDRFSLAGAKDDRRDALLLAVCLRSDRYAFRRVEPLPERLLQLKELERRRKTLQEEEVRGTHHLREALHRWFPQLLTLAPTADKPWQWSLLTVAPTLCQARRLSGKRLARILAAGHARIDPAQLRQALMQPDLPQAPGLEEIVALELGQLAAQIQLIHRQGLALEQAIAGLLRAAPRTEEEERWRRDMVLLSSLPGVGAKVLTSVVTRAALSLHEQDYHSLALLAGVLPVTRQSGGKKVVGMRYACDHALRDALFNGAWVASYRDPVWRSRYAQLRQRGKTHACALRIIGAQLLRVAIAMLKEGVPYDRSRLERRADPKELDQWLVAEPEGLATVLEREMSMV

SEQ ID NO: 162221 - protein, 340 aa, unidentified
MRSKTVLSKKFKTVGQPNIDELFKVLETYCQDKPHMAVVESTYNWYWLADEFEKRNWNLRLADPSTVSKAGFKYSDDYTDASYLAECVRNGSIRSTAIMPKDDRAVRDLARYRMTLVEDRGRLKTILVNMTANHLSIKLNADKLLKEIDEAVEKAASASDEGATDEVLSHYYDNRQVRTKMRSLLRRIRFLTHEVEALDEELTELIKPNVYATSLQSIKGCGYVTSMLIGLEIGDIGRFRTHKDFVSYCRLAPTSKLSNGKSKGLGNAKNGNAYLSWALTELATFVVRYNPEAKRVYDRYFNRSRLRVKAIRSVAAKIARGIFMMLKNGEVFDMKRCFGG

SEQ ID NO: 162222 - protein, 318 aa, unidentified
MFIGIDVAKDTLVVAARPTGTLETVANSAAGLQPLLSAWREHPPTLIVVEATGGYEVLAVLTLSLAGLPVSVVNPRQVRDFAKGTGQLAKTDAIDAHVLAHFAELMQPPVRPLADAETRALEALVARREQLRLMLEAERQRLTQPAAHAPAVRTSLEHTIAFLQQQLAHTDDEIGTAVAAHPVWAARSTLLQSVPGVGPMIAQALLGWLPELGQLTRQQIGKLVGVAPFNRDSGRYRGTRRIAGGRAAVRAKLYMGALVAVRYNARIKAFYLRLLANGKPKKVALVACMHKLLTILNQIVRTAMPWDASHHMAAPQLA

SEQ ID NO: 162223 - protein, 443 aa, unidentified
MNSLPQHLRHINVNAAGIDIGSDRHLVAVPEGRDEVSVREFGVFTADLNRIADWLEKCGITTVAMESTAVYWIPLFELLEQRGFEVKLVDTRQTKNVSGRKSDVLDCQWIQQLHTYGLLQGAFRPPDEICVLRSYMRQREMLTQVSSMHIQHMQKALQQMNLLLHNVVSDITGATGMKIIKAIIAGERDPNVLADNRHEQCRNTKETIAKSLVGNFRDEHMFALKQAVDLYETYQAKIAECEQAIIEHLATQPDVTDEEPPDGGKRVPPRDRIRAGVDLREKLFKLTGVDLFAIPGLGADTLLTITGEVGVDMSPWKTDKNFTSWLGLCPGTKISGGKILSRRTKRNANRAAQAFRMAAASQARSQTALGAFYRRIASRSSRIQALTATAHKIARIYYSMLTKGTTYVETGQQAYEQMYKERRINALKKQAQSLGYQLLACGS

SEQ ID NO: 162224 - protein, 365 aa, unidentified
MTSVTSVGTVHLGMDTSKDTIVVAVLLPGEELPAVDRIVNREEAVRRLIGRFAGQERLRACYEAGPGGYDLYRLLASMGVACDVVAPSLIPKGGSDRVKTDKRDAVRLARLHRAGELTPVRVPTPAEEAVRDLARVRAAVLADRKRAQQRLTAMLMRHGRIWRDGSYWTGAHRAWIAAQSFGEPALATTLAFYRATLDTRETELACIESELAPWARRDPLAATVARLGCYRGIAELNALTLAAEVVDWRRFPCARAFMGYTGLVPCEYSSGQRIWRGHITKAGSTPVRTALIEAAWAYRCRPAIGAALRRRQHGAPPETIARSWKAQRRLHGKYAAMTARGKAAPEAATAIARELAGFVWAEMTS

SEQ ID NO: 162225 - protein, 357 aa, unidentified
MKQLDKRIDFSNQELFIGIDVHKRSWTITERMKNLELKTYSMNPSAEELNGHLCKHYPGGNYNSVYEAGFSGYWLHRELTDLGFINTIVSPSDIPTSGKERLRKTDKVDSRKLARELSAGNLKGIYVPSILFQELRGLSRQRYQQTKKLIRIKNQIKSYLNYYGQPLPENCELLHWSNKFITHLKTLEFAYEIGKEQLENYLDELLILRKRKLEILQSLKRYLQKYNLYNKIELLLTVPGISYITATTLLTEIADIHRFKSTDRFASYIGLVPSTKSSGEKDKVIGLSVQFNRYLRQLLVEASWVAVRNDPVLALSFTKHSERMCKQKAIIKIARKLLNRIYYVLKNEKEYVCSVVA

SEQ ID NO: 162226 - protein, 419 aa, unidentified
MSSTLSGKLSTVKPGTLYVGVDLALKRNVAVVLTERAERLARFRFPNNRDGYDYFHRRLEALQECHQAPVVLVAMEPSNYFWKLLAADLEQRQVEYRLVNSYTVKKHREGDQLDRSKDDSRDAFTIGDLLRTGKFTETQLLHGAYAELRQHVVLYDRLQRHIRQQKNLICNIVGQLFPELSGEFKDLTAVTALAMLRNHAAAAVIRQMSQEAFIAGVRADFQGKRLQASRLRRAHTLATTSVALEDGVQARQLALRLHIEALEALQRQLEEVHIALLDTFWTLPESRYLVSVHGLGDITAAIILAEIGNPRNYRNGSQLIKLAGTQPVTNLSGRKSRSRTPMSHKGRPRLRTTLFFAVMRLVQVDDAFAREYLRLQLRKEKPLTKMEALGALMNKLLRILWALMRDRTFYNPALLGAVA

SEQ ID NO: 162227 - protein, 384 aa, unidentified
MLDEKIGEVNFENKPSKFPAFVEEIRKICGTKDFVFGLEDTRGFGRNLASYLTGRKFEVKHVNPAYTSAIRLSNPIIYKDDSYDAYCVARVLRDMVDTLQDAKHEDIYWAIRQLVKRREIIVKYNVMNKNQLHSQLSYSYPSYKKFFSQIDGKSALCFWENYPSPEHIWSTTPEQIYETIKAVHQAFKIERVHAIIDMIKKDGNTQKGYQEERDTIVRNIVKDIKNNQEILKDIEKQLRKLLPQTGYKLQTMPGIDLITEAKIVSEIGDINRFPNSDKLARFMGLAPVHFSSAGKGKDERCRNGNRELNAIFHFLAIQMVAVSPSGKPRHPVFREYFEQKVKEGKNKPQALICISRTLVRLIYGMMKTKTEYRPYEKKEEEGNN

SEQ ID NO: 162228 - protein, 388 aa, unidentified
MTYLGIDISKYKHDAYVLSESGEVLSDIFTFNNDIDGFRKLEQVLNLYGQGNVRIGFESTGNYAINLKLFLEQIGFDFMEINPLLINKHIKSNTLRQTVTDKISAFAIADYLRGKKYYPFRNGFYEVFALKQLTRFRSTLIKDRSKYLVHLTNVMDCLFPEFKLIFDNEFTVTSLYILENYGSAQAISNMNSRSYDILRRKSRGHFTMDMFVRLKQAAKNTVGVYDESYGIKLQSILSMYNSINNQVKVIEKYIEDIITEMNPYTLSIKGVGPLSTAVIVAEYGDFSLFENPGQMLAFAGLDPKYFQSGTTEHKGHMTKHGSPYLRNTLLNCCRSLRLHNEVFASYYYKKRYEGKSESVALVHMAKKLLRVIHILETNGEFFDPDKLR

SEQ ID NO: 162229 - protein, 332 aa, unidentified
MYLGIDIHKRYAQVAVMNDAGEIVEEVRVENANLDDLAQRYAGAQAALEATSNYYHIHDTLSEHLDVTVAHPQKLKQIANSDKKTDRVDAKELARMVRLNSVPESYVPTDEIREARALVRGRQTLIENRTKYANKIHGLLSDHGITKDVKPLNVEGREFLRELSLPAPWDTLLESYLEIIETLSEEIRELDAEIEEYAGSLKETQLLMTIPGVSYYTALTIYAELGEIDRFDGDKEVVSYVGLNPVIRESGDSRIEGSISKRGSSRVRWLLVQAAHTAVHASNDEYLTRFYERLASRKNSQKAIVATARKMLVSIYHMLDRGEVYDPPGVSA

SEQ ID NO: 162230 - protein, 455 aa, unidentified
MQVLYERCAAIDIGKDVIAVAVRLPGDGPEGRQTVKRTFKTFYGVLAEAARWLTSLGVTHVAMEATGIYSMPVYHALIEHGDFTQVLVCNAGHVKNVPGRKTDLADADWLVNLLECGLLAGSFIPPAEIKAARDVFRYRTKVAQQRVSEIARLGNVLQDAGIKIDSVASSIATKSGRAMTGALTGGERRGPVLADLAKGKMRAKIADLSMALEGRFGDHHALMCRLHLDHIDHLEAMIARLDAQIEAMMIPFRAQRDLLASIPGIGLLSAAGVICEIGVSVREFFATDARLASWTGLCPGNHESAGKRRSGKRRKGNEHLQSLLVECAWSAVRHDGYLKSLYHRHVMKWGGYRSPIAKKKAIIVVAHALIGQVAGARCRAPAPSEPDLPVVPASGSSKPLRTLRVAVVALCSCAAGPCGHGCRRRASGLWMASRSARRPARCFPARRVRAGCPGG

SEQ ID NO: 162231 - protein, 405 aa, unidentified
MEIFCGIDWSETAHDVAVVDETGRLLARRRIADDAAGFTALTELLAGYAGRPERVDVAIETGRGLLVAALRAAGHRVFAINPKAVDRYRDRHGVAGAKSDPGDARVLADILRTDRDRHRPLPADSDLAAAVGVLARAHQDAVWARVQDANRLRSLLREFFPAALTAFADLTTNTALAVLAAAPTPTAAARLSRANLTDLLRVAGRGTRPTEAARLAEIFTVDQLRQPPVVEAAMGQAVGAIVRTLTAANQSISDLEAALAVAFDQHPDGEILRSLPGLGPILAARVLSEFGDDPTRFPDPASRRAYAGTAPITRASGRSRVVLARHVRNKRLADACYLWAFAALNRSPGARAYYDTRRAAGDRHNAALRRLASKLLGQLHHCLTTSRPYDEALAWPQPDTTPAAA

SEQ ID NO: 162232 - protein, 323 aa, unidentified
MNNMNYIGPDIHKKSISCCVRQADGTIIQESTIAATRHALDEWMRQLPQPWMAGMEATLFTGWIYDHLVTSGALVKVAHPAMLQAIAAGKKKNDRVDARKIADLLRCDYFPECHMAPREIRDRRRVLRYRNLLVRQAVQMKNKVSGLLMEAGVPYNQQKVHQKKYFAELLQTQKKEMPPSMPELLRLSRSTVEALTGMQRQLIRALERDALLAARVERLASIPGVGRVVALTWALEMGDISRFASVKKAVSYCGLCGAEKSSGGKTERTPISKQRNKHLQTILVEAAKLAPRWSTELALVYEREKQRGNRNRATLAVARKLVA

SEQ ID NO: 162233 - protein, 385 aa, unidentified
MAPPRMPEAVIGLDVGKLSHWACVATRDGEILLSAPVANREGDLDSLFGRFPDALVVVDQSRYIGALALARAKAAGMSAAYLPGLAAHGAARLFAGDAKTDERDAMVIAKTALGIPDALLPVRDPGPTVAAARALAAQRNFLNCENTRSKNRLRSILLESCPAFEALVDLSDGPQLRLMASLGGAWSVADAGPRRAAALTRGAARGKIEALVRSTASSTRPDAAAIAAEDRAVRLLARRISENSAEIDVITAEISALLEGDDTYRCLLTVPGIGPKTASELAISIDIEDFPSHDRLASYCGLAPRNRQSGTSISSVTASRQGNKRLKNLLIFSCNCLTRTEGRWGDYYARCRERGMPHGKALKALARKRLKVIYAIMRDRVPYAA

SEQ ID NO: 162234 - protein, 451 aa, unidentified
MATKRKKRVQDLPVLHPDAAGIDVGASEIFVAVPADRDAEPVRSFATFTRDLNSLADWLQACGIRSAAMESTSVYWIPLHQILEARGIEVCLVNAQHVKNVPGRKTDVSDCQWIQYLHSVGLLRASFRPPAVICAIRSLWRHRDSLIQMAAEHVMHMQKALDQMNLQVHRVLSDITGFSGLRILDAILAGERDPIKLAQLYHSRVKSSQDTVAKSLEGDYRIEHVFALRQSLAGYRYYQGLIADVDQEIQRQLADLKTAAGDSKPPKRTKKTPYQRYRYEPAGFDLRGELYRILGVDLTDVPGISSVTAHTILCELGTDVSRFRNASAFASWLGLCPERQISGGKVLYTKSRRVRNRVALALRLGANSLHHANNYLGEFFRRITRKLGKAQAITATAHKLARIVFHLLNTKEAYNESVFRQCEEEALKHAELRLRKHAARMGFQLVSAANG

SEQ ID NO: 162235 - protein, 412 aa, unidentified
MKDLLEISCGLDIHKEKIVACILTGPLGKPTHSEIREFTTLIPDMLALRDWIISENCHHVAMESTGIYWIPIYEILEDAFSGDITLLVVNARHMKNVPGKKTDMRDSEWISTLLRAGLLNASFIPEKRIREFRDLNRYRKSIIRDITSQKNRVEKFLQSSGFRLSSFISDIFGASGRNIIQHLMEHGRIDKISLDSYLKTKTRKRIDEILMSVNGTLSEHQKSFLKILMCHYDSMKEHLIEIETHLQEDMLPFALQIEQLNTIYGISTTAPCAIIAEIGTDMKPFKTAEHICSWAGLCPGNNESAGKRKSTSITKGNPYIKSMLCEIAWVIAGKRNTYLSAWYWRIKQKKGARKAIVALARKLLVIIYTMLKQGTNFDENCFEVRRKNCEQKQLSRYIRELEKHGYTVEAQV

SEQ ID NO: 162236 - protein, 430 aa, unidentified
MKSNIQNAKIEAITEKTLVLGIDVGSETHYARAFDYRGIEYSKKPFKFSNTEAGFVTFKEWILDLKERHEKDKVVPGMEPTGHYWFNLGKFLQDNEMKPVLVNPHHVKKSKELDDNNPTKNDRKDPKVIAGLVREGRYMIPYLPDGVYADLRTASNIRFQLQAELTRIQNRISRWFNIYFPEYKTVYGNPDAKSGMLILKSAPLPEDILTLGIDGVNQIWREAKLRAVGKARAKTLIEAAEHSVGSKEGAVSARMEIRMLLEDYESRNIRLQEVMTLIEGLVKQIPMAEKLLKIKGVGIKTVSGFLAEVGDISRFNTPKELQKLAGLALVESSSGKHKGETTISRRGRKRLRYLLFEVAMSLVAKNPEFRELHNYYTTRRLNPLKKMQSLMAIAAKLIRVFYAMLTKGVDYDPKKMVSDIKRPAVYLQAA

SEQ ID NO: 162237 - protein, 391 aa, unidentified
MICVGIDVAKDKHDCFIISSEGVVLADVFTIPNNREGFNCLLGRIQACAMPGNEIKVGLEATGHYSYNILGFLLDNGLDSFVINPLHTNLYRKSLSLRKTKTDRVDARTIAAMLMSDVGLKPYTDTAYHNEELKSLTRYRFDKVKERAQLKQSVARLVCILFPELEKLVPTLHMASVYALLDEFPGAQQIADAHLTHLKAVLHDASKGRYGRDRAIELREAARASIGSRMPAKSLELRHTIRLIRELDAEIDEIESAIQQIMDEIHSPITTIPGIGTRMGAMILAEVGDFSRFDSPDKILAYAGLSPSTYQSGQLTNCYAHMEKRGSRYLRFAIFNATKYVCLWDPTFAAYLAKKRAQGKHYNVAISHAAKKLVRLIYALEKSREPYHQAA

SEQ ID NO: 162238 - protein, 397 aa, unidentified
MIAVGIDISKAKSTVAVIDSDGTVLASPFTMAHTQPEMEAFVSYLKGLGEPTTILMEYTGHYHYPVLKKLQDEGFPVCIVNPYQMKKYGDVEIHKAKTDKKDALRIAAYALEKSYKLVPYSSMEQKYEDLKFLSRQYNQRISYVAKLKVQLIALLDQTMPGITRILPLNSRNPEKCALLLFIKRFKSFDEIQRIGKARFLASYDVLAKKASERSASSKGLSIYELAVDSITTRGEDPYIWLSQNQCVDLLSATQNAADEIISQMRNIAETIPEYKVLRAMHGVGDRLGPIILAEIGDVHRFHSGKALNSYVGNDAPPYQSGQFESRNRHISKRGSSTLRKACYEVMQALKLIKPQDDPVYLFMLKKEQEGKPFNVAKMAGVNKFLRIYYARAMELYK

SEQ ID NO: 162239 - protein, 412 aa, unidentified
MEAKLVVAGIDVHKKMLAVVVVDDENPKQVVDQRKFGSGAKELQHLSAWLGGHGVSEVVMESTAQYWRPVWLALERDFVTHLAQAQSNAAPRGRKSDFVDALRLARRFLAAELRLSFVPDTEQRSWRGLSRSKHQKRLRRVQLQNQIEALLEENQIKLSSVVTDLLGLTGYRILKALANGESDPEKLITLAANNLKATPEELADALRGAPIPERYRKVLTMQLEELDLIDRHITELSRELGEALRGQQDAVVRLCEMPGVREDAAWQMIAEIGPEAAVFETPEQMASWIGVCPGREESAGESKSNRSPKGNRTMRRLLNQVAWGAVRTKDSFFKELFHRLIPRLGVHKAVWAVAHRIARLIWKLLHQKVHYIERGPLAMDPIAMKRRVARLTKQMRKLGYTIEVKPVAQTTD

SEQ ID NO: 162240 - protein, 351 aa, unidentified
MSHKTAATVALTIGIDRGKNTLHLIGLDDKGAIVLREKIARGRITARLANVPRCLIGIEAGMATHYVARELIALGHDVRQVPPAYAKPFRQGHKNDFRDAHAIAEAVQRPSTRCVPVKTDDQLDLQALHRVRSRLVGQRTAVINQIRGFLLEHGIAVRQGLRFLRQQLPDILAKRGDVLSPRMIRIMEDLSGDWRRLDERIKHITEEIEVLAHGSESCRQLMTAPGIGPLIASAMVAAIGNGTAFAKGRDFAAWLGLVPKQMSTGDRTILGRISKRGNRYLRTLIMQGARVILLRPANWAKHSFGLWLTAAAQRLHHNVLATALANKLARIAWTVLAQGRSYEARVVPKAA

SEQ ID NO: 162241 - protein, 415 aa, unidentified
MSETVAGVDWAKDAHRVCVLDDGGRQRLARAFSHDEDGLAGLVGTLVRMGVRRVAIERPDGVLVEAMLEAGLVVLAMHPNQVAAARPRFRAAGGKSDDFDAYVLAELARTDAHRFRRLAPDADETRALRALTRAREALVAQRVAAANQLRAELERFWPGALIFSEVDSPISLAFLERYPSPGDARGLGERRLGGFLARHAYCGRKRPAELLERLQAAPRGRAGEQEAEARRGIVLALVALLRPLVDQIRLITSQIAEAVRAHPDGQIFLSLFRDPRSVVTAGRLLAEIGDRRERYPDAAALAADAGMCPVPIESGRLRHAGFRWACDKRLRDAVGCLADASRKHNPWARELYERAIARGKDHPHAIRILGRAWLGVIWRMWQDRTAYDPTRHRALQRLLDTPVKQEVSPALAAGG

SEQ ID NO: 162242 - protein, 407 aa, unidentified
METIYPVCCGLDVHQASVSACLRRVSADGTIGIQKQEFDTTVNGLTQLSQWLTEADCPVAAMESTGVYWKPVYHILSGTLDVWVVNARDVKQRRGKKTDRADAQWISELLAHGLIEPSFIPPPPIMALRDLIRMRTALVQTRTQVKNRALAVLEDTNVKLSSVVSDPFGVSGRKMMDALIGGYRDPKAMSQLAKGVLRRKIPQLEAALEGTFTDHHALMLRLNLELIDQTNLQIAQLDKQVEKLTAPLDSTIERMTSTPGVQHRAAKIILSEIGTDMSRFGSAPRLASWAGMCPGNNQSAGKRKSGKTRKGNRYLRRVLAECAWATRNTDSYLGRTFNRLQARIGGKKAAVAVGHKILVIIYHLLNEETVYDDGRYSHFNKKQEQQQLKRALHVLNRLGYQVQLAPA

SEQ ID NO: 162243 - protein, 347 aa, unidentified
MSEEYAGRQVVGMDLHRQRSVLVRMTEDGRKLGTARITNSPAALRAEIARAGENPRVVLEATYGWYWAADTLAAAGAEVHLAHPLGVKAYGYQRVKTDARDAANLADLLRMGRLPEAWITPREVRDLRELTRYRQKLVGLRSNCKDQVHAVLAKLGIAVTCSDLFGAWGSAWMDGLRLPQPYAGKVTSLRQLIGELSTEITMLSEVIADLLAAHHGYRVIQRLPGIGPVLAAVIIAEIGDVTRFRTAAQLSSWAGLTPKHRESDVKVTRGRVTKQGSRLLRWALIEAIQRAPAGFPVRDAKDAIIARRGPGARNVAKVAAARRLLTLVYYGLRDGQIRCLPEPAVAA

SEQ ID NO: 162244 - protein, 355 aa, unidentified
MNEAKYIGMDVHQATISAAVRDSSGNLVMEAILETKAETILQFIRGLRGSLSVTFEEGTWAAWLHDLLQPHVTRVLVCDPRKNALLKVGNKNDRIDGRKLSELLYLNKLSAVYHGKPGIRTLKELARSYIAMTRDLTRVMSRLKAIYRSWAIPCAGQQVYAPRYRAEWLAKISEASVRRRAELYYQQFDALAALRQQARRELLVEARKHPAMRLLRQIPSIGPIRAALLIALMQTPHRFRTKRQLWAYCGLALRTYTSGEYRFVAGQLKRSKKVLAIRGLNINHNHDLKNIFKGAATRAASTAGPFQDFYQACVARGVKPHLVRLTSARKIAATALLVWKKGVRFDAEYLKQQAA

SEQ ID NO: 162245 - protein, 400 aa, unidentified
MISVGIDVSKGKSTVCVLKPYGEIVCRPFEMQHVEKDLEAFHNLLQKLDGEIRIVMEATGIYHLPILIFFHNKGYFVSVINPFAMKKYAKDNSIRGAKTDKLDSIMIANYGIEKWFKLQRYEGDEEIYAELKLLGRRYRYYMELHVKALQELTHILDYVMPGIKKLFSSWNEANGKDKLSDFVERFWHFDLITSMSLETFTDEYLVWAKEKKYHRSRSKAETVYELASSGIPTLPSSTPSTKMLVQEAISVLRTVDSSLSLIVTRMQVLAKSLPEYSTVREMGGVGDVLAVKLIAEIVDVRRLHSAKALIAWAGIDPPPYESGQFIGSKRKITKRGSSTLRKIGYEVMRVLKSHPAPKDDAVYNYILKKEGEGKSKKHAKIAGLNKFLRIYYARVIAVYQ

SEQ ID NO: 162246 - protein, 349 aa, unidentified
MAIVGGFDIHRRQITFDYLDTVTGQVRRGRIEPACRAVLAGWLEQRFAGRDDVTFAVEGCTGWLFVVQELQRAGITALLAEPAQTAGLRGRKQHAKTGKTDSRHLRSLVADGKVPASWIPTEQACELQALLQLYRDLAEEHTAWSQHIHATLFHQGVPGMAHRLSSAQARAVLASGQDIGLSPAGALAVQVALRQMQALEAELGPVHAQIAAFTRRQAGCKTLQQQLYGVGPMVAAVIWAFLGDARRFSSSARAVRHTGLDITVYSSDGKRTPGHLSHQGPPILRWALFEAGHQASRASSPDHRYYADVAARIDANRAALSVARKLARRSHHILRALGDQACAPVPAGR

SEQ ID NO: 162247 - protein, 399 aa, unidentified
MNSVGIDISKGRSTIAVMRPFGEVVSSPFEVRHTGSELSKLARQLKSLDGETRVVMEATGNCHASVAKLLHNAGLYVSVVNAKLVHDYGNSELRRVKTDRKDAVKLANYGLDRWLTLPRYITRLLLKNCYRQYRQYSKVQTVLKNNLISLLDTVCPNANRLFSSPIRGDGSEKWVDFVAEFWHCRCVSEKSERAFTSKYLRWCRKHGYNFREAKAHTIYAEASGHIGVMPKSETTKLLVEQAVAQLRATSAALAALKHEMQSLVSMLPEYPVVMDMFGVGPTLGSQLIAEIGDVRRFYSKKALVAYAGLDAPPNDSGDVTGRHKSMSKIGASSLRRTLFRVMTVYLQNAPLDEPVYQFMDKKRAEGKPYRVYMMASANKFLRIYYATVKAYLESLEHTA

SEQ ID NO: 162248 - protein, 373 aa, unidentified
MPKYSTAFGMDVHLRSTTVCALDADTGEAVTRRFPGNPWGEIAGWMDGFPGPSLAAYESGYLGFAPQRELAGLGVECVVAAVSKIPRSAADSASKNDRNDAARMAKAILAHDISPVWVPSPEVEGIRDLAGAYGGATARLATAKQRLLAFLARRGYAYGGTTPAGNPRKYWTYDFLRWLDKARPEDDGGVRALAALRNEVEAAAEARADPLSEYRAAADASPIAAEAAALQSIKGCAFALAAAFSAEVGDFTRFRSGRQVTAYFGLAPSQRSSGDSVRLGGISGAGNALVRKLAVEGSWCYAAARHQPKLMPRDTGAPLEIRMHGRKGSERLLRRREEMLARGMPAAKANAATAAELVRWLWALGMMCREGAE

SEQ ID NO: 162249 - protein, 411 aa, unidentified
MEVVHARCAGLDISKKDAKVCVRVAGAGRRKTVETVTTWGSMTNQVLALRDHLVAERVTCAVMEATGDYWKPFYYLLEDAGFEVLLVNARHVKNLPGRKSDVSDATWLAQLGAHGLVRGSFVPPEPIRQLRDLTRARTAITRERGREAQRLEKLLEDAGIKLSAVASDILGVSGRQMLEALIAGNHDPVVLADLAKRRLRSKIPELTQALTGRFSEHHAFLARVHLDLIDRHTEAIETLTDRIEVMIEPFQGFRDLICTIPGISTLTADVVIAETGADMTRFPTAKHLASWAGTTPGSNESAGKVKSSKTRPGNPYLQGALGAAAMSCAQNPRTYYGARYRRIASRRGPQKANVAIQHSMLIAIWQMGNTGTLYDDPGADYFTSLHPERAKNRAIHQLEAMGYRVTLDHAS

SEQ ID NO: 162250 - protein, 400 aa, unidentified
MLSIGIDVSKGKSTVCGMKPGGEIVYTPFEVQHTREGMSELVSLLRGSGEEVRVVLESTGSYHCPVVAALLENGIFVSVVNSLRMKRFCSQSIRRVKTDQIDAMQIALYGLAYWQELQPTRLPENTYRELQLLARQYYQMTSLLIKAKVDFNALCDQVLPGMQELMNDHAGRHKLSDFVLRYRHTTHILEMGETRFRKDYCKWAEKKGYRNRERMAALIFATAQNGIPVLPNAPSTQIVITEAIRVLHTVEASRDAILTQMQALAKTLPEYSLVREMPCIGDTLAPRLIAEIGDVRRFHSKRALIAYAGIDAPPYQSGKFCANNRHISKRGNRYLRKTGYEVMQSYVMHKPANDPIFTFIEKKRSEGKSGKLAMVAGLNKFLRVYYGKVTELYRSLPAIE

SEQ ID NO: 162251 - protein, 338 aa, unidentified
MGYFVGIDLHGDNNYIGILDEEDRRVFKRKNRNDVKEITRVLEPYQEEIEGIVVESTFNWYWIVDGLMDAGYTVHLANTAAMQQYEGLKYVDDTRDSFWLAHMLRLEILPEGYIYPKETRSVRDLLRKRMMLVQQRTAHILSMQTMVSRNKGVSISSDTIKTMSGEEVEGLFGDEHLVMSAQCDHEVVGVLSGQIDKIEKAVLKEVKLKKPYKKLLTVPGIGEILAMTIMLETGDIERFREVGKYSSYCRCVSAKKVSNGKNKGKGNRKNGNKYLAWAYVEAAHFHVRYCEEARKWYQRKASKSNAILATKALSNKLARACYYIIKEQVPYDKKRMFG

SEQ ID NO: 162252 - protein, 314 aa, unidentified
MAEDKVYVGIDVSKAWLDIALHPGQESWRIENTQKGIRTLIQHFQSLQIEQIVVEATGGYEAQLVDKLSLVALPVSRVNPLRVRKFAQGLNWLAKTDKIDAKVLALFGEKAQPRRVVLPSAAEKRLSALLKRRKQVLDMLTAEQNRMDLAEKDVQAYIEKIIQVLKKQLEDLDTQIHDLIDQTPELKQKQDLLQSVPGVGKVLSATLVSQVPELGCCDRKEIAALVGVAPFNHDSGKKRGKRMIRGGRAFIRNVLYMATLSATRFNPIIQAMYQRLLTAGKQKKVAIVACMRKLLTILNAIIRTQTAWQPAFTP

SEQ ID NO: 162253 - protein, 451 aa, unidentified
MSKSTKKKKSEGKNLNEFSIINPNAAGIDISSKDYVVSVPMDRDKKNIRTFGAFTCDLKEIARWLLACKIDTVAMESTGVYWKQLFMVLQEHGLEVFLVNSRHVKNVNGKKTDEQDAHWIMRLHTCGLLTNSFQPEERIRTLRELLRHRKSLNKSKTIAVNKMTKTLNTMNIKLNIVLSDLTSKSGQNIIAAINAGERRPKELVKLVHYKVKASREDILKALEGVWREECLFELKQATEYYYFLQNQTLECDKKIEEQLEIITAKYAEGDITRLKQETVKKYRRKNELNFNVNPYLKRILEINVLKIYGFSDETALTLFAEVGSDLSGFATANKFASWTGLAPNNKISGGKIISSRLPNKKHDVKKALIQAANSLYRSNNAMGDCYRRLKSRMGPKAAKCAMARKMAIIYYHMITKKEEFNIELFEKNQAAFKEKRIKFLENQLAQLNNVA

SEQ ID NO: 162254 - protein, 351 aa, unidentified
MSVTHYIGFDVHKKSVNYCVKDAAGTIAEEGKLRATREALRQWAGKRTAPWHGAMEATLFSGWIYDTLKPFAAELQMGHPAMMKAIGASKKKNDRIDARKTADLVRCNLLPVCYVAPVEMRELRRMLRYRNVVVAQAVRMKNKMSGLLMEVGAEYNKQQLHGKKYFAELLGSLEEVPESVKELLRLSRVALEMFETTQQQILDKLQKDLRLVERLEVLKSIRGVGDVTALSWALEICDPHRFASIGDAVSYCGLTSALVSSADKQQRGPISKQRNAHLQTVLIEAAKLAPRWNAQLAAVHEREMGRGHRNRATLAVARKLVAYLLAVDKSRKPFQVRTPSAAEHQALATAP

SEQ ID NO: 162255 - protein, 359 aa, unidentified
MLYVGCDAHKRYSIFAVMNNEGPVGVPVRVDHDRVLFRSYLGCLPAGTSVAIETIGSWYWMVDEIEQAGHNPILTHARKAKLMMGQINKTDKLDAKGLALLLRNGTLPEVWIPPGELRDQRELPRLRMALVGIRTRLKNRIHSSLAKYAIRIDEPSDLFGKAGREALAGRLGELPPQTRLSVESELVLLDQVEEQIELAEKQIKEVIAETPAMKLLMTMPGVGAILGVVIAMEIGDVERFAGAEKLASYAGTVPRVSSSGGKTHYGKSRPDVNRNLKWAFMEAANVISSHPRWWAGRHVGRLYQRIRERKGHGKAVGAVARHLSEAAYWILKKKEAYREPQSHIPDSSTREETRSFHES

SEQ ID NO: 162256 - protein, 394 aa, unidentified
MKLVGIDIGKNSHHFCVMDKETGELNVTPSSFSNNKEGFDFLINSLKPYSKKSILIGMEDTGHYHVALLKFLLSNGYTVALINPKTTDLTRKMEGGITKNDKLDTITICDVLDTPERKKQYRITKVDRFDLYEQRQLTRHHHNLKEELNIYCNRLQKSIDLVFPEFNTLFSSKYSIVYMNLLKTFGSAEAIASTDIRTIRKCFEIKGRGNRISLTPEKLKECAKNSIGISSEVETIQIKHLVSQITLIKEQIAEIDKKIEEFSITNNSPILSIPGISHFSGTSILAELGDIGNYSKPSQIIKFAGVAPYHYESSQYNAQHTAITKKGSKYLRKTLYQIILPVINNNPVFKKYYRLKISQGKGHRCAQGHCIRKLLRIIYHLLETGQSFDPALLR

SEQ ID NO: 162257 - protein, 404 aa, unidentified
MFYFGIDWSQDHHNLCILNEAGARVSQLQFKHSLAGFAQVEVERRKLEVPASECLVGIETTYNLVVDFLLEHDYPIYVVPPQATNGYRNRQRSSGAHDDESDATLLASIIRTDRASHRRLRPNLALTQQILAEVRLIEILRRSIQRQTNQLRAVLFRTYPQAVRLFSDLTNQIALEFLLAYPTAQDAQTLSREAFEAFLRQHGYTRSDLISLRYAHLVEPFPTANPAIVQAYQGQVRALAQVLLPQVRGRTQAIVRLGQLFEQHPDAFIFNSLPGTGLLLAPALLAKFGDDRDRFPTSVDVQALAGTCPVTERSGKRRLVLFRHGCDKEFRRITQQFARASVPQSGWAAAYWHEIRPHCHSDSHAYRILANRWLAIIWKMWQNRKPYDEVYHLHQRALRRKPRA

SEQ ID NO: 162258 - protein, 364 aa, unidentified
MNECTHIGLDVHKDTIAVAVLRPGITDCDERVIPNTPEAVRRLLSRYPDPSQLSTCYEAGPTGYDTHRLITSLGIACDVIAPSLIPKRSGVRVKTDRIDARNLARLHRAGELVSVRVPTPGEEAVRDLVRAREEIKNDRRIARQRIRSFLLRYGRSYPAPSSRWSTRFEVWMRALRFDEPMSQAAFEHLVGAYFMRDSQLAAIDRQIEQIASLEPLAADVACLRAFRGIDTLTAVTLVTETCDFRRFGSAGAYMAFTGLVPSEHSSGASRHQGSITKTGNQHIRRVLVEAAWAYRYAPAVRGKLKDRLEGQPPEVVAYSWAAQCRLHSTYRKLAAKKGANKAVVAVARELSGFVWGAMTGNMGA

SEQ ID NO: 162259 - protein, 343 aa, unidentified
MDHYVGIDVSLDQSSVCVVDATGRIVREAKVASEPEALIGFLGGLDLRLARIGLEAGPLSQWLQAALVKAGFEAVLLETRHVKAALSAMIVKTDRKDARGIAQLLRMGWFRPVHCKSAPAQEVRALLVARKQLQAKMRDVELSLRGLLRGFGLKVGEISKGQFAARVRTLVAGHTMLERIAEAMLQAREALRVEFGKLHRAMLAIVRGDEVCRRLMTVPGVGALVAVTFTSGVDAPERFARSEGVGAHFGLTPRKYQSGETDVTGAVSRVGDAMVRTALYEAAHILLTRAVRFSALKRWALEVAKRRGMKRAKVALARKLAVVLHRMWVDGTTFRWGREAAAA

SEQ ID NO: 162260 - protein, 351 aa, unidentified
MNKDNTKYIGIDLGDKTSLVHVRNGAGEFVEETRLPTTAIALEREFGQRDSVKIAIEVGGHSRWISRQLKSYGHEVIVANARKLRLIYNNPRKSDRVDAEYLAKLLRLEPSLLAPVTHRGEEAQKHLAIIRSRDSLVKARTGLVNHARGMVKSFGYRLPACSTDSFAKKVKSDIPGNLELALNPVLESIQAMTDCIKSLEKKIERLCKKEYPETINMRQIKGVGALTALAYVLTLEDPSRFNNSREVGAYLGLIPKRNQSGEVDPDGNITKTGDKYLRRLLVGSAQYMLGPFGQKSNLRSWGLRLTERGGKGAKNRAAVAVARKLAVLLHKLWISGEDYHPFHPKRAETLA

SEQ ID NO: 162261 - protein, 401 aa, unidentified
MRFAGIDVGAERHMVAMVGEQGEVLCRSSPFGEDASGYAHLFELLGPPGGCLLALEATGHYWRNLFVALLAKGYAVAVLNPLRTRRFAEEELQRTNTDAIDALGIARFAAQKRPPATQLPDIATEELRELSRLRDRLQEDFASRLRQLHRAVDLGFPEFTRHVRTLESQLANTILSRYPTAASFRGASVKKVGRIVYDGSHKIGEELARALIEAAANSVGSHHSEPYRLRIEYLCEDLRVLRRRLKDLARDIESKLDDHEVGKLLTTIDGVGPLTAACLIAELGDPARFRSAAAIASYVGVAPRLRQSGKKRFSGSPTIPFGNARLRKALWMVVLNAVRCNPWLRQYYGRLRAAGKPGKVAVIAAMRKLLAAVWSVAIHRRPFVPHLSPIPATADAVTNNV

SEQ ID NO: 162262 - protein, 312 aa, unidentified
MTQIICGVDVSSETLDARIGRDGAEARFPATPEGIEALAAFCREHQVALAVMEATGGYEKLAYSLLWSHGIPAAIVNPRNVRRFAEAMGFLEKTDRIDAGVIAWYADAKRIVAQEPPSEAQERLKALVTRLRQLTELRVGQSNQRRLVAEADINGMFSDMMVMIARQTRELEAKIAALIDADPLWQKLDECFRTIKGVADRTVSRLMAEMPEIGTLSNKAVAKLAGLAPLAKDSGKSQGKRVTRGGRANLRNILFVVVENIRRYNPVFAALHERLTKAGKAKKVIRVALARKLLVQLNAKARDARKEFAIAA

SEQ ID NO: 162263 - protein, 357 aa, unidentified
MSVYVGIDVHRKRSQVAVVSQDGEVLANRNVPNGVEPVLSVIGGLPPGTPAAFEAAFGWGWLVELLEDYGFDPHLVHPLQCKAIASARLKNDKVDAAILAQLLRADLLPEAWIAPPPVRQLRALLRHRAQLVRLRTLLRNRIHAVLADHGHGRPAGCWSGPGRAWLASLELPAVSREVIDDDLALIDALQQPIDRLDWEVHQRAKAEPAVKVLTRLPGVGPFTALVILAETGDVSRFGSARKLAAWAGLTPTVRGSDRTVRHGHISKQGSAWLRWILCEAAQTAKRHPDFAGSYQAIARRRGKKIATTAIARKLLTRAYHLLTDAQITAPLAAVPAPAGALTHREGPPSPGRARVSA

SEQ ID NO: 162264 - protein, 430 aa, unidentified
MTNRLQVGIDFGQKRADFCLLFPDGRPLEMHQSFANSCSGYSLAKHLLLDALDSHSFDGIDLSGEATGYYWLPFFLQLDADPDLADHDLNLFLLNPRWVKWFKKCFAQDHKCDEKDPFYIAERTRTRRPDVVWSPLDSLPLRFYTRLRFHLVQSLAREKCYFSSFLFLKASSYRCLKPFSDVFGVTSRIVLTQQPSLDELAELPVEDLAMHLHELSGHHLRDPFDNARKLKRVAQESFPLDETLALPVQRILDLTLEHIRFLEARVEQVNTWIATELESYPVIAQLATIPGIGPVFSSGIGAEIGDPQRFLQGSKWDQKRKRYRPRNLRDAEDAVAKIAGLWWPRSASGDFEAEDRRMAKTGNRYLRYYLIQAADHMRKRIPEYTAYYARKFKESAKHHHKRAMVMTARKSIGLVVGLLHRNEPYRSKGP

SEQ ID NO: 162265 - protein, 362 aa, unidentified
MHKTAKSSKLQRSNSSLQLGKKERCHVGVDVHKQTYHVAVWSEERGLVATWVQPANAALLVEKLRPYRKQINEIVYEAGPTGFSLARILREAGFSAEVIAPSKMLVQPGPEAKSDRLDCRRLAMFSAKKLLRPVRVPTKQEEADRQVIRLREQFVRKSRSVQQQIKSFLLQHGIADPVGMKTWSVAAIIALRGLDLCRELRFCLDVLLDEYKHVKAELTRINKEVKQLARSERHEASVNVLKTVPGVGLITTMTFRTELLEPERFNDSRQVARMIGLAPHVSQSGETRREGRLLKSGNARLRTVLVEAAWRWVASDLSAAKRYHRLVANTGNGKKAIVGMARRLGILLWRLSVRQEPYKEGT

SEQ ID NO: 162266 - protein, 337 aa, unidentified
MKRYLGVDLHRTQFVVCTRWENEEQEIRQWRIAELAKFVGQLQPEDQIAVEAMGTTARFYDAVVGRVARVVVVNPHQFKVISESVKKTDRYDAAALALYLEKNLLPEVRMKPKQNRELMHLAETRDLLVKQRSALKGKINNLLAMQGIELKREALSSKIALERVLASPVSGMVQLELRVLVGQIRSLSESIAELDEQLEEEGQQLPGYENLTSIKGIGSLSATVLLTVIGKISDFADENKLAAYLGLVPKIQNSNESERSGRITKQGNKLARTALVQCGLVAKRYSPYLQRFYERIKQRRGGGKAKIALARKLVKIVYDTLKNQWVFEDFPSFTLAA

SEQ ID NO: 162267 - protein, 343 aa, unidentified
MQVSTIGVDLAKNVFQVHGVDSAGKVVIIRQLRRKQVIDFFSKIPPCLVGMEACGTAHHWAREVSKLGHTVRLMPPSYVKGYVKRSKNDAADAAAICEAVTRPSMRFVPIKSADQQALLMLHRTRDLLIRQRTQLTNALRAHLAEFGLVAETGREGLAQLAAIITDESNREALPSAMKQALQAIVDQLAALELQIGTLDRAIHAHHRANDMSCRLETVPGIGVIGATAIASTVTDPSDFKSGRDFAAWIGLVPRQHSTGGKERLGGISKQGDRYLRRLLVIGATAVVRHARQCPQKHPWVMKLLGKKPAKLVAVAVANKMARIAWAIMAKGGYYRAPELAAAA

SEQ ID NO: 162268 - protein, 347 aa, unidentified
MAVTIVETRAITGGVDTHADMHVAAALDPIGGLLGVREFPVTPAGYAQLLAWLGGFGNVCLVGIEGTGSYGAGLSRHVTAAGVRVVEVDRSDRQDRRRAGKSDPLDAVSAARAAQSGRARGAPKGRDGAVEAIRALMVAKRSARSERIQTINQARSLIFTGPDDLRTRFTGHTADALVADLAALRPRPGSTVGYATRLALRELGRRTEFLDAQMERLDELIVPLVTAHAPGLLTLYGVGPDTAALLLIAAGDHPERLRSEATWAHLCAAAPIPASSGKVTRHRLNPGGDRQANHALWRIVITRMSSHPPTRAYAERRSNEGLSKKEIIRCLKRYVAREVYPCLRIAD

SEQ ID NO: 162269 - protein, 343 aa, unidentified
MKYMGIDYHKQHFVATTMNEKGKVLSTEKVSTDRDSIRHYFKKANAKGDVKAVMEACYGWEYFYDEVEDLVEELIMAHPLKTRLIAEARIKTDTIDSQTLAHLLRADLIPKAYAPAAETRDKKNLLRYRSSLTAMKVRIKNMIHAVLARNHIEDKDFKALSDKFGQKGRSYLRAVSLKGTDTMILNQYLDLLGETEGKIRAAETQIRLVCRQDKTCQLLKTVPGIGDILAVTLRYEIDDIERFVSAGKLCSYAGLVPSTYSSGNRTYQGKITKQGDKWLRWAMIEAAQRAPLNDAWLESFYMRIAKKGRKIARVAVARKLLEIIYRIWKEQKPYYHRSVPAAL

SEQ ID NO: 162270 - protein, 319 aa, unidentified
MAEEVYVGIDVSKAELVVAARPGGERVTLTNDRAGIKRLVGRLGEIKPRLVVVEATGGLQRQVVAALWTAGIAVAAVNPSWVRNFAKGRGLRAKTDRKDAELLALYAERERPQVRPPADAETQALQELVMRREQLVEMLVAEEHRLTHALGPVRKELRHHISYLEGRLKQIAEDIDKTVRRSAGWRRKSEIVRSVPGFGKVFCSMVLAKVPELGALNRKQIGALVGVAPVPDDSGTRHGRRAIAGGRFEVRNKLYMCALVASRANPVLKEFYQRLVARGKPKKLALVAVMRKLIVTLNAMLKTNSMWRPPCLAVSVREN

SEQ ID NO: 162271 - protein, 457 aa, unidentified
MNPKRSKPKNDRTMPMIHPNAAAIDIGATMHTAAVRADRMPEPIRSFGTFTTDLHRLVDWFTECGVETVVMESTSVYWIPIFELLDARGFAVFVVNARDAKHVPGRKTDVSDAQWLQRLHSYGLLRASFRPKGQIAELRAYVRQRERLLEYAASHIQHMQKALTEMNLQLHHVVADVTGATGLRIIRAILAGERDSKVLACLRDYRCHSSAEAIEKALTGNYRAEHLFALEQALALYNVYQDKASACDARIEAVLKELSISRGRDACPLPSPRRRLHGKANGPDFDVRAALFKLLGKDLTQIDGLGSYLSLRLIAECGDDLSAWPSAKHFTSWLCLAPSNKISGGKVLSSRTRRSGSRASALLRLAAVTVGRTDTALGAFYRRLSARIGKAKAITATARKIAVLFYSAVRHGMEYVDPGSSYYETRYRTRVVENLHRRAKAFGFVLLPLESKAGAVS

SEQ ID NO: 162272 - protein, 411 aa, unidentified
MSESDNADAGGYAVFCGVDVGKSDHHACALAPSGERLHDRPLPNDEASLAEVLSTLQARGRVLVIVDQPASIGALVIAVARSLRIDVAYLPGLAMRRIADLHPGEGKTDARDAYVIADAARTMPHTLRRVGTDDETLAELGVLAGYDDDLAAESTRLTNRLRDALLHVHPALERLLGKHLDRGGVLALLAAASTPAALRELGVEAMADIMRPRSPRLAKTLPAKILTALDGQTVVIPGTPAFGRVITGVAAALRNVHLERASLADDLEARLEAHPLAEVLTSMPGVGFRTAIKILTIVGDGSAFPTAGHLAAYAGLAPVTRRSGSSIKGETRSQRGHHALKSALFLSAFASLADPTSRAYYDRKRASGKRHNAALICLARRRVDVIHAMLRDRTPYQQPTLDEPTPTTQAA

SEQ ID NO: 162273 - protein, 414 aa, unidentified
MDVIVERCAALDVHKKTVMACVRAPDGAGGRRQELREFRTFTRDLRRLREWLVAEDVTQVAMEATGVFWKPVWYVLEGASFELLLANARHVKNLPGRKTDASDAAWLAQLLECGLLRGSFVPPRDIARLRDLTRYRTTVVQQRAREAQRLQKLLEDAGIKLDSVATDVQGVSCRRMIEALIAGERDPEVLAELALTRMRPKIPELKEALVGHFDEHHALLARMHLDHMDELTRIEERIDGEVDRLMAPFDEAATRLLTIPGIGKRVAEVIVAEIGVDMSRFPTAAHLASWAGLCPGNHESAGKRRSGKARKGNAALRSGLCEAAWAAAHTKDGYLPAQYRRLLRRFGKKNENKAVFALAHTLIVIIWHVLTHGCDYEDLGGDYLERRNDANARRRYLVRQLEALGHQVTLEPAA

SEQ ID NO: 162274 - protein, 476 aa, unidentified
MSKSNQQSSAADKSGPKVAHSKRAKQQGDAEYPVFEPNAAGIDIGAREIYVAVPTERDEHPVRKCETFTGDLHQMAEWLAHCGITTAAMESTGVYWIPVYDVLEQHGIQPCLVNPRNMKNVPGKRTDFHECQWIQQLHSMGLLHSAFRPDGEVCAVRSLMRHRNDLVEMASQHVQHMQKALTQMNVQFQHVISDITGLTGLAILDAIVAGERDPAVLAKLRDPRIKASEETIRKSLEGNWRAEHILALKQRLSLYRSYRDQINDCDKEIEKLVSAFGPRVDPEQRPLPEDRKKKQRMRKKKSGSPDFDMRTEAYKLFGVDLTQIPGLMTLVLMLFSEVGRDMSRWPTAAHFVSWLGLCPDNDISGGKVLWRGARRTKNRAGTLFRLAAHSLHRDPSPMGDYLRRMKAKLGPAAATTATAHKIAIIFYTMVSKQLEYDASLWAQRDALREKRLETRLKKQAAQRGYKLVPMDEKPAA

SEQ ID NO: 162275 - protein, 412 aa, unidentified
MDVVHERCAGIDIGKADVKVCVRVPGPGKRRRKEIRTFSTMTRDLLAMRDWLLAEQVTVVGMEATGSYWKPVFYLLENDIECWLLNARHMKNVPGRKTDVADSEWICKMVEHGLVRPSFVPPPAIRQLRDLTRYRTEVIRERTREAQRLEKLLEDSGIKLSAVVSDLLGKSARAMLEALIAGERNPTVLAEMALASMRTKRQILAQALTGQFTDHHAFLARTMLDRIDAVRATEARLSEEITRQLAPFRRQIELLTTIPGVSTRSAEMILAEIGADMARFPSAAHLASWAGMCPGNHESAGKHTSGKSRPGDPWLKNALGLAATAAARSKDTYLASRYKRIAIRRGKKRALVAVGHTILTSIWHMLTNDAEYTDLGADYFLQRTGRTRQTRRLVSQLNMLGYQVSLQSAESG

SEQ ID NO: 162276 - protein, 448 aa, unidentified
MVETVESTRMKVIGKPYEGKPHVRFDEGAEEQSSALLYPHIGFEVSNMPTLYVGIDVSKDKFDTCVKDEFGNIVMPARSYENNLDGMNKLVSDLRKIPAKPSMFLIGLEATGIYHRNLMFFLLERDLHVKEFNPLELSGLKNSRIRKTKTDKIDSEIIADGIKLYSMTNTSRCINGKDHSQMKEFGIIYHRLTENIILIKTRLRSNLSQLCPGYDNNFSNIMSKSSQQILKKAMKITNIFDISDDEMKAILKKNYLSLEKAESLTKSIKKSFDDSVCPEHLMEPLIWDVKFLLEQYETVLKQRDRVTVRIDKLMKMLNPKILTIPGIGNVTGCVILGCLGNIQRFKDGNSLTAYAGLDPSVYQSGKTVSKTGHITRRGNKYLRRYLDNASLVAIRYNPVIKDMYHRLRSKGKSHKVANIACARKLLMIVYSVEKNQKNFVVPSYLQKQ

SEQ ID NO: 162277 - protein, 336 aa, unidentified
MTIIRIGLDTSKHVFQIHGVDENEQPVLRRQVRRSGVAKFFAKLPATQIGIEACGASHHWARLLRGLGHEVMLIPPQYIKPYVKRGKNDAIDAEAICEAMSRPGMRFVAVKSAEQQAALTMLGVRDLLVKQRTMLINAIRGHAAEFGVTAPKGPQQICELLRRLVVEGSVPALAREMIGVLAGQLEALNTKLREIEARLMAWHRQDQTSQCLATIPGIGPIGGVSFALKVPDPKGFRSARHFAAWLGITPREHSTGGRQRLGKISRAGDEGLRRLLVLGAMAVIQQAKKGRAAPWLLGLLARKPKKLVAVALANKMARIVWAMMVSGETYRRQTAV

SEQ ID NO: 162278 - protein, 325 aa, unidentified
MSPLLIRILIGVDVCKDFLDAYARPAGIHRRFDNNPDGITQLVAWVRSLAPERVVFESTGPYQKAAVGALLAEGLPAVVVNARQVRDFAKGIGQLAKTDRIDATILAHFGEVVTTVVRPLPPPQVLEFRDLCDRRGQLVRMRACEKNHRHAAQGSSAKVVKNIDKHIAFLDKQIEELEERMDGLVTESETFKAKDEILQSIVGIGPQVSRTLLVHLPELGTASRQSIAALVGLAPFADDSGTCKHIRHIRGGRSKVRIALYQAAVAAIRYCATMKAFYAGLKARGKASKVALIAVARKLLVLANALLRDGKTYQARSNSVCPENA

SEQ ID NO: 162279 - protein, 338 aa, unidentified
MKNVKYFIGLDVHKEKTTYVVKDRIGNILLEGETATLYTELQERLKPYLNTSSIGLEASTSYYTLYQQFLKNGYNIKVANTIQMRQLIAKNDKLDAKRLSEMLRLETFPCSYIPDDKIQRLRSLAQLRHSLMEEKVRCNNRIQAFLDKNGVIMPSQEAFGKKWRQALMRHMGAGDVSLEMRYEYDHFEFLEKKNKQLDLEMQGYTHKHWPFEYEIIQSITGFGPVLSCYIIAHINPINRFISNRKLRRYAGVVPTYKESGNKKSKGHITKISSRKLLRWALIQAANAAGRTDTKLGKYYRMKKKQKKKASIAKVAVASSMIDIIYKVLTTKTPYNAKC

SEQ ID NO: 162280 - protein, 484 aa, unidentified
MSGILPPRAAADTEGQAPRYIGLDLAKKETQLALLNAAGQQIHSRRFASTRENFLQLASELGPLDCVALEVTTNSFTIARLLWPSGARVSLSDPMRTRIIAESKFKNDKIDARKLAELDRVDYLPKVWLPDPDTETLRHLLSQRQSLVDRRTEQKNRVHALLHRYLLRFEGTDLYGAAGRRFLDALLADATLAPYDAFELHSSLKEIDRLEGQLTEFEQLLADFIVTRPLLLAQLDHLLSVTGVSLVVGAGLLAAIGEVTRFAKPKRLASYFGLVPSTYQSGDSRAFHGRITKRGRAQARWLVIEAAEHLRKSPGPLRSFYQRLAKKRGHNIAVVAVARKLTELCRQLLTKTEDFIYALPRLTDEKRARVRFLARQWQAQLSGQPVAKAKGGSSVVSPLYATGLSGRSLKTRIARQAASQAETQYEKLLATRATAARATAAHESAALPANSSSFNPLRPTLPDWQRVLQQVAAQLSREPVKKGG

SEQ ID NO: 162281 - protein, 369 aa, unidentified
MLYLAIDQHAKQITVCVRNEDGDTVLRRQVSTRPEKIEAFFQQLTEMDTQFMAILEVCGFNDWLIEVLRKWNCREIVLIHPEKPSKKKTDRRDAHKLADLLWLNRERLAAGQLVHGLRRVYLVTQKEREDRQLTALRKTLGQRRTRTLNKIHRIINRHNLIWDYPTKSFQTQAGRRWLEQLKLPAIDRLEMEMLLEEWKTWDEQIAKVDEKIAQRASQVEPGKIMSPTQILMTAPGVSHYSGLTLASRIGPIQRFPRPRSLANYFGLTPGCHNSGNAQDRLGSITKEGSKIARFILGQLVLHFLKHDSKMRAWYRRIKLRRGSKIARVAVMRRMTTIFWHMLTHEEAYSRGGPPPRLRREPPSESQEAA

SEQ ID NO: 162282 - protein, 349 aa, unidentified
MSQNLNSAVAVIGIDIGKNSFHVVGLDDRGAIVLRQKWSRGQIEARLANLPPCLIGMEACVGAHHLSRKLKALGHDARLMPAKYVRPYSKGQKNDFRDAEAIAEAVQRPTMKFVATKTVEQLDLQALHRVRERLVSQRTGNINQIRAFLLERGVAIRQGLRFLRAELPRILATSPDVLSARMVRVIRDLAQDWRRLDERIDQLSSEIAVLARQDAGCERLMSVPGIGPIISSAMVAAIGTGEAFSKGRDFAAWLGLIPKQISTGDRTILGKISKRGNRYLRVLFVQAAWVVLIKPMSWERHGLRSWIEAAKKRLHRNVLAIALANKLARIAWGVLAGGRIFEASKLQAA

SEQ ID NO: 162283 - protein, 315 aa, unidentified
MSHTIFVGIDVAKAHLDVAVLPEKRTCQVVNDDTGFIELIAWLGQPEDTLVVLEATGGYQMAAAAALAVAGFGVAVVNPRQVREHAKSRGQLAKTDKLDAMILADFAQRNQPEVRPLPNEESRLLQALVARRRQLRDMLTMETNRFQQAPKALAKSISRHIQWLEKELEKANDDIDKQIRNSSLWREKDNLLQSVPGVGKVTSHTLIAELPELGKLNNKEIAKLAGVAPLNRDSGKYSGHRIVWGGRAAVRAALYMAVISATRYNPIIAAFYKRLKARGKASKVALVACMRKLLIILNTMLKEQQYWQPRLPKTA

SEQ ID NO: 162284 - protein, 405 aa, unidentified
MDVHRMEHVVTILLEQEDGTVLNETRKFGGFKRDMRALVDWLRSHRIELVAMESTGIYWKSVFSHLEAAGIEALVVNAFHVKNVPGRKTDVSDSEWLAQLARFGLLRGSFIPPKDLRELRVVSRYRRKLVQSLTGEKNRLHKVLDDAGIKLGGVVSDIDGVCARKMVEGLIAGKTPAELSALGHGKLKSSDELLQASMDGDLSPRHRLVLSTALNHLRYLEQQVAQLDRYLIEAMKPYAWAWRLLQTIPGIDEMSAAMILIEIGVDMQRFGSASRLASWTALCPGNHETAGKRKSGKIRHGNPIVRYLLCEAANAARRTKTVFQAKYTSLVIRRGYKKTVIALAHKLIRTIYFVLTRRKPYHDTTVDYEAAIVTRNAPRWIKALKKYGYWPKAAAANPATATAMV

SEQ ID NO: 162285 - protein, 371 aa, unidentified
MDHVAIDLGGRESQICVRSGDGVVLEERRLPTRKLGEYLAKRASCRVIVETCAEAFAVADQALAAGHEVRVVPATLARALGVGANKQKTDRRDAQVLSEVSSRVNLQSVHIPSREARDAKTVCGMREALVGARTQLINTVRGWVRGLVGMQIKKGSSATFGRRVREAASAAKVTLPACVERQLRSIEQLNCEVAQADEEVEALGRNEPRCQRLQTVPGVGPVTSVRFVAALDQLGRFPSAHKVEAYLGLVPGQKSSSDRVRHTSITKAGPSAVRRVLVQACWSMRNSRPNDPLVRWSLEVEKRRGKGAAVVAMARKLAGILFAMLRDETTYQPDRTSTLGSAVLEHEAQQARDKREAALAMLRSKGTVRTA

SEQ ID NO: 162286 - protein, 352 aa, unidentified
MDEKYVAMDVHKASVVIGVRNAAGKMISRATVETKAQTLKDYVRGLSGTIHLTFEEGTQSAWLYDLLRPLVAECIVCDPRRNKLLEDGNKSDEIDVDKLSELLYLGRLRPVYHGNHGTRTLKELAHNYEALVKDQTRVKNRLKAIFRGRGISYEGEGIYDCQQTEPWLAKLSERGVRERARQLYQQLDQLAGWVATARRQMLAESRRHQAKKILQLIPTLGEISVAELIATVDTPHRFRSKRQFWTYCGLAVVRHTSADYHFEQGELRRRAKAGPTRGLNRNYNRRLKRIFKSAALTGSTKGPFKSYYQGLLGRGLSSELAQVTLARKIAAITLTLWKKGERFDPEKLVKPD

SEQ ID NO: 162287 - protein, 336 aa, unidentified
MNDTACVVGIDVAKRKFDIALLSNNKLKIKVFDNTPVGHQAFTVWLHERGAPPEQTHLCMEATGPYSEILAINLVEAGWSLSVVNPARIKGFAQGELARNKTDSADAALLARFCAAMRPSLWTPPPVEWRELRGWVDRLQALKDMHQQESNRMEAHQASGQTHLIQDVQIHLDWLNKKIEQLTRDIHDHIDRYPDLKRDAALLNSIPGIGDTTIAKVLAYAGDVRRFANAKALAAFIGVTPRQRLSGSSVKGRTMMSRTGHSELRRALYMPGLVARRHNPTLKIFSDRLSATGLAPKAVVGAVMRKLAHLIYGVIKSGQPFDTNFHHSALAIQDGI

SEQ ID NO: 162288 - protein, 410 aa, unidentified
MEVLYPHCAGLDVHKDTVVACVRHMANGSVRREVRSFKTTTKELLALSDWLVGEGCTHVAMEATGVYWKPVWHVLSDGDFTLVLANAAHVKNVPGRKTDVNDATWLADLLAHGLIRSSFVPDEQTQEMRTLLRTRKQLVRECSRHVQRLQKTLEDANIKLDSVISDIVGLSGRRMIEALIAGETEPGALAAMAHRRIKATPDQLEAALRGRVTRHHRFLLQLHLQQIDAVNAAIDQIDQEVDACVEPFRATVRLLTTIPGIDELSACVILAEIGRDMSRFPTAGHLISWAGLCPKNDESAGKRRSTRMRKGAPWLKTTLVQCAAAAARKKASYLQAQFHRLRARRGAKKALGALAASILTSVYHMLISGELYRDLGPHHFDHRAKAVNTRRLVMRLQNLGYAVQITPLAA

SEQ ID NO: 162289 - protein, 461 aa, unidentified
MKAFLGTDVSKGYADFVLLNHKGQKLEDTIQLDDTHAGHNLLLGWINELCHQHGIEELYCGLESTGGLENNWLATLKSKPANVPINVARLNPSVVVNASKAELRSNVTDSESAYNIASYLYRFTNKVDFNQQDNLYAGFRSLHNQILMQLKQKTQLSNELKQLIYSAFPELQRYCNKGMPGWVLKLLSIYPTAANLAKAKVDRLVKIKSITKEKATKLIDSAKNSVASRSGETEGYLIKTLVEEIQFKDVKIQQLKAYLEEHCQGEETKLLTTIKGIGAYSAAALMAQIEEVHRFESPQKLASYFGLHPVIRQSGDHKGVSRMSKRGRPGVRTILYMCACSAVMHDMHMKSIYHRHRENGKTHRQAIGVIMHKLIRVVWGVLTKKQPYNPETDKQNQQKRQETKEQKDRKSTERVRRLQSFDQNAPISRLASKKRKVHSLSQSGMAEKARDPEIEPIKTNI

SEQ ID NO: 162290 - protein, 338 aa, unidentified
MNIVFLGIDLAKNVFQLCGLNQAGKPVYTKRTGRKELLQTLANIPACLIGIEASTGAFYWQREFEKLGHKVKVISPQYVKPFVRGQKNDGNDAQAIAVALMQPTMQFVPPKNPEQQDIQALHRARQRIVNHRTATVCQIRGLLLDRGIPIGSAVSRVRRAIPLILEDAENGLSSRMRRTIAELYELFNDLGRRIHFFDKEIETVFRQSEACQRIARVKGIGPKTATAVVAAIGKGTEFKNGRHFAAWLGLVPRQHSSGDRQVLMNMTKKGDKHLRTLFIHGARAVVRVATNNNDGHMNQWVNQLKERRGFNKTTVAVANKNARVIWSMLRNETEYQVV

SEQ ID NO: 162291 - protein, 340 aa, unidentified
MPGPRARIRKVGRSGVLNPSRKEHVNSTKEIFVGIDVSKARLDIHVLPSGDPWTTENQTDAITTLVSRLRSLQPTLIVLEATGGLERRVLAALLTANLPAVAMNPRQVRDFAKGMGYLAKTDAIDARVLALFAEKARPEVRPLPDAQTQELEALLVRRRQVVDMLTAEKNRLTSAPPSKRVIRAIRKTISCLESQLEDFDKNIDDAIRESPAWREKDEVLKSVPGVGRVLSRTLLGHVPELGTISKKRIGTLIGVAPLNCDSGKFRGQRHCWGGRTEVRNVLYMATLSAIRRNPVIKAFYDRISSGKLRKVAIVACMHKLLTILNAMVRSNSRWSPALPA

SEQ ID NO: 162292 - protein, 367 aa, unidentified
MSHIIYCGVDFHARQQTICCLKTETGELTSHELKHDHKEALRQFYSELGGPVIVGLEASGYTPWFEQLLEELGHQVWLGDATEIRRRARRRQKNDRRDAELILELLCHDEFPRLHRPSPESREILRMLRYRHKLVKLRTIVKNSLQALSIQAGLSLQARLFTRQGTQQLEALTLSPVMRHQRQQWLELLQELNQRITETEGWLKQQALSDPRIQLLRTHPGLGLLSSLGIVHTLIPVSRFPNTRKVAAYGGFDPMERSSADKRRYLGISKAGSRLLRFLLIEATQTAVRTDPDLQRFYHRLVQRRGKPKAKVAVARKLLIRSFIMLRDEINYAEFQQRAIAARLAREFARPNVPVPLIGQPASPAKG

SEQ ID NO: 162293 - protein, 356 aa, unidentified
MTVTIVEEARSVTEVARPITGGVDTHADTHVAAALDPVGGLLGVREFPATAAGYAGLLDWLGGFGTVCLVGIEGTGSYGAGLARYVTAAGVRVVEVDRSDRQDRRRQGKSDPLDAVSAARAAQSGRARGAPKGRDGAVEAIRTLMVARRSAAGERTRTINQARALVLTGPDDLRTRFARHTPAALITGLAALRPRTGDVTGHATRIALRELGRRARFLDGQLERLDELIVPLVTARAPGLLAVYGVGPRTAALLLIAAGDHPGRLRSEAAWAHLCGAAPIPASSGKVTRHRLNPGGDRQANHALWRIVFTRLGSDPATRAYAERRTAEGKSKAEIIRCLKRYVAREVYPHLRPAGG

SEQ ID NO: 162294 - protein, 343 aa, unidentified
MKHYGGIDVSLECSSVCVVNASGKVVREGKVDSDPEALIAWFRSLGVALERIGLEAGPLSQWLYAEMKAAGLAVELLETRHVRNAFKTMPVKTDRKDARGIAQLVRVGWFRPVHCKSMEAQETRAMLMARKLLQTKLHDVEMSLRGILRGFGLKVGHVTKRRFEARIKELVSGHPSLERVAEALLAARAVLLCEFNKFEKQVLSMARADANARLLMSAPGVGPQVSLTYISGIDDPTRFKSSKSVGPHFGITPKKYQSGETDVTGRISKRGDASVRTALYQAAHIILTKPVKGGALKSWAARIAKRAGMQKAKVALARKLAVILHRMLVDGKPFDFAAAAARQ

SEQ ID NO: 162295 - protein, 400 aa, unidentified
MSTASNRVVIGMDPHKRSVTIEMMTPDEIVVGGGRFDTNEAGFAAMMRYVSTPRPGREDRVWAVEGCNGIGHHVAMRLLAVGEEVVDVPPKFSARVRMFATGQGRKTDVTDAHSVALVGTRMAGLRPVVNDEQLAVLRVLVDRRRSLGEDHTRMVSQLHAHLLELIPGGAKKDLSAAQAKTLLAKVRPRDIAGKTRRRVAAELIGDLERIYTRTKAADKELRELVAATGTSLLGLNGIGPTGAARLLVEVGDITRFPDRGHFASWNGTAPIDASSGDHVRHRLSRAGNRQINRTLHIMATVQLRNPTEGRAYYDRRKADGKSSMEAMRCLKRRLSDIVYRTMLNDSVVHAIADGKTGPGGQRGNDSDSSAAGSHPHTGSSDKSLPGPAKHDPRTRLPDAS

SEQ ID NO: 162296 - protein, 458 aa, unidentified
MPRITSEIVGFEPFFPGNFSHVSLSALIVHFYQYSIMPRKIQNHKNKPKANTVLVDHRNIVGIDIAKRKHAATAITPKGGVITSLAMFENNKSGVDQLERQVLMPAINRSKPMVVMEATGMYWNALHDELLRRGYDCVVLNPIQTSARSAKNIRRTKTDRIDSETIARTVLAGDAQATLIPDEAMYELRLLVRHRWRLIRSQNTILLYAISLVDRVFPEFEGVFSKPFLSSVRTLIREIGLTPSSLIARKKKVRAILEKASRKRLTPETIDDLLARAKNSIGTRQGEKVVNDQLRMIVEYLDFMDSQVNQINEELRLRMELIGSPVMSLGIGPEIAATILAESGGIERFAGPREYAAFCGLDPSVWDSGDSIHGVSRISKRGSPLLRWAMYMTAIAVHKKHRDFTRIYERHTKQQPKGKRQKGHRYALIAVAHKAARVIWRLMKDNRPFKKTPPKREI

SEQ ID NO: 162297 - protein, 338 aa, unidentified
MKAYAGIDLHSSNNYLGIIDDNDKRLYGRRMPNDLNHVLMALEPFRSQLEGIVIESTYNWYWLVDGLHDHGYKVHLANPSAIRQYEGLKHTDDKWDSFWLAHMRRLGILPEGYIYPKKQRPIRDLMRRRLLFVRQQTAHILSLQSMITRNLGYKMSNNEIKKLSVKDAENLFDSPHLVLMARNSLSAIDFLKTIIKSIEKEVTSQVKLRKEFVMLLTIPGIGPILALTIMLEVGDIGRFAKVGDYSSYSRCVESKRLSNGKKKGENNKKNGNKYLAWAYVEAANFAKRYCCGAQSFYQRKKAKTNNILAIKALSNKICRASYYIMRDQVAFDEKKLFG

SEQ ID NO: 162298 - protein, 369 aa, unidentified
MKHSIIFVGLDVHKDSITIALADGGRNGEIRSHGTISGDMASLDKAIRKFRRSSVELRFVYEAGPCGYEIYRHLTAQGFHCEVIAPSMTPKRSGDRIKTDRRDAITLARLYRAGELTPVYVPREDDEAMRDLVRGRDDAIKATRHARQRLSAFVLRHSFRYSEGTSWRVAHLRWLADIKMPHPAQQITLQEYIHSVEECTERIDRLTEQILKLLPTWRMAPVVTAFQSLRGVAPIIATVMVVEIGDLRRFENPRQLMAYLGLVPSENSSGQTTKRGGITKTGNGHARRALIEAAQAYSFPARVSRALLKRQEGLSREVKEISWKGQVRLCGRFRKLIARGKNRNRVVTAIARELAGFMWAIAKVVPMPA

SEQ ID NO: 162299 - protein, 316 aa, unidentified
MNTESQISINVGVDVGKSKLDIVLHPLDLHFQIPNDEESILKVVHVLKKRNIERIVVEATGRHEHAFVFACDQANLPIVVVNPISIRRYAQAIGVLAKTDKIDASVIARFAATIQPEIKPIPDKQSRLIKDLLIRRSQLLEMQTMEKNRLQILPKALHRSIKTLLRSLETQIKTITKQIDEAVMQVKHWRTKTEILTSVPGVGKVLAYTLLSELPELGKLNRKEIAALVGVAPMNRESGTWNGKRRIRGGRHRIRTVMFMAMLSSIQCNPVFKRFYEHLKAQGKLPKVAIIACMRKLIVVLNTMLKNETRWGEKMA

SEQ ID NO: 162300 - protein, 403 aa, unidentified
MVFVGIDWAEAHHDICVVDEEGHVLAKRRVPEGLDGVGKLHALVAEHAEDPASVVVGIETDRGLLVGSLVAAGYQVYAINPFASSRYRDRHATSGAKSDSGDARVLADLVRTDRHKHRSLAGDSNLAEAVQVLARAHQGLVWTRQRQANQLRNALREFYPGALAAFDDLDAADAVAILERAPTPSLGRALSQAKIISALRQGGRERNLEAKAAQIQAQLRLPQLEAPALLAQAYGHSVSATVAVIKQLNLQIAALEQELAASFELHPDAEIYLSLPGLGLVLGARAMAEFGDDRTRFLNPKARKSYAGTAPITKASGTRKVVLARVARNRRLADACYQWAFSALTRSEGARHRYDVLRARGQTHHQALRALANRLVGILHGCLTKRQAYSEQLAWSTHVEVAA

SEQ ID NO: 162301 - protein, 320 aa, unidentified
MSVSSVVVGIDVAKAHVDVCVLGAKSQVQRLANDAEGHSALAAALQPLGVGLVVMEATGGYEAALACALQAAGLPVAVVNPRQARDFAKSMGRLAKTDAVDARMLAELAAVLVRREDLQRLLRPLADERQQWLAALVTRRRQLLSMLHSERQRLEITPKKLHASIEAIAAAIKAQLDEIETQMLTHVREHFGDLDRLLQSAAGIGPVASATMMAELPELGRLNRRQIAALVGVAPMANDSGSSKGRRRVQGGRFDVRRVLYMATLTAVRYNPAIKAFYERLKAAGKLPKVALVACMRKLLTILNAMVRTGKPWDKSLHGA

SEQ ID NO: 162302 - protein, 433 aa, unidentified
MIKINYMSTLFVGIDVSSKSNVVYAMDFDENKYIDASFGNNQPGADELAGKIAACIQKHPHLNTIIVALESTSVYSIHIANFLSSCELLMPYKPYVYCLNPKMTANYRKSYVGIDKTDHMDAFLISDFARVGRTKKCEPWRGSQYLALKRLTRHRLHLAECITREKTYMVSNLYLKFSELQLLDNDSQPFSNIYGATSSAVLTEFMSLQEIIDSPEEELLQFLASKSRNRIADISRTSELLKKAARDSYRLDKCMYEPLNVSLASSFNCIQTYQKEIKLIDQAIEKCINGMNPNAFIILKSIPGIGSVWAAGILSEIGDITAFHSSDALAKYAGLTWLKNDSGDFVSEDNRVSKAGNTYLRYYFGEAANSVRRYVPEYAEFYSRKYAEVTKHQHKRALALTSRKFVRLVFGLLVKNQLYTGEKLDAELNTESE

SEQ ID NO: 162303 - protein, 393 aa, unidentified
MICVGIDVAKDKHDCFILSSEGEALTDVFTIQNNAEGFDRLLQTIRRCTRPEDKIKVGLEATGHYSYNILGFLLDKGLPTYVINPLHTNLYRKSLSLRKTKTDRVDARTIAAMLMSDVDLKSYTDTAYHNEELKSLTRYRFDKVRERAKLKQSVFRLVTILFPELEKLVPTLHMASVYALLSEFPGAKQVAEAHLTHLKAVLYGASKGRYGRDMATTLRDAARCSVGSVMPAKSLELQHTIRLIRELDAEIEDIETAIQSMMDEIQSPITTIPGIGVRMGAMILAEIGDFSRFDSPDKILAYAGMSPSTYQSGHLSLSGAYSHMEKRGSRYLRYALYNATKYVCLWNPAFAAYLAKKRGEGKHYNVAISHAAKKLVRLIYAMEKSKQSYRNAA

SEQ ID NO: 162304 - protein, 428 aa, unidentified
MSITQNSKIRRITDSTLVVGADIAKKVHVARASNVRGVELGKPLTFDNTRHGFEKLLTWIRSLMLDHSCDNVIFGVEPTGHYWMNLAQFLRREGIQVVLVNPLHVKKTKELEDNSPTKNDRKDARVISLLVKDGRYSVPHIPEDIYADLRVGMNERDRLSEDLKRVQARIHNWLDRFFPEFTTVFKDWEGKAALVCLHEFPCPVDVQEKTASEIVQAWRKNGILRGVGLSKANLLKEMAEQSIGLTEGLQMGHQELMILLRQYDLYQEQLELLMSEVERLVSQIPGTQQMLSVPGVGLVTVAGFLAEVGDLSGYDNAKQIQKLAGLNLKENSSGKHKGRTTISKRGRPKLRSLLFRCVIPLLAKNAEFQALHRYYTQRVQNPLKRMQSAIALSCRLIRILFVLGRKQMPYDPVKVLGPVHMERLQNAA

SEQ ID NO: 162305 - protein, 427 aa, unidentified
MNEPKYKPTLCIGADIHKDEIVLRAVDKAQGHEVLDRFRVTNNLPGAQSAAATLAQVAADQGYTRIEIGWEATGMLWIPFHRYLSTEPLLQPFELELVCFNPKLVAKFKDGLVLRSPKNDDRDAFDIAARIRFGELPVTYVPGDFWQGLRRLTRYRYRLSKTLSQEKMRFQSYAFLKASDWKRVKPFANVLGATSAALLTEFTVAELQEMTHDQLVDLISRRGRGRFADPTATARLVRQALRTSYPIDPRMDEMVTASLAAMWDHIRYLDRAMKRLDQHIARYIDLIPNPIITIKGLGAVITAGIMAEIVDVLRFKEHKHLAQFVGLTWRKSSSAGFVSQNTRMTKVGNVYLRYYFILGANLLRQHNLEYKAYYWRKYQEVSKYQHKRSLVLTARKLVRLVHALLTKNVPYVRPRMTDRSQEDDELQ

SEQ ID NO: 162306 - protein, 337 aa, unidentified
MDQHIGLDVSLKDTSISVRQDGKRIWRGKCASDPKLLAEVIRKRAPNAKRVVFETGPLSVWFYHALTAEGLPAICIDARHAKAALDMAANKTDANDADGLAHLAEVGFYREVRVKGFDSMLMRTLITARRQLMKMRVQMSNQARGLMKTFGLVVPKGAGSVFERNVLTLLEGEDNLGRIILPMLQVWRDIRLRVAELTKQLVAMAGADQRCRLLTSVPGVGTVTATAFAAAVEDSIAVGAWVGLTPKRYQSGEVDYEGHISRRGDAKLRTLLYEAASVILNRSSETSTLRTWALSLRERLGFKRAAVALARKLSVIMHAMLKTGELFNPNAGATVPA

SEQ ID NO: 162307 - protein, 317 aa, unidentified
MERAPQGLVYVGIDVAKATLDVAVRPSGEHRQLAQTAEGLEELLSWLHVVQPQLIVLEATGGYEAPLVAQLSVAGLPVAVVNPRQVRDFARASGRLAKTDGLDAQALAHFAEALRPEPRPLPDTQTQELAALLERRRQVVLMRVAEENRLATTRVVAVRTHIQAHVRFLQQELAEVDAELRQQLEASPVWRARADLLRSVPGIGPTTALTLLADLPELGSLSHGQIAALVGVAPLNRDSGTLRGRRAVWGGRAAVRAMLYMATLRATRCNPVILAFYSRLVEAGKPKKVALIACMHKLLTILNAMAKHQAHWQAQTV

SEQ ID NO: 162308 - protein, 321 aa, unidentified
MKTTQDKIEFDQVIERGCGIDIHKSVLVSTVRGKGIKTETRSYDAFTESIEQLRDWLKSLGITHVAMESTGVYWKPVYNILEGDFVIVLVNARHLKNIPGNKTDKKDSRRISKLLLAGLLKGSFIPPKPVREMRDLTRYKRRIIEQIASEKNRIQKFLEDANIKLSTVVSNMSGATATKIIDAMIEGEGKPEELAKLRHGKMKASEQELIMALTGNLTGHHKFMLKMVKQSIKDKELLISELDKQIDNKLKENEMVLDAELLSTIPGVDKEAAAYILSEIGNDMERFPDEQHLASWAGLSPGNNESAGKKKVQEPRMVTNG

SEQ ID NO: 162309 - protein, 368 aa, unidentified
MGYATTILGLDLGKFKSVCCVTDAATGRHAFETLATTPATIGELLARHAASGEGVLLVIETCDAAGWVHDLARAIDGITVTVVHTQGDERWRWRKVKRKTDRDDALKLARLARLGELPQPPVHVPSPQRRQWRRLVVHRRSVVNRRTRSRNAIRSIYNQQGLSLARGNKQWTRAGLAQLQADAKAIEDCDDALDLWRGRLHVELTLMAAVDAQLKILDNKLDALAQGEPRVALLQTVRGVGPRLAEAVVLHVGEDPRRFRSGEQLANFAGLVPKQLASGEQTRLGHITGRGPALLRSLLVESAWMVWRLNDWARAFVEKVSRGGRGRRKLAVVALARKLLILLWGMLKSNRPFRAPNPKAPKPAMAIA

SEQ ID NO: 162310 - protein, 355 aa, unidentified
MNQEKYIGMDVHQATISVAVMDAEGKLIMECLLETQAATILEFIQGLRGTLSLTFEEGTSAAWLHDLLKPHVCRLVVCDPRKAALLKEGNKSDRIDARKLAELLRTNQLKPVYHGEHGIRTLKELGRSYLTVSKEITRTMNRIKSLYRSWAIPCPGTMVYAPRHRAEWLAKIVEPGVRVRAEHLYEQLDSLQPIRLQARRELLRESHKHAAVKLLRQIPSIGPIRGALLVALLQTPHRFRTKRQLWAYSGFAVETHDSGEYRWVRGKLQRNRERITVRGLNDNHNHDLKNLFKAAAISASTRPGPLHDFYVARVAQGVRPTMARLTLARKMAAITLTLWKKGVSFDPQQLSRQAV

SEQ ID NO: 162311 - protein, 331 aa, unidentified
MELPTIGIDVSKETLDVSVITGGKPLGKQFANTDQGYGLLIGWLVHRKLGQVHACLEATGRYSLGVALALHAAGHVVSIVNPAQIRDFARTKLGRNKSDKVDAGHIREYGAVFRPPAWRPPSPALRRLCELQTMRAGFLASRIEWQNRAASLHSAASLGGDAAAGVLAAATIAHFQAQIAAVDQAIAQTIDQDDDLRGKRDLLLSIDGVGQTLAALVLAELPGSDVITTGAQAVAYAGLNPRRFQSGSSVNRPTRISKIGNAVLRAGLFMPAMAAMRHNPAVAALAARLHAKGRLTPKQILIAAMRKLLVICFGVLKSGRPFDATLAMPPA

SEQ ID NO: 162312 - protein, 417 aa, unidentified
MNLTTLFVGIDVSKSSNVVRFMDGGGDTLSLFSVANNADGAAKLQEKLRHTLLNTDYSEVIIGMESTSAYAEHLASYLRNDEFMRKWGCKVYIFNAKNIEKLKESYPELPKTDNIDTFIIADYMRFGRYPKYDALDEKYLALRNLTRARYQTAQNLGREKTRFLETLFQKFSTLDSAKVFSDTFGAASLAVISEFFTVDDIINAPIQELADFVNQKGKGHFADPKAIAVALQSAAKSSYRIGKTVNDSLNQLLAIRLIGIRSIEEQIKSLDKAIESFIGVFQNVLISVPGIGPVYSAGLMAEIGDIKRFGGQVSVAKYAGLAWSKRQSGGFEAANTKMIQTGNRYLKYYLLEAANKVRMHDAEFARYYRIKYREVPKHQHKRALALTARKLVRLVYSLLSTNRLYTPPSSGEAPKSL

SEQ ID NO: 162313 - protein, 376 aa, unidentified
MQAAQVKGYEDKTVMYMAMELSNSKWKLGFGNGSKLRRKSIEARDRRGLLAEVALAKAKLGRPADARVVCCFEAGRDGHWIHRWLESEGFEVLEIDSSSIETARGRKHVKTDRIDVDKLLDLLIRHYCLGLRKAFAVVRVPDTAAEAAQRLHREDEYLLKQRTRISNRIKALLVTQGITELRLGPGFAERLERAKLWNGEGVTAELQRELLRLHEQYGVFVDQLKELQRAYAAELLTDTPVAEYRRRLERLKSVGPKSSRLLAAEVFGWRTFANTKQVGAMSGLTPTPSQSGDTRTEQGISKAGNRRVRRTMIELAWLWVRWQPDSALSQWFNRRFAHGGKRMRRIGIVALARKLLIALWRYVEHGVLPEGAVLKA

SEQ ID NO: 162314 - protein, 309 aa, unidentified
MSIPSRYLGVDVAKETLAVAFERQRWEFSNSKSGHLKFIAQIKKLRTPIHVVCESTGSYHLRMCLALQEAGIAVTICNAARIRYFGRSEGILAKSDPIDAVLIERFANSKRPPADPPLSREHIALSEMATHRRQLVDMVKAMATHRQQVQDAALVAEINKTIAALEKRITVVEKQLLEKIKANPDWKRRYDQLTAVKGVGFVTALVLIAKMPELGTLNRGQCAALSGLAPYDNDSGKHAGRRTIRGGRGEVRTALYMAALSACRFNRPLKIFYDRLIAQKKKFKVAITAVMRKLLIYLNTLLKEPLPAA

SEQ ID NO: 162315 - protein, 422 aa, unidentified
MEVIHPRCAGLDISKRDAKVCVRINGAGRRKTTETVTTFGATTRQIMALRDHLVAQKVSCVVMEATGDYWKPFYYLLEDLAEVEVMLVNARHVKNLPGRKTDVADATWLAQLGAHGLVRGSFVPPPPIRALRDLTRTRTAVTRERTREIQRLEKLLEDAGIKLSSVAADLNGKSSRAMIAALLAGQTATAVMADLAQKQLRRKIPELTEALYGRFTEHHAFLTRMHLALIDQHTAAIEALTERIEVVMEPFRHFRGLICTIPGIGGLTADVVVAETGADMAKFPTAAHLASWAGAAPGNNESAGKVKSRRTRPGNPYLQGALGTAAMSISHTRDTYLGAKYRRIAARRGPLRANVAIQRALLVAIWNIATTDTAYRDPGGDYFTRLNPQKARSNAVRQLEAMGYHVTLSNDQNLWMTLGEGA

SEQ ID NO: 162316 - protein, 351 aa, unidentified
MESITIGMDLGDKNNTVCVLDSQGNIVHKENIENTQESILKFMKKFSNAKVAIEAGTHSPWISRLLTGIGQKVLVGNPRKLRSIWQSEKKDDMRDAEMLARIARFDPDLLYPVQHKSKEAQIDMSLLHTREILIKQRSSLINHIRGTAKSFGIRVAGCSTESFHKQAMSQIPEELLTTLCPVLEIIETLTEQIKIFDKKIEGISQERYPETELLRKIKGVGPITALTYILTIEDPHKFTRSRQVGSYLGLVPRRDQSGETDKQLHITKAGNPYLRKLLVNCAQYILGHFGEDCDLRRFGLRIASRGGKNAKRRAVVAVARKLSVLMHRLWKNGEIYDPLYMDNLKKMKRAA

SEQ ID NO: 162317 - protein, 409 aa, unidentified
MRYYLGVDWADQTHAVRVVDEGGTKVSMRTVPHTAEGLTEWGRELDEWRAHGIELWAAIERPEGRVVDFLLDHGVVVYAVNPKALDRARDRFRQSAAKSDPFDARVLAEFLRTDHAHLRAVQPSSEAAQELKLLTDDYQRQIRQQTRLVNQLTTTLKAYYPRGLEVAELTTALAREFLQAYPTPAALTALTERQWQRWARTHRLPEARTRELWAVLQRPQLPVPAHVVRAKARLMQSLLAQLTVVLEGVGAYRVAIEDFFAQLPAAQWIRTLPIGDHGITAPTLWARLGDAPGRWESFRHLQAQAGTVPVTIRSGKHQVVRFRFACDKSLRYVIDHVAFLSLRWSEWARAYYAEQRARGHSYHQALRALSAKWLKIIFVMWKRQVPYDEQYHLATMTRQQLRQCQTQNA

SEQ ID NO: 162318 - protein, 391 aa, unidentified
MIYIGIDVAKDKHDCFITNSDSEVLFKAFTIFNNLDGFNDLYQKIESVMDDVTKVKVGLEATGHYSYNLLGYLIDKGLPTYVINPLHTNLYRKSLSLRQTKTDKVDARTIASMLMSDMNLKSYSDTSYHNEELKSLTRYRFDKVKERAKLKTSVSRLVCILFPELEKLVPTLHMASVYALLSEFPSAKHVATTHLTRLTNLLSESSKGRYGKDTAITFRDSARASIGSNMPAKSLELKHPIKLIQELDSEIDEIENEIKIIMDEINSPILSIPGINYRMGAMIIAEIGDFNRFDSPDKILAYAGFSPSTYQSGQLDGAYAHMEKRGSRYLRYALYNATKYVCHWNPTFAAYLAKKRAEGKHYNVAISHAVKKLVRVIYHLEKTKQQYIKAA

SEQ ID NO: 162319 - protein, 349 aa, unidentified
MQKTLTEEEAFMKLYGGIDLHSNNSVIVVLNEKDEAVYKKKHNNDLLEILSCLLPFRDFLQGLVVESTYNWYWLVDGLMSAGFKVHLANPAALQQYSGLKHTDDKSDARWLAHVLRLGLLPEGYICPKEERSIRDLLRKRSQLVRQKTANVLSIINLFTRNTGEAINLKQVRKLTEESLRERFGDESLSLAVHSNLMVFQCLQTQIKLLEKTILDKVKLRKEFIHLKTVDGIGDILALTIMLETGEIGRFPKAGNFASYCRCVGSKRISNGKKKGKGNTKNGNKYLAWAFVEAATFAVHYNEKVKKFYQRKKAKTNGMIAIKAVAHKLARACYYILRDQVEFDAAKAFG

SEQ ID NO: 162320 - protein, 357 aa, unidentified
MKRTTKYVALDVHQATTVASVREESGRVIARSVLPTDPVAITEFVRGMRGAVHLTFEEGTQAQWLHDLLAPYVHRVVVCDRRGAPRQGTKGDQVDADHLSELLRRGGLRTVYHGSAQRGVLKELTRTYRNLVEDSTRVMLRLKALFRARGIRTAGRGAYHEAQQAQWLAKLSDAGVRFRAETLYGELAVLHALRPKAKAALLAEAQRDPAWAVLRTIPFLGPVRVALLLATLQTPWRFRTKRQLWAYAGLAVVTRRTAEYVLDRGRPVRRRRPPLTRGLNQNHNRVVKEVLKGAATAATARAGAYLDFYRALLARGMREELARVTLTRKLAALTLRLWKTGERYDPAKVMGQAVPAR

SEQ ID NO: 162321 - protein, 343 aa, unidentified
MKLMRIGVDLAKNVFQIHGVDSHEKPVWRQRLTRERWLQTMFEKIEPGCEIGMESCGGAHHWARQLEARGFRVKLIAPQFVKPYVKSNKNDANDAEAICEAMSRPSMRFVAIKTVEQQDIQATHRIRSGLIEQRTAKANQIRGLVSEYGLVAPKELLSLRRVIPCWLEDAENGLTLRFRHLLDGLWGDLRALDERVKELDSEISVIAANEPRAQVLQQLRGVGPMIATALVVAIGDARQFANGRQFAASLGLTPRQHSSGGKDRLLGISKRGDTYLRTLMVHGARSALRTAQSKDDRLSQWAVRLAGRSHVNVAAIALANKTARMAWAMLRNGTEYQPERAAA

SEQ ID NO: 162322 - protein, 345 aa, unidentified
MSIVGGLDIHRKQITFDYLDTGTGQVQRGQIAPADREHVRAWLARFAGREDVAFAAEGCTGWRYVTEELAAAGIAAHLAEPADTAFARGRKRHAKTDKTDCRHLRQLLAEGRLPECWIPPSHILECRALLETYHDLRAEHTAWVQRIHAVLFHQGAPALGEGTLRTEQGVAALRTAAAAHLSPAGQLQVATALDMTDMLETRLHELRHQLLDAARHLTGAKVLAARLYGVGPVTALAMTCWLGGEGRFSSSRKAVRFAGLDVTVYSSDRKGPPGRLSRQGPPVLRWAVYEAGKTHARSSAPDHRYYAQVKDRCNGKRAALSEARKILRQACHILAELGGVALSAA

SEQ ID NO: 162323 - protein, 412 aa, unidentified
MDRLVERCAGLDVHKDSVAATVRIPGPGGQRLQETRTFSATTRGLLTLADWLESYGVTLVGMESTGCYWKPVYYVLEERFECWLLNARHLRNVPGRKTDVADSAWICQLVEHGLVRASFVPPKPIRELRDLTRYRKAQIEERSREVQRLDKVLQDAGIKLSSVASETLGVSVRRMLEALVAGTHDPEVLAELARGRLRRKLPALREALTGRFRSGHHGLLIAQILAHIDYLDETIATLSARVEQVIAPFSTERELLMTIPGVARLGAEVLIAEIGVDMRVFPSDAHLASWAGQCPGNHESAGKRRSGKPRKGSKWLNTTLTESAKSASRSKGTYLSAQYSRLRGRRGPGKATGALRHSILVAAYHILERKVPYEELGADYFDQRRSLEQRTKRLVRQLEQLGHKVNLEPVAA

SEQ ID NO: 162324 - protein, 343 aa, unidentified
MQTITTIGLDIAKSVFQVHGVDAGGQVVIRRQLKRRSVLAFFQKLPPCLVGIEACASSHHWSRELQALGHTVRLMPPAYVKPYVKRRKNDMADAEAICEAVTRANMRFVPTKTPEQQSCLMLHRTRHLFIRQQTAVINSIRAHLAEFGIVAPVGRRGVTELLHVVADPSDKRVPEIARACLAALGTQLLRLKEQILEFDRMILAWHRSNQTSKRLHYIPGVGPMLATALVASVADPKTFRSGRNFSAWIGLVPKQHSSGGKDRLGSISKQGDRYLRSLFVAGALAVIRYAKIHGTGHRPWLTALLMRKPTKVAAIALANKIARMAWAMMAKGERYKEPVALAR

SEQ ID NO: 162325 - protein, 363 aa, unidentified
MKRTTTQNSYIGEDVFVGIDVHKKTYCVVARVNQEVAKKWTTPASPPKLVEQLEKFFKGAKIHTAYEAGFSGFALHRYLVSAGINNIVVHAAGIEVAVNNRVKTDKRDATKLATLLEAKRLKGIRIPSEKEENQRILTRTRAQLVQDLTAVKNKIRMKCHQMGLIDYDDKRVMTHKLVEEMLKRSTSSELTIAIKAYWQIWKSLEQEIRYIEKELSKQAQTDPNEKTYRSAPGVGSLSARILSNELGDLTQFDNERQLFSYTGLTPCEYSSGEAIRRGHISKQGNSRLRAILVEAAWRAIKIDSALAEFFNRLYPRRGKTRAIVAVARKLIGRIRAAFKQGRSYQLGYSSNNLCPTSMISITS

SEQ ID NO: 162326 - protein, 483 aa, unidentified
MAAKKDAKTGTDRSSAGAAAEHGGDGAEVAEERVQVVEYAAAIDVAKGFGMVCTRVPGSRPDRRRQKVWRVEATYGEVTALMDHLRCEGIQRLVLESTSDYWRLWYYLAEAAGLEVWLVNARDVKHLPGRGKSDRADCVWHCKLNERGMLRRSFVPPEPVRDLRALTRTRTRLAQDQARHQARVEKILEDAQLKISVVISDLFGVSGRRFLDALVAGERDPKALAALGDHRLKATRQQLEDALTGRFRDIHAFEISTHLRLIDAINDEITRLDDAIGQQLPQVPRTAPACTACGLIGGGHAPGCAAAGTVLLGLAARLDEVTGLGLCNAAVLIAELGTSPSQFPTPGHAAAWARLTSRSRQSGETARPGRTGKGNRYLRGALGQAAMTAARTDTRLGAMYRRIARKRGKQKAIVAVSRVICEIAWILICDPGARYEELGPGYYRPRSPARQTRDKIREIERLNPGTKVILAPADPGTRAGQAA

SEQ ID NO: 162327 - protein, 411 aa, unidentified
MYYVGIDIAKITNVTSIINDKDVFIKKSFKFNNDEKGFKEFTNLLSSIDKNIDNFIIAMEATGLLFENLYLYLKGKGYNVILLNPYQTSKFREMDTMKKVKNDNIDAVMIASLIKSGRYSKAYVSEEVYASLRALHRHRASLEEELKKHKRQVSSLLAVVFPEFEQVVKNPFSVSGLALLEKYPTAKHYTYTSPQRILKVFRNIKGNNFNIQKAEKLLELAKSSIYSGNAYDERAFVIQSHIRAIKFLQKEIESIDNEMLKLFNASPSFTKEEEQEVTDIIDNLRSIPGVSDKTLFTIMGECGNLDRFKNINAFIGYLGLYPTLEQSGNKTSYGKLAKRGSKLAKKALYQAAVAAVRHNDEMKKLYCDKVSQGKAKKEALVIVARKLAAIILAIYKNNTPYNPARVFNQNT

SEQ ID NO: 162328 - protein, 348 aa, unidentified
MRKHNENRAVKIMGIDLAKKSFHVYGEDVEGRKAVRKKFGRQKLKEYLANLPPCTVAMEACGSAHYWARLVQSYGHEVKLIAPQFVKPYVKSNKNDAADAEAICEAAQRPNMRFVAVKEVVQQDVQAVHRMRSLTVDRRTAQINQIRGLLLEYGIEVPTGRSNLFKRLPEILEDAENGLTDLFREELFGLYGELRHLDERIAHYDAKIEQIARSDERTQRLQTIPGIGPKIATALLAAIGNIQAFKNGRELAAWLGLVPRQHSTGDRITLLGISKRGDVYLRQLIIHGARAILNWVDRKTDRTSRWATALKERRHKNIAVVAMANKMVRIAFALSKKGEAYRAEPAAA

SEQ ID NO: 162329 - protein, 350 aa, unidentified
MNVNQYIGFDVHKKSVSYCVKIADGIIVEEGKLRATHEALRQWAEKRQEPWRGAMEATLFSGWIYDALKPFAAELQVGHPAMMKAIGASKKKNDKLDARKIADLVRCDLLPACYVAPAEIRELRRLLRYRNLVVRQAVRMKNRMSGLLMEVGAEYNKQQLHGKQYFMELLDTLAEAPDSVKDLLQLSRGAMEMFETTQQQLLVRLKRDQLLSKRVTLLESIRGVGEVTALTWALEVGDPHRFSSVAHAVSYCGLTSALASSADKQQRGPISKQRNAHLQTVLIEAAKLAPRWNPQLAAVHARELERGNRNRATLAVARKLVAYLLAVDKSGQAFQVRNQPAAAMAEGKVA

SEQ ID NO: 162330 - protein, 391 aa, unidentified
MIYIGIDVAKDKHDCFITNSDSEVLFKAFTIFNNLDGFNDLYQKIESVMDDVTKVKVGLEATGHYSYNLLGYLIDKGLPTYVINPLHTNLYRKSLSLRQTKTDKVDARTIASMLMSDVNLKSYSDISYHNEELKSLTRYRFDKVKERAKLKTSVSRLVCILFPELEKLVPTLHMASVYALLSEFPSAKHVATAHLTRLTNLLSESSKGRYGKDTAITFRDSARTSIGSNMPAKSLELKHTIKLIQELDSEIDEIENEIKIIMDEINSPILSIPGINYRMGAMIIAEIGDFNRFDSPDKILAYAGFSPSTYQSGQLDGAYAHMEKRGSRYLRYALYNATKYVCHWDPTFAAYLAKKRAEGKHYNVAISHAVKKLVRVIYHLEKTKQQYIKAA

SEQ ID NO: 162331 - protein, 333 aa, unidentified
MNYIGLDIHKKSTQACVMNDSGRVLMNVRFPSNSKDINEFLDKIELLGAASIFMEATGFCMYIYDIIEARGHDVKVAHPYKVKALTAGRAKTDKNDAEMLAELLRLNAIPESYIPPKELRELRELTRFRQSLVRNPACIKNQIHAILAMRGIKAPPPLRSHFSKKHVKWLRSLDIVQLDDFLDIMALIDFKIAKADEDIERICHDDEDVQRLKTIPGIGDVTATSFVAEIGDIERFASPEKLASYAGLTPIVRQSGEKEWTGPISKRGNATLRYLLIEAAYSHVNCSKESKLTQFFERKSQAKGSKKAIVATARKMLEVIFYMLKREEVYHAH

SEQ ID NO: 162332 - protein, 413 aa, unidentified
MVQAIIERCCGLDVHQETVVACLLVGAPGAHPMKEVRTFRTVTRELEALRDWLLEAGVTHVGMESTGIYWRPVYAVLEGHFELIVGNARHMRNVPGRKTDVKDSEWIADLVRHGLIAKSYVPPRPLRDLRDLLRYRRKLVESQAAERNRLLKLLETANIKLASVASDVFGVSGRAMLRALIAGEASPEAMADLAKGQLRRKRTDLILALDGRLEAHHRFLLAMQLRRLEAIEADIAALDLRIGERLEPYSAPHALLMQIPGVDWVVAAVLIAEIGVDMSVFLSVYHLAAWAGVCPGNHESAGRQKSGRARKGNIHLRTILVGAAISASRTKGSYLKDKFHRLKARRGGLRAALAIAHKILVSAYHMLAKNLPYRDLGAAYLDQISQTRTVANLKRRLERLGYRVTLEPNAQAA

SEQ ID NO: 162333 - protein, 391 aa, unidentified
MILVGVDVAKDKHDCYIMTSEGEVLFKSFTIANNMEGFNQLYEKILSVIDNFDNVKIGLEATGHYSYNILGYLLDKGLTPYVINPLHSNLYRKSLSLRKTKTDKVDSHIIASMLMSDVSLKPYSNTLYHNEELKSLTRYHFTKVQERAKLKISISRLVTILFPELEKLVPTLQMNSIYALLYEFPSAHAISKAHLTRLTNLLNTTSKGHYTKDKAVLIREAAKNSIGSNMPAKSLELKHTIKLIKELTSEINEIEEEIKIIMNKINSPILTIPGIGLSTGAQILAEIGDFKNFSSPDKLLAFAGLSPSTYQSGNMYSSNTKMEKRGSKYLRFALFNAAIYVSYWEPTFSQYLKKKRVEGKHYYVAISHVVKKLVRLIFHLEKTNERYSTVV

SEQ ID NO: 162334 - protein, 414 aa, unidentified
MEDILECCCGLDVHKESIVACLLKGPIGEKLKPQSEVKEFGTQLRDLITLKEWLAKHECRYVAMESTGIYWQPIYAVLETGLSDEMHLLVVNARHMKNIPGKKTDMRDAEWIATLLRAGLLKGSFIPDRDIRDLRQYTRYRKAIIRDITSQKNRIEKLLQSNGFRLSSFLTDIFGVSGKAIMQQLVQVGFVSKESLAICLKSHARRKAEEILSSMNGVMSSPQRKLLKMQMAHLDELKTNLREVEDEIHDNFSQFEGPIDCLDSIPGIDKTAAFAILAEIGSKMNSFPTAEHICSWAGLVPGNHESAGKKKKQRVTQGNNYLKSILCEVAWVIASHRNYYLSGWYWRLKQKTDSKRAIVALAHKLLVIIYTMLKTNSTYNEEKFLERKQVGDQKRINRMIGNLTKIGYVISLPA

SEQ ID NO: 162335 - protein, 346 aa, unidentified
MSQTVAAPIPAAVDHERTLVLAIEVSNKSWVIAAQVPGLPHTKAKRTIDPEAEALLAAIAAYRARAAATGRSIERVIAVYEAGWSGFWLARWLMRHGVEVYVVQPSSVPVDRRIRRAKSDGIDSELLLRTLLAWLRGEPRVCSMVPVPDEADEDARRCVRERSELISERIGLTNRIGAILATLGVSDYNPLLRNRGRRLAELRTALGEPLPANAHAKLKRLLARLELVLTQIAELERERDAVVETEASDGASKMIQQLTALRGIGVQSATVLVREAFVRRFANGKALGSYAGLASSPYSSGGIDREQGIGKAGNRRVRTVMVELAWLWTRYQPDAAQVCWFRERVG

SEQ ID NO: 162336 - protein, 376 aa, unidentified
MTAKTDPQPSSVCEAPLYVAFDLGKTSWTVAMTTGLGVAPWVRAVRAGAWEEVGSVVVRARARFGVAATAPVISCYEAGRDGFWIHRALVAHGWANRVVDSASIEVNRRARRTKTDRIDACKLVVLLVRVCLGDRGAWREVHVPPVEAEAARHATRERMALQKEHTALLNQMRGWLTTWGTALPSRRRDAWWERLRDWRGAALPVAVQARLARASARLALVREQLRALTRAEQRAVQAAAPTSAAGRLMRLRAVGVKGTTTLLGEGLVWRGFTNRRQVGGMLGFAPTHASSGEQHRDQGISHAGNWRWQGTMIQLAWSWVRLQPTSALTQWYLARFGTGKRARRIGIVALARKLLIALWRYATTGLVPAGAVLKTV

SEQ ID NO: 162337 - protein, 338 aa, unidentified
MDKYIGIDVAKATLQVYIPRNSLELEIENSPKGLKQLYSKIKKQYKKELSEVIFVYEPTGSYSTLLDRFSMAHNILCFKVKPAQSSAFAKTLDHRNKSDRIDAKLLHRIGILAKESDISVIHIDEDAHHLQSMFKYYRRVLKDRISASNYLEASLLHQEDPFILNRLRSNIKRLKREADDVLQRMLDFINAHEKYKEAFENITSIKGIGENAGIALLYLFLRYPDASRSHITALCGLDPIIVQSGTSVNKRSRISKQGNRAIREILFMPTLSALAYNDEMKTFYNRLKDNGKHSTAAQMAVMRKLILLAHSLYKNKEKYDPKRYMIFQQPRKEKAVVH

SEQ ID NO: 162338 - protein, 459 aa, unidentified
MKPGQNSGSKHGSQTDDKEAYAREFPVHVGVDTGKEFHKLVARGPDGRRTKAVRVEVDRDGFDAADKFLSEKFPCVPRDRMLIGLEFAGHYGLTFAHYLADRGYRIVTVLPSVTKKLKEVEDNSPRKDDAKDAAQICRLVGSGLFVGFSLLEEHAAALRTLTTERERLTREETRLKNRLQSLLDLVWPEFMDHFHNLTKATPRALLARWATPYELLSERPETVRSFAREVSRSHIKREAVDALLVASAGTVGLTVGLEARASEIGRIMTRWTLLQEHMATVDERLAVLVEEIPSAKALTTVPDVSVVCAATIVAELGDPESYVSPRQVLKLAGMNLAGKQSGVSVNGRVKQTKRGRPALRRQLFLLAGRWCQKRGLYREQYLALRARNGGKRTSAMCAVARKLVPMLLHIMQTGEPFDVERWCAAHGVPLPAPKATRKPRKGKGGLELAKREESTRQVA

SEQ ID NO: 162339 - protein, 441 aa, unidentified
MAMRTQDEEIVFPNAAGIDIGASSHWVAVPRRSTDDPVREFGPMTDDLNAMADWLIACGVDTVALESTGVYWIPVYEVLEQRGLKVWLVDARQMKYVPGRKSDVQDCQWLQKLMSLGFLRAAWRPDGEVCTVRAVARQREVLLAEQASWVQRMQKALVQMNIQLTEVLTDVMGLTGQAIIRSIVAGERDPKALARHRDGRVKASAEKIAKALTGNWRDEHVFVLRQSLAMYDDIARHLTECDTKLQALLSELGQAKVDLGKAPREGSKLRREFDARQILANWAGVDLTRINGLGLAVVMKILSEIGPDLSRFETVKHFCSWLALSPGTKISGGKVLSAKTKRSANRVRQALKMAAMSLSHSDSALGAFYRRLCSRMDKPSANTAVAHKLARMVYFMLTRGEDFVDQGQQRYDEQQRLRNVATLKRRAAALGFDINPTSVPA

SEQ ID NO: 162340 - protein, 420 aa, unidentified
MKAPTVDDFAALIGIDWADQKHDICENPTGSKKYLHSVVSSKPESIDNWAMNLKIRYPNKQVAIACELQKGPLINALSKYSHLTIFPLNPSSVAKYRQAFTPSGAKDDPSDAYLQAEILALHMDKLTVIQPESAEIRALSQLVEYRRKIVQDRVDLTNKITATLKNYYPQVLEWFSEKDTIIFCDFIKKWPSLMQAKKAKKQSLQTFFNQHNSRYPEVNATRISLIKKATTLTDDLGVIEPNKILIEILIPQLKVLIKGIEQLDSEIKQRYKKQKDRVIFDSFPGAGPQLAPRLLAAFGTKRDRYTDASALQKYAGIAPVIERSGKQKWVHWRYSCPKFLRQTFVEWAGLSVRFSFWAKAYYEQQKSKGKPHNVIIRSLAFKWIRIAFRCWKTRTPYNESMYLEALKRRDSPLLKFAVGA

SEQ ID NO: 162341 - protein, 359 aa, unidentified
MSLKTTLPDFKGQPFHVGIDTHKSNWKITIRSKDIHLKTLSINPSPEELNKYMKHHYPNGIYKSVYEAGFCGYWIHRKLTEYNFENIIVNPSDVPSTNKERDRKSDPIDSSKLSRELANNSLTGIYIPDAHHEALRCLHRLYKQNTRRMTQIKNRIKGFMHFIGIKLPEEFDKVCWSNNFMIFLENIRFSEPNNRIVMDVHIADLRHARKTRNSILYHIRKVSKDVPTIQLLKTVPGVGSLTAFALYSELIDINRFKNVDKLASYVGLVPSTHSSDTTVITGGMSRRHCKHVRSALIESAWVAIRNDQALLSAFNQLIKSMPKSEAIIRIAKKLLNRIRFVWKNKMPYVNGIVEIQMCQ

SEQ ID NO: 162342 - protein, 315 aa, unidentified
MKQGKYNTKIAGIDVGKRQLDIAVHGGEMSQVANDKAGIGALIAWLEARGVVRVGLEPSGGYERAVREALAAAGFEVVMHHASEVRLFARFKRIKIKNDRADAVLIAVATAQVDTVKASADPRFAELAERLTAYEQVTERLAQMKTGLEHVTLKDLAKALRAEIRATELLKAKLIGKVVAFIKTHADLAARLKLLRSLPGFGPVVAVGALVRMPELGAMARGQAASLLGVAPFDRDSGQYKGLRFIAGGRERPRRMLYIAALAARRCDPGFKTFAKHLAAKGKPPKVILVAIMRKLIEAANLVLARGAVWERRPA

SEQ ID NO: 162343 - protein, 412 aa, unidentified
MLKIVYPVCCGMDVHKSFVVACVASTNDHGVTTYRSGRFSTFTGDLRRLAAWLHAHSCTDVCMESTGKYWIPIYNILESSCRITLAHPKYVKAIRGKKTDKKDAKWIADIFKHGLVCGSFIPSADIRQLRDLMRYRAKLTGFSTGEKNRAQNCLTVSNIKLDDVFSDVFGKTASAITQRLLENDAPFDVTLFLNKNLKASADRIQAAVDGHICAHQAGKLRVIRSHMENLAACKKSLEVLIFGLAEKYLPTLDLILTVPGIQVFAAVGILSEIGADMSVFPTSKHLCSWAGLTPQNNESAGKKKTTRISRAGAYIKPLLVQCALCAIRKKSNPEIRSRYLNLKKRRGHKKAIIAIARMLLTAIYNIIKRNETYNPALYRKADTPPRNREVSVNEAIYILQRQGYLVTAPQSA

SEQ ID NO: 162344 - protein, 439 aa, unidentified
MFSRSEERSLNKKGKQTPMKAAQTILHVGLDVHKDSIAVALAAQDGSLRRYGEIPGHIEAVDKLLKRLDRADQQIRLCYEAGPFGFVLCRHLRRKGYVCEVVAPSLIPKRAGDRVKTDARDAEQLARLFRAGELTAVRVPDEADEALRDLIRGRLSAVFEQHRARHRLKGFLLRLGFRYPGKTSWTPAHMNYLSKLKMSHPAQQIVLEEYIQAVQSATERLDRLTTQVQAQLPGWKWEPVVRALMCLRGVSVINGMTLVAEIGDIDRFESPRQLMSFLGLTPSEHTSGDKRHQGAITKAGNGACRRALVEAAHHYRIPPRISPTLRQRQHGQPEQVRQIAWKAQQRLYSRQRTLSLRRKKSVVVVTAVARELCGFVWAICRALKHPHPKAPTRTSEGSARVYVLKPDLKFKSSAGRSHLASSAAAPPARARKGPTSLAS

SEQ ID NO: 162345 - protein, 345 aa, unidentified
MPIVGGLDIHRKQITFDYLDTVTGQVCRGQISPADREHLRAWLARFAGCEDAAFAIEGCTGWRYVVEELAAAGIAAHLAEPADTALARGRKRHAKTDKTDCRHLRMLLAEGRLPECWIPPGRILECRALLETYHDLRAEHTAWVQRIHAVLFHQGAPALGEGTLRTGQGVAALRAAAAGCLSPAGQLQVATALEVIEALDTRLHELRHQLTDAARHLTGAKVLAARLYGVGPVTALAMTCWLAGKDRFSSSRKAVRFAGLDVTVWSSDRKGPPGRLSRQGPPVLGWAVYEAGKTHARSSAPDHRYYAQVKDRCNGKRDALSEARKILRQACHILAELGDDALSAA

SEQ ID NO: 162346 - protein, 432 aa, unidentified
MEVVHPQVAGIDVHKKVIWVAVRLPGQERGQRAVTVRRFKAFWRSLQKMASWLAELGVADAGMESTGVYWWPACHALAGAGIEVCVCNAAHMRNVPGRKTDLADCQQLAELHEYGLLRTGFIPGAQVAALRQRTRYRKKLTGQRSSEGQRLAKVLEDAGIKIGSVASDMLGKSGRAMTGALIAGERDPARLAGLALGVLRRKTGELAMACDGRFTAGHGQMCRPHLDACDHLTAKIAELDALVAEAAAPFAALIARLVTIPGIGQRTAEVIIAETGGDMARFATAARLAAWAGLAPGDNESAGKRKKAPARNGNPHLRTAMVEAAWATWRTAARPGARFRRLARRFGKGNEKKAAIAVAHTLLSTAWAVMRYDADYIDAGAGYYQRRDQRNREHLVRYHQNAPARPGLQVIITQPGDGAPPPPSPQNPGQAA

SEQ ID NO: 162347 - protein, 312 aa, unidentified
MTQETRFVGLDVGKLEIYAFDAGRDAEIIVTNTGSGHLALADWLGDPNDIVIALESTGGYEWMVWQNLNDAGFDARQVSAAHVRSFSRASGALAKTDPIDARLIARFIAFRPTAGRKPPAYKVREINRLNVKRRQLVEMRKRLRCQVKQRHSPQLDEMDTDLLDLLTQQIADLEGLIETAISSCQELSNRAKILRTIPGIGPVLMANLIGDLPELGHCSDKQIAALAGLAPINNDSGKMAGKRAIKGGRYAIRGLFYQAALVASNHNPVLRIFAKRLREKGKPHKVVLIAVARKLLIIANVLVAKNAVWEPN

SEQ ID NO: 162348 - protein, 351 aa, unidentified
MALADLVDHVIGVDPDRDRITAAVVCSGTQGEVASKVFATTARGYGQAMRWAMAYTTDGRRAWSIESTGSYGAGLAAALAAKGEFVIEFDHPSTRPSKDGAKSDSLDAVRAAREILGRKTWATPRSRGTREGLRTLITARDSAKLARVAAINVLKALVVTAPVDLREELRGRPLMALVSRCQRLRPDTATDAEHAATKLSLRSTANRVRQLTDECRELELAMIPLVRAMVPALLDEPGVGVLMAAQILVSWSHPGRCRDEAAFARLGGVAPLEATSGQTQTRHRLSRGGDRQLNRALHTVILARAKHHQPTKEYIARRITEGKTKRETMRCLKRYYARHLFRLLEAAPMTP

SEQ ID NO: 162349 - protein, 382 aa, unidentified
MSKGNQYVGLDVSLKQTSICVIDDADKIVWRGQVDTTPEAIVSAVTQHAPHAVRIGLESGQLSNWLFHGLKQAGLPVICVDARHAKAALSLKVNKTDTNDALGLAQIMRVGWYREVTVKGLDCQAVRALLVARAQIVSQITTLKNCVRGILKTFGRVLPKGLRSQFPARVRAAIEGHPVLGAIIEPTLQVLEAARAQLLVYDRAVIQRARSDDTARQLMSAPGVGTVVALAYMTGVEDPARFKRSSSVAAYFGMTPRRYQSGEVDHAGRISKCGDGMVRGLLFEAAKVLLGRSSRPNALKTWGEASANASVLRRQRWRLPASLPSSCIACGPQAQRSNGTLELRLPSPEVDRNIPSPRSRRIAVPAGTGLDDRAILRASTSC

SEQ ID NO: 162350 - protein, 313 aa, unidentified
MNQTEINVGIDTSKDRLDIAIRPAGDFFSVDNNPHGIKIAIERLALVQPDRILIEATGRLELPFACAAFKAGLPIVICNAWHVHSFAKATGQLAKTDKLDAFIIAHYGEAVKPALTQLNPEKLQQISDLITLRTQLLTIRTQQKNRLSRMPKPTHAPIRRVLKAVQKEIQTLDKQLDKLIRQVPQWQHDVDILMSAHSVGKVLAYTLLSELPELGSLSRRQVAALVGVAPINHDSGKRSGKRSIRGGRHKIRSVLFVSVMSAIQHHPTLKPMYQRLVAQGKPKKVALIACARKQLITLNAMMKTRTYWNEKMA

SEQ ID NO: 162351 - protein, 353 aa, unidentified
MKTYYVGMDVHRASIVIGVLNGAGKVVEQIVLETSAARVRSYLKGLKGRVFVTFEEGTQAQWLYDVVQPLVTEVIVCDPRQNRLLAAGNKSDRIDAQKLAELLRNGSLKAVDHADHGVRELKELVRNYDCLVRDTTRVQNRLKAIFRGRAIACSGHEIYRQDRRAQWLKKLKEPGAKARAGFLYEQLGAMKPLRHQAKQLMVRTAKRQAAYPWLQSIPRLGPVSVAQLLAVVGSPHRFRSKRQFWTYVGLAVVTRTSADHEVVNGVLRRSRRPVATRGLNRNHNHLLKRVFKTAATSACHSQPFQAAYEARVRQGMDPALARLTVARQIAALTLTIWKCGETFDVTRIKQPAM

SEQ ID NO: 162352 - protein, 420 aa, unidentified
MKVVYPTCCGVDVHKSFLVATIIKTTSGIEPSYQKKRFSTFNNSILDFKKWLLDNSCRDVCMESTGKYWIPVFNLLEDEINVAIANPKWVKAVEGNKDDTKDSKWIGDLFRLGLVPGSYIPCKPIRILREFTRYRYKLTSCRSSEKNRFQNALTVCNVALDSGVSDIFGKSATSVIDYLLNQPNNSINHEEISSRLLRSLKKKSESVMESIEGYQMTDAPKYRMRLVHAHMDYITSTISDIDSMIDSLVKPYENAVQLLCTIPGVDRSNAITIISEIGTDMTQFSNSKRLCCWAGLTPGNNESAGKKKSIRITRAGVYLKPALVQAAHAAVKSNKSPYYKAKYERIMKRRGKKRAIIAVARMILTAVCHMLSAGEAWNPTDLYKIDMPEPLKNKQKEKAVKQAMKLLIAEGLIKEPQTAS

SEQ ID NO: 162353 - protein, 380 aa, unidentified
MNTNTLYLGLDVHKDSIVIAIAEPGSKGEVRSFGTITNDMGRLEHALNRIRKAHPGAHLEVAYEAGPCGFVIARRLKQLEVPCLVAAPSLIPKQPGSPFKTDKRDARTMARLLRAGELTGVYIPESTDEAIRDLCRARTDAVDDLRRCRLRLKAFLLRHGYRYQGKANWSAAHMRYLRELVLPHPAMKAILEEYLQGIDAAHQRVCRIEVSMLALLDGWRLKPAVCALMAFRGFQLVAAMITVSELGDIHRFAHPRQLMTYLGLVSVEDSSGPRQRLGRISRCGNGHQRWLLVECAEHYLLPPKVSKELSRRQDGQPEEVKALSWKAQNRLHHRFGRLLARRLQRNKAKVAIARELCGFIWALLRTQPCYTQLQPVPAKP

SEQ ID NO: 162354 - protein, 343 aa, unidentified
MDHFAGLDVSVKETSVCVVDDTGRIVREMKVASEPEALLEVLTNPAYHFKRIGLEAGPLSQWLFSALAEAGLPVICVETRHMRAVLKAQINKSDRNDARGMAQMMRVGLFRLVHVKTLRSQKLRMLLTHRKLLQSKAIAIENDLRATLRNFGLKVGMVGTVKFETRIKELVEKVTDLAMLVEPLLMVRRVLREQVNILHRRLLAVVRDDDVCRRLMTVPGVGPVVALTYRATIDVPARFRNSKAVGAVLGLTPSKYQSGEIDRTGAISRCGDEMMRAVLYEAAQSMLVVSTKWSWLKAWAMKIAKNRGMKKAIVALARRLAVIMHRIWVDGTEFRWTREVAAP

SEQ ID NO: 162355 - protein, 460 aa, unidentified
MTLPPPASPEPRIDDKGTRHRAPVSDHSTAGSLASAWPLPAVSSRKATTLSLDDAQFFVGIDWAATEHAVCVLDRAGRKVAAFTIAHTAIGFTGLATRLGKLADTENVPVAIERPDGRLVDALLEAGHPVVPVKPNAIKTWRESEVLSGAKSDPGDAHVIADYLRVRAHRLRPAVPFSGHTKALRAVVRTRGDLVDARVAATNQLAALLDTHWPGAKAIFASISSAITLAFLTRYPTAASAVSLTEKRLAAFCAKQGYSGKKPAAVLLARLRSAPAGPTDPILSEGVADAVAAQVAVLAALNTAIKALDRSITKKMEAHPDGKVFRSFPRAGTVNAAQILAEWGDAREAFGHPDAISALAGITPVTKASGKQRGVSFRWACNKRLRQALTTFAANSRFASPWAADIYNRARASGKDHPHATRILARAWVRVMWRCWQDSTTYDPTLHRGARQNTEQQIAA

SEQ ID NO: 162356 - protein, 326 aa, unidentified
MHGYRCDKEVGILGIDISKDHLVSSEGRVYENNKKGYEEILKVKLNTIVVEPTGAYSIKPCQYFKEKGIKILQVSPNILWKEKDLRGKKTDFYDAQKLINMANKAKEYNYNPLKELVTLYIFLKDLEAKYKNRVKRALFLVSDEEKISKEMLEEFSKGNFKIQLYNLEYTKIVLEEIEVLSKALLETSEKIKEVEKMIQLQSENHVLLTIPGIGKLSSGIIIGIVGDIKRFPNPESFVAYCGLDPIVERSGKATVSKGISKKGNKYLRSLFYFLAEMNYSRNPTLLEFYENHKEKLKGKKLYTALARKLARIVWSVWYNNKPYEPK

SEQ ID NO: 162357 - protein, 412 aa, unidentified
MEVIHSRCAGMDIAKRDAKVCIRLAGSGRRRTVEIVTTWGATTRQILALREHLVAERVTCIVMEATSDYWKPFYYLLEDLVGVEVMLVNARHVKNLPGRKTDVADATWLAQLGAHGLVRGSFVPPAPVRQLRDLTRTRTAVTRERGREIQRLEKVLEDAGIKLSSVASDITGVSGRAMLEALIAGNSDPTAMADLARRRLREKIPALTEALTGRFTRHHAFLTRTHLNLIDQHTAAIDELTARIEVVIEPFRRFRDLICTIPGIGGNTADVIVAETGADMSRFPSAEHLASWAGTTPGNNESAGKVKSSRTRPGNPYLQGALGIAAISVSHTKHTYLAAKYRRIASRRGPLKANVAVQRAMLIAIWNMATTDTAYLDPGADYFTRLNPEKARTKAIRQLEAMGYHVTLEQAS

SEQ ID NO: 162358 - protein, 362 aa, unidentified
MRIIGCDLHTRQQTVAMLDTTTGAVERQTLRHDGSNTREFYSALPRPVLVGIEATGSMHWFLNLMEELGIECQVGHPGKIRAAEPRKQKHDRRDAELILTLLVENRFPSIWLPSKELLDLRALLLHRHQWVRMRTRVQNALQAIALANGLRRGPSLWSQTGQDMIASLPLAPHTAHRRSELQAMYGKFQAEVEKLNQRVEEQACKRPGARLLMTHPGVGPITALATDVFLGDPTRFADGKALASYVGIIPREYSSGGRQRLGGLSKQGNPLLRFLWGEAAAHAVRRDPELQRFYRRKLLQKGVGKARVAVARKLGIRLWIMLRDEIDYKEFCRRGQMQERSGDACAGMPEARNGADSHRPID

SEQ ID NO: 162359 - protein, 343 aa, unidentified
MDYFAGLDVSVKETSVCIVDDTGKIVRETRVASEPEALLQVLTNTIYRFKRVGLEAGPLSQWLYSVLAEAGLPVICVETRHMRAVLKAQINKTDRNDARGLAQMMRVGLYRPVHVKTLHSQKLRMLLTHRKLLQSKAIAIENDLRATLRNFGLKVGIVGTVKFEARIKELVENLPDVAVLVEPLLVVRRVLREQVGILHRRLLAIVRDDDVCRRLMTVPGVGPVVALTYRATVDVPARFRNSKAVGAVFGLTPSKYQSGENERTGAISRCGDEMMRMMLYEAAQSMLVRSAKWSWLKAWAMKIARHRGIKKAIVALARRLAVIMHRIWVDGSEFRWTREVAAA

SEQ ID NO: 162360 - protein, 434 aa, unidentified
MAQEGTALLVVALPTSPSTSVRAQAGAAHATDAADHHRVDPHKLSATIEVVDDRERFLGSGRFTTDRAGYTAMLTYAKAWPERVWAVEGSNGAGRPLAQRLLEAGEQVVDVPAKLAARVRLFDTGHNRKTDALDAHSIAVVAVRTEGLRVLKVDGELEALRMLTDRRETLTRRRVQTVNRLQALLAELLPGQAKKDSTPLQAKALLASVRPCDIAGKTRRRIAAEELAELVAVDAKIKKATAELKAIVLARGSRLMNLRGVGPVVAARTLADVGDVTRFADRNRFASWTGTAPLDASSGEQNRHRLSRAGNRRMNHMIHIAAISQIRLDTDGRAYYRRKRAEGKKPLEALRCLKRRISDALYRQLLADHQRAAGGERGTGPGRHCGATQESSAVDLPPHIDTSDQPLPGPAKPTLRPAPTSRKTARGDTLVSTP

SEQ ID NO: 162361 - protein, 312 aa, unidentified
MDAIYIGIDVSKDRLDVATHPGGESFAVGRNGAGIDELIERLRAISPRVIAIEATGGFERIVAAGLAGAELPVVVVNPAHVRSYADALGKRAKTDPIDAMVIAKFAKAIKPALRPLPDEMTRLLADLVARRRQIVEMIAAESQRAQRVSNPRLKKSIARLRKALEKELSELDDDIGDHIRGTPAWAEKEDLLASVPGIGPVIASSLIAELPELGTLDRRQIAALVGLAPWTRQSGKWRGKSFTGGGRAKIRSALFMGAMVAARHNPQLKLFRDKLVAAGKPKLVAIIAVARKLLTILNAILRDKTPWQPKNA

SEQ ID NO: 162362 - protein, 331 aa, unidentified
MKFKEALGIDVSKKTIDVMLHNAGVHHKFDNTVKGYKSLLEWVEKQTGLSLDQVVICFEHTGLYSLPLAVFLSKQKITFCMESALQIKRSLGLTRGKNDKIDANRIAEYTYLRREQLRPFVLPSINVLKLQKLLSLRERMVKQRAGFIGSMKEYKAMLKQKEHKLMFSVHEKTIHFLSKQIDSLEKEIIDLIQADEVMKELYDLMVSVKGVGLILASNLLVVTNCFRGFKDSRKFACYAGIAPFEKQSGTSLNRKSRVSHYANKKIKSLLNLSASSAIQCDPELKAYYKRRVESGKSKMSTLNIVRNKIVHRVFAVIKRGTPYVPLYQHAA

SEQ ID NO: 162363 - protein, 410 aa, unidentified
MTDTTIAQAEPVLVAIDISKARHEVLIALPGKKRRRRLTVLNQLDDFNRLVATVAEYGRPVRVAFEATGNYHRALAYHLGCAGFDVKLVSSVALARTREALNNSWDKNDPKDAQVILHMMEIGNEQFYHDPLVRGTNDIQELSKTHDIVSKSKTELWHRILTHYLPLYFPEADRFHRSSRSDWFFAFLDRYPSPHLISAMSKEAFIADAWDVVGRKVAKERLLSDIYETAKVSVGLPVAADSDAISMFRLVLNEGRNLIAQRNQIEARAVALLKDLPDYQLLTSVPGIGPINALTILAEAGDLRRFRHHRQFLKFCGMDLATMQSGTFRGQTKLSKYGNARLRRTLWMAGQVAILQRTNSFRDKFERYIAKDRHNTHLRRKAYTAIAAKMARTVHGIIKHGEPYRPFFEG

SEQ ID NO: 162364 - protein, 384 aa, unidentified
MQASNICTPIGGDIGTIFVAIELSRRSWLVTVHSPDRDRFSRHNVLGGDHAGLLALIERVRERAARRLGSAPAVVSCYEAGYDGFWLHRLLTAAGIINHVFDPASIAVEQRARRAKTDRIDGELLLRTLMAHCRGEPRVVRVVRVPSAGQEDMRRDSRERQRLVQEQTAHINRIKALLRLLGMAVGNPRRRDWLSWLEAQRDWQGEPVPPRQMAELEREHARLMLVREQIAALERASAASPASEAAAQRGENKCLLQRLRGLGAAFSGTLANEVFYKDFSNQRQVGGYVGLAPSPWCSGGTDREQGISKAGNPRARQAAIECAWLWLRHQPDSALSRWFRERTANASKRIRRIAIVALARKLMVALWRYLTTGLIPEGAVLSNA

SEQ ID NO: 162365 - protein, 352 aa, unidentified
MNTMTQQVLAVTVGVDTHADTHVAAAVDAVGVILGTASFPATAGGYAALLGWAQRFGPVQRFGVEGTGSYGAGLARHLRAVGQQVVEVDRPDRKTRRLQGKSDPIDAEAAARAALSGKACGRPKTRDGDVEMIRILRVARGSAVKSRTMAANQIAALVTTAPEALRAQLRGLTGRRRVDRCAALRPGPMNDPTAACKFTLRQLARRCHALDTEVGDLNDQLAALVTAAAPALIASHGIGVETAGQRLITAGDNTDRLHSEASFAHLCGVAPLPASSGRTTRHRLNRGGDRAANHALWRIAMVRLAHDPRTRAYAAKRTKDGLSKKETMRCLKRAIAREVYRLLPQRPRLDKS

SEQ ID NO: 162366 - protein, 347 aa, unidentified
MRFYTRQHRHYCGVDLHARSMYVCVLDRDGNVLVSKNIPSAPEPFLELIAPYREDLAVAAECMFTWYWLADLCAREGVVFVLGHALYMRAIHGGKAKNDRIDAHKIAGLLRGGMLPQAYVYPQAMRATRDLMRRRNYLMRQRAELLAHITNTNHQYNLPALGVRPARPAERSGLLEHFAEPQVRRSVAVDLSFVEHYDRELPALERYLESNAQAHDPLALAIVRTVHGMGKVLGLSILYEIQDIGRFARVQQFLSYGRLVKPTKSSAGKVLGHSGKKIGNAHLKWAFSEAAVCFLRANKPAQALRARLMAKHGKGKSLAIIAAKLARAVYFMLKRGEAFDAERFFAH

SEQ ID NO: 162367 - protein, 425 aa, unidentified
MEEPVKRGCGIDIDSLRLWVTVFITTLTGKVKMDTIEFDNSVDGIEKLITWLRKKKVTHVAFESTGNYWQMLYSFLEYHFTVIVANPRQIKQLKGKKTDPHDAKNIARLLRLGVIEPSFILPHDLREIRDLTRQYQNMIHDWVRVKNRITKTLRHACITLDAYMADIFGVSGQVIIQSLIDGVPGKEAAKLVKGKLKKNIPNLEAALRYPLSNHYREILARYWRQYLFLQDELANLDIEINMRMKPYKAPIKQLQTLPGFGQKMSCNIISEMGDDMSCFPKAENLCSWVKICPGNNSSGGKRKSGRNSKGNKYLRSYLVEAAWAAVRTRGSEFRELYYRRCARLGKKKAIVSVAHKMLRIIYTMLSKGIDYDKAYELHNSQANKKAWKNKGLVSLTNEELVSELLSRGADKVIWSWEDSEAALTI

SEQ ID NO: 162368 - protein, 365 aa, unidentified
MEEQKLTEGRFVGIDLGKRTYEVAIVGKGGKVTKSNGKTHIAGRQHLYKKLRPHDKVALEAGNLAFIIGKEIEAAVGCKVYVLNPSNLALIYGSMKKTDKEDALKLAHILEDYNEERLPLVPIPSEKEMQRRKLVSSYNRTQQSRNRDINQLHALFVSQGITTKVRKDLSTDELRREAIRELSGLERKEGEYLVKRLLLIDVRLEELEKDMEEEAKGDEQIQRLQEVPGVGPKTSFAFVAFIGVERFENAGQVSNYLGLVPRVYISGETVRYGRITKRGNGYLRALLVQASWALIRTREGGKLKALYEHMTIEKSKSKKKAIVAVARQLAELMYTLMREKTRYESRQFVPEKSEAKELARLALSA

SEQ ID NO: 162369 - protein, 411 aa, unidentified
MDKIYDKCCGIDVHKKLIVACFRRGNRQEVREFGATTRELLTLADWLKEGGCQMVAMESTASYWKPLYNILESSDLNAMVVNAHHMKAVPGRKTDVKDAEWIADLLQHGLLQASYIPDKDQRELRELVRYRKSLVGERTRELNRLQKMLEGANIKLSGTVEDINGRSARNLLEYLLTGKPFDEAKYDEMYEKKLIAHNLKATKEQIIEDLNGVMTPLQRRMMKELPAHLDELNVHIKNLDDEIDNFMKPEEKQASQAIQSVTGIGNTSAQAVISVTGTDMERFPTDAHISSWAGLCPGDNESAKKRKSGKTRKGNALLRTTLITCAHSAVKNKSSCFYAQYMRISAHRGKKRAYVAVAHSMLTAIYHILKEGVVFKDPGADYYNQFNKERKINAYLKKLKSLGWEPTVVAT

SEQ ID NO: 162370 - protein, 327 aa, unidentified
MNTQYIGLDAHSSTCTFCVMDPQGVEIDNKTIVTNGRLLVDYVQSLGNKSILAFEECDLSCWLFDILHKHVREVVVCNPAQNAQYKRAKTDKLDARNLANLLRGGYLKPVFHDASAREKLRMLVSSYQDNLQEVVRIKNRLKTIKRRVRLYPKKDAPVHAAFIQEQLTSHLEQLLISHKEYQQQITRCVQRFKETTILMSIPGIGYIHSAKIIAQVIDPERFKSKYKFFAYCGLVKHPRISANRNYGSTRIWGNRTLKCVFKMAAHCAIGGHNALNVLYGHLLDKGVSDRNARNAIARKIATLTLSLWKNNQRFSNEIILEGLPVKV

SEQ ID NO: 162371 - protein, 381 aa, unidentified
MPEEIDQWARGLADRLPGGKIAVCLEPSKGSLISALLKDDHWVLYPINPRMLAKCREALAPSGKKDDPADAQLLLELVGKHQAKLKPWRPAAEHTRTLPFFVEPRRKLVQDKTRLTNRLTSVLKGYFPHVLRWFAALDTPLVWDFLKQWPTLEAVQNTDDTALRTFFRAHRSHNPAINQQRMDGIRQAIPATTAQAVIRSSVMVVHTLVEPVRGLAEAIHRFEQEIEGLTRSHADLQIFASLPGAGPVHAARLLSALGTDRSRYECVEDFRTFAGIAPIIERSGKTIVTHFRWFCPTFLRHSCHEFAGQSIPYSRWAKAFYRHQRMRGKDHQAAVRSLAFKWTPIIFQMWKSRTPYHERTYMAALQRRGSPLCQVLAEHPA

SEQ ID NO: 162372 - protein, 322 aa, unidentified
MNKYKETFGIDISKDVFDCYGSVQGHLQFKNDEQGFKKFQKTLCKNSLVVMEATGYYHYRLAQYLYKNGVIVSVVNPLSIKRFIQMKLAKVKTDKSDSKAICEYGLTQEVPLYNALTDIQSECLQLFRWMDSLLKKRTATKNKIHGEQVLGIPSTFVYRSLQRTLKYLDKELRGIDEKLLSLVRQDQQQQLTLLKSIPGIGLKTALFLIVVTDGFTKFENASQLCSYVGITPTIRESGSSVRGRARISKVGNRKLRNLLFLCAFSAYKHNKGCREIFERITNKGKSKKLALIAVSNKLLRQAFAIAKAGIPYDETHVSFLPK

SEQ ID NO: 162373 - protein, 340 aa, unidentified
MSSMQIGVDLAKSVFEVAVSKVPGRVHERRRLSRAALTAFFAARPPAEVLLEACGSAHHWGRELQRLGHTVRLLPAGDVARYRAGNKTDRADAKALLEAARNEKISRVPVKSVEQQAVVALHRIRQGYLQTRTARINAVRGHLREFGCVIPVGAAQVVPRAYAALDQDAVPVLLRPALQTVLEEIAALETQAEAVRTELIRLAAQMPDGQLLLTVPGVGILTATALVAFVGDIHRFRSGRDFAAYLGLTPREHSSGPVRRLGAITKRGNSYVRMLLIHGARSALRAGTVTPHPDDLRTWARALADRKGHNVAAVALANKLARVCWRVWHDQRPFERREPR

SEQ ID NO: 162374 - protein, 356 aa, unidentified
MSHKLNSAIAVIGIDIGKNSFHAVGQDKRGEIVLRQKWSRGQVEARLANLSPCLIGMEACVGAHHLSRKLQALGHDARLMPAKYVRPYSKGQKNDFRDAEAIAEAVQRPTMRFVATKTTDQLDLQALHRVRERLVGQRTGIINQIRAFLLERGIAVRQGLRFLRAELPSILANRTDALSPRMLQIIERLADDWHRLDERIEGLSSEITALACQDRGCERLMTVPGIGPIISSAMVAAIGTGDAFSKGRDFGAWLGLVPKQISTGDRTILGSISKRGNRYLRALFVQAAWVVLVKVGPKHWERYGLKSWIETAKKRLHHNVLAIALANKLARIAWAVLHKGRAFECVKTNATAPRPA

SEQ ID NO: 162375 - protein, 342 aa, unidentified
MSYLGVDLHTNSFTVCRRTQQGKNSIRTFQISRISDFRKTLRKRDLLAVEATGNTAWFVSQIRDRVKKVTVVNPFQFEVVRRSVKKTDKNDSKTLALFLSKDMLPEARMKTKENAQLHSLATTRDKLVKQRTALINKVHNVLNSYGIKFKKESLGSEKGLKSVWAYDWDVIVRIELEVLVEQIRSLNKSIKTLDKEMSDHGQKLKGHESLTSIKGIASRSATVLLSVIGDVNDFADENKLAAYFGIVPRVSDSNETVRHGRITKHGSKLGRTTLVQCTLVAKRYSPYLHQYYERIKSHRGSGKAIIATARKFLAIIYNTLKNEWIFEDFPNFVLASSCVKKQ

SEQ ID NO: 162376 - protein, 382 aa, unidentified
MSLYFVGIDISKYKHDCCIISATDQKVISKFSIKNDKVGFEELITTFNSLSSPEDIRIGFESTAHYALNLELFLENAHHSFMEVNPVLIKEYKKSTTLRRTKTDSVDCESIARWLMTVEYKPHSKGFYHAYSLKSLTRLRDRLIRQRSFYLVKITNVLDHTFPEFKPFFNERLSKTALYLLENYGSAEKMARMNSVSYEKLRSISRGKFSPQQFIALKELAANTVGVNNSIFDVELNSLLILYKTLVTEINTLEKEINLLIEEVHPHYLSVPGIGSISAAIIYSEYGDISNFDNPGQMLAFAGIEPHGGRMVKRGSSQLRYALINCCLPLIRFDMTFATYYAKKRAEGKPHRVAITHVAKKLIRVIYALERQNTDFCVQKLR

SEQ ID NO: 162377 - protein, 339 aa, unidentified
MKLYAAIDLHANNSVLVIMDEEDRVVHEQRYPNELPGILAQLAPYKKKIQGIAVESTYNWYWLVDGLMEAGYIVKLVNTAAVKVYEGLKYTGDEHDARHLAHLMRLGLLPTGYIHPKEERAVRDLLRKRAQLVRCRTTQILSIQAMVSRNSGKRVNTDGVRKLDDAVIKEICGGNPALSLAIQGNLAVMRCLDEQISGIESVVLKQAKLKPEFKMLLTVDGIWHTLGMMIMYEAGDMDRFETVGQFASYARCVNSTRWSNGKKKGEGNRKNGNKYLAWAFIEAAHYAARYNERIRSYYDRKAKKTNKFVAAKAVAHKLARACYHVIKEQTPFDEARAFA

SEQ ID NO: 162378 - protein, 309 aa, unidentified
MIVCGVDVSKRRLDAHVAPSGAFESFDNDAAGIAALANFCRQQGVQLVAMEATGGYERQAFLLLWEAGMACGLTNPRSVRRYAEAMGILEKTDRLDAGVIARFAIAKDLKPTSPPTTAQQRLNALVARLRQVTDDLTVQKQRRSSAMNEEMVTSINEVIALLKRQTRTLAGEIGSMIDDDPLWSQLDAALRVKGVADRTVARMLAELPEIGIYSNKAVVKLAGLAPLAHDSGARAGKRHIRGGRAGIRSILFLVANIVRRFDQSLADFHRKLTAAGKPKMVVRIALARKLLVRLNAKARQARESYALAT

SEQ ID NO: 162379 - protein, 370 aa, unidentified
MQTIRSFVGMDVHKATISISVAEDGRSGPVRFLGVIPNQPDDIAKMAKRLAKHGELDFCYEASSCGYNIHRQLTGLGHKCTVAAPSMIPRKPGERIKTDRRDSEKLAILHRAGDLTPVWVPDTTHEALRDLVRARVDASMHLMRARQQLLAFLLRHGRSYPTGKHWTQRHRCWLAGQTFKEQAHGIVFQDYLETVWTAQDRRDALVKKISEMVAVWSLGPLVEALRGLRSVDLVSAATFIASTGDLSRFESPRLLMGYLGLVPSEHSSGGTIRRGGITKTGNREARRMLIEAAWSYQYPARIAKEKAEILVRLPKTIRDIAWNAQSRLCARYRSLIARGKKPTVVVTAIARELAGFIWAIGQEMRAPMTA

SEQ ID NO: 162380 - protein, 340 aa, unidentified
MKKEAKFYLGMDVSKLWIDIAVMSVVNHEKQQVITERFDNDAAGMKALDKWLKKHQVTFDENSLLVIENTGVYHRLVWQYCSTHALPLYIGNATHIKYSFGIARGKNDKIDSQRLCAYAFKNADELKATPVLNPVFLRLKDMMTARSRLLAQKNSIKVYLGEMKSSNSEETQQIIEQAHKAALEGIKQSIKIVEKQIEQMIQQDAAIKKNYDLLLSVPGIGHLTAVYVICCTNNFICKITGKQLASYGGVAPFSNTSGTSIKGRDKVHKMANKDLKKLLHMGAISAITHYPEFRDYYERKVKEGKHEQSVINAVRSKIALRAVSVINNQQLYVDKYKKAA

SEQ ID NO: 162381 - protein, 343 aa, unidentified
MDYFAGLDVSVKETSVCIVDDAGKIVREARVASEPEALLQVLTNILHRFKRVGLEAGPLSQWLYSSLTEAGLPVICVETRHMQAVLRAQINKTDRNDARGIAQMMRAGLYRPVHVKTLRSQKLRMLLTHRKLLQSKAIAIENDLRATLRNFGLKVGIVGTVKFEARIKELVAKLPDVALLVEPLLVVRRVLREQVGILHRRLLAVVRDDDVCRRLMTIPGVGPVVALTYRVTVDVPARFRNSKAVGAVFGLTPAKYQSGENDRTGAISRCGDEMMRVMLYEAAQSMLVRSTKWSWLKAWAMKIARHRGMKKAIVALARRLAVIMHRMWVDGTAFRWTREVAVA

SEQ ID NO: 162382 - protein, 355 aa, unidentified
MNTLTSNSIFVGVDVHKYGHSAVALDVLGQEKGKLDFTNQTLLPFTTWLASLGDKDNIVVGLEDTNCYGTHMVESLRKESFHIRYVPAILTERERKRSTKREKSDYVDAKRVGRVILTKYEETLPAKESIADERELQTARSLDLLLMERRDLVKHKTILKNQLHALIYQRYTESYRTVVPRSFTKKSIRWFLSDTRNDETILAASIVRRLLRLLFVENHIYAISKEITIIGSQSKEALSLTAIHGCGMVTASAIMAEVITVKRFADKHCFSMYAGVAPTERSSGRKQTMHTNPFGNRQLNKAIHTIALSQIAIKGDPTGKEYYQRKLKEGKTKLWALRCLKHQIAKRVFQTLRYC

SEQ ID NO: 162383 - protein, 340 aa, unidentified
MSEKEAILGIDISKDKFSAALLKGEKKSQVKEFSNNLEGFEQLKQWLEQNQLEKVHACLEATSTYGHSVATYLHGLGHVVSIVNPARIKGFAQSRLSRTKNDQADATTIARFCAALKPQAWTPPSPEMAQLQSYSRRLRALEQMATQEKNRLKTTVDESLIEDIEAHLVFLETQIDNVKKRQKELLNEYSSLKSQADLLTSIVGIGEPTAMTILAEIGDINQFSSARQLAAFAGLTPQEHQSGTSVKGKTRLCKIGNPHLRKALYFPALSSIRHCSPIKDLRERFLEAGKNKMQIVGVVMHKLIRIVYGVLKSGKPFDQTKLALPNVVLEEETDFLPASP

SEQ ID NO: 162384 - protein, 352 aa, unidentified
MRRAPMKYVGLDVHAAHCDICVVDDDGQVIFETSCTTNGSELVKVLAVIAEPKVAVLEETTLADWVYRVLQPHVGRVVVSDPRQNALIAKDENLNDKTAALKLALLLRAGFIHEVHHGSLERHDFKRLVLFYHKQTRTLIRLRNQLKAVFRSDAIACPGSRVYAADKREEWLAKLTSASAQFEARELLASIEYLAQSKARTYRQLTCRARQFPLIKRFQQVPGIGLVRAATYFAIVDTPQRFARKSKLWAYCGIGIARRSSGDSAGPEHLNRNGNPLLKDVVKGAATAAISSTGRFEAQYARLLAEHVSPEHARLIIARSLVGTLDAMWRKGQPYQPGYRWVSQPTEVAARA

SEQ ID NO: 162385 - protein, 320 aa, unidentified
MTILTSPTVVGIDVAKAEIVVYREDLENTQFISNDRTAIGRWLKTLPAQSSIALEATSLYHLDAAELAHGMGHRVYVVDAYRVSHYRESIGQRAKTDPCDARLLARYLSSEQQRLRIWNPPPPLYTVLKSLLNKRAQLIKAHVALMLSWSSEPLLKALSAQQLEHFKQSDQAIQKLLRKASQEAGISENIRRCKAIEGIGELTATGLATTFMRGHFASADAFIAFLGMDLRAKDSAKKHSPRHLSKKGDGELRRLAHNAAMAACRSPVWKPYYECYLARGLARTQALVILARKLCRVAFALMKNQSEYQPNLKLQGSPAT

SEQ ID NO: 162386 - protein, 348 aa, unidentified
MTVFIGLDISLDETHICVVDEEGKTLKESKVMTEPEAIAPVLRRFEGRIKRVGFEASSLSPWLSNELIKLGFPAIIVETRHMASALGAMRNKTDRNDARGLAQMMRTGWYRSVHVKSDDSHRLRILLTNRRILKRKFLDIENAIRGTLKVFGIKMTRTTRGRFEQDLMVKLAEADPMLREMTQSMLEARRTLLEQHSRCHKLVLQVVRGDDVCRRFMTVPGVGPITALEFKTTIDNPTRFKKSKTVGAHLGLTPKRYQSGTVDYEGRISKCGDPEMRTLLYEAASSLLTRVQSWSVLKAWGMSLQKRAGKRRATVAVARKLSVILHRMWVDGSEFIASRDDLNAAKVA

SEQ ID NO: 162387 - protein, 426 aa, unidentified
MLNSQINKIQAITSDTLIVGVDIAKNIQWAQFINFRGIEVSKHICFENNYSGFNSIMEKIEEIKSKNNFLSVIVGMEPTGHYWKTFVTFLHNNGIKVVQVNPYHTKKAKELDDNSQTKSDKKDALVIAKLIKDGRYSAIYFPEGEYADLRNLSNTRLEVSRLLNICKNRIHACVDEYFPEFETVFKSFIKGKVALHILKRIPFPTDILGLALEDIISVIREAAKKSVGKKKAEELIRAAKVSIGVKVGLEGARIRLNNLLEEYELYHNQLEKIEKEMAQELEKTGYKDILTSIPGIGIISAASFIGEIGDPKRFSNPQQIIRLAGYNLVEDSSGKHKSKTMISKRGRKILRTILYKISLIVVCKNQEIKLLYKYLITRKENPLKKKQALIVISGKMVKIMYSLIKKEEVYDKEKVLGIYRKQQIVA

SEQ ID NO: 162388 - protein, 430 aa, unidentified
MKSNTQNAKIEAITEKTLVLGIDVGSETHYARAFDYRGIEYSKKPFKFSNTEAGFVTFKEWILDLKERHEKDKVVPGMEPTGHYWFNLGKFLQDNEMKPVLVNPHHVKKSKELDDNNPTKNDRKDPKVIAGLVREGRYMIPYLPEGVYADLRTASNIRFQLQAELTRIQNRISRWFNIYFPEYKTVYGKPDAKSGMLILKAAPLPEDILTLGIDGVNQIWRDAKLRAVGKARAKTLIEAAKHSVGSKEGAVAARMEIRMLLEDYESRNTRLQEVMVLIEELVRKIPMAEKLLEIKGVGIRTVSGFLAEVGDISRFNNPKELQKLAGLALVENSSGKHKGETTISRRGRKRLRYLLFEVAMSLVSKNQEFRELHNYYTTRRLNPLKKMQSLMAIAAKLIRVFYAMLTKGVDYDPKKMVSDIKRPAVYLQAA

SEQ ID NO: 162389 - protein, 414 aa, unidentified
MKVEVVHWRCAGLDVHKATVVACIRLMADGKVAREVRTFGTTTAALLELSAWLAEHEVRHIAMEATGVYWKPVWHILSDGEFELVLANAAHIKNVPGRKTDVNDATWIAELLAHGLIRASFVPGEEIQELRVLMRTRKQLVREQTSHTQRLQKTLEDANIKLDSLISDILGVSGRRMLEALIAGESDAEKLAALAHRRIKASQEELQTALHGRVTENHRFLLHLHLRQIDGLTALIAEIDHKVADQLRPFRDALGQVSTVPGIRDVAAPAILAEIGVDMSLFPTAAHLLSWAGLCCGNNQSADKRRRTRLRKGSRWLKEALIQSAWAAVRTKGTYYRAQYYRLIARMDKKKAICAVAASMLTAIYHMLTDGTLHQDLGADYFARRSKQSRTNRLVKQLVSLGYHVEITPTETAA

SEQ ID NO: 162390 - protein, 359 aa, unidentified
MDAQEGAVRRIIGGVDTHKDLHVAAVVDEQDRVLGTQSFASTRQGYRQMLAWMRSFGEVQRVGVESTGSYGAGLLRFLQQAGVTVLEVTTPDRQDRRRRGKNDDFDAQNAAHAAFAGIRTVTPKSRDGMIEALRVLSACRKTAVTARRIALQMIQNTIVCAPESLREMLRRMTRMQLVRTLAAWRPDLTAYRDVEAAYRISLKSLARRYLELHDEIADLDAMIAAIVDELAPNLVARNSIGHRGAAQLLLTAGDNPQRLRSEAGFAALCGVSPVPASSGKTARHRLNRGGDRAANSALHIIAIGRLRTDARTQAYVAKRIGEGHSKLEAIRCLKRYIAREVFTLIKQRQREINNTRIAA

SEQ ID NO: 162391 - protein, 441 aa, unidentified
MPQSEFIAYIAIDWADSQHYWKLADAEETRREQGHLLHKPEAIDIWVGELLARFPQGSVAVCLEQSRGPLVYQLSKYPRLVLYPVHPATLASYRKAFFPSGSKSDPGDTGLLLELLLHHRQHLRRLDPDTAETRLLLMLIELRRRLVDERTRQSNRLTAWLKMYFPQPLDWIDNIDSPLGCAFLERWPTLEQLQRARAETIERFFREHNSRSEERIQERVTAIRAALPAVNDQALLQAGTLATTSLVALLKALNDSIATLDLKIAEQVPKHPEAGLFHGLPGAGPALLPRLIVAFGTRRDRFQSAAELAAYSGIAPVTRQSGNSKTVHFRLSCPKFLRQTFQEFAAHSVIKSVWARQYYEQQRNRGMRHAMIVRSLAFKWIRILFRCWKERTPYDEERYLRALERRRAPRNSPSQSSSDEEIRMTDAEVPCPGLARPELPE

SEQ ID NO: 162392 - protein, 473 aa, unidentified
MSKGSGISRTDRRRNARKASLRGLVPRDGVVLGIDLGEDKQALALVDHDVQVLWRRSVRVKAHQLGAMIDAAVAATRKAGLGPVTVACEPTGPRWLQVQRLCRERGLALVCIQPLMSHASRRQQDLTGHKRDESDAVMIARLASELHCYIPEELDEAWALLRDLGRRRAQLARAETASVLRIRDFLSVAWPSVLSAAAGPFRSGTWLAAVEVVTRECGSDPGKLAGMGEEEFAGMVRAALPGWGIRRISLRVARNVLAVLADPDAVPWARRGRFRRIREELADLQRSRALLAAVEDEMEALVAGELGLARLAEVPGLTVKTVAVILAEAGDPRRYDTSKSLVKHAGLSPADTASGASEGESHISRRGRPGLRLAAWRAITPLLLHNPVMAAKYQALTADAEEAARAAQARAKPGSAQAAQAARGVRGARAKARVACAASLLRWIYYMTVHDAGWDPVAASGGRLAPAELEEAA

SEQ ID NO: 162393 - protein, 369 aa, unidentified
MDDITFVGLDVHKATVCIAIAQGMRGGEVRQLGVFENRREVLSKVVSRLSKGGRRLSFCYEAGPCGYGLHRLLTGYGHECVVVAPSLIPMKAGDRVKTDRRDALMLAKLHRAGELTAIWIPDAAHEAMRDLVRARATAVRVLAKARQHLQGFLLRHERIYHGARAWTLAYRRWLTTVRFEHPAQQIVLQDYIHAVQEAEARRDRLTQQIEELLPNWSMAPVVAALQSMRGVALVVAVTVVAEVGDFRRFANPRQLMAYFGLVPSEHSSGSSVRRGGITKAGNALARRVLIEGAWTYRMSARVSCKLHNRLEGLPAAVRDIAWKAQLRLCARYRRLAATGRPKVMVTTAIAREMVGFIWAIARLAQPALV

SEQ ID NO: 162394 - protein, 398 aa, unidentified
MTESSDYESVQVFIGVDVGKDTHHAVAINRSGKRLFDKALPNDENKLRSLISDLKQHGQILLVVDQPATIGALPVAVARSEGVLVGYLPGLAMRRIADLHAGEAKTDARDAAIIAEAARTLPHALRTLKLADEQIAELSMLCGFDDDLAAQTTQASNRLRGLLTQIHPALERVLGPRLEHPAVLDLLQRYPSPEKLASLGEKKLAAQLCKLAPRLGKRLAADIAQALAEQTVVVPGTNAAAVVLPRLALQLITLRKQRDEVALEVEQRVLAHPLYPVLTSMPGVGVRTAARLLTEVACRAFASAAHLAAYAGLAPVTRRSGSSIRGEHLSRRGNKALKRALFLLAFAALRDPLSRAYYTRKMSQGKRHNQALIALARRRCDVLFAMMRDGTFYTPQGS

SEQ ID NO: 162395 - protein, 429 aa, unidentified
MTRISVGVDVSKNRSTVCIMDQDGKVIMRPFLVWHSTEELDFLADTLKRLNGEVRVIMESTSIYQYPIALHLKEKGIFISIVNAYKVKKFANTDFRGGKTDKKDSRTIASYGISYWDKLVEWQIPKDTYFNLDLLNRTYMNAKKHRQIILQELQHYIDCAMPGMDKELRSLNLSTKKDFMLDFVEKSWHRDEIVNMTEAEFTEVFTAWAKKKGYRPVEGKAAKIYAIAKSCIPYYPANPTVKTILQCIVDKLSGVNRTLVTIVTQMIEEAKKLPEYQIVREMPGVGDPLAARFFGSAGDIRRFKNSKALVAYAGIDSPPDESGDFSSTHRHITKKGSKVFHDTGYEIMMALRAQKRTWEKVRKNPEVYDYMLRKEAEEKPRKVAKIAALNKFLRIVYARIKELYDNMALAERAKTKTRYKTRAKTKATA

SEQ ID NO: 162396 - protein, 351 aa, unidentified
MIIVGVDYHPSVQQVAFLDTETGETGERRLNHSDGEAERFYRDLQRRQVKVRVGIEATGHARWFERLLAELKFELWIGDPARIKAARVRKQKTDRQDAQLLLRLLIEGRFPQIWVPSPENRDLRQLIWHRHRLVQMRTRAMNQIQAAAMNEGVRRKKTLWSKTGRRQLEALPLAPWATRRRQDLLELVDRLNTTIDELTAAAEQEARKRPEVLRLMTHPGVGPITALAFVLVLGSPDRFGCGHQIGSYLGLIPCEDSSADRQRLGHITKQGSSLLRFLLVEAAQAAVRWDPDWRRRFVHLAMRRDRRIAKVAMARKLAVSLYWMWRKGFDYPQTLQFGSHAGEPGYVHGVK

SEQ ID NO: 162397 - protein, 356 aa, unidentified
MARNSLSALQNFVGVHQSDPFWVGIDVHKRSYHIALLRADHKTFTFTTTASPDAFIEQLQRLDILVAGVAYEAGPTGFSLARALVAEKIPVMVAAPSKIPRSVSAGAKTDRLDCLKLAHYAAKGLIRPIAIPTAEEEARRALLRRRHQLVDRVRQCKQRIKGFLLYHGFKETDAIRNWRSDCDEQIAALPLLPEGRMTVESHLRELRFLKQELSDVADQLESLNRQPEHRPVIQALTSVPGVGKVVATTFHLELFRPERFRRGDEVASYLGLAPTVRHSGEKTPRGYLVPVGQKRLRSLLIEAAWMWRAKDPKAGELYNKLLGKTGVPQKAIAALARRLAIILWRLSIEQRAYRPA

SEQ ID NO: 162398 - protein, 343 aa, unidentified
MSVIIGVDPHKATHTAVAISSSEHELGRKKVRSGAHQAEQLLDWAASFETRTWAIEFAGGLGYLLAQQLVAAGETVVDVPATLASRVRVLATGRSNKNDPNDAVSVGVAALRSPGLRRVEAAGHSEVLRLLAKRNTDIGNHRTRVVCRMHALLAELAGGGISKEINASDVDRFLATLAPATPVERARYGLAVELLEDIRRLDAQLKASHQRIRVAVRASGTSVTDLFGVGPIIAAELIGYTGDVCRFRNRDQFAAYNGTAPVEFSSGGRIVHRLSERGNRQLNHAIHMAAICQLRQPHSDGRAYFERKVAEGKTNKEAIRALKRQISNAVYRHLVADARHTAR

SEQ ID NO: 162399 - protein, 374 aa, unidentified
MSSNAITWVGLDAHKNSIHVAMLVPGRTEPLCWQEANEETAVRRLARRLTREAPGEVRACYEAGPLGYALQRQLEAQQVICEVVAPSLIPIKPGERIKTDWRDARKLAELLRSGMLTTVQPPNEADEALRDLCRGRDSVRQDLTRARHRMSKFLLRRGYRYRDTQRHWGVRHMKWLRPLAFEHASAQAIFDHYLLTIDHLDERLRQVDAHLERFGGQEPYRQPVAWLRCFRGIDTVTAVSLVAELHDFRRFRSARALMAYLGLVPSEHSSGERRRQGSITRAGNRHVRRLLVEAAWHHRHRPVLSQPLRKRREGQPAHIIAIADRAQERLHGRFMRMTRRGIHYNKVVVAMARELVGYLWATLYPHEVEAPPSA

SEQ ID NO: 162400 - protein, 417 aa, unidentified
MRVNEKIERITPDTLICGIDIGKTKCCARFCDYRGLEVYHKVWFDKTENLDAIGCQITAAMYNENKTDVIISFEPTGHYWLNIDKYFKDCGQETVLMPTYTVKQAKEMHDQNPTKSDPKDALLIARLTSEGKYVKPIERDELYQNIYSGYSIYEDIQKEINRIRNKIHVWNDKYFPEVEKVYKIDSVGIKPIYENQLLPNEIKNMTLENFTELMIKDNSRANKKSIMKLKELCEKSNGICSDAFTKKEIRRLYERFIEMLKELEEYEKELIELASQIDYVEKAVEITGIGYMSMIGIIAETGNLKKYEHAKQVLKMSGLSLKESSSGQKKGKKHISKRGRSKLRRNLKQIGICLVGKNNFFLQLHNYYTTERTNPLTKLVSINAIIRKFMYILMAIVKSGESFSEEKAIRESCINFS

SEQ ID NO: 162401 - protein, 452 aa, unidentified
MEEPQEVQDEEYERVWERVAAIDVAKASGVVCTRVPDESRPGRRRTRVWAVTATMNAVTELADHLRGHQIEVVTLESTSDYWRVWHVVLEAAGLRVQLAGARAVKNVPGRAKTDKKDAVWLAKLTERGMLRPSFVPPPEIRRLREFTRLRADLVHERTRYWARLEKLLERALIKISAVASSVDTQSVRAMIEALIAGQRNPKALADLAKGKLRAKRAQLAEAADGKFEDHHGELARIILDQIDALTARIDQLSARISELIEAIPAAQGIDADGTTGPGAGTGPGAPVLPAVARLDEITGCGTVAAQAIIAEIGLDMTVFSTPGRLVSWARRCPQTRQSGTKTTSGKAGKGNPYLNGIPGEIAASAGRTDTFLGERYRRLARRRGKRKAVTAVARSVLVIIFHLLADPEARFCDLGPDYYNTRISRERKIAGHVRQLQALGLTVTLTPADAAA

SEQ ID NO: 162402 - protein, 402 aa, unidentified
MVVKNPKALVSKKRTPHSNRPIAGRDCHAQVSLDNADTVIDGATETIASTHRRLEPEEASMRIIGVDLHTRQQTIAMLDTETGEVTEKTLKHEGDTVRKFYEALPGPVQVGIEATGSMHWFLELLEELGIACRVGHPAEIRKAESRKQKHDRRDAALQLKLQIEDRFPSIGMPSTELRDLRTLLRHRHQWVRMRTRVQNALQALAVSRGLRRGKTLWSQAGQQAIESLPLPPQAAYRRTELQGLYRLLHEQIEELDHRVREQAVQRPGAQRLLTHPGVGPVTALATDVFLGDPARFEDSKTLASYVGMIPGEYSSAGKQRFGKLSHYTRRMLVQTWVREENDETIDMDGSDLFGRADGCSLAGPGAESSLNKVAGDPRRLLKILGRHWRSNARREVQLPSYS

SEQ ID NO: 162403 - protein, 345 aa, unidentified
MELHTIGIDLGKTVFHLVGMNLRGEAVVRKKLSRKQLLQFTANLHVDLIGMEACGGSHFLGRALREQGHEVRLMPAQYVKPYVKTNKSDFIDAEAIAEAVARPTMRFVPIKTDDQLDMQSLHRVRERWVMRRTAIVNQIRGLLLERGITLRKGRSHVDAALPGILEDADSKLSGALRVLLAQLKLELDQMAIRIDEADAVLNKTAHENEAWQRLVKIPGIGPITATALIAAIGNGGAFRKGREFAAWMGVVPREHSTGGKQKLLGISKHGNSYLRKLFIQGARAVLQQRTKQAPGLNEWLAQLAGRAHNNVVAVALANKLARIAWAVLAKEEQYHPPTLTSLEAA

SEQ ID NO: 162404 - protein, 358 aa, unidentified
MTSMPDRQLSITGGVDTHKDFHVAAALDQMGTVLQTAQFATTKADYLNLVAWLESFGPVMGVGVEGTGSWGKGLTRVLIGAGISVVEVIRPNRQTRRRYGKSDIADAIAAARAVLNGEASAQPRDPQGPVESIRRLKVARISAIKQRTAVANQIHAGLATATEPVRGPLTTMTMTQIINRITRYRPGEVSCVTQAAKLALKTLGHRHRNLSTEIEMIDQHLETLVALAAPPELINMFGVGTQTAAELLITAGNNPQRITSESSFAALCGVSPVDASSGKQIRHRLNRGGDRQANSALHRIVIVRLAHHQPTRQYMARRTAQGLTKREIIRCLKRYLAREIYQHLTNHQTHQHTIPKAA

SEQ ID NO: 162405 - protein, 344 aa, unidentified
MPMYQLGIDVSKNTLDLCLLREGIKGRIKTRKLKNTADAAKVVAEWLKKQSCELGEVHIIMEATGVYHEPLAYGLHFAGARISLANPHRTREFARGMNILTKNDKVDAWMLACYGSLKEPEAWTPPPESVRYLRALLRRRDALVADSTREKNGLEKSVFTDSPDAVRASIENMLQELSNEIEHLDVLIQEHIKTHPELNQDFRLLTSIKSVGYLLGLNMLAILKSHSFESAEQAAAFLGVVPVERRSGTSVKGKPKLSKIGPPEIRTKLYLAALCGLRFNPVMKQMYTKLCQRGKSKMCAIGALMRKLVHWCYGVLKTQLPFDAEHNQQSYYKTTCYSTPSEQY

SEQ ID NO: 162406 - protein, 390 aa, unidentified
MVYVGIDVASQKHDFFIMNDLGEAYTTHSITISNSNEGYKKLHNSIQEFCGATNDFKVRIGLESTGFYHKNIVSYLLSLDYEIMVINPILTNMYKKSKKVHIQKNDNIDSIYICMYLGDTHTVFKPYTIVSYHSDTLKALSRDRFSLVEELRLAKIGIYRLLVHVFPEYLKLFSNIYQKSALSILERYNNPDRLSKAHISTISSLIHGKCRVSAIDIINAAKNSIGIKDDCLYFELERAIIRLRYIKSQIEEYNKKIKRYIELLNSPILSIPGISYITAGIILGEIGDINNFKNAESLISYSGLDVIIYESGKYKRTNLSISKKGSIYLRYALYQAARVCWMFDPMFHNFYLKKQNENKHFYVILGHIEKKLVKVIYSVLKNNKPYSPHL

SEQ ID NO: 162407 - protein, 316 aa, unidentified
MGKMIIGVDVAKEWIDVSIAGDGRVKRIVNSEQAIAAWIVQTGAGSIGLVAFEPTGGYERHLRRCLLRAKVTSKQVHPNEVVAYRRRRGIKAKTDRIDAKLLADFAAEELARRELEPVPQADEVLRELASRRRQLQAMLHAETCRCDVADSASVRKSLQAVIATLERSLAAVDRAIAERIANSAHAETSRRLQTFCGVGPAIAETLIADVPELGHLSGKKIAALCGLAPHTRESGNQRGHASTGHGRPGVRKVLFNGARSAIQHNPVMTAFYRRLVDQNHRLGKVALTAVMRKMLVILNAMIRDGSDWKHAAGPAA

SEQ ID NO: 162408 - protein, 345 aa, unidentified
MGKDIVVGLDLAKNVFQVQVNDAQGKKLRSKKLKRSEVMEYFAQLPPSLVGMEACGGAHEWARRIGSCGHQIKMMAPQYVKPYVQRDKSDARDAGGIAEAVVRPAVPAVRIRTRAEQELQSLHRVRELWQKQRIATTNQLRGLLAEFGEVMSPGAKKLREQVRAWQGRAADGMLRQLVEDLLTHWSALETQLSALEARIQVAHRASTESRRLDTIPGVGVLTATATVAAFGNASTFATARRFACGLGLTPREHSSGGREVKLGISKRGNSYVRRLLIHGARAVVKVRMSNPKYANDWVVKLAQRRGHNIAVVALAAKNARRMWAVLRSGQAFDANYVHPVAGAAD

SEQ ID NO: 162409 - protein, 336 aa, unidentified
MSLELSSACVVDAQGKILKEAKVASEPDALVEFFETLGFAVKRIGLEAGPLSQWLHAGLKGAGFETVLLETRHVKAALSAMTVKTDRKDARGIAQLIRMGWFRQVHAKSVDAQEIRALLIARKQLLGRLIDVELSIRGILRGFGLKVGPVTRRNFEARILELVAGQATLERIAGAMLSARSALKAEYGKLHKAVLAIVRDDAVCSRLMTVPGVGPLVAITYKSAIDDPHRIVKSKAAGALFGLTPKKYQSGEKDVTGGITLAGDETVRTALYEAANVLLSRITRFSKLKRWGMDVAKRRGSKRAKVALARKLAVILHRIWVDGTTYRWAEAGSIAA

SEQ ID NO: 162410 - protein, 465 aa, unidentified
MKKISYRSVSIEKISVAMLVGLLSGAKKLVVAIDVAKTKMMAGFGSEDGSIVRLVRFTSPSQTRAFVTLVSQTGESLGVPVEALMEPTGTYGDALRALLREAGAEVFMLSPKRVHDAREVFDGVPSLHDPKACVLLARLHHQEISRRYEERSEERRRMRALVDQRQIYRKPMQQHLGQLEALLSRHWPELLDETDVWTRVTPLKVLEHYGCPAEVARDRQGAEALMRSASRGAMSASTIGQVVDSASRSIGVKTTNEERTLIQDLAREALRLRDALGELDKRLEKLAVNNEATAGLSTAVGRITAVVLVAFLGPLGDYESAAALEKACGLNLKIKSSGNKRGRVSITKRGSAEVRAYLYLAAVRLVRLDPLIGAWYRSRAAYREDRKVVALVAVMRKLIRALWHVARGEPFNADKLIDRRALLPHAPELAISDDSAKASNAVSPQAHGAHSPAVATTTSHHAPSP

SEQ ID NO: 162411 - protein, 383 aa, unidentified
MDAPDRALQGQDMPIIGRLYMAFELGEKSWKLSLGDGVRGPSRCTVAAGDTASVLAAIVKAKARCHLATDAPVRSCYEAGRDGFWLHRWLVAQGITNLVVDSASIEVNRRARRAKTDRLDSDKLLSMSMRYHAGERRVWAVARIPTPQQEDERRLHRELERLRQERTAHSNRIRSLLVLHNLRVERIGGRVWTHWWTHHAAQLLPGLRAEIERELERLALVLGQIRPLEAQQKQQVRSGVQPMVARLARLAGIGIGSAWTLSKELFGWRRFHNRREVAGCLGLAPTPYASGTSEIEQGISKAGNKRVRWLMVELAWSWLRFQPGSQLSRWFNERFAGRGKRARRIGIVALARRLSIALWRYLDYGEIPIGARLKPRHSDAVIA

SEQ ID NO: 162412 - protein, 347 aa, unidentified
MRFYTKQHPFYCGIDLHARTMYLCILDQAGETLLHRNMTATPEALLTAIAPYRDQIVLAAECMFTWYWLADLCAEHQIPFVLGHALYMKAIHGGKAKNDKIDAHKIAVLLRGGMLPQAYVYPAEMRATRDLLRRRMHLARKRGELLAHVQNTNSQYNLPAIGKKIAYKANRDGVAERFADPAVQKSIEVDLALITYYDELLRDVELTIVKTAKHHDANTLYLLQTVPGIGKILSLVLLYEIHQIDRFPRVQEFASYCRLVKCAKESAGKRSGTSGSKIGNAHLKWAFSEAAVLFLRDNPAAQKLLARLEKKHSKGKALTILAHKLARAVYYMLKRQTAFDLPTFLQG

SEQ ID NO: 162413 - protein, 369 aa, unidentified
MPVVRGERAARFTFGTPSPRGSIWRAFATVLWKPEQLIDFNSHLQGWETENMPELIHVGIDVSKDALEVACGPESPTQCFTNDDAGHEALVNVLHVHRVDLIVMEATGGYEAPCACALQAAGLAVAVVNARQARDFAKAMGYLAKTDRIDAQVLAALAAVLANRADRQKLIKALPSDEQQRLHALVLRRRQLVQMLVAERNRLPMSHQAARVSIEALIKAIRKQIVDIEADLSSHIAHHHADLAGLLRSAKGIGPHTSMALIADLPELGKLSNREISALVGLAPFNRDSGKMRGKRMIFGGRTQVRCALYMATIVAMRHNRVIQRFYQRLLAAGKPKKVAIVACMRKLLTILNAMVRTGKQWDETFHFA

SEQ ID NO: 162414 - protein, 358 aa, unidentified
MQRNKKTFKGQNIYIGIDVHKKNWQVAVITESGYTERLSTAADAKALFKFLKSHYPDGNYRAVYESGFSGFATHCALSELGVSCVVAHAADIPSSQYELTMKSDRIDAEKLARALRAGLVRGIYVRPKDNLDDRGVLRIRKTIQIQVGGYKTRIKHLLHSNGVELPERFSRSGTHWSRAFIAWLREDVRLLSDTRRSLELLLLQVETLRANLLEATRRVRALSMTDRYREDCALLMGIPGIGLTVAMTILTEVCDIGRFGNERQFASYLGLVPTSHSSGERVSHGEMTFRGNKHIGPLLVEASWVLIVRDRELGRMYTEYRWRMAGQKAIIKIARKLSNIIFAVLKTRKAYEPYRRDA

SEQ ID NO: 162415 - protein, 340 aa, unidentified
MVKYFVGMDIASNTFMAAVGTQPWKLVVKPQEFENSEDGFAKLLSWLKEHHLEPHQTVACMESTGVYGESLAYFLCAKGYRVAVEPPLKVKRAFRPGGPKTDAVDSCQIAEYACRFEDQLNFWQPRTELLEQIKVLLATREQFSGQKTAHQNALQAIKRKVVRTPLAEQVHEQSITQLQKHIHDIDQELRRLINSDPTLKQMLLLLMSVPGVGLLLAAHMILLTQTSLDPKELAAYLGIAPNEFSSGTSVFKKTSSRHYGPSAVRKLLYLASCSVRTHREQFRSYFLRKTAEGKSKRLVLNNIANKLLKIICAVLRSNTPFIQNYCPIQPLALTRSSYSQ

SEQ ID NO: 162416 - protein, 379 aa, unidentified
MNGPIYEQSVIVGVDAHKYSHTAAAMDAWGQEKGRLNFTNDSLPDCLSWLKTLGRREDVIVAVEDANSYGCHLVSALAEQQFAVRSVPAVLTERDRQHSTQRDKSDFRDAKRVAKVILAKYEETLPVIASLATSAELAAATELNLLLNERRDVVKQGTAIKNQLHSLLHQYYGDHYADGFSKAFNKQAIIFYQANLAQAISANSSSADQAGKALIAESILRRIRRLKLLQEQSAAILKQITKIGETSAPVAALHENIHGCGLLTAGAIMAELVTIRRFGGRDKLAKYAGIAPTIKSSGSHHRLYTNPFGNRLLNKALHTIALSQIAIKGDDRGKRYYRKKLKEGKTKLWALRCLKRRLINLVFRVLKQTEMGSAETAIS

SEQ ID NO: 162417 - protein, 495 aa, unidentified
MNRKSNTPKNQEANVGKTGRRSAGPKTGKKNELKRLTKEEQLELKIRAEEIGKGLTSSTWRELETAGKFDKNKKLDFVKDDTLIVGCDIGSETHYIRAIDTRGRELSQGILAFENNSEGFENALSWVLLIAAQYGKTQIVLGLEPTGHYWFTLTAWMLLHGVSVVQVNPYAVKQTKELEDNSQDKNDRKDPKLIANLVKDGNYGLPYLPEDTYATLRVLSGLRDQLKEEVGRSKNRLHRELTIVFPEYKAAFGKLDGPFTLSLLSKAPIPSDLVALGEAGIRKIWHDRKLRGAGYRRVAEIIRQASNSVGLTDGVDAHKICILHYVADIERLTSEIAEIEAELAAKCREIPNAENILAICGLGETITAGILAEMGDIDRFDDAKEIQKLSGLGLVACSSGKHKGQTKISHRGRKRLRYWLYQGAMSLVAHNEAFRQLHVYYTTRAENPLKKMQSLIVIACKLLRIIFTILKKGAQFDAERMLKDIVRPEAGKAVA

SEQ ID NO: 162418 - protein, 307 aa, unidentified
MTIPQATLGIDVSGDWLDAFDHPGGRSRRFRNDRQGIAALIGWARRLGAFVVLEATAPCDRLLIRGLEAADLRFHRANPGRARDFARSIGRLAKTDRVDARMLAAYGAAVPLRPTVPVPPERLALQGLMTRRDQLVAMRKAERIRLKAAPDPFVADSLKAMIVAFDEAIEKIEQRIERTVAQSPDLARRKAVLRSVPGIGPVAAGVLLAGLPEIGQIDRRAVAALAGLAPIARDSGTMRGRRHVRGGRKRIRDALYMAALAAVRTQPWKPIYQAMRDARKPPKLALIAIARKLLVSLNALMRNHIAA

SEQ ID NO: 162419 - protein, 349 aa, unidentified
MNIATLGIDLAKNVFELAVADSGGRIRAHHRLSRARLLPFFSNLPHCRVVMEACGSAHHFARRFSELGHDVMLLPAQYVRAYVRRNKTDRADAAALIEAARCADIHPVPIKSVDQQAIQQLHRLRTQWMRTRTARINLLRGMLREFGIAIALGAVRAIEQVRRQLAAPDGTVPAALQPSLTELLAEIAALEQRCTHIERQLRSLTQHDAVVQQLLGIPGVGPLTATAMRAALVDVHRFPSGRHLASWLGLTVREHSSGERRRLGRISKQGDPYLRTLLIHGARAVLNAAQTARRRGQSPDRLRSWALSTHERCGHNKAAVALANKLARIIWATWKHERTFNANWVPTTA

SEQ ID NO: 162420 - protein, 311 aa, unidentified
MQDTIGIDISKDTLDCFQLSSSKHSQYRNGKLGHKALIKWLKSQGATLVVFEATGAYHRSLEATLARYEYPFVKVNPRQARRFAEATGKLAKTDRVDAAMLAKMGAVLDLPAQEPKSENINILRELLTARRALTKDNAAAKTRSHTTLHAVLKMQIGARQKQITLQLKQIDKIIAKMIDGNQELSRKFEILLSIPGIGQVTAFSMLIEMPELGTMTGKQSASLAGLAPISRQSGKWQGKERIQGGRAFFRRAMYMPALCIIRHNLSSKQKYDQMIKRGKPTKVAITAIMRKLVVLANVLLRDDRKWTEKPT

SEQ ID NO: 162421 - protein, 441 aa, unidentified
MSKIVNPDAAGIDISTKEYYVAVPEGRSKEDVRCFQSFTRDLHELAKWLKECNVDTVAMESTGVYWYHLYTVLLDYGFEVYLVNAYHVKNVPGRKSDVSDARWLQQLHSFGLLKGCFQPDNLTRSLRNYVRQRKQLIKQMATEVQRMQKALEQMNIKLNNVIRDLQGKTGTAIITSILKGERDPHVLAQYRDPRIQASRETLIKSLEGNWREEQLFNLKQAHDHYNFLQGQLTECDRECEKIVKQMSDQSTPKKEIKAGRKQKNRPDFNAEQYLYDALGVDVTQIYGMKSSTALTVFSETGPNLKEKFPTEKQFLSWLNVVPDNKITGGKIIYSKVKRKKNRAGHAFRDAAGALWKSKNPLGDYLRRKKAISGSRQAIVATARKIAAIYYKMVTEKDDFDPNILKIRTHQYLEKRLAYLEKSLLKTKMLLADNKEVGQFVI

SEQ ID NO: 162422 - protein, 342 aa, unidentified
MSAAFIGLDLAKSVFQVHGVDAQGKVVVTKRLRRDAVLAFFANLAPCVVGMEACAGSHFWAREIARLGHTVRLMAPQYVKPYVKRQKNDRADAEAICEAVQRPSMRFVAVKTEEQQSTLVIHRVRETLVAQKTQLINALRAHLAEFGIVGPQGAGKVSQLTAVVADLEDSRVPALARSALQGLVDQLRDTERRVEDLDARLAERAREDEVCQRLTTIPGIGPITATALTATVGDATVFESGRHLAAWLGLVPRQNSSGGRERLGGISKAGDGYLRRLLVHGARAVMRWHGKTSPWLAGLLKRRPFNVAVVALANKLARIAWAVMARGEDYRKPAVTAEPAQG

SEQ ID NO: 162423 - protein, 442 aa, unidentified
MQFQNLQMKRHFVSGKFIVGIDPSKEKYDAAVINPNGILQRTTFAFQNNHDGVQSQLWFFIRQRIKSCSPEDTIFAIEASCNLWQKLAGYITSQGFTVVMINPLSTHKARVLINHSFSKTDAKDALVIANAGREGYFDLYRIHPDPVKAMHELSITYDKLKKSLSQAKLRLRALVEQVFPEFCVILKLNTHTALYLLERYIIPQDFLNANILETIQGMGKVSRKQHGLKTLKKLQEAAKNSIGLSMDEEQIRAVRMSRDAWVAMIHTLQIQQGRILEQLITMTKSCPYFEILTSIKGISDISAALFIAETRGLDGFQHYKQIEAFAGLGLKHSDSGKYRGYRHISHIGNNRLRSIIYLMTVETKNHIPEIRIKYLNRQLRQDRYRRNIVSCSSNLLKLIMALVKENRRYEFREESVKELEKLENKIQSIQEKRTKKQYKKAS

SEQ ID NO: 162424 - protein, 304 aa, unidentified
MLTAEADKCKTKVVVNTAAGVQALLAWCAKHGAQPAQLHAILEPTGLYHEQAATALPQVRVSLVNPAQARDFAKALALRSKNDALDSYVLARYGQTLSPALWHPAPLHARQLRALLTRREALSKDLLRELNRKEKSQFSPSAPLVDGSIDKAIAFLREQIKQIERAIDQHIDNHPDLKQDCELLNSIPAIGPQAGNAILAVMHNRHIDSAQSLAAYLGVVPVQRQSGSSLNSCARLSKAGPSQVRATLYMAALVGTRHNPHIRALYQRLLKAGKSKKAALGAAMRKLVHLCFGKTASPTSPITP

SEQ ID NO: 162425 - protein, 344 aa, unidentified
MRYVGVDLHKQTISLCVVELAGRERKVVQRKRFRCRDEEALLAYFAGLGSYEAVVEATASYEWFVQLIEPTAARIVLAHPGKLRVIAESKNKTDKLDAQTLAEFLALDQVPESWRPTPRVREHRALVRLRSYVQGRITSAKNKLRWIVANYNADRTDLFTRTGRAYLEKIDLSAADRFAADLLCEELDQHATRLQTVDRRLKEFAQDAPLPEQEARAVLASVPCVGPVTTEVMLAEAGDVRRFGSQRKATAYAGLAPGIRQSDKRTKQLPITKAGSRLLRTALVELAWRLTNKTRRWGLLYERLKKRCGAKKAIVAIARRAWCVIVSLLKSGQAYRPIGEPAAG

SEQ ID NO: 162426 - protein, 360 aa, unidentified
MFSERTSVGLDVHARSVAAAAIDSVTGELFQTRLTPAHDHVREWVLSLPGPVAVAYEAGPTGFGLYRSLIESGIRCEVVAPSKLQRPAGDRVKTDAKDAVHLARLLRIDEITPVSVPTLEQEAARDLVRAREDVRRDLMGARHRLSKLLLRHGIVYSGGKAWTGKHDAWLRTQRFAMPSTQMTFDSGYDTVLTTSARRNRLDQAIKAIATDSDFTPVVRRLACLRGISMLTAFALAVEIGDWHRFTGNTIGSFVGLVPSEHSSGASRVQGPITKTGNHHLRRLLIEAAWHHRPRYAPGAVMRARWDQAPAAARARGDLGNRRLHGRWVGFDTRSKRSVIANTAIARELAGWCWSLAILED

SEQ ID NO: 162427 - protein, 347 aa, unidentified
MRFYNRQHRHYCGIDLHVKTMYICILDSAGQVLVHRNVKSTPEAFLEIVAPYREDLVVAAECMFTWYWLADVCAAEGIAFVLGHALAMKAIHGGKAKNDKIDSHKIASLLRGGLLPQAYVYPAGMRSTRDLIRRRLHLVRKRGELLAHIQNTRAQYNLPAFERRLAYPANRDGISAHFADPSVRKSMDVDLALIDQYDTLILDLELTIVREAKRHDADAFHRLRSVPGIGKVLALTILYEIHDVTRFDRVQEFASYARLVKCVHQSAGKKLGTGGAKMGNVHLKWAFSEAAVLFLRHTKDGKKILAGIEKKHGKGKALSILAHKIGRAVFYMLSRGTVFSMEKFLAA

SEQ ID NO: 162428 - protein, 400 aa, unidentified
MQTPIYIGIDVSKDKFDYAAMDTHNTIIKKGSLQMNRDGFIEDSLLGQEISQLIESFPNVVVGFESTGTYHVNIMSFLLSLTEHVYLLNPALVKKFAEADSLRKTKTDAVDAIAIARFLIYRQHSIFAMTEIDSAYLTQLARLRESITRDVGKTKTHLKQMLNIAFPELLKHANVFTDTFLQILEQFPSAKAIRKATKKRIQKIFYNPTKSRGKKPDMNPDQLFDLAKYSIGTADESLEMAIKFDIKHLVFLQKHLDEVTSKLIDNVNKRFGNELEILKSIKGIGDTTACHFLSEVKNIQRFSNYKQLIAYAGTDPSVKQSGKMIKRGKISKRGVSSLRRVGYLITCSVIRHDGVFRDYYIRKREEGMAYRKAVIATWNKLLRVIFAILTKQVKFVPNHG

SEQ ID NO: 162429 - protein, 426 aa, unidentified
MLYCGIDWAWEELTLMVLDEKGNSIKEDFKIQNSLDGFFFALSTIRQLCREQEIIFGIETSNHRIVEFLLSYGYKLYLINPISMDKFRKRYKTSGVKSDCLDAFVIANVLRTDLNTLRIITPKDELTEELGIVLRDRESLVELKTRLTNKLRASLREYFPQALKLFSDISCRTSLEFLEAFPTHEEALRTTKKRIGSVLTRSNSYSYDKVQEIYQALREQQFPSRAAVIRAKRELTLALISQIKPLTKQIEAYDRRINSLLEQHPDSQLFLSLPGVGNTLAAGMIALIGDERARFNSPKQIQALGGTAPITKSSGNYRHTQYRFSCNKDLRNTLSQFAFTSITKSLWAKSYYNKKRREGKTKSHALRCLANAWVKVIFAIWRNNTAYDENRHLASVSKHLMNQNSLSCQYKVKMSPLMQSENVTSK

SEQ ID NO: 162430 - protein, 338 aa, unidentified
MTIVMGFDQHREQIAFDALDTATGEVSRGRIRPADRLGFRRWLRRFEGEEIEAALEATTGWRFMVEELRAVGARVHLAEPAETSALRGPKKRAKTDLKDARRLRELLQAGRVPESWIPPDWILELRSKVRLRHTLSDERGEWQQRIQAQLYHHGVERRRQLLVGERRAWLEALELPDAARRQIRVALAMIDAVDEQLGPLDRELRALARRQPGCRALMSHYGIGGITAVAIVAELGDAQRFSSSRHAVRYAGMDITVSESDRKRAPGRLSRQGPPTLRWALYEAAQVARRRGSPDRDYYEQAAARLGGNRACLSVARRLLQRSFHTLRELGEEALQPA

SEQ ID NO: 162431 - protein, 412 aa, unidentified
MEVLHAHCAGLDVHKDAVVACARHMVDGAVKREVRSFKTTTKELMALSAWLSVEGCTHLVMEATGVYWKPVWHILADGEFELVLANAAHVKNVPGRKTDVNDATWLAELMAHGLVRASFVPDEPTQEMRNLLRTRKQFMRERSSHVQRIQKTLEDANIKLDSVISDVMGLSGRRMIEALIAGETDPAALAALAHRRIKATPAELEAALRGRVTDHHRFMLGLLLQHIDAIDAAITQIDQEVDGKIEPFRTAIEILSTIPGIHQLSAAVIVAEIGIDMARFPTEAHLISWSGLCPKNDESAGKRRSTRMRKGAPWLKTTLIQCAWAAARKKDSYLQAQFHRLRARRGAKKAIGAVAASILTAAYHMLKNGTLYHDLGPDHFDKRAKAKHVDRLVHRLRNLGFAVALAPLEAAA

SEQ ID NO: 162432 - protein, 338 aa, unidentified
MKKYSGIDLHSNNSVVVVSDEADRVVYRRRLPNELGKILEALEPHREELAGVAVESTYNWYWLVDGLQAAGYKVHLANPAAMKRYDGLKHSGDDTDAVQLAHLLRLGILPSGYIYPVAERGLRDLGRRRLQLVRHRTMHVLAVENVQARQTGARMTGDRVKRLSAQELQALGLPEDVSLGLQANVAMIGALNEEIAKIEKHLVQRLRPRPEYTLLNTAPGIGRILAPIILLETGSIERFAAVGNYASYARCVDSVRLSNGKKKGEGNVRNGNKYLAWAFIEAANMARRWCPEARRFHDRKRAKTNAIVATKALAHKLARACYHMLRTGEPFDMKRCFG

SEQ ID NO: 162433 - protein, 466 aa, unidentified
MTTGNKVWRNRKERKDWARRLRSEDPGLEVVHPHAAGIDVGNSAHYVAVRPDRDPEPVRRFECFTADLYRLAEWLASCGVKTVALQSTGVYWIPLYEILEDRGFEVYLVNARHTKNLPGRKSDVQESQWLLKLHTYGLLSNSFQPPAEIRVLRTYWRQRAEHVSGAATCIQRMQKALTQMNLQLSNVISDLSGLTGQAIVRAIIAGERNPQKLAELSHPRIEASREEIAKSLEGNWRPELVFVLRQEVEMYDAYQRRIAECDQQLQKHLTRFADTVLPQSPEAEPRQKKAKPTKNAPRFDLGSELKRITGVDLTCTDGIDVMVAQTLLSEVGMDMSRWNTEAHFSSWLGLCPDNRISGDKLLGRGTRHVVNRAATALRLAARNLIRSRSYLGAQYRRLRTKLGAPKAITAMAHRLARLVYRMLKYGQRYVDKGTEYYDNRYRQQQIHLLQKKAAKLGLQLTVATQP

SEQ ID NO: 162434 - protein, 366 aa, unidentified
MDPIYIGVDFHSRQQTICYLKTETGELVTCELKHQDKDEVRDFYRKFQGHVIVGLEASGYSLWFEAMLEQRGFAVWLGDATEIRRRARWRYKDDRRDAELIRDLMVHHEFPRLHQPTPQSRDILRMLRYRQKLIKVRTMTKNSLQAIAMQAGLAKGRRLFTLAGQTEFKAIAMSPVLQYQRDHWFELLKPLNQELLETMKWFKAAAKGDATVARLRTHPGIGLLTALCLLHTLQPVSRFRNQRKVVAYAGFDPMVRRSADSALHLGISKAGSRMLRYLTVEAVHTAIRHDKDLDRFYKRLTERRGRPKAKVAAARKLLIRAYIMMRDEIDYAEFNRRAVAARPARKSQGTPGVPEVLIGRSASPGA

SEQ ID NO: 162435 - protein, 357 aa, unidentified
MKKRLNADTINVNGKTVNVGIDVHKLSWHVTALVEGVIVESATIKPSYRVLKKLLAQYKGARIRIAYEAGFSGFNLYDELTADGIECIVVSPSLIPVESGNRVKTDKRDSRKLAQYLENNLLKRVYVLSKQERAHRQYVRTRRQLSNHRTDVMRQIKSLLLFHGLPSFDGNRGFWTRPVLRALRSITPDEYVSRSLNKLIDLYEYLTQQVKHMTREVRRLARTEKYARRVELLTSIPGVGVLSAMEILTELQDVSRFATADQIAAFLGLTPSQYSSGQHVRMGKITHAGNHRLRTRMVECSWIAIKKDPGLNKTYQAIKMRRGGKRAIVAVSRKLIIRIRRILLDEVTYRKECAIAA

SEQ ID NO: 162436 - protein, 404 aa, unidentified
MPTLRPNAIRIKRFRDLKATLRINRDRLLVGIDIGKRQHVAQLRVAHGAIVLPKVVIPNTTAGFTTFWGQVTAAQRATGCAEVVAALEPTGTYHEALGRFLEGQGVDVVLVANQVAHANRKTLDGTWGKSDPKDAHNLCELLERGLVLFYSLADGPAAALRRLVRLLRAARVERAACRVRWRNTLRPALGPTGEPLSAAVCVQLPAAVQAWERAAGRAESPPPGRPGAAALPPGFAAECADLGARLSAAQARIGTLEAALVAVAAPLPAYSLLLTIPGVGPTLAAILLAEIGDIAWYTKFSQLRKLAGLDIAPLESGQWAGTPRISRCGRALLRWALYQAALGAARTAAGRAWRARLLAKRQGDRHAFVKANVELAAKLLRRVGGVWRSGRPYTAELPGLPARG

SEQ ID NO: 162437 - protein, 343 aa, unidentified
MQAITTIGLDIAKSVFQVHSVDAGGQVVIRRQLKRRYVLAFFQKLPRCLVGIEACASSHHWSRELQALGHTVRLMPPAYVKPYVKRHKNDAADAEAICEAVTRANMRFVATKTPEQQSCLMLHRTRHLFIRQQTAVINAIRAHLAEFGIVAPVGRNGVEQLLGVVADAKDKRLPEVARACVGALGAQLQMLKAQILKFDRLIRTWHRSSEASKRLDAIPGVGPVLATALVASVADPKAFRSGRDFSAWIGLVPKQNSSGGKERLGNISKRGDRYLRSLFTIGALAVIRYAKIHGTKHRPWLTALLARRPAKVAAVALANKIARMAWAIMAKSERYKEPVALAA

SEQ ID NO: 162438 - protein, 349 aa, unidentified
MIWIGVDAHKRVHQAVAISEHGIEGERTFPNTTAAWAELLSWAGQWPERTWAVEGAWFLGRGLAQYLAATGEVVHEVSGRLTATRRRRAVRPGKSDRLDAHAVALLLREEAARLPRVLAQDDETAAVQLWSRTQAELTKDRTRLVNRLHDLLLVCDPEYQATVPDLTTKAGIAALLQYTAPGAAAIAREREQVVRSTAAQLELLDAQDRALKRKLERVSKTRFSPLRQIEGIGPLIACGLVAELGRPRPGFGEQQLAALAAVSPLEASSAGAIRHRLNRGGNRRLNMLFHQIVLTQGRMYPPARTYLLRRIAEGKTKREARRALKRLIVRRVFHAWLACFATNSERVAA

SEQ ID NO: 162439 - protein, 410 aa, unidentified
MEVLHPRCCGLDVHKETVVACVRLVIDGKLVKEVRTFSTTTAGLIELSEWLTETKCTHVAMEATGVYWKPVWHILADDGFQLVLANAAHIKNVPGRKSDVKDSDWISDLLAHGLIRPSFVPDGPTQEMRTFLRTRKQFVHEKGSHILRIQKTLEDANIKLDSVITDIIGVSGRKMIEALIAGERDPAKLASFADRRLKASQQTLRQVLRGRVTAQHRFLLRLHLDQIDALDAAIARIDREVEASIAPFRTAVEQVSTVPGIKSLAAQTILSEIGIDMSRFPSSGHLISWACICPRSDESAGKRRSTRIRKGSPWLKTTLVQCAWAATRKKGSYLQAQYYRLRARRGPKKAIVAVAASILTAIYHMLKDGTMYQDLGPNHFDARAKERQKNRLIKRLADLGYAVELAPLPN

SEQ ID NO: 162440 - protein, 347 aa, unidentified
MRFYTESHQHYCGIDLHARTMYVCILDAEGQVLLHQNLPCDPERFLRAIAPYRDDLVVAVECIFTWYWLADLCAREGIAFVLGHALYMRAIHGAKAKNDRIDAHKTAALLRGGLLPQAYVYPAEMRATRDLLRRRLHFVRHRGQLLAHIQNTHHQYNRPSPGKRIAYRSNRDGVAEGFEDTSVTKSVEADVALIDPYDAVIRDLELAVLRRARGHDRDSYERLKTVPGIGKVLALTILYEIHSIDRFSKVQEFASYSRLVKCQASSAGKVKGTSGAKIGNAHLKWAFSEAAVLFLAKCPEGKKLLARLEKKHGKGKALSILAHRIGRAVYFMLKRKRAFDLARFLKM

SEQ ID NO: 162441 - protein, 451 aa, unidentified
MAKQSNRFDEVRRYVAGVDLAGNADHYVCGPRKDDGTHDIEHFGTTTNELLRMAAWMKERKVESAAMESTSVYWIPVYDTLESAGIEVILVDTRTVKMVPGRKSDVKDCQWLQRLHSCGLLRGAFRPPEAFNAVRSVIREKGNVLQMRTQAIQSIQKALDQMNIRLHHAVSDIDGMTGMKILGAIVAGERDPRKLAALRDRRCKKSEAEIAEELTGNWREEHLFNLKQAYGTLCFLDGCISDYDMKIRAMYAKIAAAFPPVDPPPDGGGRKPKDKEDAKAKADLARICGGFDMTKIDGIGYDSAAAILSELGPKLDAFPTESHFISYIGLAPALGKSAGKNVSSRKKHKNTSRVGIVLKMAASTLSRSESSLGARYRCVRSRTCSRTAIKDVAREMAKRILRGIKYGQSYIDEGERAYMERTRERIIKSMKKKISKLGISAEELGICAVSM

SEQ ID NO: 162442 - protein, 438 aa, unidentified
MTRYVGIDLHKHLIVGHIVDSGGKTLDTFRYTSVDAATLDHIGRLRLTREDEVVLEATTHSWAVVRSLEPFAARVVVSNPMATKAIAKAKVKTDKVDAAVLSHLLRLGYLPEVWQPDPATRHLREWTARRSRIVGQRTAVINRLRSTLAQRLLHCPYEMTSRAARDWIAGQPVEEDTRWLLESDLRLMDSLQTELDAMDKLLAKRGYVDPRVKLLMTLPGVSQHTAQALLAAIGDIARFRDADSLASYLGLVPSTRQSANHCYHGPITKQGRGHTRCMLIQAAHTVRTHPGPLGHFFRRLQKRKPYNVAVVAVAHKLALLAWHVLTKGEPYRYALPQTTDAKLSKLRVLATGRKRQGGGTRGTKCQSKLPGAEGGSRTIKSLAEVYAIEGVPAATAAPPGEQRHLAANRLDTFAAELQHTHVVPRRAPKLPGALPGDP

SEQ ID NO: 162443 - protein, 338 aa, unidentified
MEKYIGMDAHSSICVFSVVDEKGTEVDQTKIATNGQLLVEYIRSIKGSKKLVFEECELSAWLHEILHNEVDELVVCNPTRNLQYKKAKTDKLDARNLALLLRGGFLTPVYHDGSKTEWLRALMSGYQDVVDTGVSVKNRYKSLFRKAGLPARGTRLYDDSSLLEDLPRPDQRFVGHSFYRLLEALEKEREQYVVAIKKLSRTFPEIKLLKGIPGIGDIQAAKIASQVIAAQRFKDKHKFWSYCGLVRHRLESGGHVYGSKRGWGNRILKCVFKMAARSVLTGESELRTYYDELRAKGTSDKSARNAVSRKLAAITLVILKTRRPYDETRIMPQNEQAI

SEQ ID NO: 162444 - protein, 455 aa, unidentified
MYLPDWKWIPIRKGLLLMSNKVIFNLDELFISVGIDVGADFSWMSIALPNQQLVGKPYKILHSSMNSLTTAVSKIKEAEELYSLESRIFLESTGIYHNPLFCYLRDKGFNCSVINPIITKNSTNINIRKVHNDRFDSKKAALVGLKPDLKVSLMPSDLALNCRNLCREYYALMDTRSAYVNKLQGELRMAFPQYLGIFSKVTINTSLALLETYTSPNAFIEADKQEIIDTIKSTARFGLTYAEKKYNAIIRAAHDANEFGYIIDSNIKRIRLYISFIRKYDEEIAGIMDALHDLVDSNEDTDFVKQIHLIETFKGAGFLSAVSLMGEIGDFSAFTKPKQLFAYFGLDPAVKQSGKFEGTKVQMSKRGSAIARRVIHVLTLQSISTSRTGEAKNPVLRDYYLKKCESKPKLVAMGAVSHKVCNMIFAILRDNKPFEIVTPQEHIKQYNAAKCDEAA

SEQ ID NO: 162445 - protein, 315 aa, unidentified
MEGKSPSVGIDVSKATLDLWLYPSGKSWQAEHSPAGMSALAEELAALEPAVVVVEATGGLEVSLAVALGSAGLPVTVVNPRQVRDFARTTGRLAKTDKLDAQVLAQFGAMVQPSVRPLPEAARRELRALVTRRQQLLEMITAERNRMRRTTPGVRHRIEVNVRWLQALLKELDRDQGDLLRSSPLWQEEAKLLQSVPGVGPIVTATLIARLPELGSLNRKEVAALVGVAPFNRDGGTLRGKRTVWGGWGPLRKALYMATLVATRCNPVLRNFYQRLCAAGKPKNVALTACLRKLLVILNSMFKHRRTWTPVGQTS

SEQ ID NO: 162446 - protein, 488 aa, unidentified
MKLRKEQPQQKQKKAAPSARGPESAGWQQMNRKQRREMARKIQAEDLSLEVVHPHAAGIDIGNESHYVAVPSTRDEQPVRRFGCTTAELKAMAAWLKQCGIRTVALQSTGVYWIPVYDILEAAGLEVYLVNARETKNLPGRKTDVQESQWLMKLHTYGLLRNSFRPAQEIRTMRTYWRQRQDLVQSAGRHIQRMQKALTQMNLQLANVLSDITGKSGQAILHAILEGERDPYELAALCQSNVKASEEEIARSLEGNWQEDLLFLLQQEQEGYEFCQKQMAECDAQLQHYLAQRKDRSAGASLPEEKRQRRQHKNKKNYPQFDLREQLFRTTGTDLIQIDGIDVLSAMTVISEAGWDMSKWPSEHHFVSWLRLSPDNRVSGDRVIGKGRLPTNNRLNVVLRMAASTLRQSDSYLGAQFRRLKRRLGAPVAIKAMAAKLARMIYRMLRYGMRFVDQGAEVYEAAHHQREIYYLKRKAASLGFQIIEATAS

SEQ ID NO: 162447 - protein, 339 aa, unidentified
MYYIGLDLHKKTIGYCVKDASGKVHQQGKIGATRWELDTWLKTLPQPWTAAMEATIFSGWIYDHLKPHAAAVKVAHPLMLRAIAASKKKNDQIDAGKLADCLRCDFLPECYMASTGIRERRRTLRCRHLLVRQVVQLKNRVSSLLMETGVSYNKQRLHRAGYFPELLASKDAIDKSIRPLLRLSRDSITRLQRIESALIRSLQRDPLLAERVRRLQTIPCVGRITALTWALEMGDISRFRSIRQAISYCGLCGDEKRSAETAVRTPLSKQRNKHIQRVLVEAAKLAPRYDPDLALFYAREKQSGNANRATHRGCRGGCSPSPSPLQITGGIHLDSLAID

SEQ ID NO: 162448 - protein, 363 aa, unidentified
MMIIGVDYHPSFQQIAFLDQETGECGERPLNHSDEEAEKFYRELKQRGVSVRVGMEATGHSRWFERLLTELGFEVWIGDAAEIKRQRVRKQKTDREDARLMRKLLLENRFPRIWVPSPENRDLRQLLWHRHRLVQMRTRIMNQLQAVAMNEGYRWKKKLFSAQGRALLEKLSLAPWASRRRKELLELLDQLDPKIAELTTEVEREANKRPEVVRLMTHPGVGPITGLAYVQVIGTPERFPCGKQIGSYTGLIPCEDSSAGKQRLGHLSKQGNTLLRYLLGEAAQAAARCNPDWRRRYVHLAMRRHKNIAKAAMARKLAVRLYWMWRNGWDYSQLVEFGSHAGKLATGHGVKESVVHMIGHPAP

SEQ ID NO: 162449 - protein, 318 aa, unidentified
MSSAAPAFVGIDVAKAELVITIRPSGEHWTIANDVAGIHTLGQRVRGHAPTLIVLEATGGYARAAVAARAAAQLPVVVATPRQVRDFARATGQLAKTDRIDADILALFAERVRPAPRALPDDAAQALDALLTRRRQVLEMLIAGRNRLEHAVPTVRRGITQHIRWLERQLADVDRDLDDTIQASPVWRATENLLRSTPGVGPVLSRTLIGELPELGTLPRKQIAALVGVAPLARDRGTLKHKRLVWGGRAPVRAALFMAALVGTRCNPVLRAFYRRLLEAGKPKNVALTACMRKLLTILNAMMRTNTAWRHIDLSPTT

SEQ ID NO: 162450 - protein, 351 aa, unidentified
MIIIGVDYHPSDQYIAFVDTETGEYEERQLNHSHGEAEKFYRELATRGVRVRVGMEATGYSRWFERLLAELGMELWIGNAAEIETKRVRKQKTDREDARLLLRLLRENNFPRIWVPSPENRDLRQLLWHRHRLVQMRTRMMNQLQALAMNEGERRKKKLWSERGRAEFEKLPLAFWASRRRQDLLELLDRLNPTIEELTAAVEWEARKWPEVLRLMTHPGVGPLTALAFVLIIGTPQRFRRGKQIGSYVGLIPSEDSSAGHQRLGHISKQGSSLLRFLLGEAAQAAARCDADWRRRYMHLALRRQRNIAKVAMARRLAVRLYWMWRKGWEYAEWVKFGSHAGQLGTGHGVQ

SEQ ID NO: 162451 - protein, 313 aa, unidentified
MCEQRMVGIDVAKATLDVAVRPSGEQHSAPNDSEGIAALVNWVGMLEPTVIVVEATGGYEAALVAALGVAGRPVAVVNPRQVRAFATAAGYLAKTDRLDAPVLAHFAAALRPTPRPLPDAQAQELAALLERRRQVVAMRTAEQNRLGATRVERVRARIQAHLAWLDADLQEVDADLRRSLRARPLWRARDDLLQGVPGVGPVVALTLVADLPELGRLAPAQIAALVGGAPPSRESGTRRGRRTVWGARAAVRAALSRGTLRATRCNPVIPGFYVRLLAAGKAKKVARVACRHKLLTILNAMVRHGATWQAQAA

SEQ ID NO: 162452 - protein, 408 aa, unidentified
MNVVHERCCGIDVHQAKLAVCVSIREEGKHETHRLLCGTTTGELLRLVDWLHGHGVTHVAMEATGVYWKPVWHLLEGQFELLLANPMQVKALRGRKTDLRDGERIADFLQHGLLQGSFVPSQPMQQLRDLTRNRTLLKQEQVRISNRILKVLEDANIKLNTVVSNMMGASGQAMIRAIVSGKWDAGELAEMARGRLRGKIPVLREAAEGRLTEHHRFLLEQWLAMWDELSKRVGLFEERIEEQMRPFEWAVKTWMSLPGIDRVTAWTMVAELGVDMRQFPTAGHASSWVGLCPGDDETAGKRKSGRTRNGNRWIKQALSQAAWGARATKGSYFKALYHRFAARKGAKRTIVIVAHALLETGYALLRTGRTYADLGADYFDRLDREHLTKRLVKRLEHLGHKVTLQPAA

SEQ ID NO: 162453 - protein, 412 aa, unidentified
MNIVYERCAGIDVHQRSVVVCAITPDQHGQRHKQQDTFSTMMPDLLRMRQWFERLGVTHVAMESTGSFWKPIFNVLEGHVEVLVVNAQHLKAVPGRKTDLKDAEWIADLLQHGLLRPSFVPPAFQRERRELTRYRSSVVEERSRTINRLQKILEDTNLKLSAVATDLMGLSAREMLAALLAGETNPSVLAQLARGKMRAKRDLLVQALQGQFKPHHRLLISEQLTHIDALDEEIEHLSADIAQRLRPYEAQLKRLETIPGMKRRLAEVILAEIGPDMQRFPSARHLASWAGMCPGNRQSAGKRLSGKTHKGDPWLRTALVEAAHAATHCKDSYLAAQYHRLVLRRGGKKATIAVGHTLLVIVYHVLADAKDSQELGGNYFDEQDRQAVQKRLVHRLEKLGYEVTLAPISPAA

SEQ ID NO: 162454 - protein, 421 aa, unidentified
MEVLHPRCAGLDVHKETVVACVRIVSGGEVSRAVRTFETTTVGLIELAEWLEASGCTHVAMEATGVYWKPVWQVLAGGGFELVLANASHVKNVPGRKTDVNDAMWIADLVACGLIKASFVPEQEIQELQGLLRTRKQLVREKASHVQRLQKTLEEPNIKLESVLSDVMGRSGRAMIQALIAGETDPAKLAALAHPKVRAPQARLREALRGRVKRHRRFLLDLHLQQIDALEAGIAAIDREVDAGLASFRDAVKQLSIPGVSELSAQVILSEIGTDMSRFATAAHLRSWAGLCPRNDESPTGQARGLKAHGKRRSTRLRMGAPWLKATLVQCGWAAARTKATYLNAQFVRLRTRRGPKKAVCAVAASILTAAYHMLKDGTFYEDLGAAHFDRRRPAAQARRLVKRLADLGFSVELKLPVAAS

SEQ ID NO: 162455 - protein, 428 aa, unidentified
MSEKNHTRLEEFRQLQKEIRGSEDYLIVGIDVAKERNSAFFGTATGKTLFRRLVFGNDREGFERLLLQAEAMRVQHGLKKVVFGLESTANYHKPLGEYLIRCRHRVVLVSTKSVKRNRELLDGRWDKHDTKDSANVADLISQGKCLYYEYPEMKLRELRSLLSLKRRLKRQEHGFRVRIRNHLIAQYFPEFDRYFGRSESEGLAIVRWCLGPSVIEGLSYEEFVRLVAPGRRALRQQERLRSIWQGACVSIGCEVGEAMRFEAKVMVEGLRQIRETLGETDEKIMNLCRGFPEYEYLLTIPGFGPDVSSKVLGAIGDPFRFTRGTQVLKMAGLDLVAARSGKRSDGVVPVISKNGKADLRYALYQAAMIASSRDREFIMWFTNRLRGRQREKGIKNRMRVKLSAKLLVIAWTVMKKKEPFNPDCLRIA

SEQ ID NO: 162456 - protein, 378 aa, unidentified
MSLVILGVDPHKQSHTATALVVGSHQQLASLQVPASQSGYRQLLAWARQFPQRRWAIENARGPGCHLTQWLLAGGETVQDVRTTATARVRELSRGRGRKTDALDAAAAAGIAALQGDAEQLQPEDATVVLAVLEERRSNLVGQRTRSVNQLHALLRKLIPGGAPRKLSADKAAALLRAVHPLTAADRARKQVAWDLVAEVRGLNRRLAMIGKQIQDTVTALGSRLPETVGVGPIIAGRLLGRTGRASRFPTAAHFASYTGAAPVEVASGERARHRLSRAGDRQLNHTLHIIALVQVRSQAAPATTTSGANWPRARRPEKLCVASSAGSPITSGESCSATNRPATSANSRRLDTQRRPRPVAVKRQAICGGGTPLVRCR

SEQ ID NO: 162457 - protein, 407 aa, unidentified
MSRRVAGLDVHKETIVVSVLAEGQAPDKAPVQTFAAHTRGLVQMRVWLREQGVSEIAMESTGVYWKPVYAVLEEEPSWKLVVGNAQHLKNVPGRKTDTKDAQWLAHLLRAGLIRPSFVPPPDLRRARELTRYRSRLVEERSRERNRVLKVLQTAGIKLDGVASDVFGVSGLSMLHALADGTKTPRQMAELARGRMRTKLDALEVALEGRLEEHHRDMLRIALRRLQQAESDVGEVDALIDTALAAYREPMERLQQIPGVDAIIAKVVVAELGPDMSVFPTAAHAASWAGVCPGNHESAGKSRSGRPAKGNGHLRKALCQAANAASRKRGSYLKDKFYRIKARRGHNRAVLAIGHKILIAAYHMLQNGSDFVDLGEHHLDRRSPQRTVRRLVERLEGLGFQVVLAPAA

SEQ ID NO: 162458 - protein, 415 aa, unidentified
MEGLSPLHRRVAGIDVHRMLHVVTVLIEQPDGSVSKHSREFGGFKRDCRALAAWLAEMQVELVVMESTGIYWKSVFSHLENAGITAWVVNAHFIKHVPGRKTDMLDSEWLAVLARFGLVRGSFIPPKDLRELRLVSRYRRKLSATCASQINRLHKMLDDGGIKLGAVVADLDGVSARAMVRGLIQGHSPDTLLAHARGALKRKTDQLAASLDGDLSERHLFVLRQLSTSIEQMQQQLADIDAYLLRAMQPYAWAHSLLQTIPGIDQIASALILIEIGDDMTRFASPQRLACWAALSPGNNESAGKRKSGRTRHGNNTIRYILCECANAARMTRSTLAAKYRSLMVRKSHKKAIVAVAHKIIRLIYILLSRRQPYLDQAIDYAAMSAQKNAPRWIKQLKAIGKWPAANCASAHAIS

SEQ ID NO: 162459 - protein, 394 aa, unidentified
MKLVGIDVGKNSHHFCVMDKETGEFNVTPTSFSNNKEGFDFLINSLKPYSKKSILIGMEDTGHYHVALLKFLLSNGYPVALINPKTTDLTRKMEGGITKNDKLDTITICDVLDTPERKKQYRITKVDRFDLYEQRQLTRHHHNLKEELNVYCNRLQKSIDLVFPEFNTLFSSKYGIVYMNLLKTFGSAEAIASTDIRTIRKFFEIKGKGNRISLTPEKLKECAKNSIGISSEVETIQIKHLVSQITLIKEQIAEIDKKIEEFSITNNSPILSIPGISHFSGTSILAELGDIGNYSKPSQIIKFAGVAPYHYESSQYNAQHTAITKKGSKYLRKTLYQIILPVINNNPVFKKYYLLKISQGKGHRCAQGHCIRKLLRIIYHLLETRQSFDPALLR

SEQ ID NO: 162460 - protein, 359 aa, unidentified
MEGPIVSIDVSNGNSHYMCFIKNNKRFGKVKKIDHDIEGFKRLLEDIQKLEAETNEKVCAVFEATGVYTKPLERFLSKNSIKTYIINPLESARKRKEEIHNKKTDKLDPISISKVYYDKEEMMELKKKDETYNWLRKKNRLYEDQLNHLRKYKVTFQNQLSICFPGYLDLFRDGYSDIPMTILKKYPHPDLLKNKKAETVARYLEKNTCHTHKISLEYALKIIGFAKKTYPGCEKDDVEVEIFKILLDKVIETQRECEKTLNEMITVASTLEEYRYISSIDGIGPNLAARIIAEIGDIEEFKSREALVAYAGLDPHIYQSGDQDGKHLKISKKGNKYLRCLLFLAVGCSIRGAKDNPVN

SEQ ID NO: 162461 - protein, 350 aa, unidentified
MYFAGLDAHLKYVTVAVLDRLGTIVLGTTVSTREPERLLAVLAPFRPLEVVVETCPFWPWLYDLLVPAGIKFHLAHAKRLRAIATAPQKNDRVDARLLARMLLSGLIPEAYPRPGDQRELLRLLRHRTTLVRYRTRLAGRIHSQLHQQRLLLPREQLLRQATRTWLRETAWPRLTPEQQAIVTTHLALIDQLTPLIQALERRIDTAAGANPTAALLATIPGIASYRSLLLAAELSPLSRFPRVEHLASYAGLAPVTRSSGGHTRHGSIPQGANRWVRGALVSAIPSHVRWAPTSPVTRAYGQLTARLGWRVARVAAARKLLRIVYIMLRRGEPWRGAGRVEADVRDEVYA

SEQ ID NO: 162462 - protein, 355 aa, unidentified
MIIIGVDFHPEFQQIASVDTDTGEFQEKRLAHSGEAEKFYRALTVAGQKVRVGMEASGHARWFERLLAELQFELWIGDAAEIQSKRGRKQKTDRQDAQHILKLMLKDDFPKIWVPSWENRDLRQLLWHRHRMVQARTRIMNQLQAVALNQGLRCKKKLWRKGGRQQLESFRLAPWAGRRRRDLLELLDRLNPTIAELSQAIEHEAEKCPEARRLMTHPGVGALTALAFVLIIGNAERFQCGKQLASYLGLVPLEKSSGNRRRLGHITKQGSSMMRFLLVEAAQVTVRSLSEWRSQYFHLMMRRGRKTAKVAMARRLAICLYWMWREARDYEQQRSSVRTQDSPEQAMVCSRTPSN

SEQ ID NO: 162463 - protein, 342 aa, unidentified
MAHFVGLDVSVAETSICIVDEHGKIARERKVPTEPEEIIAALNGSGQACERIGLEAGPLSQWLYGELAEAGLPVICIETRHIRAVLAAQVNKTDRNDARGIAQMMPVGLFRPVHVKTLQSQQRRMLLTTRKLLQCKMLDLENDLRGTLKNFGFKVGKIGAASFDARVRELVDGYPTLRAMVVPVLVARAALREQFKVLHALLLRLVRHDRACRLLMTAPGVGPVTAMTFRATVDVPARFRKSKAVGAHLGLTPRKHQSGEMDRTGRISKRGDRMVRTALFEAAQAVMIRLTRWCALKAWGMKIARKRGLRRAIVAVARRLGVILHRMWASGTAYRWGQPASV

SEQ ID NO: 162464 - protein, 384 aa, unidentified
MKRIKFVGLDVHAETIAVAVAEQDGEVRSLGVIPNREESIRKLVKKLGPVEQLRFCYEAGPTGYVVYWQLTALGAKCEVVAPTLVPVKSGERVKTDRRDALKLARNYRAGELTPVWVPDAAHEALRDLVRAREAAKKDQLRAKHRLGKFLLRHGRRPPTGVKPWTLKYMTWVKQGVHFEQPAQEATLLDYLHEVEHAEARIARLDLAIEEAVKSTPPKMKAVIEGLQALRGIAQVAAVTIVAELGEISRFSRARQLMGYGGIVASEHSSGESNWRGGITKTGNAHLRRVVVEAAWAYRHRPNLGAALRQRQELVSEEVREIAWKAQHRLYTRYRKLMARGKDKGKVITAIGRELLGFIWAIGVKVEAAQVIQPGRPGSFFEDDA

SEQ ID NO: 162465 - protein, 348 aa, unidentified
MRFYTQQHKYSCGIDLHARSMYVCILDEEGKTVLHKNRKATPEALLRAIAPYREDVVVAAECMFVWYWLADLCAKEKIPFVLGHALYMKAIHGGKSKNDRIDSHKIAALLRGGTLPKAYVYPRKMRSTRDLLRRRNYLVRKRSELLTHLQNTNSQYNLPEFEKKIALKANRDGVAEHFSDPSVRKSIEVDLELLDFYDRLLSELERYIEKSAKGHDVHSWYLLRSIPGVGRILGLILLYEIHDIRRFPRVQDFVSYCRLVKCPRESGGKKFGAKNTKVGNHHLKWAFSEAACFFIRVNEQAQHYHSRLVSKHGKGKALSIFAHKIGRAVYFMLKRKEPFSMEKFFAHT

SEQ ID NO: 162466 - protein, 341 aa, unidentified
MNIKRIGIDLAKQVFQLHGVDGQEKVVLRKQLRRTQLLDYFKKLPACLIGMEACGGAHYWARELQKLGHTVKLMAPQFVKPYVKSNKNDANDAEAICEAVGRPTMRFVAVKTIAQQDIQALHRIRSEQVKQRTAKVNQIRGLLAEYGIVVGRRVEVLRHALPSLLEDAENGLTADFRVLLEGLRHDLVRLDERVDELDKNIKTLANNSPAAKRLQQIPGIGPIIATALICAIGDGKQFKRGRDMAAWLGLTPRQHSSGGKERLLGISKRGDAYLRTLLIHGARSVLKVADKKDDPRSRWLQNLSSRRNKNIAAVALANKNARIAWALLSKETDYLPEGEPA

SEQ ID NO: 162467 - protein, 410 aa, unidentified
MQVLYPRCCALDVHKQSVVACLRLVVGGKVVKEVRTFDTTTASLMALSEWLAENKCTHIAMEATGVYWKPVWHILADGEFQLVLANAAHVKNVPGRKTDVSDADWLADLLAHGLIRASFVPDTPTQELRALLRTRKQLVREQSSHVLRVQKTLEDANIKLDSVISDLMGKSGRAMLEALIAGETDPAKLARLAGPRLKASPAQLREALRGRVTKNHRFLLRLHLKQIDALDAVILTIDQQVEADIAPFRAAVKQLISTPGIKTLNAQVVLSEIGLDMSRFPSDRHLISWAGICPRNDESAGKRRSNRLRKGAPWLKTALVQSAWAAVRKKDSYLRAQFHRIKARRGARKAIMAVAASILTAIYHMLKNGTKYQDLGPHHFDRRSKEQQTHRLVKRLADLGYAVALAPIAG

SEQ ID NO: 162468 - protein, 330 aa, unidentified
MNYVGIDISKNSFVVAFSYEKNTKTQSYKNTPEGVRKFIKSLDKEQHHCVMEATGNYCFLLLYMLVEQGYRASLINPKQIKYFAKAALSVTKTDPQDALLLALYGKRFEPELYKMPSESIILLKQKRTAIRQLKKQRIASQNLKKSIEVLPYKDKKTIKVLNTTIDFLNNQVKNLEKELFDIASSDFQKQISLLTSIKGIGMTVATSLIIATGGFSFFENPKQISRYIGICPTYQQSGTSVNIKGSINRNGDTSLRSMMFLASITAIRCNSACKEFYTNLKDKGKPSKLALIAVANKLIRQAFAVVKSEIPYQDGFVSLAPNQKQINYNA

SEQ ID NO: 162469 - protein, 373 aa, unidentified
MIAGIDTHKDTLAVAVVDDSGRLVAGGDVPNTERGFAQLVDMFTAHHVQRVGIEGSGSFGRAVAVHLALCWQSGQPVAVVEVPTLMTSRERHGQLGKGKTDPVDALAIARITAREQQLPPVRLTVGAAADLRALLDYREDLVRERGALVNRVHAELGGLRPGYQQQIPILTTRARVRAAVDLLGDDGSIRATLCRRRLERVIAIDAETAELKRQITGLVAAADTTLTDLYGVGPLVAARFLAEVVDIRRYPNRNAFASANGTAPLPASSGRTVRHRFNPGGNRQLNRSLYTIALTQIRGDTEGRAYYERKRAAGKSKREALRCLKRRLSDIVFTTMRHDAAGADAPPDQASPPAWPVLVGVGAVDANEARLTA
